United States Patent Application Publication US 2025/0074962 A1 - sequence listing, part 3

SEQ ID NO: 2053 - DNA, 4444 bp, Homo sapiens
  source 1..4444: mol_type = genomic DNA
agtccagacaaccggcttccagctggggctggggaaagggggttggaggggtgcgccccccccccacgccccttaggggtgggggacgcgggctcagagttccagggacccaggaatgcccccccgccagccccctcggcaggcggggggagggctcagccgggagtttggcaaactcctccccgcgttgagtcattcgcctctgggaggtttaggaagcggctccgggtcggtggccccaggacagggaagagcgggcgctatggggagccggacgccagagtcccctctccacgccgtgcagctgcgctggggcccccggcgccgacccccgctgctgccgctgctgttgctgctgctgccgccgccacccagggtcgggggcttcaacttagacgcggaggccccagcagtactctcggggcccccgggctccttcttcggattctcagtggagttttaccggccgggaacagacggggtcagtgtgctggtgggagcacccaaggctaataccagccagccaggagtgctgcagggtggtgctgtctacctctgtccttggggtgccagccccacacagtgcacccccattgaatttgacagcaaaggctctcggctcctggagtcctcactgtccagctcagagggagaggagcctgtggagtacaagtccttgcagtggttcggggcaacagttcgagcccatggctcctccatcttggcatgcgctccactgtacagctggcgcacagagaaggagccactgagcgaccccgtgggcacctgctacctctccacagataacttcacccgaattctggagtatgcaccctgccgctcagatttcagctgggcagcaggacagggttactgccaaggaggcttcagtgccgagttcaccaagactggccgtgtggttttaggtggaccaggaagctatttctggcaaggccagatcctgtctgccactcaggagcagattgcagaatcttattaccccgagtacctgatcaacctggttcaggggcagctgcagactcgccaggccagttccatctatgatgacagctacctaggatactctgtggctgttggtgaattcagtggtgatgacacagaagactttgttgctggtgtgcccaaagggaacctcacttacggctatgtcaccatccttaatggctcagacattcgatccctctacaacttctcaggggaacagatggcctcctactttggctatgcagtggccgccacagacgtcaatggggatgggctggatgacttgctggtgggggcacccctgctcatggatcggacccctgacgggcggcctcaggaggtgggcagggtctacgtctacctgcagcacccagccggcatagagcccacgcccacccttaccctcactggccatgatgagtttggccgatttggcagctccttgacccccctgggggacctggaccaggatggctacaatgatgtggccatcggggctccctttggtggggagacccagcagggagtagtgtttgtatttcctgggggcccaggagggctgggctctaagccttcccaggttctgcagcccctgtgggcagccagccacaccccagacttctttggctctgcccttcgaggaggccgagacctggatggcaatggatatcctgatctgattgtggggtcctttggtgtggacaaggctgtggtatacaggggccgccccatcgtgtccgctagtgcctccctcaccatcttccccgccatgttcaacccagaggagcggagctgcagcttagaggggaaccctgtggcctgcatcaaccttagcttctgcctcaatgcttctggaaaacacgttgctgactccattggtttcacagtggaacttcagctggactggcagaagcagaagggaggggtacggcgggcactgttcctggcctccaggcaggcaaccctgacccagaccctgctcatccagaatggggctcgagaggattgcagagagatgaagatctacctcaggaacgagtcagaatttcgagacaaactctcgccgattcacatcgctctcaacttctccttggacccccaagccccagtggacagccacggcctcaggccagccctacattatcagagcaagagccggatagaggacaaggctcagatcttgctggactgtggagaagacaacatctgtgtgcctgacctgcagctggaagtgtttggggagcagaaccatgtgtacctgggtgacaagaatgccctgaacctcactttccatgcccagaatgtgggtgagggtggcgcctatgaggctgagcttcgggtcaccgcccctccagaggctgagtactcaggactcgtcagacacccagggaacttctccagcctgagctgtgactactttgccgtgaaccagagccgcctgctggtgtgtgacctgggcaaccccatgaaggcaggagccagtctgtggggtggccttcggtttacagtccctcatctccgggacactaagaaaaccatccagtttgacttccagatcctcagcaagaatctcaacaactcgcaaagcgacgtggtttcctttcggctctccgtggaggctcaggcccaggtcaccctgaacggtgtctccaagcctgaggcagtgctattcccagtaagcgactggcatccccgagaccagcctcagaaggaggaggacctgggacctgctgtccaccatgtctatgagctcatcaaccaaggccccagctccattagccagggtgtgctggaactcagctgtccccaggctctggaaggtcagcagctcctatatgtgaccagagttacgggactcaactgcaccaccaatcaccccattaacccaaagggcctggagttggatcccgagggttccctgcaccaccagcaaaaacgggaagctccaagccgcagctctgcttcctcgggacctcagatcctgaaatgcccggaggctgagtgtttcaggctgcgctgtgagctcgggcccctgcaccaacaagagagccaaagtctgcagttgcatttccgagtctgggccaagactttcttgcagcgggagcaccagccatttagcctgcagtgtgaggctgtgtacaaagccctgaagatgccctaccgaatcctgcctcggcagctgccccaaaaagagcgtcaggtggccacagctgtgcaatggaccaaggcagaaggcagctatggcgtcccactgtggatcatcatcctagccatcctgtttggcctcctgctcctaggtctactcatctacatcctctacaagcttggattcttcaaacgctccctcccatatggcaccgccatggaaaaagctcagctcaagcctccagccacctctgatgcctgagtcctcccaatttcagactcccattcctgaagaaccagtccccccaccctcattctactgaaaaggaggggtctgggtacttcttgaaggtgctgacggccagggagaagctcctctccccagcccagagacatacttgaagggccagagccaggggggtgaggagctggggatccctcccccccatgcactgtgaaggacccttgtttacacataccctcttcatggatgggggaactcagatccagggacagaggccccagcctccctgaagcctttgcattttggagagtttcctgaaacaacttggaaagataactaggaaatccattcacagttctttgggccagacatgccacaaggacttcctgtccagctccaacctgcaaagatctgtcctcagccttgccagagatccaaaagaagcccccagctaagaacctggaacttggggagttaagacctggcagctctggacagccccaccctggtgggccaacaaagaacactaactatgcatggtgccccaggaccagctcaggacagatgccacacaaggatagatgctggcccagggcccagagcccagctccaaggggaatcagaactcaaatggggccagatccagcctggggtctggagttgatctggaacccagactcagacattggcacctaatccaggcagatccaggactatatttgggcctgctccagacctgatcctggaggcccagttcaccctgatttaggagaagccaggaatttcccaggaccctgaaggggccatgatggcaacagatctggaacctcagcctggccagacacaggccctccctgttccccagagaaaggggagcccactgtcctgggcctgcagaatttgggttctgcctgccagctgcactgatgctgcccctcatctctctgcccaacccttccctcaccttggcaccagacacccaggacttatttaaactctgttgcaagtgcaataaatctgacccagtgcccccactgaccagaactagaa

SEQ ID NO: 2054 - DNA, 5797 bp, Homo sapiens
  source 1..5797: mol_type = genomic DNA
aacgggctcattcagcggtcgcgagctgcccgcgagggggagcggccggacggagagcgcgacccgtcccgggggtggggccgggcgcagcggcgagaggaggcgaaggtggctgcggtagcagcagcgcggcagcctcggacccagcccggagcgcagggcggccgctgcaggtccccgctcccctccccgtgcgtccgcccatggccgccgccgggcagctgtgcttgctctacctgtcggcggggctcctgtcccggctcggcgcagccttcaacttggacactcgggaggacaacgtgatccggaaatatggagaccccgggagcctcttcggcttctcgctggccatgcactggcaactgcagcccgaggacaagcggctgttgctcgtgggggccccgcgggcagaagcgcttccactgcagagagccaacagaacgggagggctgtacagctgcgacatcaccgcccgggggccatgcacgcggatcgagtttgataacgatgctgaccccacgtcagaaagcaaggaagatcagtggatgggggtcaccgtccagagccaaggtccagggggcaaggtcgtgacatgtgctcaccgatatgaaaaaaggcagcatgttaatacgaagcaggaatcccgagacatctttgggcggtgttatgtcctgagtcagaatctcaggattgaagacgatatggatgggggagattggagcttttgtgatgggcgattgagaggccatgagaaatttggctcttgccagcaaggtgtagcagctacttttactaaagactttcattacattgtatttggagccccgggtacttataactggaaagggattgttcgtgtagagcaaaagaataacactttttttgacatgaacatctttgaagatgggccttatgaagttggtggagagactgagcatgatgaaagtctcgttcctgttcctgctaacagttacttaggcctgctgtttttgaccagcgtttcctatacagatcctgatcagtttgtttataaaacacggcctccccgggagcagcctgacacattccctgatgtgatgatgaatagctacctaggtttttctttggactcagggaaaggtattgtttctaaagatgagatcacttttgtatctggtgctcccagagccaatcacagtggagccgtggttttgctgaagagagacatgaagtctgcacatctcctccctgagcacatattcgatggagaaggtctggcctcttcatttggctatgatgtggcggtggtggacctcaacaaggatgggtggcaagatatagttattggagccccacagtattttgatagagatggagaagttggaggtgcagtgtatgtctacatgaaccagcaaggcagatggaataatgtgaagccaattcgtcttaatggaaccaaagattctatgtttggcattgcagtaaaaaatattggagatattaatcaagatggctacccagatattgcagttggagctccgtatgatgacttgggaaaggtttttatctatcatggatctgcaaatggaataaataccaaaccaacacaggttctcaagggtatatcaccttattttggatattcaattgctggaaacatggaccttgatcgaaattcctaccctgatgttgctgttggttccctctcagattcagtaactattttcagatcccggcctgtgattaatattcagaaaaccatcacagtaactcctaacagaattgacctccgccagaaaacagcgtgtggggcgcctagtgggatatgcctccaggttaaatcctgttttgaatatactgctaaccccgctggttataatccttcaatatcaattgtgggcacacttgaagctgaaaaagaaagaagaaaatctgggctatcctcaagagttcagtttcgaaaccaaggttctgagcccaaatatactcaagaactaactctgaagaggcagaaacagaaagtgtgcatggaggaaaccctgtggctacaggataatatcagagataaactgcgtcccattcccataactgcctcagtggagatccaagagccaagctctcgtaggcgagtgaattcacttccagaagttcttccaattctgaattcagatgaacccaagacagctcatattgatgttcacttcttaaaagagggatgtggagacgacaatgtatgtaacagcaaccttaaactagaatataaattttgcacccgagaaggaaatcaagacaaattttcttatttaccaattcaaaaaggtgtaccagaactagttctaaaagatcagaaggatattgctttagaaataacagtgacaaacagcccttccaacccaaggaatcccacaaaagatggcgatgacgcccatgaggctaaactgattgcaacgtttccagacactttaacctattctgcatatagagaactgagggctttccctgagaaacagttgagttgtgttgccaaccagaatggctcgcaagctgactgtgagctcggaaatccttttaaaagaaattcaaatgtcactttttatttggttttaagtacaactgaagtcacctttgacaccccagatctggatattaatctgaagttagaaacaacaagcaatcaagataatttggctccaattacagctaaagcaaaagtggttattgaactgcttttatcggtctcgggagttgctaaaccttcccaggtgtattttggaggtacagttgttggcgagcaagctatgaaatctgaagatgaagtgggaagtttaatagagtatgaattcagggtaataaacttaggtaaacctcttacaaacctcggcacagcaaccttgaacattcagtggccaaaagaaattagcaatgggaaatggttgctttatttggtgaaagtagaatccaaaggattggaaaaggtaacttgtgagccacaaaaggagataaactccctgaacctaacggagtctcacaactcaagaaagaaacgggaaattactgaaaaacagatagatgataacagaaaattttctttatttgctgaaagaaaataccagactcttaactgtagcgtgaacgtgaactgtgtgaacatcagatgcccgctgcgggggctggacagcaaggcgtctcttattttgcgctcgaggttatggaacagcacatttctagaggaatattccaaactgaactacttggacattctcatgcgagccttcattgatgtgactgctgctgccgaaaatatcaggctgccaaatgcaggcactcaggttcgagtgactgtgtttccctcaaagactgtagctcagtattcgggagtaccttggtggatcatcctagtggctattctcgctgggatcttgatgcttgctttattagtgtttatactatggaagtgtggattctttaaacgctctaggtacgatgacagtgttccccgataccatgctgtaaggatccggaaagaagagcgagagatcaaagatgaaaagtatattgataaccttgaaaaaaaacagtggatcacaaagtggaacgaaaatgaaagctactcatagcgggggcctaaaaaaaaaaagcttcacagtacccaaactgctttttccaactcagaaattcaatttggatttaaaagcctgctcaatccctgaggactgatttcagagtgactacacacagtacgaacctacagttttaactgtggatattgttacgtagcctaaggctcctgttttgcacagccaaatttaaaactgttggaatggatttttctttaactgccgtaatttaactttctgggttgcctttatttttggcgtggctgacttacatcatgtgttggggaagggcctgcccagttgcactcaggtgacatcctccagatagtgtagctgaggaggcacctacactcacctgcactaacagagtggccgtcctaacctcgggcctgctgcgcagacgtccatcacgttagctgtcccacatcacaagactatgccattggggtagttgtgtttcaacggaaagtgctgtcttaaactaaatgtgcaatagaaggtgatgttgccatcctaccgtcttttcctgtttcctagctgtgtgaatacctgctcacgtcaaatgcatacaagtttcattctccctttcactaaaacacacaggtgcaacagacttgaatgctagttatacttatttgtatatggtatttattttttcttttctttacaaaccattttgttattgactaacaggccaaagagtctccagtttacccttcaggttggtttaatcaatcagaattagagcatgggaggtcatcactttgacctaaattatttactgcaaaaagaaaatctttataaatgtaccagagagagttgttttaataacttatctataaactataacctctccttcatgacagcctccaccccacaacccaaaaggtttaagaaatagaattataactgtaaagatgtttatttcaggcattggatattttttactttagaagcctgcataatgtttctggatttcatactgtaacattcaggaattcttggagaaaatgggtttattcactgaactctagtgcggtttactcactgctgcaaatactgtatattcaggacttgaaagaaatggtgaatgcctatggtggatccaaactgatccagtataagactactgaatctgctaccaaaacagttaatcagtgagtcgatgttctattttttgttttgtttcctcccctatctgtattcccaaaaattactttggggctaatttaacaagaactttaaattgtgttttaattgtaaaaatggcagggggtggaattattactctatacattcaacagagactgaatagatatgaaagctgattttttttaattaccatgcttcacaatgttaagttatatggggagcaacagcaaacaggtgctaatttgttttggatatagtataagcagtgtctgtgttttgaaagaatagaacacagtttgtagtgccactgttgttttgggggggcttttttcttttcggaaatcttaaaccttaagatactaaggacgttgttttggttgtactttggaattcttagtcacaaaatatattttgtttacaaaaatttctgtaaaacaggttataacagtgtttaaagtctcagtttcttgcttggggaacttgtgtccctaatgtgtttagattgctagattgctaaggagctgatactttgacagtgtttttagacctgtgttactaaaaaaaagatgaatgtcctgaaaagggtgttgggagggtggttcaacaaagaaacaaagatgttatggtgtttagatttatggttgttaaaaatgtcatctcaagtcaagtcactggtctgtttgcatttgatacatttttgtactaactagcattgtaaaattatttcatgattagaaattacctgtggatatttgtataaaagtgtgaaataaattttttataaaagtgttcattgtttcgtaacacagcattgtatatgtgaagcaaactctaaaattataaatgacaacctgaattatctatttcatcaaaccaaagttcagtgtttttatttttggtgtctcatgtaatctcagatcagccaaagatactagtgccaaagcaatgggattcggggtttttttctgttttcgctctatgtaggtgatcctcaagtctttcattttccttctttatgattaaaagaaacctacaggtatttaacaacc

SEQ ID NO: 2055 - DNA, 5618 bp, Homo sapiens
  source 1..5618: mol_type = genomic DNA
ttgataaaacgcctgcgagtctccagagaacaacgggctcattcagcggtcgcgagctgcccgcgagggggagcggccggacggagagcgcgacccgtcccgggggtggggccgggcgcagcggcgagaggaggcgaaggtggctgcggtagcagcagcgcggcagcctcggacccagcccggagcgcagggcggccgctgcaggtccccgctcccctccccgtgcgtccgcccatggccgccgccgggcagctgtgcttgctctacctgtcggcggggctcctgtcccggctcggcgcagccttcaacttggacactcgggaggacaacgtgatccggaaatatggagaccccgggagcctcttcggcttctcgctggccatgcactggcaactgcagcccgaggacaagcggctgttgctcgtgggggccccgcgggcagaagcgcttccactgcagagagccaacagaacgggagggctgtacagctgcgacatcaccgcccgggggccatgcacgcggatcgagtttgataacgatgctgaccccacgtcagaaagcaaggaagatcagtggatgggggtcaccgtccagagccaaggtccagggggcaaggtcgtgacatgtgctcaccgatatgaaaaaaggcagcatgttaatacgaagcaggaatcccgagacatctttgggcggtgttatgtcctgagtcagaatctcaggattgaagacgatatggatgggggagattggagcttttgtgatgggcgattgagaggccatgagaaatttggctcttgccagcaaggtgtagcagctacttttactaaagactttcattacattgtatttggagccccgggtacttataactggaaagggattgttcgtgtagagcaaaagaataacactttttttgacatgaacatctttgaagatgggccttatgaagttggtggagagactgagcatgatgaaagtctcgttcctgttcctgctaacagttacttaggtttttctttggactcagggaaaggtattgtttctaaagatgagatcacttttgtatctggtgctcccagagccaatcacagtggagccgtggttttgctgaagagagacatgaagtctgcacatctcctccctgagcacatattcgatggagaaggtctggcctcttcatttggctatgatgtggcggtggtggacctcaacaaggatgggtggcaagatatagttattggagccccacagtattttgatagagatggagaagttggaggtgcagtgtatgtctacatgaaccagcaaggcagatggaataatgtgaagccaattcgtcttaatggaaccaaagattctatgtttggcattgcagtaaaaaatattggagatattaatcaagatggctacccagatattgcagttggagctccgtatgatgacttgggaaaggtttttatctatcatggatctgcaaatggaataaataccaaaccaacacaggttctcaagggtatatcaccttattttggatattcaattgctggaaacatggaccttgatcgaaattcctaccctgatgttgctgttggttccctctcagattcagtaactattttcagatcccggcctgtgattaatattcagaaaaccatcacagtaactcctaacagaattgacctccgccagaaaacagcgtgtggggcgcctagtgggatatgcctccaggttaaatcctgttttgaatatactgctaaccccgctggttataatccttcaatatcaattgtgggcacacttgaagctgaaaaagaaagaagaaaatctgggctatcctcaagagttcagtttcgaaaccaaggttctgagcccaaatatactcaagaactaactctgaagaggcagaaacagaaagtgtgcatggaggaaaccctgtggctacaggataatatcagagataaactgcgtcccattcccataactgcctcagtggagatccaagagccaagctctcgtaggcgagtgaattcacttccagaagttcttccaattctgaattcagatgaacccaagacagctcatattgatgttcacttcttaaaagagggatgtggagacgacaatgtatgtaacagcaaccttaaactagaatataaattttgcacccgagaaggaaatcaagacaaattttcttatttaccaattcaaaaaggtgtaccagaactagttctaaaagatcagaaggatattgctttagaaataacagtgacaaacagcccttccaacccaaggaatcccacaaaagatggcgatgacgcccatgaggctaaactgattgcaacgtttccagacactttaacctattctgcatatagagaactgagggctttccctgagaaacagttgagttgtgttgccaaccagaatggctcgcaagctgactgtgagctcggaaatccttttaaaagaaattcaaatgtcactttttatttggttttaagtacaactgaagtcacctttgacaccccagatctggatattaatctgaagttagaaacaacaagcaatcaagataatttggctccaattacagctaaagcaaaagtggttattgaactgcttttatcggtctcgggagttgctaaaccttcccaggtgtattttggaggtacagttgttggcgagcaagctatgaaatctgaagatgaagtgggaagtttaatagagtatgaattcagggtaataaacttaggtaaacctcttacaaacctcggcacagcaaccttgaacattcagtggccaaaagaaattagcaatgggaaatggttgctttatttggtgaaagtagaatccaaaggattggaaaaggtaacttgtgagccacaaaaggagataaactccctgaacctaacggagtctcacaactcaagaaagaaacgggaaattactgaaaaacagatagatgataacagaaaattttctttatttgctgaaagaaaataccagactcttaactgtagcgtgaacgtgaactgtgtgaacatcagatgcccgctgcgggggctggacagcaaggcgtctcttattttgcgctcgaggttatggaacagcacatttctagaggaatattccaaactgaactacttggacattctcatgcgagccttcattgatgtgactgctgctgccgaaaatatcaggctgccaaatgcaggcactcaggttcgagtgactgtgtttccctcaaagactgtagctcagtattcgggagtaccttggtggatcatcctagtggctattctcgctgggatcttgatgcttgctttattagtgtttatactatggaagtgtggtttcttcaagagaaataagaaagatcattatgatgccacatatcacaaggctgagatccatgctcagccatctgataaagagaggcttacttctgatgcatagtattgatctacttctgtaattgtgtggattctttaaacgctctaggtacgatgacagtgttccccgataccatgctgtaaggatccggaaagaagagcgagagatcaaagatgaaaagtatattgataaccttgaaaaaaaacagtggatcacaaagtggaacgaaaatgaaagctactcatagcgggggcctaaaaaaaaaaagcttcacagtacccaaactgctttttccaactcagaaattcaatttggatttaaaagcctgctcaatccctgaggactgatttcagagtgactacacacagtacgaacctacagttttaactgtggatattgttacgtagcctaaggctcctgttttgcacagccaaatttaaaactgttggaatggatttttctttaactgccgtaatttaactttctgggttgcctttatttttggcgtggctgacttacatcatgtgttggggaagggcctgcccagttgcactcaggtgacatcctccagatagtgtagctgaggaggcacctacactcacctgcactaacagagtggccgtcctaacctcgggcctgctgcgcagacgtccatcacgttagctgtcccacatcacaagactatgccattggggtagttgtgtttcaacggaaagtgctgtcttaaactaaatgtgcaatagaaggtgatgttgccatcctaccgtcttttcctgtttcctagctgtgtgaatacctgctcacgtcaaatgcatacaagtttcattctccctttcactaaaacacacaggtgcaacagacttgaatgctagttatacttatttgtatatggtatttattttttcttttctttacaaaccattttgttattgactaacaggccaaagagtctccagtttacccttcaggttggtttaatcaatcagaattagagcatgggaggtcatcactttgacctaaattatttactgcaaaaagaaaatctttataaatgtaccagagagagttgttttaataacttatctataaactataacctctccttcatgacagcctccaccccacaacccaaaaggtttaagaaatagaattataactgtaaagatgtttatttcaggcattggatattttttactttagaagcctgcataatgtttctggatttcatactgtaacattcaggaattcttggagaaaatgggtttattcactgaactctagtgcggtttactcactgctgcaaatactgtatattcaggacttgaaagaaatggtgaatgcctatggtggatccaaactgatccagtataagactactgaatctgctaccaaaacagttaatcagtgagtcgatgttctattttttgttttgtttcctcccctatctgtattcccaaaaattactttggggctaatttaacaagaactttaaattgtgttttaattgtaaaaatggcagggggtggaattattactctatacattcaacagagactgaatagatatgaaagctgattttttttaattaccatgcttcacaatgttaagttatatggggagcaacagcaaacaggtgctaatttgttttggatatagtataagcagtgtctgtgttttgaaagaatagaacacagtttgtagtgccactgttgttttgggggggcttttttcttttcggaaatcttaaaccttaagatactaaggacgttgttttggttgtactttggaattcttagtcacaaaatatattttgtttacaaaaatttctgtaaaacaggttataacagtgtttaaagtctcagtttcttgcttggggaacttgtgtccctaatgtgtttagattgctagattgctaaggagctgatactttgacagtgtttttagacctgtgttactaaaaaaaagatgaatgtcctgaaaagggtgttgggagggtggttcaacaaagaaacaaagatgttatggtgtttagatttatggttgttaaaaatgtcatctcaagtcaagtcactggtctgtttgcatttgatacatttttgtactaactagcattgtaaaattatttcatgattagaaattacctgtggatatttgtataaaagtgtgaaataaattttttataaaagtgttcattgtttcgtaacacagcattgtatatgtgaagc

SEQ ID NO: 2056 - DNA, 5795 bp, Homo sapiens
  source 1..5795: mol_type = genomic DNA
aacgggctcattcagcggtcgcgagctgcccgcgagggggagcggccggacggagagcgcgacccgtcccgggggtggggccgggcgcagcggcgagaggaggcgaaggtggctgcggtagcagcagcgcggcagcctcggacccagcccggagcgcagggcggccgctgcaggtccccgctcccctccccgtgcgtccgcccatggccgccgccgggcagctgtgcttgctctacctgtcggcggggctcctgtcccggctcggcgcagccttcaacttggacactcgggaggacaacgtgatccggaaatatggagaccccgggagcctcttcggcttctcgctggccatgcactggcaactgcagcccgaggacaagcggctgttgctcgtgggggccccgcgggcagaagcgcttccactgcagagagccaacagaacgggagggctgtacagctgcgacatcaccgcccgggggccatgcacgcggatcgagtttgataacgatgctgaccccacgtcagaaagcaaggaagatcagtggatgggggtcaccgtccagagccaaggtccagggggcaaggtcgtgacatgtgctcaccgatatgaaaaaaggcagcatgttaatacgaagcaggaatcccgagacatctttgggcggtgttatgtcctgagtcagaatctcaggattgaagacgatatggatgggggagattggagcttttgtgatgggcgattgagaggccatgagaaatttggctcttgccagcaaggtgtagcagctacttttactaaagactttcattacattgtatttggagccccgggtacttataactggaaaggcctgctgtttttgaccagcgtttcctatacagatcctgatcagtttgtttataaaacacggcctccccgggagcagcctgacacattccctgatgtgatgatgaatagctacctaggtttttctttggactcagggaaaggtattgtttctaaagatgagatcacttttgtatctggtgctcccagagccaatcacagtggagccgtggttttgctgaagagagacatgaagtctgcacatctcctccctgagcacatattcgatggagaaggtctggcctcttcatttggctatgatgtggcggtggtggacctcaacaaggatgggtggcaagatatagttattggagccccacagtattttgatagagatggagaagttggaggtgcagtgtatgtctacatgaaccagcaaggcagatggaataatgtgaagccaattcgtcttaatggaaccaaagattctatgtttggcattgcagtaaaaaatattggagatattaatcaagatggctacccagatattgcagttggagctccgtatgatgacttgggaaaggtttttatctatcatggatctgcaaatggaataaataccaaaccaacacaggttctcaagggtatatcaccttattttggatattcaattgctggaaacatggaccttgatcgaaattcctaccctgatgttgctgttggttccctctcagattcagtaactattttcagatcccggcctgtgattaatattcagaaaaccatcacagtaactcctaacagaattgacctccgccagaaaacagcgtgtggggcgcctagtgggatatgcctccaggttaaatcctgttttgaatatactgctaaccccgctggttataatccttcaatatcaattgtgggcacacttgaagctgaaaaagaaagaagaaaatctgggctatcctcaagagttcagtttcgaaaccaaggttctgagcccaaatatactcaagaactaactctgaagaggcagaaacagaaagtgtgcatggaggaaaccctgtggctacaggataatatcagagataaactgcgtcccattcccataactgcctcagtggagatccaagagccaagctctcgtaggcgagtgaattcacttccagaagttcttccaattctgaattcagatgaacccaagacagctcatattgatgttcacttcttaaaagagggatgtggagacgacaatgtatgtaacagcaaccttaaactagaatataaattttgcacccgagaaggaaatcaagacaaattttcttatttaccaattcaaaaaggtgtaccagaactagttctaaaagatcagaaggatattgctttagaaataacagtgacaaacagcccttccaacccaaggaatcccacaaaagatggcgatgacgcccatgaggctaaactgattgcaacgtttccagacactttaacctattctgcatatagagaactgagggctttccctgagaaacagttgagttgtgttgccaaccagaatggctcgcaagctgactgtgagctcggaaatccttttaaaagaaattcaaatgtcactttttatttggttttaagtacaactgaagtcacctttgacaccccagatctggatattaatctgaagttagaaacaacaagcaatcaagataatttggctccaattacagctaaagcaaaagtggttattgaactgcttttatcggtctcgggagttgctaaaccttcccaggtgtattttggaggtacagttgttggcgagcaagctatgaaatctgaagatgaagtgggaagtttaatagagtatgaattcagggtaataaacttaggtaaacctcttacaaacctcggcacagcaaccttgaacattcagtggccaaaagaaattagcaatgggaaatggttgctttatttggtgaaagtagaatccaaaggattggaaaaggtaacttgtgagccacaaaaggagataaactccctgaacctaacggagtctcacaactcaagaaagaaacgggaaattactgaaaaacagatagatgataacagaaaattttctttatttgctgaaagaaaataccagactcttaactgtagcgtgaacgtgaactgtgtgaacatcagatgcccgctgcgggggctggacagcaaggcgtctcttattttgcgctcgaggttatggaacagcacatttctagaggaatattccaaactgaactacttggacattctcatgcgagccttcattgatgtgactgctgctgccgaaaatatcaggctgccaaatgcaggcactcaggttcgagtgactgtgtttccctcaaagactgtagctcagtattcgggagtaccttggtggatcatcctagtggctattctcgctgggatcttgatgcttgctttattagtgtttatactatggaagtgtggtttcttcaagagaaataagaaagatcattatgatgccacatatcacaaggctgagatccatgctcagccatctgataaagagaggcttacttctgatgcatagtattgatctacttctgtaattgtgtggattctttaaacgctctaggtacgatgacagtgttccccgataccatgctgtaaggatccggaaagaagagcgagagatcaaagatgaaaagtatattgataaccttgaaaaaaaacagtggatcacaaagtggaacgaaaatgaaagctactcatagcgggggcctaaaaaaaaaaagcttcacagtacccaaactgctttttccaactcagaaattcaatttggatttaaaagcctgctcaatccctgaggactgatttcagagtgactacacacagtacgaacctacagttttaactgtggatattgttacgtagcctaaggctcctgttttgcacagccaaatttaaaactgttggaatggatttttctttaactgccgtaatttaactttctgggttgcctttatttttggcgtggctgacttacatcatgtgttggggaagggcctgcccagttgcactcaggtgacatcctccagatagtgtagctgaggaggcacctacactcacctgcactaacagagtggccgtcctaacctcgggcctgctgcgcagacgtccatcacgttagctgtcccacatcacaagactatgccattggggtagttgtgtttcaacggaaagtgctgtcttaaactaaatgtgcaatagaaggtgatgttgccatcctaccgtcttttcctgtttcctagctgtgtgaatacctgctcacgtcaaatgcatacaagtttcattctccctttcactaaaacacacaggtgcaacagacttgaatgctagttatacttatttgtatatggtatttattttttcttttctttacaaaccattttgttattgactaacaggccaaagagtctccagtttacccttcaggttggtttaatcaatcagaattagagcatgggaggtcatcactttgacctaaattatttactgcaaaaagaaaatctttataaatgtaccagagagagttgttttaataacttatctataaactataacctctccttcatgacagcctccaccccacaacccaaaaggtttaagaaatagaattataactgtaaagatgtttatttcaggcattggatattttttactttagaagcctgcataatgtttctggatttcatactgtaacattcaggaattcttggagaaaatgggtttattcactgaactctagtgcggtttactcactgctgcaaatactgtatattcaggacttgaaagaaatggtgaatgcctatggtggatccaaactgatccagtataagactactgaatctgctaccaaaacagttaatcagtgagtcgatgttctattttttgttttgtttcctcccctatctgtattcccaaaaattactttggggctaatttaacaagaactttaaattgtgttttaattgtaaaaatggcagggggtggaattattactctatacattcaacagagactgaatagatatgaaagctgattttttttaattaccatgcttcacaatgttaagttatatggggagcaacagcaaacaggtgctaatttgttttggatatagtataagcagtgtctgtgttttgaaagaatagaacacagtttgtagtgccactgttgttttgggggggcttttttcttttcggaaatcttaaaccttaagatactaaggacgttgttttggttgtactttggaattcttagtcacaaaatatattttgtttacaaaaatttctgtaaaacaggttataacagtgtttaaagtctcagtttcttgcttggggaacttgtgtccctaatgtgtttagattgctagattgctaaggagctgatactttgacagtgtttttagacctgtgttactaaaaaaaagatgaatgtcctgaaaagggtgttgggagggtggttcaacaaagaaacaaagatgttatggtgtttagatttatggttgttaaaaatgtcatctcaagtcaagtcactggtctgtttgcatttgatacatttttgtactaactagcattgtaaaattatttcatgattagaaattacctgtggatatttgtataaaagtgtgaaataaattttttataaaagtgttcattgtttcgtaacacagcattgtatatgtgaagcaaactctaaaattataaatgacaacctgaattatctatttcatcaaaccaaagttcagtgtttttatttttggtgtctcatgtaatctcagatcagccaaagatactagtgccaaagcaatgggattcggggtttttttctgttttcgctctatgtaggtgatcctcaagtctttcattttccttctttatgattaaaagaaacctacaggtatttaacaacc

SEQ ID NO: 2057 - DNA, 5927 bp, Homo sapiens
  source 1..5927: mol_type = genomic DNA
aacgggctcattcagcggtcgcgagctgcccgcgagggggagcggccggacggagagcgcgacccgtcccgggggtggggccgggcgcagcggcgagaggaggcgaaggtggctgcggtagcagcagcgcggcagcctcggacccagcccggagcgcagggcggccgctgcaggtccccgctcccctccccgtgcgtccgcccatggccgccgccgggcagctgtgcttgctctacctgtcggcggggctcctgtcccggctcggcgcagccttcaacttggacactcgggaggacaacgtgatccggaaatatggagaccccgggagcctcttcggcttctcgctggccatgcactggcaactgcagcccgaggacaagcggctgttgctcgtgggggccccgcgggcagaagcgcttccactgcagagagccaacagaacgggagggctgtacagctgcgacatcaccgcccgggggccatgcacgcggatcgagtttgataacgatgctgaccccacgtcagaaagcaaggaagatcagtggatgggggtcaccgtccagagccaaggtccagggggcaaggtcgtgacatgtgctcaccgatatgaaaaaaggcagcatgttaatacgaagcaggaatcccgagacatctttgggcggtgttatgtcctgagtcagaatctcaggattgaagacgatatggatgggggagattggagcttttgtgatgggcgattgagaggccatgagaaatttggctcttgccagcaaggtgtagcagctacttttactaaagactttcattacattgtatttggagccccgggtacttataactggaaagggattgttcgtgtagagcaaaagaataacactttttttgacatgaacatctttgaagatgggccttatgaagttggtggagagactgagcatgatgaaagtctcgttcctgttcctgctaacagttacttaggcctgctgtttttgaccagcgtttcctatacagatcctgatcagtttgtttataaaacacggcctccccgggagcagcctgacacattccctgatgtgatgatgaatagctacctaggtttttctttggactcagggaaaggtattgtttctaaagatgagatcacttttgtatctggtgctcccagagccaatcacagtggagccgtggttttgctgaagagagacatgaagtctgcacatctcctccctgagcacatattcgatggagaaggtctggcctcttcatttggctatgatgtggcggtggtggacctcaacaaggatgggtggcaagatatagttattggagccccacagtattttgatagagatggagaagttggaggtgcagtgtatgtctacatgaaccagcaaggcagatggaataatgtgaagccaattcgtcttaatggaaccaaagattctatgtttggcattgcagtaaaaaatattggagatattaatcaagatggctacccagatattgcagttggagctccgtatgatgacttgggaaaggtttttatctatcatggatctgcaaatggaataaataccaaaccaacacaggttctcaagggtatatcaccttattttggatattcaattgctggaaacatggaccttgatcgaaattcctaccctgatgttgctgttggttccctctcagattcagtaactattttcagatcccggcctgtgattaatattcagaaaaccatcacagtaactcctaacagaattgacctccgccagaaaacagcgtgtggggcgcctagtgggatatgcctccaggttaaatcctgttttgaatatactgctaaccccgctggttataatccttcaatatcaattgtgggcacacttgaagctgaaaaagaaagaagaaaatctgggctatcctcaagagttcagtttcgaaaccaaggttctgagcccaaatatactcaagaactaactctgaagaggcagaaacagaaagtgtgcatggaggaaaccctgtggctacaggataatatcagagataaactgcgtcccattcccataactgcctcagtggagatccaagagccaagctctcgtaggcgagtgaattcacttccagaagttcttccaattctgaattcagatgaacccaagacagctcatattgatgttcacttcttaaaagagggatgtggagacgacaatgtatgtaacagcaaccttaaactagaatataaattttgcacccgagaaggaaatcaagacaaattttcttatttaccaattcaaaaaggtgtaccagaactagttctaaaagatcagaaggatattgctttagaaataacagtgacaaacagcccttccaacccaaggaatcccacaaaagatggcgatgacgcccatgaggctaaactgattgcaacgtttccagacactttaacctattctgcatatagagaactgagggctttccctgagaaacagttgagttgtgttgccaaccagaatggctcgcaagctgactgtgagctcggaaatccttttaaaagaaattcaaatgtcactttttatttggttttaagtacaactgaagtcacctttgacaccccagatctggatattaatctgaagttagaaacaacaagcaatcaagataatttggctccaattacagctaaagcaaaagtggttattgaactgcttttatcggtctcgggagttgctaaaccttcccaggtgtattttggaggtacagttgttggcgagcaagctatgaaatctgaagatgaagtgggaagtttaatagagtatgaattcagggtaataaacttaggtaaacctcttacaaacctcggcacagcaaccttgaacattcagtggccaaaagaaattagcaatgggaaatggttgctttatttggtgaaagtagaatccaaaggattggaaaaggtaacttgtgagccacaaaaggagataaactccctgaacctaacggagtctcacaactcaagaaagaaacgggaaattactgaaaaacagatagatgataacagaaaattttctttatttgctgaaagaaaataccagactcttaactgtagcgtgaacgtgaactgtgtgaacatcagatgcccgctgcgggggctggacagcaaggcgtctcttattttgcgctcgaggttatggaacagcacatttctagaggaatattccaaactgaactacttggacattctcatgcgagccttcattgatgtgactgctgctgccgaaaatatcaggctgccaaatgcaggcactcaggttcgagtgactgtgtttccctcaaagactgtagctcagtattcgggagtaccttggtggatcatcctagtggctattctcgctgggatcttgatgcttgctttattagtgtttatactatggaagtgtggtttcttcaagagaaataagaaagatcattatgatgccacatatcacaaggctgagatccatgctcagccatctgataaagagaggcttacttctgatgcatagtattgatctacttctgtaattgtgtggattctttaaacgctctaggtacgatgacagtgttccccgataccatgctgtaaggatccggaaagaagagcgagagatcaaagatgaaaagtatattgataaccttgaaaaaaaacagtggatcacaaagtggaacgaaaatgaaagctactcatagcgggggcctaaaaaaaaaaagcttcacagtacccaaactgctttttccaactcagaaattcaatttggatttaaaagcctgctcaatccctgaggactgatttcagagtgactacacacagtacgaacctacagttttaactgtggatattgttacgtagcctaaggctcctgttttgcacagccaaatttaaaactgttggaatggatttttctttaactgccgtaatttaactttctgggttgcctttatttttggcgtggctgacttacatcatgtgttggggaagggcctgcccagttgcactcaggtgacatcctccagatagtgtagctgaggaggcacctacactcacctgcactaacagagtggccgtcctaacctcgggcctgctgcgcagacgtccatcacgttagctgtcccacatcacaagactatgccattggggtagttgtgtttcaacggaaagtgctgtcttaaactaaatgtgcaatagaaggtgatgttgccatcctaccgtcttttcctgtttcctagctgtgtgaatacctgctcacgtcaaatgcatacaagtttcattctccctttcactaaaacacacaggtgcaacagacttgaatgctagttatacttatttgtatatggtatttattttttcttttctttacaaaccattttgttattgactaacaggccaaagagtctccagtttacccttcaggttggtttaatcaatcagaattagagcatgggaggtcatcactttgacctaaattatttactgcaaaaagaaaatctttataaatgtaccagagagagttgttttaataacttatctataaactataacctctccttcatgacagcctccaccccacaacccaaaaggtttaagaaatagaattataactgtaaagatgtttatttcaggcattggatattttttactttagaagcctgcataatgtttctggatttcatactgtaacattcaggaattcttggagaaaatgggtttattcactgaactctagtgcggtttactcactgctgcaaatactgtatattcaggacttgaaagaaatggtgaatgcctatggtggatccaaactgatccagtataagactactgaatctgctaccaaaacagttaatcagtgagtcgatgttctattttttgttttgtttcctcccctatctgtattcccaaaaattactttggggctaatttaacaagaactttaaattgtgttttaattgtaaaaatggcagggggtggaattattactctatacattcaacagagactgaatagatatgaaagctgattttttttaattaccatgcttcacaatgttaagttatatggggagcaacagcaaacaggtgctaatttgttttggatatagtataagcagtgtctgtgttttgaaagaatagaacacagtttgtagtgccactgttgttttgggggggcttttttcttttcggaaatcttaaaccttaagatactaaggacgttgttttggttgtactttggaattcttagtcacaaaatatattttgtttacaaaaatttctgtaaaacaggttataacagtgtttaaagtctcagtttcttgcttggggaacttgtgtccctaatgtgtttagattgctagattgctaaggagctgatactttgacagtgtttttagacctgtgttactaaaaaaaagatgaatgtcctgaaaagggtgttgggagggtggttcaacaaagaaacaaagatgttatggtgtttagatttatggttgttaaaaatgtcatctcaagtcaagtcactggtctgtttgcatttgatacatttttgtactaactagcattgtaaaattatttcatgattagaaattacctgtggatatttgtataaaagtgtgaaataaattttttataaaagtgttcattgtttcgtaacacagcattgtatatgtgaagcaaactctaaaattataaatgacaacctgaattatctatttcatcaaaccaaagttcagtgtttttatttttggtgtctcatgtaatctcagatcagccaaagatactagtgccaaagcaatgggattcggggtttttttctgttttcgctctatgtaggtgatcctcaagtctttcattttccttctttatgattaaaagaaacctacaggtatttaacaacc

SEQ ID NO: 2058 - DNA, 5298 bp, Homo sapiens
  source 1..5298: mol_type = genomic DNA
atggccgccgccgggcagctgtgcttgctctacctgtcggcggggctcctgtcccggctcggcgcagccttcaacttggacactcgggaggacaacgtgatccggaaatatggagaccccgggagcctcttcggcttctcgctggccatgcactggcaactgcagcccgaggacaagcggctgttgctcgtgggggccccgcgggcagaagcgcttccactgcagagagccaacagaacgggagggctgtacagctgcgacatcaccgcccgggggccatgcacgcggatcgagtttgataacgatgctgaccccacgtcagaaagcaaggaagatcagtggatgggggtcaccgtccagagccaaggtccagggggcaaggtcgtgacatgtgctcaccgatatgaaaaaaggcagcatgttaatacgaagcaggaatcccgagacatctttgggcggtgttatgtcctgagtcagaatctcaggattgaagacgatatggatgggggagattggagcttttgtgatgggcgattgagaggccatgagaaatttggctcttgccagcaaggtgtagcagctacttttactaaagactttcattacattgtatttggagccccgggtacttataactggaaagggattgttcgtgtagagcaaaagaataacactttttttgacatgaacatctttgaagatgggccttatgaagttggtggagagactgagcatgatgaaagtctcgttcctgttcctgctaacagttacttaggtttttctttggactcagggaaaggtattgtttctaaagatgagatcacttttgtatctggtgctcccagagccaatcacagtggagccgtggttttgctgaagagagacatgaagtctgcacatctcctccctgagcacatattcgatggagaaggtctggcctcttcatttggctatgatgtggcggtggtggacctcaacaaggatgggtggcaagatatagttattggagccccacagtattttgatagagatggagaagttggaggtgcagtgtatgtctacatgaaccagcaaggcagatggaataatgtgaagccaattcgtcttaatggaaccaaagattctatgtttggcattgcagtaaaaaatattggagatattaatcaagatggctacccagatattgcagttggagctccgtatgatgacttgggaaaggtttttatctatcatggatctgcaaatggaataaataccaaaccaacacaggttctcaagggtatatcaccttattttggatattcaattgctggaaacatggaccttgatcgaaattcctaccctgatgttgctgttggttccctctcagattcagtaactattttcagatcccggcctgtgattaatattcagaaaaccatcacagtaactcctaacagaattgacctccgccagaaaacagcgtgtggggcgcctagtgggatatgcctccaggttaaatcctgttttgaatatactgctaaccccgctggttataatccttcaatatcaattgtgggcacacttgaagctgaaaaagaaagaagaaaatctgggctatcctcaagagttcagtttcgaaaccaaggttctgagcccaaatatactcaagaactaactctgaagaggcagaaacagaaagtgtgcatggaggaaaccctgtggctacaggataatatcagagataaactgcgtcccattcccataactgcctcagtggagatccaagagccaagctctcgtaggcgagtgaattcacttccagaagttcttccaattctgaattcagatgaacccaagacagctcatattgatgttcacttcttaaaagagggatgtggagacgacaatgtatgtaacagcaaccttaaactagaatataaattttgcacccgagaaggaaatcaagacaaattttcttatttaccaattcaaaaaggtgtaccagaactagttctaaaagatcagaaggatattgctttagaaataacagtgacaaacagcccttccaacccaaggaatcccacaaaagatggcgatgacgcccatgaggctaaactgattgcaacgtttccagacactttaacctattctgcatatagagaactgagggctttccctgagaaacagttgagttgtgttgccaaccagaatggctcgcaagctgactgtgagctcggaaatccttttaaaagaaattcaaatgtcactttttatttggttttaagtacaactgaagtcacctttgacaccccagatctggatattaatctgaagttagaaacaacaagcaatcaagataatttggctccaattacagctaaagcaaaagtggttattgaactgcttttatcggtctcgggagttgctaaaccttcccaggtgtattttggaggtacagttgttggcgagcaagctatgaaatctgaagatgaagtgggaagtttaatagagtatgaattcagggtaataaacttaggtaaacctcttacaaacctcggcacagcaaccttgaacattcagtggccaaaagaaattagcaatgggaaatggttgctttatttggtgaaagtagaatccaaaggattggaaaaggtaacttgtgagccacaaaaggagataaactccctgaacctaacggagtctcacaactcaagaaagaaacgggaaattactgaaaaacagatagatgataacagaaaattttctttatttgctgaaagaaaataccagactcttaactgtagcgtgaacgtgaactgtgtgaacatcagatgcccgctgcgggggctggacagcaaggcgtctcttattttgcgctcgaggttatggaacagcacatttctagaggaatattccaaactgaactacttggacattctcatgcgagccttcattgatgtgactgctgctgccgaaaatatcaggctgccaaatgcaggcactcaggttcgagtgactgtgtttccctcaaagactgtagctcagtattcgggagtaccttggtggatcatcctagtggctattctcgctgggatcttgatgcttgctttattagtgtttatactatggaagtgtggattctttaaacgctctaggtacgatgacagtgttccccgataccatgctgtaaggatccggaaagaagagcgagagatcaaagatgaaaagtatattgataaccttgaaaaaaaacagtggatcacaaagtggaacgaaaatgaaagctactcatagcgggggcctaaaaaaaaaaagcttcacagtacccaaactgctttttccaactcagaaattcaatttggatttaaaagcctgctcaatccctgaggactgatttcagagtgactacacacagtacgaacctacagttttaactgtggatattgttacgtagcctaaggctcctgttttgcacagccaaatttaaaactgttggaatggatttttctttaactgccgtaatttaactttctgggttgcctttatttttggcgtggctgacttacatcatgtgttggggaagggcctgcccagttgcactcaggtgacatcctccagatagtgtagctgaggaggcacctacactcacctgcactaacagagtggccgtcctaacctcgggcctgctgcgcagacgtccatcacgttagctgtcccacatcacaagactatgccattggggtagttgtgtttcaacggaaagtgctgtcttaaactaaatgtgcaatagaaggtgatgttgccatcctaccgtcttttcctgtttcctagctgtgtgaatacctgctcacgtcaaatgcatacaagtttcattctccctttcactaaaacacacaggtgcaacagacttgaatgctagttatacttatttgtatatggtatttattttttcttttctttacaaaccattttgttattgactaacaggccaaagagtctccagtttacccttcaggttggtttaatcaatcagaattagagcatgggaggtcatcactttgacctaaattatttactgcaaaaagaaaatctttataaatgtaccagagagagttgttttaataacttatctataaactataacctctccttcatgacagcctccaccccacaacccaaaaggtttaagaaatagaattataactgtaaagatgtttatttcaggcattggatattttttactttagaagcctgcataatgtttctggatttcatactgtaacattcaggaattcttggagaaaatgggtttattcactgaactctagtgcggtttactcactgctgcaaatactgtatattcaggacttgaaagaaatggtgaatgcctatggtggatccaaactgatccagtataagactactgaatctgctaccaaaacagttaatcagtgagtcgatgttctattttttgttttgtttcctcccctatctgtattcccaaaaattactttggggctaatttaacaagaactttaaattgtgttttaattgtaaaaatggcagggggtggaattattactctatacattcaacagagactgaatagatatgaaagctgattttttttaattaccatgcttcacaatgttaagttatatggggagcaacagcaaacaggtgctaatttgttttggatatagtataagcagtgtctgtgttttgaaagaatagaacacagtttgtagtgccactgttgttttgggggggcttttttcttttcggaaatcttaaaccttaagatactaaggacgttgttttggttgtactttggaattcttagtcacaaaatatattttgtttacaaaaatttctgtaaaacaggttataacagtgtttaaagtctcagtttcttgcttggggaacttgtgtccctaatgtgtttagattgctagattgctaaggagctgatactttgacagtgtttttagacctgtgttactaaaaaaaagatgaatgtcctgaaaagggtgttgggagggtggttcaacaaagaaacaaagatgttatggtgtttagatttatggttgttaaaaatgtcatctcaagtcaagtcactggtctgtttgcatttgatacatttttgtactaactagcattgtaaaattatttcatgattagaaattacctgtggatatttgtataaaagtgtgaaataaattttttataaaagtgttcattgtttcgtaacacagcattgtatatgtgaagcaaactctaaaattataaatgacaacctgaattatctatttcatc

SEQ ID NO: 2059 - DNA, 3544 bp, Homo sapiens
  source 1..3544: mol_type = genomic DNA
acgtcgtggcttccgggcaggtaccgggcagctggagacgccagagccggcgggttgctcgtgggggccccgcgggcagaagcgcttccactgcagagagccaacagaacgggagggctgtacagctgcgacatcaccgcccgggggccatgcacgcggatcgagtttgataacgatgctgaccccacgtcagaaagcaaggaagatcagtggatgggggtcaccgtccagagccaaggtccagggggcaaggtcgtgacatgtgctcaccgatatgaaaaaaggcagcatgttaatacgaagcaggaatcccgagacatctttgggcggtgttatgtcctgagtcagaatctcaggattgaagacgatatggatgggggagattggagcttttgtgatgggcgattgagaggccatgagaaatttggctcttgccagcaaggtgtagcagctacttttactaaagactttcattacattgtatttggagccccgggtacttataactggaaaggcctgctgtttttgaccagcgtttcctatacagatcctgatcagtttgtttataaaacacggcctccccgggagcagcctgacacattccctgatgtgatgatgaatagctacctaggtttttctttggactcagggaaaggtattgtttctaaagatgagatcacttttgtatctggtgctcccagagccaatcacagtggagccgtggttttgctgaagagagacatgaagtctgcacatctcctccctgagcacatattcgatggagaaggtctggcctcttcatttggctatgatgtggcggtggtggacctcaacaaggatgggtggcaagatatagttattggagccccacagtattttgatagagatggagaagttggaggtgcagtgtatgtctacatgaaccagcaaggcagatggaataatgtgaagccaattcgtcttaatggaaccaaagattctatgtttggcattgcagtaaaaaatattggagatattaatcaagatggctacccagatattgcagttggagctccgtatgatgacttgggaaaggtttttatctatcatggatctgcaaatggaataaataccaaaccaacacaggttctcaagggtatatcaccttattttggatattcaattgctggaaacatggaccttgatcgaaattcctaccctgatgttgctgttggttccctctcagattcagtaactattttcagatcccggcctgtgattaatattcagaaaaccatcacagtaactcctaacagaattgacctccgccagaaaacagcgtgtggggcgcctagtgggatatgcctccaggttaaatcctgttttgaatatactgctaaccccgctggttataatccttcaatatcaattgtgggcacacttgaagctgaaaaagaaagaagaaaatctgggctatcctcaagagttcagtttcgaaaccaaggttctgagcccaaatatactcaagaactaactctgaagaggcagaaacagaaagtgtgcatggaggaaaccctgtggctacaggataatatcagagataaactgcgtcccattcccataactgcctcagtggagatccaagagccaagctctcgtaggcgagtgaattcacttccagaagttcttccaattctgaattcagatgaacccaagacagctcatattgatgttcacttcttaaaagagggatgtggagacgacaatgtatgtaacagcaaccttaaactagaatataaattttgcacccgagaaggaaatcaagacaaattttcttatttaccaattcaaaaaggtgtaccagaactagttctaaaagatcagaaggatattgctttagaaataacagtgacaaacagcccttccaacccaaggaatcccacaaaagatggcgatgacgcccatgaggctaaactgattgcaacgtttccagacactttaacctattctgcatatagagaactgagggctttccctgagaaacagttgagttgtgttgccaaccagaatggctcgcaagctgactgtgagctcggaaatccttttaaaagaaattcaaatgtcactttttatttggttttaagtacaactgaagtcacctttgacaccccagatctggatattaatctgaagttagaaacaacaagcaatcaagataatttggctccaattacagctaaagcaaaagtggttattgaactgcttttatcggtctcgggagttgctaaaccttcccaggtgtattttggaggtacagttgttggcgagcaagctatgaaatctgaagatgaagtgggaagtttaatagagtatgaattcagggtaataaacttaggtaaacctcttacaaacctcggcacagcaaccttgaacattcagtggccaaaagaaattagcaatgggaaatggttgctttatttggtgaaagtagaatccaaaggattggaaaaggtaacttgtgagccacaaaaggagataaactccctgaacctaacggagtctcacaactcaagaaagaaacgggaaattactgaaaaacagatagatgataacagaaaattttctttatttgctgaaagaaaataccagactcttaactgtagcgtgaacgtgaactgtgtgaacatcagatgcccgctgcgggggctggacagcaaggcgtctcttattttgcgctcgaggttatggaacagcacatttctagaggaatattccaaactgaactacttggacattctcatgcgagccttcattgatgtgactgctgctgccgaaaatatcaggctgccaaatgcaggcactcaggttcgagtgactgtgtttccctcaaagactgtagctcagtattcgggagtaccttggtggatcatcctagtggctattctcgctgggatcttgatgcttgctttattagtgtttatactatggaagtgtggtttcttcaagagaaataagaaagatcattatgatgccacatatcacaaggctgagatccatgctcagccatctgataaagagaggcttacttctgatgcatagtattgatctacttctgtaattgtgtggattctttaaacgctctaggtacgatgacagtgttccccgataccatgctgtaaggatccggaaagaagagcgagagatcaaagatgaaaagtatattgataaccttgaaaaaaaacagtggatcacaaagtggaacgaaaatgaaagctactcatagcgggggcctaaaaaaaaaaagcttcacagtacccaaactgctttttccaactcagaaattcaatttggatttaaaagcctgctcaatccctgaggactgatttcagagtgactacacacagtacgaacctacagttttaactgtggatattgttacgtagcctaaggctcctgttttgcacagccaaatttaaaactgttggaatggatttttctttaactgccgtaatttaactttctgggttgcctttatttttggcgtggctgacttacatcatgtgtt

SEQ ID NO: 2060 - DNA, 3390 bp, Homo sapiens
  source 1..3390: mol_type = genomic DNA
atggccgccgccgggcagctgtgcttgctctacctgtcggcggggctcctgtcccggctcggcgcagccttcaacttggacactcgggaggacaacgtgatccggaaatatggagaccccgggagcctcttcggcttctcgctggccatgcactggcaactgcagcccgaggacaagcggctgttgctcgtgggggccccgcgggcagaagcgcttccactgcagagagccaacagaacgggagggctgtacagctgcgacatcaccgcccgggggccatgcacgcggatcgagtttgataacgatgctgaccccacgtcagaaagcaaggaagatcagtggatgggggtcaccgtccagagccaaggtccagggggcaaggtcgtgacatgtgctcaccgatatgaaaaaaggcagcatgttaatacgaagcaggaatcccgagacatctttgggcggtgttatgtcctgagtcagaatctcaggattgaagacgatatggatgggggagattggagcttttgtgatgggcgattgagaggccatgagaaatttggctcttgccagcaaggtgtagcagctacttttactaaagactttcattacattgtatttggagccccgggtacttataactggaaagggattgttcgtgtagagcaaaagaataacactttttttgacatgaacatctttgaagatgggccttatgaagttggtggagagactgagcatgatgaaagtctcgttcctgttcctgctaacagttacttaggcctgctgtttttgaccagcgtttcctatacagatcctgatcagtttgtttataaaacacggcctccccgggagcagcctgacacattccctgatgtgatgatgaatagctacctaggtttttctttggactcagggaaaggtattgtttctaaagatgagatcacttttgtatctggtgctcccagagccaatcacagtggagccgtggttttgctgaagagagacatgaagtctgcacatctcctccctgagcacatattcgatggagaaggtctggcctcttcatttggctatgatgtggcggtggtggacctcaacaaggatgggtggcaagatatagttattggagccccacagtattttgatagagatggagaagttggaggtgcagtgtatgtctacatgaaccagcaaggcagatggaataatgtgaagccaattcgtcttaatggaaccaaagattctatgtttggcattgcagtaaaaaatattggagatattaatcaagatggctacccagatattgcagttggagctccgtatgatgacttgggaaaggtttttatctatcatggatctgcaaatggaataaataccaaaccaacacaggttctcaagggtatatcaccttattttggatattcaattgctggaaacatggaccttgatcgaaattcctaccctgatgttgctgttggttccctctcagattcagtaactattttcagatcccggcctgtgattaatattcagaaaaccatcacagtaactcctaacagaattgacctccgccagaaaacagcgtgtggggcgcctagtgggatatgcctccaggttaaatcctgttttgaatatactgctaaccccgctggttataatccttcaatatcaattgtgggcacacttgaagctgaaaaagaaagaagaaaatctgggctatcctcaagagttcagtttcgaaaccaaggttctgagcccaaatatactcaagaactaactctgaagaggcagaaacagaaagtgtgcatggaggaaaccctgtggctacaggataatatcagagataaactgcgtcccattcccataactgcctcagtggagatccaagagccaagctctcgtaggcgagtgaattcacttccagaagttcttccaattctgaattcagatgaacccaagacagctcatattgatgttcacttcttaaaagagggatgtggagacgacaatgtatgtaacagcaaccttaaactagaatataaattttgcacccgagaaggaaatcaagacaaattttcttatttaccaattcaaaaaggtgtaccagaactagttctaaaagatcagaaggatattgctttagaaataacagtgacaaacagcccttccaacccaaggaatcccacaaaagatggcgatgacgcccatgaggctaaactgattgcaacgtttccagacactttaacctattctgcatatagagaactgagggctttccctgagaaacagttgagttgtgttgccaaccagaatggctcgcaagctgactgtgagctcggaaatccttttaaaagaaattcaaatgtcactttttatttggttttaagtacaactgaagtcacctttgacaccccagatctggatattaatctgaagttagaaacaacaagcaatcaagataatttggctccaattacagctaaagcaaaagtggttattgaactgcttttatcggtctcgggagttgctaaaccttcccaggtgtattttggaggtacagttgttggcgagcaagctatgaaatctgaagatgaagtgggaagtttaatagagtatgaattcagggtaataaacttaggtaaacctcttacaaacctcggcacagcaaccttgaacattcagtggccaaaagaaattagcaatgggaaatggttgctttatttggtgaaagtagaatccaaaggattggaaaaggtaacttgtgagccacaaaaggagataaactccctgaacctaacggagtctcacaactcaagaaagaaacgggaaattactgaaaaacagatagatgataacagaaaattttctttatttgctgaaagaaaataccagactcttaactgtagcgtgaacgtgaactgtgtgaacatcagatgcccgctgcgggggctggacagcaaggcgtctcttattttgcgctcgaggttatggaacagcacatttctagaggaatattccaaactgaactacttggacattctcatgcgagccttcattgatgtgactgctgctgccgaaaatatcaggctgccaaatgcaggcactcaggttcgagtgactgtgtttccctcaaagactgtagctcagtattcgggagtaccttggtggatcatcctagtggctattctcgctgggatcttgatgcttgctttattagtgtttatactatggaagtgtggattctttaaacgctctaggtacgatgacagtgttccccgataccatgctgtaaggatccggaaagaagagcgagagatcaaagatgaaaagtatattgataaccttgaaaaaaaacagtggatcacaaagtggaacgaaaatgaaagctactca

SEQ ID NO: 2061 - DNA, 3258 bp, Homo sapiens
  source 1..3258: mol_type = genomic DNA
atggccgccgccgggcagctgtgcttgctctacctgtcggcggggctcctgtcccggctcggcgcagccttcaacttggacactcgggaggacaacgtgatccggaaatatggagaccccgggagcctcttcggcttctcgctggccatgcactggcaactgcagcccgaggacaagcggctgttgctcgtgggggccccgcgggcagaagcgcttccactgcagagagccaacagaacgggagggctgtacagctgcgacatcaccgcccgggggccatgcacgcggatcgagtttgataacgatgctgaccccacgtcagaaagcaaggaagatcagtggatgggggtcaccgtccagagccaaggtccagggggcaaggtcgtgacatgtgctcaccgatatgaaaaaaggcagcatgttaatacgaagcaggaatcccgagacatctttgggcggtgttatgtcctgagtcagaatctcaggattgaagacgatatggatgggggagattggagcttttgtgatgggcgattgagaggccatgagaaatttggctcttgccagcaaggtgtagcagctacttttactaaagactttcattacattgtatttggagccccgggtacttataactggaaaggcctgctgtttttgaccagcgtttcctatacagatcctgatcagtttgtttataaaacacggcctccccgggagcagcctgacacattccctgatgtgatgatgaatagctacctaggtttttctttggactcagggaaaggtattgtttctaaagatgagatcacttttgtatctggtgctcccagagccaatcacagtggagccgtggttttgctgaagagagacatgaagtctgcacatctcctccctgagcacatattcgatggagaaggtctggcctcttcatttggctatgatgtggcggtggtggacctcaacaaggatgggtggcaagatatagttattggagccccacagtattttgatagagatggagaagttggaggtgcagtgtatgtctacatgaaccagcaaggcagatggaataatgtgaagccaattcgtcttaatggaaccaaagattctatgtttggcattgcagtaaaaaatattggagatattaatcaagatggctacccagatattgcagttggagctccgtatgatgacttgggaaaggtttttatctatcatggatctgcaaatggaataaataccaaaccaacacaggttctcaagggtatatcaccttattttggatattcaattgctggaaacatggaccttgatcgaaattcctaccctgatgttgctgttggttccctctcagattcagtaactattttcagatcccggcctgtgattaatattcagaaaaccatcacagtaactcctaacagaattgacctccgccagaaaacagcgtgtggggcgcctagtgggatatgcctccaggttaaatcctgttttgaatatactgctaaccccgctggttataatccttcaatatcaattgtgggcacacttgaagctgaaaaagaaagaagaaaatctgggctatcctcaagagttcagtttcgaaaccaaggttctgagcccaaatatactcaagaactaactctgaagaggcagaaacagaaagtgtgcatggaggaaaccctgtggctacaggataatatcagagataaactgcgtcccattcccataactgcctcagtggagatccaagagccaagctctcgtaggcgagtgaattcacttccagaagttcttccaattctgaattcagatgaacccaagacagctcatattgatgttcacttcttaaaagagggatgtggagacgacaatgtatgtaacagcaaccttaaactagaatataaattttgcacccgagaaggaaatcaagacaaattttcttatttaccaattcaaaaaggtgtaccagaactagttctaaaagatcagaaggatattgctttagaaataacagtgacaaacagcccttccaacccaaggaatcccacaaaagatggcgatgacgcccatgaggctaaactgattgcaacgtttccagacactttaacctattctgcatatagagaactgagggctttccctgagaaacagttgagttgtgttgccaaccagaatggctcgcaagctgactgtgagctcggaaatccttttaaaagaaattcaaatgtcactttttatttggttttaagtacaactgaagtcacctttgacaccccagatctggatattaatctgaagttagaaacaacaagcaatcaagataatttggctccaattacagctaaagcaaaagtggttattgaactgcttttatcggtctcgggagttgctaaaccttcccaggtgtattttggaggtacagttgttggcgagcaagctatgaaatctgaagatgaagtgggaagtttaatagagtatgaattcagggtaataaacttaggtaaacctcttacaaacctcggcacagcaaccttgaacattcagtggccaaaagaaattagcaatgggaaatggttgctttatttggtgaaagtagaatccaaaggattggaaaaggtaacttgtgagccacaaaaggagataaactccctgaacctaacggagtctcacaactcaagaaagaaacgggaaattactgaaaaacagatagatgataacagaaaattttctttatttgctgaaagaaaataccagactcttaactgtagcgtgaacgtgaactgtgtgaacatcagatgcccgctgcgggggctggacagcaaggcgtctcttattttgcgctcgaggttatggaacagcacatttctagaggaatattccaaactgaactacttggacattctcatgcgagccttcattgatgtgactgctgctgccgaaaatatcaggctgccaaatgcaggcactcaggttcgagtgactgtgtttccctcaaagactgtagctcagtattcgggagtaccttggtggatcatcctagtggctattctcgctgggatcttgatgcttgctttattagtgtttatactatggaagtgtggattctttaaacgctctaggtacgatgacagtgttccccgataccatgctgtaaggatccggaaagaagagcgagagatcaaagatgaaaagtatattgataaccttgaaaaaaaacagtggatcacaaagtggaacgaaaatgaaagctactca

SEQ ID NO: 2062 - DNA, 4120 bp, Homo sapiens
  source 1..4120: mol_type = genomic DNA
gccggagctgcggctgctgtagttgtcctagccggtgctggggcggcggggtggcggagcggcgggcgggcgggagggctggcggggcgaacgtctgggagacgtctgaaagaccaacgagactttggagaccagagacgcgcctggggggacctggggcttggggcgtgcgagatttcccttgcattcgctgggagctcgcgcagggatcgtcccatggccggggctcggagccgcgacccttggggggcctccgggatttgctacctttttggctccctgctcgtcgaactgctcttctcacgggctgtcgccttcaatctggacgtgatgggtgccttgcgcaaggagggcgagccaggcagcctcttcggcttctctgtggccctgcaccggcagttgcagccccgaccccagagctggctgctggtgggtgctccccaggccctggctcttcctgggcagcaggcgaatcgcactggaggcctcttcgcttgcccgttgagcctggaggagactgactgctacagagtggacatcgaccagggagctgatatgcaaaaggaaagcaaggagaaccagtggttgggagtcagtgttcggagccaggggcctgggggcaagattgttacctgtgcacaccgatatgaggcaaggcagcgagtggaccagatcctggagacgcgggatatgattggtcgctgctttgtgctcagccaggacctggccatccgggatgagttggatggtggggaatggaagttctgtgagggacgcccccaaggccatgaacaatttgggttctgccagcagggcacagctgccgccttctcccctgatagccactacctcctctttggggccccaggaacctataattggaaggggttgctttttgtgaccaacattgatagctcagaccccgaccagctggtgtataaaactttggaccctgctgaccggctcccaggaccagccggagacttggccctcaatagctacttaggcttctctattgactcggggaaaggtctggtgcgtgcagaagagctgagctttgtggctggagccccccgcgccaaccacaagggtgctgtggtcatcctgcgcaaggacagcgccagtcgcctggtgcccgaggttatgctgtctggggagcgcctgacctccggctttggctactcactggctgtggctgacctcaacagtgatggctggccagacctgatagtgggtgccccctacttctttgagcgccaagaagagctggggggtgctgtgtatgtgtacttgaaccaggggggtcactgggctgggatctcccctctccggctctgcggctcccctgactccatgttcgggatcagcctggctgtcctgggggacctcaaccaagatggctttccagatattgcagtgggtgccccctttgatggtgatgggaaagtcttcatctaccatgggagcagcctgggggttgtcgccaaaccttcacaggtgctggagggcgaggctgtgggcatcaagagcttcggctactccctgtcaggcagcttggatatggatgggaaccaataccctgacctgctggtgggctccctggctgacaccgcagtgctcttcagggccagacccatcctccatgtctcccatgaggtctctattgctccacgaagcatcgacctggagcagcccaactgtgctggcggccactcggtctgtgtggacctaagggtctgtttcagctacattgcagtccccagcagctatagccctactgtggccctggactatgtgttagatgcggacacagaccggaggctccggggccaggttccccgtgtgacgttcctgagccgtaacctggaagaacccaagcaccaggcctcgggcaccgtgtggctgaagcaccagcatgaccgagtctgtggagacgccatgttccagctccaggaaaatgtcaaagacaagcttcgggccattgtagtgaccttgtcctacagtctccagacccctcggctccggcgacaggctcctggccaggggctgcctccagtggcccccatcctcaatgcccaccagcccagcacccagcgggcagagatccacttcctgaagcaaggctgtggtgaagacaagatctgccagagcaatctgcagctggtccgcgcccgcttctgtacccgggtcagcgacacggaattccaacctctgcccatggatgtggatggaacaacagccctgtttgcactgagtgggcagccagtcattggcctggagctgatggtcaccaacctgccatcggacccagcccagccccaggctgatggggatgatgcccatgaagcccagctcctggtcatgcttcctgactcactgcactactcaggggtccgggccctggaccctgcggagaagccactctgcctgtccaatgagaatgcctcccatgttgagtgtgagctggggaaccccatgaagagaggtgcccaggtcaccttctacctcatccttagcacctccgggatcagcattgagaccacggaactggaggtagagctgctgttggccacgatcagtgagcaggagctgcatccagtctctgcacgagcccgtgtcttcattgagctgccactgtccattgcaggaatggccattccccagcaactcttcttctctggtgtggtgaggggcgagagagccatgcagtctgagcgggatgtgggcagcaaggtcaagtatgaggtcacggtttccaaccaaggccagtcgctcagaaccctgggctctgccttcctcaacatcatgtggcctcatgagattgccaatgggaagtggttgctgtacccaatgcaggttgagctggagggcgggcaggggcctgggcagaaagggctttgctctcccaggcccaacatcctccacctggatgtggacagtagggataggaggcggcgggagctggagccacctgagcagcaggagcctggtgagcggcaggagcccagcatgtcctggtggccagtgtcctctgctgagaagaagaaaaacatcaccctggactgcgcccggggcacggccaactgtgtggtgttcagctgcccactctacagctttgaccgcgcggctgtgctgcatgtctggggccgtctctggaacagcacctttctggaggagtactcagctgtgaagtccctggaagtgattgtccgggccaacatcacagtgaagtcctccataaagaacttgatgctccgagatgcctccacagtgatcccagtgatggtatacttggaccccatggctgtggtggcagaaggagtgccctggtgggtcatcctcctggctgtactggctgggctgctggtgctagcactgctggtgctgctcctgtggaagatgggattcttcaaacgggcgaagcaccccgaggccaccgtgccccagtaccatgcggtgaagattcctcgggaagaccgacagcagttcaaggaggagaagacgggcaccatcctgaggaacaactggggcagcccccggcgggagggcccggatgcacaccccatcctggctgctgacgggcatcccgagctgggccccgatgggcatccagggccaggcaccgcctaggttcccatgtcccagcctggcctgtggctgccctccatcccttccccagagatggctccttgggatgaagagggtagagtgggctgctggtgtcgcatcaagatttggcaggatcggcttcctcaggggcacagacctctcccacccacaagaactcctcccacccaacttccccttagagtgctgtgagatgagagtgggtaaatcagggacagggccatggggtagggtgagaagggcaggggtgtcctgatgcaaaggtggggagaagggatcctaatcccttcctctcccattcaccctgtgtaacaggaccccaaggacctgcctccccggaagtgccttaacctagagggtcggggaggaggttgtgtcactgactcaggctgctccttctctagtttcccctctcatctgaccttagtttgctgccatcagtctagtggtttcgtggtttcgtctatttattaaaaaatatttgagaacaaaa

SEQ ID NO: 2063 - DNA, 4348 bp, Homo sapiens
  source 1..4348: mol_type = genomic DNA
gggcgccggagctgcggctgctgtagttgtcctagccggtgctggggcggcggggtggcggagcggcgggcgggcgggagggctggcggggcgaacgtctgggagacgtctgaaagaccaacgagactttggagaccagagacgcgcctggggggacctggggcttggggcgtgcgagatttcccttgcattcgctgggagctcgcgcagggatcgtcccatggccggggctcggagccgcgacccttggggggcctccgggatttgctacctttttggctccctgctcgtcgaactgctcttctcacgggctgtcgccttcaatctggacgtgatgggtgccttgcgcaaggagggcgagccaggcagcctcttcggcttctctgtggccctgcaccggcagttgcagccccgaccccagagctggctgctggtgggtgctccccaggccctggctcttcctgggcagcaggcgaatcgcactggaggcctcttcgcttgcccgttgagcctggaggagactgactgctacagagtggacatcgaccagggagctgatatgcaaaaggaaagcaaggagaaccagtggttgggagtcagtgttcggagccaggggcctgggggcaagattgttacctgtgcacaccgatatgaggcaaggcagcgagtggaccagatcctggagacgcgggatatgattggtcgctgctttgtgctcagccaggacctggccatccgggatgagttggatggtggggaatggaagttctgtgagggacgcccccaaggccatgaacaatttgggttctgccagcagggcacagctgccgccttctcccctgatagccactacctcctctttggggccccaggaacctataattggaagggcacggccagggtggagctctgtgcacagggctcagcggacctggcacacctggacgacggtccctacgaggcggggggagagaaggagcaggacccccgcctcatcccggtccctgccaacagctactttgggttgctttttgtgaccaacattgatagctcagaccccgaccagctggtgtataaaactttggaccctgctgaccggctcccaggaccagccggagacttggccctcaatagctacttaggcttctctattgactcggggaaaggtctggtgcgtgcagaagagctgagctttgtggctggagccccccgcgccaaccacaagggtgctgtggtcatcctgcgcaaggacagcgccagtcgcctggtgcccgaggttatgctgtctggggagcgcctgacctccggctttggctactcactggctgtggctgacctcaacagtgatggctggccagacctgatagtgggtgccccctacttctttgagcgccaagaagagctggggggtgctgtgtatgtgtacttgaaccaggggggtcactgggctgggatctcccctctccggctctgcggctcccctgactccatgttcgggatcagcctggctgtcctgggggacctcaaccaagatggctttccagatattgcagtgggtgccccctttgatggtgatgggaaagtcttcatctaccatgggagcagcctgggggttgtcgccaaaccttcacaggtgctggagggcgaggctgtgggcatcaagagcttcggctactccctgtcaggcagcttggatatggatgggaaccaataccctgacctgctggtgggctccctggctgacaccgcagtgctcttcagggccagacccatcctccatgtctcccatgaggtctctattgctccacgaagcatcgacctggagcagcccaactgtgctggcggccactcggtctgtgtggacctaagggtctgtttcagctacattgcagtccccagcagctatagccctactgtggccctggactatgtgttagatgcggacacagaccggaggctccggggccaggttccccgtgtgacgttcctgagccgtaacctggaagaacccaagcaccaggcctcgggcaccgtgtggctgaagcaccagcatgaccgagtctgtggagacgccatgttccagctccaggaaaatgtcaaagacaagcttcgggccattgtagtgaccttgtcctacagtctccagacccctcggctccggcgacaggctcctggccaggggctgcctccagtggcccccatcctcaatgcccaccagcccagcacccagcgggcagagatccacttcctgaagcaaggctgtggtgaagacaagatctgccagagcaatctgcagctggtccgcgcccgcttctgtacccgggtcagcgacacggaattccaacctctgcccatggatgtggatggaacaacagccctgtttgcactgagtgggcagccagtcattggcctggagctgatggtcaccaacctgccatcggacccagcccagccccaggctgatggggatgatgcccatgaagcccagctcctggtcatgcttcctgactcactgcactactcaggggtccgggccctggaccctgcggagaagccactctgcctgtccaatgagaatgcctcccatgttgagtgtgagctggggaaccccatgaagagaggtgcccaggtcaccttctacctcatccttagcacctccgggatcagcattgagaccacggaactggaggtagagctgctgttggccacgatcagtgagcaggagctgcatccagtctctgcacgagcccgtgtcttcattgagctgccactgtccattgcaggaatggccattccccagcaactcttcttctctggtgtggtgaggggcgagagagccatgcagtctgagcgggatgtgggcagcaaggtcaagtatgaggtcacggtttccaaccaaggccagtcgctcagaaccctgggctctgccttcctcaacatcatgtggcctcatgagattgccaatgggaagtggttgctgtacccaatgcaggttgagctggagggcgggcaggggcctgggcagaaagggctttgctctcccaggcccaacatcctccacctggatgtggacagtagggataggaggcggcgggagctggagccacctgagcagcaggagcctggtgagcggcaggagcccagcatgtcctggtggccagtgtcctctgctgagaagaagaaaaacatcaccctggactgcgcccggggcacggccaactgtgtggtgttcagctgcccactctacagctttgaccgcgcggctgtgctgcatgtctggggccgtctctggaacagcacctttctggaggagtactcagctgtgaagtccctggaagtgattgtccgggccaacatcacagtgaagtcctccataaagaacttgatgctccgagatgcctccacagtgatcccagtgatggtatacttggaccccatggctgtggtggcagaaggagtgccctggtgggtcatcctcctggctgtactggctgggctgctggtgctagcactgctggtgctgctcctgtggaagtgtggcttcttccatcggagcagccagagctcatcttttcccaccaactatcaccgggcctgtctggctgtgcagccttcagccatggaagttgggggtccagggactgtgggatgggattcttcaaacgggcgaagcaccccgaggccaccgtgccccagtaccatgcggtgaagattcctcgggaagaccgacagcagttcaaggaggagaagacgggcaccatcctgaggaacaactggggcagcccccggcgggagggcccggatgcacaccccatcctggctgctgacgggcatcccgagctgggccccgatgggcatccagggccaggcaccgcctaggttcccatgtcccagcctggcctgtggctgccctccatcccttccccagagatggctccttgggatgaagagggtagagtgggctgctggtgtcgcatcaagatttggcaggatcggcttcctcaggggcacagacctctcccacccacaagaactcctcccacccaacttccccttagagtgctgtgagatgagagtgggtaaatcagggacagggccatggggtagggtgagaagggcaggggtgtcctgatgcaaaggtggggagaagggatcctaatcccttcctctcccattcaccctgtgtaacaggaccccaaggacctgcctccccggaagtgccttaacctagagggtcggggaggaggttgtgtcactgactcaggctgctccttctctagtttcccctctcatctgaccttagtttgctgccatcagtctagtggtttcgtggtttcgtctatttatt

SEQ ID NO: 2064 - DNA, 3835 bp, Homo sapiens
  source 1..3835: mol_type = genomic DNA
gggcgccggagctgcggctgctgtagttgtcctagccggtgctggggcggcggggtggcggagcggcgggcgggcgggagggctggcggggcgaacgtctgggagacgtctgaaagaccaacgagactttggagaccagagacgcgcctggggggacctggggcttggggcgtgcgagatttcccttgcattcgctgggagctcgcgcagggatcgtcccatggccggggctcggagccgcgacccttggggggcctccgggatttgctacctttttggctccctgctcgtcgaactgctcttctcacgggctgtcgccttcaatctggacgtgatgggtgccttgcgcaaggagggcgagccaggcagcctcttcggcttctctgtggccctgcaccggcagttgcagccccgaccccagagctggctgctggtgggtgctccccaggccctggctcttcctgggcagcaggcgaatcgcactggaggcctcttcgcttgcccgttgagcctggaggagactgactgctacagagtggacatcgaccagggagctgatatgcaaaaggaaagcaaggagaaccagtggttgggagtcagtgttcggagccaggggcctgggggcaagattgttacctgtgcacaccgatatgaggcaaggcagcgagtggaccagatcctggagacgcgggatatgattggtcgctgctttgtgctcagccaggacctggccatccgggatgagttggatggtggggaatggaagttctgtgagggacgcccccaaggccatgaacaatttgggttctgccagcagggcacagctgccgccttctcccctgatagccactacctcctctttggggccccaggaacctataattggaagggcacggccagggtggagctctgtgcacagggctcagcggacctggcacacctggacgacggtccctacgaggcggggggagagaaggagcaggacccccgcctcatcccggtccctgccaacagctactttgggttgctttttgtgaccaacattgatagctcagaccccgaccagctggtgtataaaactttggaccctgctgaccggctcccaggaccagccggagacttggccctcaatagctacttaggcttctctattgactcggggaaaggtctggtgcgtgcagaagagctgagctttgtggctggagccccccgcgccaaccacaagggtgctgtggtcatcctgcgcaaggacagcgccagtcgcctggtgcccgaggttatgctgtctggggagcgcctgacctccggctttggctactcactggctgtggctgacctcaacagtgatggctggccagacctgatagtgggtgccccctacttctttgagcgccaagaagagctggggggtgctgtgtatgtgtacttgaaccaggggggtcactgggctgggatctcccctctccggctctgcggctcccctgactccatgttcgggatcagcctggctgtcctgggggacctcaaccaagatggctttccagatattgcagtgggtgccccctttgatggtgatgggaaagtcttcatctaccatgggagcagcctgggggttgtcgccaaaccttcacaggtgctggagggcgaggctgtgggcatcaagagcttcggctactccctgtcaggcagcttggatatggatgggaaccaataccctgacctgctggtgggctccctggctgacaccgcagtgctcttcagggccagacccatcctccatgtctcccatgaggtctctattgctccacgaagcatcgacctggagcagcccaactgtgctggcggccactcggtctgtgtggacctaagggtctgtttcagctacattgcagtccccagcagctatagccctactgtggccctggactatgtgttagatgcggacacagaccggaggctccggggccaggttccccgtgtgacgttcctgagccgtaacctggaagaacccaagcaccaggccctggaccctgcggagaagccactctgcctgtccaatgagaatgcctcccatgttgagtgtgagctggggaaccccatgaagagaggtgcccaggtcaccttctacctcatccttagcacctccgggatcagcattgagaccacggaactggaggtagagctgctgttggccacgatcagtgagcaggagctgcatccagtctctgcacgagcccgtgtcttcattgagctgccactgtccattgcaggaatggccattccccagcaactcttcttctctggtgtggtgaggggcgagagagccatgcagtctgagcgggatgtgggcagcaaggtcaagtatgaggtcacggtttccaaccaaggccagtcgctcagaaccctgggctctgccttcctcaacatcatgtggcctcatgagattgccaatgggaagtggttgctgtacccaatgcaggttgagctggagggcgggcaggggcctgggcagaaagggctttgctctcccaggcccaacatcctccacctggatgtggacagtagggataggaggcggcgggagctggagccacctgagcagcaggagcctggtgagcggcaggagcccagcatgtcctggtggccagtgtcctctgctgagaagaagaaaaacatcaccctggactgcgcccggggcacggccaactgtgtggtgttcagctgcccactctacagctttgaccgcgcggctgtgctgcatgtctggggccgtctctggaacagcacctttctggaggagtactcagctgtgaagtccctggaagtgattgtccgggccaacatcacagtgaagtcctccataaagaacttgatgctccgagatgcctccacagtgatcccagtgatggtatacttggaccccatggctgtggtggcagaaggagtgccctggtgggtcatcctcctggctgtactggctgggctgctggtgctagcactgctggtgctgctcctgtggaagtgtggcttcttccatcggagcagccagagctcatcttttcccaccaactatcaccgggcctgtctggctgtgcagccttcagccatggaagttgggggtccagggactgtgggatgggattcttcaaacgggcgaagcaccccgaggccaccgtgccccagtaccatgcggtgaagattcctcgggaagaccgacagcagttcaaggaggagaagacgggcaccatcctgaggaacaactggggcagcccccggcgggagggcccggatgcacaccccatcctggctgctgacgggcatcccgagctgggccccgatgggcatccagggccaggcaccgcctaggttcccatgtcccagcctggcctgtggctgccctccatcccttccccagagatggctccttgggatgaagagggtagagtgggctgctggtgtcgcatcaagatttggcaggatcggcttcctcaggggcacagacctctcccacccacaagaactcctcccacccaacttccccttagagtgctgtgagatgagagtgggtaaatcagggacagggccatggggtagggtgagaagggcaggggtgtcctgatgcaaaggtggggagaagggatcctaatcccttcctctcccattcaccctgtgtaacaggaccccaaggacctgcctccccggaagtgccttaacctagagggtcggggaggaggttgtgtcactgactcaggctgctccttctctagtttcccctctcatctgaccttagtttgctgccatcagtctagtggtttcgtggtttcgtctatttatt

SEQ ID NO: 2065 - DNA, 4216 bp, Homo sapiens
  source 1..4216: mol_type = genomic DNA
gggcgccggagctgcggctgctgtagttgtcctagccggtgctggggcggcggggtggcggagcggcgggcgggcgggagggctggcggggcgaacgtctgggagacgtctgaaagaccaacgagactttggagaccagagacgcgcctggggggacctggggcttggggcgtgcgagatttcccttgcattcgctgggagctcgcgcagggatcgtcccatggccggggctcggagccgcgacccttggggggcctccgggatttgctacctttttggctccctgctcgtcgaactgctcttctcacgggctgtcgccttcaatctggacgtgatgggtgccttgcgcaaggagggcgagccaggcagcctcttcggcttctctgtggccctgcaccggcagttgcagccccgaccccagagctggctgctggtgggtgctccccaggccctggctcttcctgggcagcaggcgaatcgcactggaggcctcttcgcttgcccgttgagcctggaggagactgactgctacagagtggacatcgaccagggagctgatatgcaaaaggaaagcaaggagaaccagtggttgggagtcagtgttcggagccaggggcctgggggcaagattgttacctgtgcacaccgatatgaggcaaggcagcgagtggaccagatcctggagacgcgggatatgattggtcgctgctttgtgctcagccaggacctggccatccgggatgagttggatggtggggaatggaagttctgtgagggacgcccccaaggccatgaacaatttgggttctgccagcagggcacagctgccgccttctcccctgatagccactacctcctctttggggccccaggaacctataattggaaggggttgctttttgtgaccaacattgatagctcagaccccgaccagctggtgtataaaactttggaccctgctgaccggctcccaggaccagccggagacttggccctcaatagctacttaggcttctctattgactcggggaaaggtctggtgcgtgcagaagagctgagctttgtggctggagccccccgcgccaaccacaagggtgctgtggtcatcctgcgcaaggacagcgccagtcgcctggtgcccgaggttatgctgtctggggagcgcctgacctccggctttggctactcactggctgtggctgacctcaacagtgatggctggccagacctgatagtgggtgccccctacttctttgagcgccaagaagagctggggggtgctgtgtatgtgtacttgaaccaggggggtcactgggctgggatctcccctctccggctctgcggctcccctgactccatgttcgggatcagcctggctgtcctgggggacctcaaccaagatggctttccagatattgcagtgggtgccccctttgatggtgatgggaaagtcttcatctaccatgggagcagcctgggggttgtcgccaaaccttcacaggtgctggagggcgaggctgtgggcatcaagagcttcggctactccctgtcaggcagcttggatatggatgggaaccaataccctgacctgctggtgggctccctggctgacaccgcagtgctcttcagggccagacccatcctccatgtctcccatgaggtctctattgctccacgaagcatcgacctggagcagcccaactgtgctggcggccactcggtctgtgtggacctaagggtctgtttcagctacattgcagtccccagcagctatagccctactgtggccctggactatgtgttagatgcggacacagaccggaggctccggggccaggttccccgtgtgacgttcctgagccgtaacctggaagaacccaagcaccaggcctcgggcaccgtgtggctgaagcaccagcatgaccgagtctgtggagacgccatgttccagctccaggaaaatgtcaaagacaagcttcgggccattgtagtgaccttgtcctacagtctccagacccctcggctccggcgacaggctcctggccaggggctgcctccagtggcccccatcctcaatgcccaccagcccagcacccagcgggcagagatccacttcctgaagcaaggctgtggtgaagacaagatctgccagagcaatctgcagctggtccgcgcccgcttctgtacccgggtcagcgacacggaattccaacctctgcccatggatgtggatggaacaacagccctgtttgcactgagtgggcagccagtcattggcctggagctgatggtcaccaacctgccatcggacccagcccagccccaggctgatggggatgatgcccatgaagcccagctcctggtcatgcttcctgactcactgcactactcaggggtccgggccctggaccctgcggagaagccactctgcctgtccaatgagaatgcctcccatgttgagtgtgagctggggaaccccatgaagagaggtgcccaggtcaccttctacctcatccttagcacctccgggatcagcattgagaccacggaactggaggtagagctgctgttggccacgatcagtgagcaggagctgcatccagtctctgcacgagcccgtgtcttcattgagctgccactgtccattgcaggaatggccattccccagcaactcttcttctctggtgtggtgaggggcgagagagccatgcagtctgagcgggatgtgggcagcaaggtcaagtatgaggtcacggtttccaaccaaggccagtcgctcagaaccctgggctctgccttcctcaacatcatgtggcctcatgagattgccaatgggaagtggttgctgtacccaatgcaggttgagctggagggcgggcaggggcctgggcagaaagggctttgctctcccaggcccaacatcctccacctggatgtggacagtagggataggaggcggcgggagctggagccacctgagcagcaggagcctggtgagcggcaggagcccagcatgtcctggtggccagtgtcctctgctgagaagaagaaaaacatcaccctggactgcgcccggggcacggccaactgtgtggtgttcagctgcccactctacagctttgaccgcgcggctgtgctgcatgtctggggccgtctctggaacagcacctttctggaggagtactcagctgtgaagtccctggaagtgattgtccgggccaacatcacagtgaagtcctccataaagaacttgatgctccgagatgcctccacagtgatcccagtgatggtatacttggaccccatggctgtggtggcagaaggagtgccctggtgggtcatcctcctggctgtactggctgggctgctggtgctagcactgctggtgctgctcctgtggaagtgtggcttcttccatcggagcagccagagctcatcttttcccaccaactatcaccgggcctgtctggctgtgcagccttcagccatggaagttgggggtccagggactgtgggatgggattcttcaaacgggcgaagcaccccgaggccaccgtgccccagtaccatgcggtgaagattcctcgggaagaccgacagcagttcaaggaggagaagacgggcaccatcctgaggaacaactggggcagcccccggcgggagggcccggatgcacaccccatcctggctgctgacgggcatcccgagctgggccccgatgggcatccagggccaggcaccgcctaggttcccatgtcccagcctggcctgtggctgccctccatcccttccccagagatggctccttgggatgaagagggtagagtgggctgctggtgtcgcatcaagatttggcaggatcggcttcctcaggggcacagacctctcccacccacaagaactcctcccacccaacttccccttagagtgctgtgagatgagagtgggtaaatcagggacagggccatggggtagggtgagaagggcaggggtgtcctgatgcaaaggtggggagaagggatcctaatcccttcctctcccattcaccctgtgtaacaggaccccaaggacctgcctccccggaagtgccttaacctagagggtcggggaggaggttgtgtcactgactcaggctgctccttctctagtttcccctctcatctgaccttagtttgctgccatcagtctagtggtttcgtggtttcgtctatttatt

SEQ ID NO: 2066 - DNA, 4228 bp, Homo sapiens
  source 1..4228: mol_type = genomic DNA
gggcgccggagctgcggctgctgtagttgtcctagccggtgctggggcggcggggtggcggagcggcgggcgggcgggagggctggcggggcgaacgtctgggagacgtctgaaagaccaacgagactttggagaccagagacgcgcctggggggacctggggcttggggcgtgcgagatttcccttgcattcgctgggagctcgcgcagggatcgtcccatggccggggctcggagccgcgacccttggggggcctccgggatttgctacctttttggctccctgctcgtcgaactgctcttctcacgggctgtcgccttcaatctggacgtgatgggtgccttgcgcaaggagggcgagccaggcagcctcttcggcttctctgtggccctgcaccggcagttgcagccccgaccccagagctggctgctggtgggtgctccccaggccctggctcttcctgggcagcaggcgaatcgcactggaggcctcttcgcttgcccgttgagcctggaggagactgactgctacagagtggacatcgaccagggagctgatatgcaaaaggaaagcaaggagaaccagtggttgggagtcagtgttcggagccaggggcctgggggcaagattgttacctgtgcacaccgatatgaggcaaggcagcgagtggaccagatcctggagacgcgggatatgattggtcgctgctttgtgctcagccaggacctggccatccgggatgagttggatggtggggaatggaagttctgtgagggacgcccccaaggccatgaacaatttgggttctgccagcagggcacagctgccgccttctcccctgatagccactacctcctctttggggccccaggaacctataattggaagggcacggccagggtggagctctgtgcacagggctcagcggacctggcacacctggacgacggtccctacgaggcggggggagagaaggagcaggacccccgcctcatcccggtccctgccaacagctactttggcttctctattgactcggggaaaggtctggtgcgtgcagaagagctgagctttgtggctggagccccccgcgccaaccacaagggtgctgtggtcatcctgcgcaaggacagcgccagtcgcctggtgcccgaggttatgctgtctggggagcgcctgacctccggctttggctactcactggctgtggctgacctcaacagtgatggctggccagacctgatagtgggtgccccctacttctttgagcgccaagaagagctggggggtgctgtgtatgtgtacttgaaccaggggggtcactgggctgggatctcccctctccggctctgcggctcccctgactccatgttcgggatcagcctggctgtcctgggggacctcaaccaagatggctttccagatattgcagtgggtgccccctttgatggtgatgggaaagtcttcatctaccatgggagcagcctgggggttgtcgccaaaccttcacaggtgctggagggcgaggctgtgggcatcaagagcttcggctactccctgtcaggcagcttggatatggatgggaaccaataccctgacctgctggtgggctccctggctgacaccgcagtgctcttcagggccagacccatcctccatgtctcccatgaggtctctattgctccacgaagcatcgacctggagcagcccaactgtgctggcggccactcggtctgtgtggacctaagggtctgtttcagctacattgcagtccccagcagctatagccctactgtggccctggactatgtgttagatgcggacacagaccggaggctccggggccaggttccccgtgtgacgttcctgagccgtaacctggaagaacccaagcaccaggcctcgggcaccgtgtggctgaagcaccagcatgaccgagtctgtggagacgccatgttccagctccaggaaaatgtcaaagacaagcttcgggccattgtagtgaccttgtcctacagtctccagacccctcggctccggcgacaggctcctggccaggggctgcctccagtggcccccatcctcaatgcccaccagcccagcacccagcgggcagagatccacttcctgaagcaaggctgtggtgaagacaagatctgccagagcaatctgcagctggtccgcgcccgcttctgtacccgggtcagcgacacggaattccaacctctgcccatggatgtggatggaacaacagccctgtttgcactgagtgggcagccagtcattggcctggagctgatggtcaccaacctgccatcggacccagcccagccccaggctgatggggatgatgcccatgaagcccagctcctggtcatgcttcctgactcactgcactactcaggggtccgggccctggaccctgcggagaagccactctgcctgtccaatgagaatgcctcccatgttgagtgtgagctggggaaccccatgaagagaggtgcccaggtcaccttctacctcatccttagcacctccgggatcagcattgagaccacggaactggaggtagagctgctgttggccacgatcagtgagcaggagctgcatccagtctctgcacgagcccgtgtcttcattgagctgccactgtccattgcaggaatggccattccccagcaactcttcttctctggtgtggtgaggggcgagagagccatgcagtctgagcgggatgtgggcagcaaggtcaagtatgaggtcacggtttccaaccaaggccagtcgctcagaaccctgggctctgccttcctcaacatcatgtggcctcatgagattgccaatgggaagtggttgctgtacccaatgcaggttgagctggagggcgggcaggggcctgggcagaaagggctttgctctcccaggcccaacatcctccacctggatgtggacagtagggataggaggcggcgggagctggagccacctgagcagcaggagcctggtgagcggcaggagcccagcatgtcctggtggccagtgtcctctgctgagaagaagaaaaacatcaccctggactgcgcccggggcacggccaactgtgtggtgttcagctgcccactctacagctttgaccgcgcggctgtgctgcatgtctggggccgtctctggaacagcacctttctggaggagtactcagctgtgaagtccctggaagtgattgtccgggccaacatcacagtgaagtcctccataaagaacttgatgctccgagatgcctccacagtgatcccagtgatggtatacttggaccccatggctgtggtggcagaaggagtgccctggtgggtcatcctcctggctgtactggctgggctgctggtgctagcactgctggtgctgctcctgtggaagtgtggcttcttccatcggagcagccagagctcatcttttcccaccaactatcaccgggcctgtctggctgtgcagccttcagccatggaagttgggggtccagggactgtgggatgggattcttcaaacgggcgaagcaccccgaggccaccgtgccccagtaccatgcggtgaagattcctcgggaagaccgacagcagttcaaggaggagaagacgggcaccatcctgaggaacaactggggcagcccccggcgggagggcccggatgcacaccccatcctggctgctgacgggcatcccgagctgggccccgatgggcatccagggccaggcaccgcctaggttcccatgtcccagcctggcctgtggctgccctccatcccttccccagagatggctccttgggatgaagagggtagagtgggctgctggtgtcgcatcaagatttggcaggatcggcttcctcaggggcacagacctctcccacccacaagaactcctcccacccaacttccccttagagtgctgtgagatgagagtgggtaaatcagggacagggccatggggtagggtgagaagggcaggggtgtcctgatgcaaaggtggggagaagggatcctaatcccttcctctcccattcaccctgtgtaacaggaccccaaggacctgcctccccggaagtgccttaacctagagggtcggggaggaggttgtgtcactgactcaggctgctccttctctagtttcccctctcatctgaccttagtttgctgccatcagtctagtggtttcgtggtttcgtctatttatt

SEQ ID NO: 2067 - DNA, 3763 bp, Homo sapiens
  source 1..3763: mol_type = genomic DNA
gacacagagtgagtagacaaggcttcacatactgggagatctggctgggcttcaagagagggggttggtggtggtgtggctaagttccaaatgttggcctgaagccagtgctcaaagaaagggggcccttgagacagtccaaatggctccctttgccactcccatggttcaagctttgactacaaccagaattcagaggcaggcagaaggattccagtgctggagagaatgtggaacaaggagatctccatttgagggcaaggaaacctgtgcacaccgatatgaggcaaggcagcgagtggaccagatcctggagacgcgggatatgattggtcgctgctttgtgctcagccaggacctggccatccgggatgagttggatggtggggaatggaagttctgtgagggacgcccccaaggccatgaacaatttgggttctgccagcagggcacagctgccgccttctcccctgatagccactacctcctctttggggccccaggaacctataattggaagggcacggccagggtggagctctgtgcacagggctcagcggacctggcacacctggacgacggtccctacgaggcggggggagagaaggagcaggacccccgcctcatcccggtccctgccaacagctactttggcttctctattgactcggggaaaggtctggtgcgtgcagaagagctgagctttgtggctggagccccccgcgccaaccacaagggtgctgtggtcatcctgcgcaaggacagcgccagtcgcctggtgcccgaggttatgctgtctggggagcgcctgacctccggctttggctactcactggctgtggctgacctcaacagtgatggctggccagacctgatagtgggtgccccctacttctttgagcgccaagaagagctggggggtgctgtgtatgtgtacttgaaccaggggggtcactgggctgggatctcccctctccggctctgcggctcccctgactccatgttcgggatcagcctggctgtcctgggggacctcaaccaagatggctttccagatattgcagtgggtgccccctttgatggtgatgggaaagtcttcatctaccatgggagcagcctgggggttgtcgccaaaccttcacaggtgctggagggcgaggctgtgggcatcaagagcttcggctactccctgtcaggcagcttggatatggatgggaaccaataccctgacctgctggtgggctccctggctgacaccgcagtgctcttcagggccagacccatcctccatgtctcccatgaggtctctattgctccacgaagcatcgacctggagcagcccaactgtgctggcggccactcggtctgtgtggacctaagggtctgtttcagctacattgcagtccccagcagctatagccctactgtggccctggactatgtgttagatgcggacacagaccggaggctccggggccaggttccccgtgtgacgttcctgagccgtaacctggaagaacccaagcaccaggcctcgggcaccgtgtggctgaagcaccagcatgaccgagtctgtggagacgccatgttccagctccaggaaaatgtcaaagacaagcttcgggccattgtagtgaccttgtcctacagtctccagacccctcggctccggcgacaggctcctggccaggggctgcctccagtggcccccatcctcaatgcccaccagcccagcacccagcgggcagagatccacttcctgaagcaaggctgtggtgaagacaagatctgccagagcaatctgcagctggtccgcgcccgcttctgtacccgggtcagcgacacggaattccaacctctgcccatggatgtggatggaacaacagccctgtttgcactgagtgggcagccagtcattggcctggagctgatggtcaccaacctgccatcggacccagcccagccccaggctgatggggatgatgcccatgaagcccagctcctggtcatgcttcctgactcactgcactactcaggggtccgggccctggaccctgcggagaagccactctgcctgtccaatgagaatgcctcccatgttgagtgtgagctggggaaccccatgaagagaggtgcccaggtcaccttctacctcatccttagcacctccgggatcagcattgagaccacggaactggaggtagagctgctgttggccacgatcagtgagcaggagctgcatccagtctctgcacgagcccgtgtcttcattgagctgccactgtccattgcaggaatggccattccccagcaactcttcttctctggtgtggtgaggggcgagagagccatgcagtctgagcgggatgtgggcagcaaggtcaagtatgaggtcacggtttccaaccaaggccagtcgctcagaaccctgggctctgccttcctcaacatcatgtggcctcatgagattgccaatgggaagtggttgctgtacccaatgcaggttgagctggagggcgggcaggggcctgggcagaaagggctttgctctcccaggcccaacatcctccacctggatgtggacagtagggataggaggcggcgggagctggagccacctgagcagcaggagcctggtgagcggcaggagcccagcatgtcctggtggccagtgtcctctgctgagaagaagaaaaacatcaccctggactgcgcccggggcacggccaactgtgtggtgttcagctgcccactctacagctttgaccgcgcggctgtgctgcatgtctggggccgtctctggaacagcacctttctggaggagtactcagctgtgaagtccctggaagtgattgtccgggccaacatcacagtgaagtcctccataaagaacttgatgctccgagatgcctccacagtgatcccagtgatggtatacttggaccccatggctgtggtggcagaaggagtgccctggtgggtcatcctcctggctgtactggctgggctgctggtgctagcactgctggtgctgctcctgtggaagatgggattcttcaaacgggcgaagcaccccgaggccaccgtgccccagtaccatgcggtgaagattcctcgggaagaccgacagcagttcaaggaggagaagacgggcaccatcctgaggaacaactggggcagcccccggcgggagggcccggatgcacaccccatcctggctgctgacgggcatcccgagctgggccccgatgggcatccagggccaggcaccgcctaggttcccatgtcccagcctggcctgtggctgccctccatcccttccccagagatggctccttgggatgaagagggtagagtgggctgctggtgtcgcatcaagatttggcaggatcggcttcctcaggggcacagacctctcccacccacaagaactcctcccacccaacttccccttagagtgctgtgagatgagagtgggtaaatcagggacagggccatggggtagggtgagaagggcaggggtgtcctgatgcaaaggtggggagaagggatcctaatcccttcctctcccattcaccctgtgtaacaggaccccaaggacctgcctccccggaagtgccttaacctagagggtcggggaggaggttgtgtcactgactcaggctgctccttctctagtttcccctctcatctgaccttagtttgctgccatcagtctagtggtttcgtggtttcgtctatttattaaaaaatatttgagaac

SEQ ID NO: 2068 - DNA, 3935 bp, Homo sapiens
  source 1..3935: mol_type = genomic DNA
ctcgcgcagggatcgtcccatggccggggctcggagccgcgacccttggggggcctccgggatttgctacctttttggctccctgctcgtcgaactgctcttctcacgggctgtcgccttcaatctggacgtgatgggtgccttgcgcaaggagggcgagccaggcagcctcttcggcttctctgtggccctgcaccggcagttgcagccccgaccccagagctggctgctggtgggtgctccccaggccctggctcttcctgggcagcaggcgaatcgcactggaggcctcttcgcttgcccgttgagcctggaggagactgactgctacagagtggacatcgaccagggagctgatatgcaaaaggaaagcaaggagaaccagtggttgggagtcagtgttcggagccaggggcctgggggcaagattgttacctgtgcacaccgatatgaggcaaggcagcgagtggaccagatcctggagacgcgggatatgattggtcgctgctttgtgctcagccaggacctggccatccgggatgagttggatggtggggaatggaagttctgtgagggacgcccccaaggccatgaacaatttgggttctgccagcagggcacagctgccgccttctcccctgatagccactacctcctctttggggccccaggaacctataattggaagggcacggccagggtggagctctgtgcacagggctcagcggacctggcacacctggacgacggtccctacgaggcggggggagagaaggagcaggacccccgcctcatcccggtccctgccaacagctactttggcttctctattgactcggggaaaggtctggtgcgtgcagaagagctgagctttgtggctggagccccccgcgccaaccacaagggtgctgtggtcatcctgcgcaaggacagcgccagtcgcctggtgcccgaggttatgctgtctggggagcgcctgacctccggctttggctactcactggctgtggctgacctcaacagtgatggctggccagacctgatagtgggtgccccctacttctttgagcgccaagaagagctggggggtgctgtgtatgtgtacttgaaccaggggggtcactgggctgggatctcccctctccggctctgcggctcccctgactccatgttcgggatcagcctggctgtcctgggggacctcaaccaagatggctttccagatattgcagtgggtgccccctttgatggtgatgggaaagtcttcatctaccatgggagcagcctgggggttgtcgccaaaccttcacaggtgctggagggcgaggctgtgggcatcaagagcttcggctactccctgtcaggcagcttggatatggatgggaaccaataccctgacctgctggtgggctccctggctgacaccgcagtgctcttcagggccagacccatcctccatgtctcccatgaggtctctattgctccacgaagcatcgacctggagcagcccaactgtgctggcggccactcggtctgtgtggacctaagggtctgtttcagctacattgcagtccccagcagctatagccctactgtggccctggactatgtgttagatgcggacacagaccggaggctccggggccaggttccccgtgtgacgttcctgagccgtaacctggaagaacccaagcaccaggcctcgggcaccgtgtggctgaagcaccagcatgaccgagtctgtggagacgccatgttccagctccaggaaaatgtcaaagacaagcttcgggccattgtagtgaccttgtcctacagtctccagacccctcggctccggcgacaggctcctggccaggggctgcctccagtggcccccatcctcaatgcccaccagcccagcacccagcgggcagagatccacttcctgaagcaaggctgtggtgaagacaagatctgccagagcaatctgcagctggtccgcgcccgcttctgtacccgggtcagcgacacggaattccaacctctgcccatggatgtggatggaacaacagccctgtttgcactgagtgggcagccagtcattggcctggagctgatggtcaccaacctgccatcggacccagcccagccccaggctgatggggatgatgcccatgaagcccagctcctggtcatgcttcctgactcactgcactactcaggggtccgggccctggaccctgcggagaagccactctgcctgtccaatgagaatgcctcccatgttgagtgtgagctggggaaccccatgaagagaggtgcccaggtcaccttctacctcatccttagcacctccgggatcagcattgagaccacggaactggaggtagagctgctgttggccacgatcagtgagcaggagctgcatccagtctctgcacgagcccgtgtcttcattgagctgccactgtccattgcaggaatggccattccccagcaactcttcttctctggtgtggtgaggggcgagagagccatgcagtctgagcgggatgtgggcagcaaggtcaagtatgaggtcacggtttccaaccaaggccagtcgctcagaaccctgggctctgccttcctcaacatcatgtggcctcatgagattgccaatgggaagtggttgctgtacccaatgcaggttgagctggagggcgggcaggggcctgggcagaaagggctttgctctcccaggcccaacatcctccacctggatgtggacagtagggataggaggcggcgggagctggagccacctgagcagcaggagcctggtgagcggcaggagcccagcatgtcctggtggccagtgtcctctgctgagaagaagaaaaacatcaccctggactgcgcccggggcacggccaactgtgtggtgttcagctgcccactctacagctttgaccgcgcggctgtgctgcatgtctggggccgtctctggaacagcacctttctggaggagtactcagctgtgaagtccctggaagtgattgtccgggccaacatcacagtgaagtcctccataaagaacttgatgctccgagatgcctccacagtgatcccagtgatggtatacttggaccccatggctgtggtggcagaaggagtgccctggtgggtcatcctcctggctgtactggctgggctgctggtgctagcactgctggtgctgctcctgtggaagatgggattcttcaaacgggcgaagcaccccgaggccaccgtgccccagtaccatgcggtgaagattcctcgggaagaccgacagcagttcaaggaggagaagacgggcaccatcctgaggaacaactggggcagcccccggcgggagggcccggatgcacaccccatcctggctgctgacgggcatcccgagctgggccccgatgggcatccagggccaggcaccgcctaggttcccatgtcccagcctggcctgtggctgccctccatcccttccccagagatggctccttgggatgaagagggtagagtgggctgctggtgtcgcatcaagatttggcaggatcggcttcctcaggggcacagacctctcccacccacaagaactcctcccacccaacttccccttagagtgctgtgagatgagagtgggtaaatcagggacagggccatggggtagggtgagaagggcaggggtgtcctgatgcaaaggtggggagaagggatcctaatcccttcctctcccattcaccctgtgtaacaggaccccaaggacctgcctccccggaagtgccttaacctagagggtcggggaggaggttgtgtcactgactcaggctgctccttctctagtttcccctctcatctgaccttagtttgctgccatcagtctagtggtttcgtggtttcgtctatttattaaaaaatatttgagaacaaaa

SEQ ID NO: 2069 - DNA, 3930 bp, Homo sapiens
  source 1..3930: mol_type = genomic DNA
tcgctgggagctcgcgcagggatcgtcccatggccggggctcggagccgcgacccttggggggcctccgggatttgctacctttttggctccctgctcgtcgaactgctcttctcacgggctgtcgccttcaatctggacgtgatgggtgccttgcgcaaggagggcgagccaggcagcctcttcggcttctctgtggccctgcaccggcagttgcagccccgaccccagagctggctgctggtgggtgctccccaggccctggctcttcctgggcagcaggcgaatcgcactggaggcctcttcgcttgcccgttgagcctggaggagactgactgctacagagtggacatcgaccagggagctgatatgcaaaaggaaagcaaggagaaccagtggttgggagtcagtgttcggagccaggggcctgggggcaagattgttacctgtgcacaccgatatgaggcaaggcagcgagtggaccagatcctggagacgcgggatatgattggtcgctgctttgtgctcagccaggacctggccatccgggatgagttggatggtggggaatggaagttctgtgagggacgcccccaaggccatgaacaatttgggttctgccagcagggcacagctgccgccttctcccctgatagccactacctcctctttggggccccaggaacctataattggaagggcacggccagggtggagctctgtgcacagggctcagcggacctggcacacctggacgacggtccctacgaggcggggggagagaaggagcaggacccccgcctcatcccggtccctgccaacagctactttgggttgctttttgtgaccaacattgatagctcagaccccgaccagctggtgtataaaactttggaccctgctgaccggctcccaggaccagccggagacttggccctcaatagctacttaggcttctctattgactcggggaaaggtctggtgcgtgcagaagagctgagctttgtggctggagccccccgcgccaaccacaagggtgctgtggtcatcctgcgcaaggacagcgccagtcgcctggtgcccgaggttatgctgtctggggagcgcctgacctccggctttggctactcactggctgtggctgacctcaacagtgatggctggccagacctgatagtgggtgccccctacttctttgagcgccaagaagagctggggggtgctgtgtatgtgtacttgaaccaggggggtcactgggctgggatctcccctctccggctctgcggctcccctgactccatgttcgggatcagcctggctgtcctgggggacctcaaccaagatggctttccagatattgcagtgggtgccccctttgatggtgatgggaaagtcttcatctaccatgggagcagcctgggggttgtcgccaaaccttcacaggtgctggagggcgaggctgtgggcatcaagagcttcggctactccctgtcaggcagcttggatatggatgggaaccaataccctgacctgctggtgggctccctggctgacaccgcagtgctcttcagggccagacccatcctccatgtctcccatgaggtctctattgctccacgaagcatcgacctggagcagcccaactgtgctggcggccactcggtctgtgtggacctaagggtctgtttcagctacattgcagtccccagcagctatagccctactgtggccctggactatgtgttagatgcggacacagaccggaggctccggggccaggttccccgtgtgacgttcctgagccgtaacctggaagaacccaagcaccaggcctcgggcaccgtgtggctgaagcaccagcatgaccgagtctgtggagacgccatgttccagctccaggaaaatgtcaaagacaagcttcgggccattgtagtgaccttgtcctacagtctccagacccctcggctccggcgacaggctcctggccaggggctgcctccagtggcccccatcctcaatgcccaccagcccagcacccagcgggcagagatccacttcctgaagcaaggctgtggtgaagacaagatctgccagagcaatctgcagctggtccgcgcccgcttctgtacccgggtcagcgacacggaattccaacctctgcccatggatgtggatggaacaacagccctgtttgcactgagtgggcagccagtcattggcctggagctgatggtcaccaacctgccatcggacccagcccagccccaggctgatggggatgatgcccatgaagcccagctcctggtcatgcttcctgactcactgcactactcaggggtccgggccctggaccctgcggagaagccactctgcctgtccaatgagaatgcctcccatgttgagtgtgagctggggaaccccatgaagagaggtgcccaggtcaccttctacctcatccttagcacctccgggatcagcattgagaccacggaactggaggtagagctgctgttggccacgatcagtgagcaggagctgcatccagtctctgcacgagcccgtgtcttcattgagctgccactgtccattgcaggaatggccattccccagcaactcttcttctctggtgtggtgaggggcgagagagccatgcagtctgagcgggatgtgggcagcaaggtcaagtatgaggtcacggtttccaaccaaggccagtcgctcagaaccctgggctctgccttcctcaacatcatgtggcctcatgagattgccaatgggaagtggttgctgtacccaatgcaggttgagctggagggcgggcaggggcctgggcagaaagggctttgctctcccaggcccaacatcctccacctggatgtggacagtagggataggaggcggcgggagctggagccacctgagcagcaggagcctggtgagcggcaggagcccagcatgtcctggtggccagtgtcctctgctgagaagaagaaaaacatcaccctggactgcgcccggggcacggccaactgtgtggtgttcagctgcccactctacagctttgaccgcgcggctgtgctgcatgtctggggccgtctctggaacagcacctttctggaggagtactcagctgtgaagtccctggaagtgattgtccgggccaacatcacagtgaagtcctccataaagaacttgatgctccgagatgcctccacagtgatcccagtgatggtatacttggaccccatggctgtggtggcagaaggagtgccctggtgggtcatcctcctggctgtactggctgggctgctggtgctagcactgctggtgctgctcctgtggaagatgggattcttcaaacgggcgaagcaccccgaggccaccgtgccccagtaccatgcggtgaagattcctcgggaagaccgacagcagttcaaggaggagaagacgggcaccatcctgaggaacaactggggcagcccccggcgggagggcccggatgcacaccccatcctggctgctgacgggcatcccgagctgggccccgatgggcatccagggccaggcaccgcctaggttcccatgtcccagcctggcctgtggctgccctccatcccttccccagagatggctccttgggatgaagagggtagagtgggctgctggtgtcgcatcaagatttggcaggatcggcttcctcaggggcacagacctctcccacccacaagaactcctcccacccaacttccccttagagtgctgtgagatgagagtgggtaaatcagggacagggccatggggtagggtgagaagggcaggggtgtcctgatgcaaaggtggggagaagggatcctaatcccttcctctcccattcaccctgtgtaacaggaccccaaggacctgcctccccggaagtgccttaacctagagg

SEQ ID NO: 2070 - DNA, 7030 bp, Homo sapiens
  source 1..7030: mol_type = genomic DNA
cctcagacgctgcgtggagcggcggagccggagggaagcaaaggaccgtctgcgctgctgtccccgccccgcgcgctctgcgcccctcgtccctggcggtcgctccgaagctcagccctcttgcctgccccggagctgtcccgggctagccgagaagagagcggccggcaagtttgggcgcgcgcaggcggcgggccgcgggcactgggcgcctcgctggggcggggggaggtggctaccgctcccggcttggcgtcccgcgcgcacttcggcgatggcttttccgccgcggcgacggctgcgcctcggtccccgcggcctcccgcttcttctctcgggactcctgctacctctgtgccgcgccttcaacctagacgtggacagtcctgccgagtactctggccccgagggaagttacttcggcttcgccgtggatttcttcgtgcccagcgcgtcttcccggatgtttcttctcgtgggagctcccaaagcaaacaccacccagcctgggattgtggaaggagggcaggtcctcaaatgtgactggtcttctacccgccggtgccagccaattgaatttgatgcaacaggcaatagagattatgccaaggatgatccattggaatttaagtcccatcagtggtttggagcatctgtgaggtcgaaacaggataaaattttggcctgtgccccattgtaccattggagaactgagatgaaacaggagcgagagcctgttggaacatgctttcttcaagatggaacaaagactgttgagtatgctccatgtagatcacaagatattgatgctgatggacagggattttgtcaaggaggattcagcattgattttactaaagctgacagagtacttcttggtggtcctggtagcttttattggcaaggtcagcttatttcggatcaagtggcagaaatcgtatctaaatacgaccccaatgtttacagcatcaagtataataaccaattagcaactcggactgcacaagctatttttgatgacagctatttgggttattctgtggctgtcggagatttcaatggtgatggcatagatgactttgtttcaggagttccaagagcagcaaggactttgggaatggtttatatttatgatgggaagaacatgtcctccttatacaattttactggcgagcagatggctgcatatttcggattttctgtagctgccactgacattaatggagatgattatgcagatgtgtttattggagcacctctcttcatggatcgtggctctgatggcaaactccaagaggtggggcaggtctcagtgtctctacagagagcttcaggagacttccagacgacaaagctgaatggatttgaggtctttgcacggtttggcagtgccatagctcctttgggagatctggaccaggatggtttcaatgatattgcaattgctgctccatatgggggtgaagataaaaaaggaattgtttatatcttcaatggaagatcaacaggcttgaacgcagtcccatctcaaatccttgaagggcagtgggctgctcgaagcatgccaccaagctttggctattcaatgaaaggagccacagatatagacaaaaatggatatccagacttaattgtaggagcttttggtgtagatcgagctatcttatacagggccagaccagttatcactgtaaatgctggtcttgaagtgtaccctagcattttaaatcaagacaataaaacctgctcactgcctggaacagctctcaaagtttcctgttttaatgttaggttctgcttaaaggcagatggcaaaggagtacttcccaggaaacttaatttccaggtggaacttcttttggataaactcaagcaaaagggagcaattcgacgagcactgtttctctacagcaggtccccaagtcactccaagaacatgactatttcaagggggggactgatgcagtgtgaggaattgatagcgtatctgcgggatgaatctgaatttagagacaaactcactccaattactatttttatggaatatcggttggattatagaacagctgctgatacaacaggcttgcaacccattcttaaccagttcacgcctgctaacattagtcgacaggctcacattctacttgactgtggtgaagacaatgtctgtaaacccaagctggaagtttctgtagatagtgatcaaaagaagatctatattggggatgacaaccctctgacattgattgttaaggctcagaatcaaggagaaggtgcctacgaagctgagctcatcgtttccattccactgcaggctgatttcatcggggttgtccgaaacaatgaagccttagcaagactttcctgtgcatttaagacagaaaaccaaactcgccaggtggtatgtgaccttggaaacccaatgaaggctggaactcaactcttagctggtcttcgtttcagtgtgcaccagcagtcagagatggatacttctgtgaaatttgacttacaaatccaaagctcaaatctatttgacaaagtaagcccagttgtatctcacaaagttgatcttgctgttttagctgcagttgagataagaggagtctcgagtcctgatcatgtctttcttccgattccaaactgggagcacaaggagaaccctgagactgaagaagatgttgggccagttgttcagcacatctatgagctgagaaacaatggtccaagttcattcagcaaggcaatgctccatcttcagtggccttacaaatataataataacactctgttgtatatccttcattatgatattgatggaccaatgaactgcacttcagatatggagatcaaccctttgagaattaagatctcatctttgcaaacaactgaaaagaatgacacggttgccgggcaaggtgagcgggaccatctcatcactaagcgggatcttgccctcagtgaaggagatattcacactttgggttgtggagttgctcagtgcttgaagattgtctgccaagttgggagattagacagaggaaagagtgcaatcttgtacgtaaagtcattactgtggactgagacttttatgaataaagaaaatcagaatcattcctattctctgaagtcgtctgcttcatttaatgtcatagagtttccttataagaatcttccaattgaggatatcaccaactccacattggttaccactaatgtcacctggggcattcagccagcgcccatgcctgtgcctgtgtgggtgatcattttagcagttctagcaggattgttgctactggctgttttggtatttgtaatgtacaggatgggcttttttaaacgggtccggccacctcaagaagaacaagaaagggagcagcttcaacctcatgaaaatggtgaaggaaactcagaaacttaactgcagtttttaagttatgctacatcttgacccactagaattagcaactttattatagatttaaactttcttcatgaggagtaaaaatccaaggctttactgctgatagtgctaattggcattaaccacaaaatgagaattatatttgtcaaccttctccttataaataagttcagacatacatttaataacatagggtgacttgtgtttttaggtatttaaataataaaatttcaagggatagtttttattcaatgtatataagacaggtagtgcctgatttactactttatataaaatagtacctccttcagttactgtttctgatttaatgtacggaactttatttgttgttgttgttgttgttgttgttgttgttttaaagcagtccaaatttggaccttagcaatcatgtcttttgtataggtacttaatgttaatacatattacactacagtttacttttcagaatactaaagactttataactgcatgaacttggatttttttaatcactcatatggtagaattttataaacacatacatgataccatccaaattcttgcttttaataacaaaggtacaatattttgttttagtatgaaaatctggtagatcctattacacttctgtttatattaaatccacaatattttattacatttttaacttgtataaattttaggtcaaatccttcaagccaacctatactaaaaattagttccataatcacaaatggctcttttgtgtaattgtttaatttcacctgaatatcataatgcttaaagccatatggagttggaaattatttccaaagcatatttattccattgttttagtctggctatttacagtataaaaaaagcatttttattaaaatactgtgtagttctttgagatagttgcttatgcatatagtaagtattacattcttagagtagagcagagtttttagttagtattaatttattttcctccattcatgtacttttccttatatttccaaaactgttactgagaatgggtcaagatcagtgagaaatctttacagttgacaggaacctggaccccttaccccaactttatgagtaatgcttggaataaaaactcttaaggcaactcactgatttacttctagcaatagcatgatgttacaggaatattacctctgtttaagcaaggtaatgtgtaaaatcagtctcggctgtcagaataacttctaaaaggtatttttataagcagttcaagttactgaaaaccttttaaacctttctgaagttcgttagtataaattacttttctaggattattaataaaagccacataggtggcaagttgtagttttatatggctctgtagagtggtgaaccttctagaggaatatatgatttattcacagttcctcaaggcctggggatgatgatcagttatacctatttttgtgcaattacatcatgttgtacattagaaatggagagtttaatagctctttaactgctgtcctcattaggtaatgataaatatttcccttaaataattgactattttgctgtgttttaaaaatgattgaaatttatcttgccatatctcataatttcatgcacaagttgactgagctaatcttgagaatatattcgtaaaataggagcacatttagttgaggtatacaaggtaggactctagacaaaaccttctattttagctttagtgaatttcaaaagtaatgggtcttggagtatagatttttattagtagcttgaaagagcttaatcatatgcagtaagtatttttattaccaataaatttaaaattttttaagaaaaatatttttatcctagggccaagtgttgcctgccaccaatcagtaagttagtctataacaaattttaccctaacagttttaccacctagtaacagtcatttctgaaaatatgttggatagaaagtcactctttggcaaaagtgttagaatttgcttttgtgccatctattccttttatggcatctatcttgaaagtaatcttgtattggagattgaaagatgctgtaatttagaaattaacatgatatcttaaattacctttatgaaatatagttttgtataatagcatagattttccttcaaaaaatgaacatttatatatctacaaaaatatggagaagagtaatttgaaagcctactttctgaagaaaatggtgggatttttttttatcatgattaaatatcaaaaaattgccctatgaaaactttaaatctctaaaacatttgaaatactaccatatttgtgatttattgagaataaaaatccattttgaaatgtaaaatttttatgatctgattcagttttaagaaaacatgaatgaactagaagatattaaaaacatttgacattggtaagaaatattgatactgatattgatttttatataggtatttatttcagaattgatattttgagaaaaatacatgtgagtcattttttctgtttctcttttctcttaacgattatcactgtaattctgaatctgaaaggtaaaacaattagtcaaaatattattgccatcattctacctgtgttatgaaactacttattcatagttaattctcattaacacttacatttccataaagaaaactcaagtattaataaaagagactttactggcttaagagggctgtgaaagatttttgatagtgaatcatgaccctaagggagagatttgtgtgataaaagtattgtatataatagatcagcgatttttgtaaggcaaacagaatttgtaagttggcagatcttcctaagttgcaaaatgtaatgatgagcttggtggagaagaatgagtcgttcttggaatacctatgtgcagccactacccatctcaatgtcaccttgtttgcattcttggatagcttgtatatgtagtagtttgatgaataatttaaagaaaaacacctaaaatttgaaaaatgattgtaggatcaaaaaaggcagatgaaattacttaatactcagtgttttggagagtattccttttagtttgttggttggctggtttgaacgatagaaatatgcagcatgcaatatatgcttatatttcattttaatttctgatatataatgaacttcttgggagaggtactgaatctttgatgttttttgtcattgttctcaagtgcaatataacaatgtaaccaaatctagataatttcaaagttgtcattaatttagtaagcctaatataaacaaatatttgtattatttttgttagcaggaaagagtgattaagtgaggttatttacccctaaatggtccattctgcattgtatttcaggctggaaatgaattattctttaccagttttgaaacactttgaaatatcctaaggtaacttggaagctgtgtagtatatcaaattaatttgctacctaataacatagaaagtaaatatctttgtggtcacccacattgggtgagacagaaaatgaatctgttctaaaatttgtaatttgctaacttgatttgagttagtgaaaactggtacagtgttctgcttgatttacaacatgtaacttgtgactgtacaataaacataagcatatggtacca

SEQ ID NO: 2071 - DNA, 6903 bp, Homo sapiens
  source 1..6903: mol_type = genomic DNA
ggagcggcggagccggagggaagcaaaggaccgtctgcgctgctgtccccgccccgcgcgctctgcgcccctcgtccctggcggtcgctccgaagctcagccctcttgcctgccccggagctgtcccgggctagccgagaagagagcggccggcaagtttgggcgcgcgcaggcggcgggccgcgggcactgggcgcctcgctggggcggggggaggtggctaccgctcccggcttggcgtcccgcgcgcacttcggcgatggcttttccgccgcggcgacggctgcgcctcggtccccgcggcctcccgcttcttctctcgggactcctgctacctctgtgccgcgccttcaacctagacgtggacagtcctgccgagtactctggccccgagggaagttacttcggcttcgccgtggatttcttcgtgcccagcgcgtcttcccggatgtttcttctcgtgggagctcccaaagcaaacaccacccagcctgggattgtggaaggagggcaggtcctcaaatgtgactggtcttctacccgccggtgccagccaattgaatttgatgcaacaggcaatagagattatgccaaggatgatccattggaatttaagtcccatcagtggtttggagcatctgtgaggtcgaaacaggataaaattttggcctgtgccccattgtaccattggagaactgagatgaaacaggagcgagagcctgttggaacatgctttcttcaagatggaacaaagactgttgagtatgctccatgtagatcacgtcagcttatttcggatcaagtggcagaaatcgtatctaaatacgaccccaatgtttacagcatcaagtataataaccaattagcaactcggactgcacaagctatttttgatgacagctatttgggttattctgtggctgtcggagatttcaatggtgatggcatagatgactttgtttcaggagttccaagagcagcaaggactttgggaatggtttatatttatgatgggaagaacatgtcctccttatacaattttactggcgagcagatggctgcatatttcggattttctgtagctgccactgacattaatggagatgattatgcagatgtgtttattggagcacctctcttcatggatcgtggctctgatggcaaactccaagaggtggggcaggtctcagtgtctctacagagagcttcaggagacttccagacgacaaagctgaatggatttgaggtctttgcacggtttggcagtgccatagctcctttgggagatctggaccaggatggtttcaatgatattgcaattgctgctccatatgggggtgaagataaaaaaggaattgtttatatcttcaatggaagatcaacaggcttgaacgcagtcccatctcaaatccttgaagggcagtgggctgctcgaagcatgccaccaagctttggctattcaatgaaaggagccacagatatagacaaaaatggatatccagacttaattgtaggagcttttggtgtagatcgagctatcttatacagggccagaccagttatcactgtaaatgctggtcttgaagtgtaccctagcattttaaatcaagacaataaaacctgctcactgcctggaacagctctcaaagtttcctgttttaatgttaggttctgcttaaaggcagatggcaaaggagtacttcccaggaaacttaatttccaggtggaacttcttttggataaactcaagcaaaagggagcaattcgacgagcactgtttctctacagcaggtccccaagtcactccaagaacatgactatttcaagggggggactgatgcagtgtgaggaattgatagcgtatctgcgggatgaatctgaatttagagacaaactcactccaattactatttttatggaatatcggttggattatagaacagctgctgatacaacaggcttgcaacccattcttaaccagttcacgcctgctaacattagtcgacaggctcacattctacttgactgtggtgaagacaatgtctgtaaacccaagctggaagtttctgtagatagtgatcaaaagaagatctatattggggatgacaaccctctgacattgattgttaaggctcagaatcaaggagaaggtgcctacgaagctgagctcatcgtttccattccactgcaggctgatttcatcggggttgtccgaaacaatgaagccttagcaagactttcctgtgcatttaagacagaaaaccaaactcgccaggtggtatgtgaccttggaaacccaatgaaggctggaactcaactcttagctggtcttcgtttcagtgtgcaccagcagtcagagatggatacttctgtgaaatttgacttacaaatccaaagctcaaatctatttgacaaagtaagcccagttgtatctcacaaagttgatcttgctgttttagctgcagttgagataagaggagtctcgagtcctgatcatgtctttcttccgattccaaactgggagcacaaggagaaccctgagactgaagaagatgttgggccagttgttcagcacatctatgagctgagaaacaatggtccaagttcattcagcaaggcaatgctccatcttcagtggccttacaaatataataataacactctgttgtatatccttcattatgatattgatggaccaatgaactgcacttcagatatggagatcaaccctttgagaattaagatctcatctttgcaaacaactgaaaagaatgacacggttgccgggcaaggtgagcgggaccatctcatcactaagcgggatcttgccctcagtgaaggagatattcacactttgggttgtggagttgctcagtgcttgaagattgtctgccaagttgggagattagacagaggaaagagtgcaatcttgtacgtaaagtcattactgtggactgagacttttatgaataaagaaaatcagaatcattcctattctctgaagtcgtctgcttcatttaatgtcatagagtttccttataagaatcttccaattgaggatatcaccaactccacattggttaccactaatgtcacctggggcattcagccagcgcccatgcctgtgcctgtgtgggtgatcattttagcagttctagcaggattgttgctactggctgttttggtatttgtaatgtacaggatgggcttttttaaacgggtccggccacctcaagaagaacaagaaagggagcagcttcaacctcatgaaaatggtgaaggaaactcagaaacttaactgcagtttttaagttatgctacatcttgacccactagaattagcaactttattatagatttaaactttcttcatgaggagtaaaaatccaaggctttactgctgatagtgctaattggcattaaccacaaaatgagaattatatttgtcaaccttctccttataaataagttcagacatacatttaataacatagggtgacttgtgtttttaggtatttaaataataaaatttcaagggatagtttttattcaatgtatataagacaggtagtgcctgatttactactttatataaaatagtacctccttcagttactgtttctgatttaatgtacggaactttatttgttgttgttgttgttgttgttgttgttgttttaaagcagtccaaatttggaccttagcaatcatgtcttttgtataggtacttaatgttaatacatattacactacagtttacttttcagaatactaaagactttataactgcatgaacttggatttttttaatcactcatatggtagaattttataaacacatacatgataccatccaaattcttgcttttaataacaaaggtacaatattttgttttagtatgaaaatctggtagatcctattacacttctgtttatattaaatccacaatattttattacatttttaacttgtataaattttaggtcaaatccttcaagccaacctatactaaaaattagttccataatcacaaatggctcttttgtgtaattgtttaatttcacctgaatatcataatgcttaaagccatatggagttggaaattatttccaaagcatatttattccattgttttagtctggctatttacagtataaaaaaagcatttttattaaaatactgtgtagttctttgagatagttgcttatgcatatagtaagtattacattcttagagtagagcagagtttttagttagtattaatttattttcctccattcatgtacttttccttatatttccaaaactgttactgagaatgggtcaagatcagtgagaaatctttacagttgacaggaacctggaccccttaccccaactttatgagtaatgcttggaataaaaactcttaaggcaactcactgatttacttctagcaatagcatgatgttacaggaatattacctctgtttaagcaaggtaatgtgtaaaatcagtctcggctgtcagaataacttctaaaaggtatttttataagcagttcaagttactgaaaaccttttaaacctttctgaagttcgttagtataaattacttttctaggattattaataaaagccacataggtggcaagttgtagttttatatggctctgtagagtggtgaaccttctagaggaatatatgatttattcacagttcctcaaggcctggggatgatgatcagttatacctatttttgtgcaattacatcatgttgtacattagaaatggagagtttaatagctctttaactgctgtcctcattaggtaatgataaatatttcccttaaataattgactattttgctgtgttttaaaaatgattgaaatttatcttgccatatctcataatttcatgcacaagttgactgagctaatcttgagaatatattcgtaaaataggagcacatttagttgaggtatacaaggtaggactctagacaaaaccttctattttagctttagtgaatttcaaaagtaatgggtcttggagtatagatttttattagtagcttgaaagagcttaatcatatgcagtaagtatttttattaccaataaatttaaaattttttaagaaaaatatttttatcctagggccaagtgttgcctgccaccaatcagtaagttagtctataacaaattttaccctaacagttttaccacctagtaacagtcatttctgaaaatatgttggatagaaagtcactctttggcaaaagtgttagaatttgcttttgtgccatctattccttttatggcatctatcttgaaagtaatcttgtattggagattgaaagatgctgtaatttagaaattaacatgatatcttaaattacctttatgaaatatagttttgtataatagcatagattttccttcaaaaaatgaacatttatatatctacaaaaatatggagaagagtaatttgaaagcctactttctgaagaaaatggtgggatttttttttatcatgattaaatatcaaaaaattgccctatgaaaactttaaatctctaaaacatttgaaatactaccatatttgtgatttattgagaataaaaatccattttgaaatgtaaaatttttatgatctgattcagttttaagaaaacatgaatgaactagaagatattaaaaacatttgacattggtaagaaatattgatactgatattgatttttatataggtatttatttcagaattgatattttgagaaaaatacatgtgagtcattttttctgtttctcttttctcttaacgattatcactgtaattctgaatctgaaaggtaaaacaattagtcaaaatattattgccatcattctacctgtgttatgaaactacttattcatagttaattctcattaacacttacatttccataaagaaaactcaagtattaataaaagagactttactggcttaagagggctgtgaaagatttttgatagtgaatcatgaccctaagggagagatttgtgtgataaaagtattgtatataatagatcagcgatttttgtaaggcaaacagaatttgtaagttggcagatcttcctaagttgcaaaatgtaatgatgagcttggtggagaagaatgagtcgttcttggaatacctatgtgcagccactacccatctcaatgtcaccttgtttgcattcttggatagcttgtatatgtagtagtttgatgaataatttaaagaaaaacacctaaaatttgaaaaatgattgtaggatcaaaaaaggcagatgaaattacttaatactcagtgttttggagagtattccttttagtttgttggttggctggtttgaacgatagaaatatgcagcatgcaatatatgcttatatttcattttaatttctgatatataatgaacttcttgggagaggtactgaatctttgatgttttttgtcattgttctcaagtgcaatataacaatgtaaccaaatctagataatttcaaagttgtcattaatttagtaagcctaatataaacaaatatttgtattatttttgttagcaggaaagagtgattaagtgaggttatttacccctaaatggtccattctgcattgtatttcaggctggaaatgaattattctttaccagttttgaaacactttgaaatatcctaaggtaacttggaagctgtgtagtatatcaaattaatttgctacctaataacatagaaagtaaatatctttgtggtcacccacattgggtgagacagaaaatgaatctgttctaaaatttgtaatttgctaacttgatttgagttagtgaaaactggtacagtgttctgcttgatttacaacatgtaacttgtgactgtacaataaacataagcatatggt

SEQ ID NO: 2072 - DNA, 3288 bp, Homo sapiens
  source 1..3288: mol_type = genomic DNA
ctttgtagctcctggagattcaattctttcttgccagggtctttctacctctgcctcacatattccctccatctcttcattccacttccctcatccccaccccccactcccctccatcctcaatacacaaatgctcctaggcaccctccttctgatcctgtacatcttaatgttgtgccggatgtttcttctcgtgggagctcccaaagcaaacaccacccagcctgggattgtggaaggagggcaggtcctcaaatgtgactggtcttctacccgccggtgccagccaattgaatttgatgcaacaggcaatagagattatgccaaggatgatccattggaatttaagtcccatcagtggtttggagcatctgtgaggtcgaaacaggataaaattttggcctgtgccccattgtaccattggagaactgagatgaaacaggagcgagagcctgttggaacatgctttcttcaagatggaacaaagactgttgagtatgctccatgtagatcacaagatattgatgctgatggacagggattttgtcaaggaggattcagcattgattttactaaagctgacagagtacttcttggtggtcctggtagcttttattggcaaggtcagcttatttcggatcaagtggcagaaatcgtatctaaatacgaccccaatgtttacagcatcaagtataataaccaattagcaactcggactgcacaagctatttttgatgacagctatttgggttattctgtggctgtcggagatttcaatggtgatggcatagatgactttgtttcaggagttccaagagcagcaaggactttgggaatggtttatatttatgatgggaagaacatgtcctccttatacaattttactggcgagcagatggctgcatatttcggattttctgtagctgccactgacattaatggagatgattatgcagatgtgtttattggagcacctctcttcatggatcgtggctctgatggcaaactccaagaggtggggcaggtctcagtgtctctacagagagcttcaggagacttccagacgacaaagctgaatggatttgaggtctttgcacggtttggcagtgccatagctcctttgggagatctggaccaggatggtttcaatgatattgcaattgctgctccatatgggggtgaagataaaaaaggaattgtttatatcttcaatggaagatcaacaggcttgaacgcagtcccatctcaaatccttgaagggcagtgggctgctcgaagcatgccaccaagctttggctattcaatgaaaggagccacagatatagacaaaaatggatatccagacttaattgtaggagcttttggtgtagatcgagctatcttatacagggccagaccagttatcactgtaaatgctggtcttgaagtgtaccctagcattttaaatcaagacaataaaacctgctcactgcctggaacagctctcaaagtttcctgttttaatgttaggttctgcttaaaggcagatggcaaaggagtacttcccaggaaacttaatttccaggtggaacttcttttggataaactcaagcaaaagggagcaattcgacgagcactgtttctctacagcaggtccccaagtcactccaagaacatgactatttcaagggggggactgatgcagtgtgaggaattgatagcgtatctgcgggatgaatctgaatttagagacaaactcactccaattactatttttatggaatatcggttggattatagaacagctgctgatacaacaggcttgcaacccattcttaaccagttcacgcctgctaacattagtcgacaggctcacattctacttgactgtggtgaagacaatgtctgtaaacccaagctggaagtttctgtagatagtgatcaaaagaagatctatattggggatgacaaccctctgacattgattgttaaggctcagaatcaaggagaaggtgcctacgaagctgagctcatcgtttccattccactgcaggctgatttcatcggggttgtccgaaacaatgaagccttagcaagactttcctgtgcatttaagacagaaaaccaaactcgccaggtggtatgtgaccttggaaacccaatgaaggctggaactcaactcttagctggtcttcgtttcagtgtgcaccagcagtcagagatggatacttctgtgaaatttgacttacaaatccaaagctcaaatctatttgacaaagtaagcccagttgtatctcacaaagttgatcttgctgttttagctgcagttgagataagaggagtctcgagtcctgatcatgtctttcttccgattccaaactgggagcacaaggagaaccctgagactgaagaagatgttgggccagttgttcagcacatctatgagctgagaaacaatggtccaagttcattcagcaaggcaatgctccatcttcagtggccttacaaatataataataacactctgttgtatatccttcattatgatattgatggaccaatgaactgcacttcagatatggagatcaaccctttgagaattaagatctcatctttgcaaacaactgaaaagaatgacacggttgccgggcaaggtgagcgggaccatctcatcactaagcgggatcttgccctcagtgaaggagatattcacactttgggttgtggagttgctcagtgcttgaagattgtctgccaagttgggagattagacagaggaaagagtgcaatcttgtacgtaaagtcattactgtggactgagacttttatgaataaagaaaatcagaatcattcctattctctgaagtcgtctgcttcatttaatgtcatagagtttccttataagaatcttccaattgaggatatcaccaactccacattggttaccactaatgtcacctggggcattcagccagcgcccatgcctgtgcctgtgtgggtgatcattttagcagttctagcaggattgttgctactggctgttttggtatttgtaatgtacaggatgggcttttttaaacgggtccggccacctcaagaagaacaagaaagggagcagcttcaacctcatgaaaatggtgaaggaaactcagaaacttaactgcagtttttaagttatgctacatcttgacccactagaattagcaactttattatagatttaaactttcttcatgaggagtaaaaatccaaggctttactgctgatagtgctaattggcattaaccacaaaatgagaattatatttgt

SEQ ID NO: 2073 - DNA, 2271 bp, Homo sapiens
  source 1..2271: mol_type = genomic DNA
agcctcagacgctgcgtggagcggcggagccggagggaagcaaaggaccgtctgcgctgctgtccccgccccgcgcgctctgcgcccctcgtccctggcggtcgctccgaagctcagccctcttgcctgccccggagctgtcccgggctagccgagaagagagcggccggcaagtttgggcgcgcgcaggcggcgggccgcgggcactgggcgcctcgctggggcggggggaggtggctaccgctcccggcttggcgtcccgcgcgcacttcggcgatggcttttccgccgcggcgacggctgcgcctcggtccccgcggcctcccgcttcttctctcgggactcctgctacctctgtgccgcgccttcaacctagacgtggacagtcctgccgagtactctggccccgagggaagttacttcggcttcgccgtggatttcttcgtgcccagcgcgtcttcccggatgtttcttctcgtgggagctcccaaagcaaacaccacccagcctgggattgtggaaggagggcaggtcctcaaatgtgactggtcttctacccgccggtgccagccaattgaatttgatgcaacaggcaatagagattatgccaaggatgatccattggaatttaagtcccatcagtggtttggagcatctgtgaggtcgaaacaggataaaattttggcctgtgccccattgtaccattggagaactgagatgaaacaggagcgagagcctgttggaacatgctttcttcaagatggaacaaagactgttgagtatgctccatgtagatcacaagatattgatgctgatggacagggattttgtcaaggaggattcagcattgattttactaaagctgacagagtacttcttggtggtcctggtagcttttattggcaaggtcagcttatttcggatcaagtggcagaaatcgtatctaaatacgaccccaatgtttacagcatcaagtataataaccaattagcaactcggactgcacaagctatttttgatgacagctatttgggttattctgtggctgtcggagatttcaatggtgatggcatagatgactttgtttcaggagttccaagagcagcaaggactttgggaatggtttatatttatgatgggaagaacatgtcctccttatacaattttactggcgagcagatggctgcatatttcggattttctgtagctgccactgacattaatggagatgattatgcagatgtgtttattggagcacctctcttcatggatcgtggctctgatggcaaactccaagaggtggggcaggtctcagtgtctctacagagagcttcaggagacttccagacgacaaagctgaatggatttgaggtctttgcacggtttggcagtgccatagctcctttgggagatctggaccaggatggtttcaatgatattgcaattgctgctccatatgggggtgaagataaaaaaggaattgtttatatcttcaatggaagatcaacaggcttgaacgcagtcccatctcaaatccttgaagggcagtgggctgctcgaagcatgccaccaagctttggctattcaatgaaaggagccacagatatagacaaaaatggatatccagacttaattgtaggagcttttggtgtagatcgagctatcttatacagggccagaccagttatacctatttttgtgcaattacatcatgttgtacattagaaatggagagtttaatagctctttaactgctgtcctcattaggtaatgataaatatttcccttaaataattgactattttgctgtgttttaaaaatgattgaaatttatcttgccatatctcataatttcatgcacaagttgactgagctaatcttgagaatatattcgtaaaataggagcacatttagttgaggtatacaaggtaggactctagacaaaaccttctattttagctttagtgaatttcaaaagtaatgggtcttggagtatagatttttattagtagcttgaaagagcttaatcatatgcagtaagtatttttattaccaataaatttaaaattttttaagaaaaatatttttatcctagggccaagtgttgcctgccaccaatcagtaagttagtctataacaaattttaccctaacagttttaccacctagtaacagtcatttctgaaaatatgttggatagaaagtcactctttggcaaaagtgttagaatttgcttttgtgccatctattccttttatggcatctatcttga

SEQ ID NO: 2074 - DNA, 3640 bp, Homo sapiens
  source 1..3640: mol_type = genomic DNA
agcgggagtcgcggaacagcaggcccgagcccaccgcgccgggccccggacgccgcgcggaaaagatgaatttacaaccaattttctggattggactgatcagttcagtttgctgtgtgtttgctcaaacagatgaaaatagatgtttaaaagcaaatgccaaatcatgtggagaatgtatacaagcagggccaaattgtgggtggtgcacaaattcaacatttttacaggaaggaatgcctacttctgcacgatgtgatgatttagaagccttaaaaaagaagggttgccctccagatgacatagaaaatcccagaggctccaaagatataaagaaaaataaaaatgtaaccaaccgtagcaaaggaacagcagagaagctcaagccagaggatattactcagatccaaccacagcagttggttttgcgattaagatcaggggagccacagacatttacattaaaattcaagagagctgaagactatcccattgacctctactaccttatggacctgtcttactcaatgaaagacgatttggagaatgtaaaaagtcttggaacagatctgatgaatgaaatgaggaggattacttcggacttcagaattggatttggctcatttgtggaaaagactgtgatgccttacattagcacaacaccagctaagctcaggaacccttgcacaagtgaacagaactgcaccagcccatttagctacaaaaatgtgctcagtcttactaataaaggagaagtatttaatgaacttgttggaaaacagcgcatatctggaaatttggattctccagaaggtggtttcgatgccatcatgcaagttgcagtttgtggatcactgattggctggaggaatgttacacggctgctggtgttttccacagatgccgggtttcactttgctggagatgggaaacttggtggcattgttttaccaaatgatggacaatgtcacctggaaaataatatgtacacaatgagccattattatgattatccttctattgctcaccttgtccagaaactgagtgaaaataatattcagacaatttttgcagttactgaagaatttcagcctgtttacaaggagctgaaaaacttgatccctaagtcagcagtaggaacattatctgcaaattctagcaatgtaattcagttgatcattgatgcatacaattccctttcctcagaagtcattttggaaaacggcaaattgtcagaaggcgtaacaataagttacaaatcttactgcaagaacggggtgaatggaacaggggaaaatggaagaaaatgttccaatatttccattggagatgaggttcaatttgaaattagcataacttcaaataagtgtccaaaaaaggattctgacagctttaaaattaggcctctgggctttacggaggaagtagaggttattcttcagtacatctgtgaatgtgaatgccaaagcgaaggcatccctgaaagtcccaagtgtcatgaaggaaatgggacatttgagtgtggcgcgtgcaggtgcaatgaagggcgtgttggtagacattgtgaatgcagcacagatgaagttaacagtgaagacatggatgcttactgcaggaaagaaaacagttcagaaatctgcagtaacaatggagagtgcgtctgcggacagtgtgtttgtaggaagagggataatacaaatgaaatttattctggcaaattctgcgagtgtgataatttcaactgtgatagatccaatggcttaatttgtggaggaaatggtgtttgcaagtgtcgtgtgtgtgagtgcaaccccaactacactggcagtgcatgtgactgttctttggatactagtacttgtgaagccagcaacggacagatctgcaatggccggggcatctgcgagtgtggtgtctgtaagtgtacagatccgaagtttcaagggcaaacgtgtgagatgtgtcagacctgccttggtgtctgtgctgagcataaagaatgtgttcagtgcagagccttcaataaaggagaaaagaaagacacatgcacacaggaatgttcctattttaacattaccaaggtagaaagtcgggacaaattaccccagccggtccaacctgatcctgtgtcccattgtaaggagaaggatgttgacgactgttggttctattttacgtattcagtgaatgggaacaacgaggtcatggttcatgttgtggagaatccagagtgtcccactggtccagacatcattccaattgtagctggtgtggttgctggaattgttcttattggccttgcattactgctgatatggaagcttttaatgataattcatgacagaagggagtttgctaaatttgaaaaggagaaaatgaatgccaaatgggacacgggtgaaaatcctatttataagagtgccgtaacaactgtggtcaatccgaagtatgagggaaaatgagtactgcccgtgcaaatcccacaacactgaatgcaaagtagcaatttccatagtcacagttaggtagctttagggcaatattgccatggttttactcatgtgcaggttttgaaaatgtacaatatgtataatttttaaaatgttttattattttgaaaataatgttgtaattcatgccagggactgacaaaagacttgagacaggatggttactcttgtcagctaaggtcacattgtgcctttttgaccttttcttcctggactattgaaatcaagcttattggattaagtgatatttctatagcgattgaaagggcaatagttaaagtaatgagcatgatgagagtttctgttaatcatgtattaaaactgatttttagctttacaaatatgtcagtttgcagttatgcagaatccaaagtaaatgtcctgctagctagttaaggattgttttaaatctgttattttgctatttgcctgttagacatgactgatgacatatctgaaagacaagtatgttgagagttgctggtgtaaaatacgtttgaaatagttgatctacaaaggccatgggaaaaattcagagagttaggaaggaaaaaccaatagctttaaaacctgtgtgccattttaagagttacttaatgtttggtaacttttatgccttcactttacaaattcaagccttagataaaagaaccgagcaattttctgctaaaaagtccttgatttagcactatttacatacaggccatactttacaaagtatttgctgaatggggaccttttgagttgaatttattttattatttttattttgtttaatgtctggtgctttctgtcacctcttctaatcttttaatgtatttgtttgcaattttggggtaagactttttttatgagtactttttctttgaagttttagcggtcaatttgcctttttaatgaacatgtgaagttatactgtggctatgcaacagctctcacctacgcgagtcttactttgagttagtgccataacagaccactgtatgtttacttctcaccatttgagttgcccatcttgtttcacactagtcacattcttgttttaagtgcctttagttttaacagttcactttttacagtgctatttactgaagttatttattaaatatgcctaaaatacttaaatcgga

SEQ ID NO: 2075 - DNA, 3758 bp, Homo sapiens
  source 1..3758: mol_type = genomic DNA
ggagaggcccagcgggagtcgcggaacagcaggcccgagcccaccgcgccgggccccggacgccgcgcggaaaagatgaatttacaaccaattttctggattggactgatcagttcagtttgctgtgtgtttgctcaaacagatgaaaatagatgtttaaaagcaaatgccaaatcatgtggagaatgtatacaagcagggccaaattgtgggtggtgcacaaattcaacatttttacaggaaggaatgcctacttctgcacgatgtgatgatttagaagccttaaaaaagaagggttgccctccagatgacatagaaaatcccagaggctccaaagatataaagaaaaataaaaatgtaaccaaccgtagcaaaggaacagcagagaagctcaagccagaggatattactcagatccaaccacagcagttggttttgcgattaagatcaggggagccacagacatttacattaaaattcaagagagctgaagactatcccattgacctctactaccttatggacctgtcttactcaatgaaagacgatttggagaatgtaaaaagtcttggaacagatctgatgaatgaaatgaggaggattacttcggacttcagaattggatttggctcatttgtggaaaagactgtgatgccttacattagcacaacaccagctaagctcaggaacccttgcacaagtgaacagaactgcaccagcccatttagctacaaaaatgtgctcagtcttactaataaaggagaagtatttaatgaacttgttggaaaacagcgcatatctggaaatttggattctccagaaggtggtttcgatgccatcatgcaagttgcagtttgtggatcactgattggctggaggaatgttacacggctgctggtgttttccacagatgccgggtttcactttgctggagatgggaaacttggtggcattgttttaccaaatgatggacaatgtcacctggaaaataatatgtacacaatgagccattattatgattatccttctattgctcaccttgtccagaaactgagtgaaaataatattcagacaatttttgcagttactgaagaatttcagcctgtttacaaggagctgaaaaacttgatccctaagtcagcagtaggaacattatctgcaaattctagcaatgtaattcagttgatcattgatgcatacaattccctttcctcagaagtcattttggaaaacggcaaattgtcagaaggcgtaacaataagttacaaatcttactgcaagaacggggtgaatggaacaggggaaaatggaagaaaatgttccaatatttccattggagatgaggttcaatttgaaattagcataacttcaaataagtgtccaaaaaaggattctgacagctttaaaattaggcctctgggctttacggaggaagtagaggttattcttcagtacatctgtgaatgtgaatgccaaagcgaaggcatccctgaaagtcccaagtgtcatgaaggaaatgggacatttgagtgtggcgcgtgcaggtgcaatgaagggcgtgttggtagacattgtgaatgcagcacagatgaagttaacagtgaagacatggatgcttactgcaggaaagaaaacagttcagaaatctgcagtaacaatggagagtgcgtctgcggacagtgtgtttgtaggaagagggataatacaaatgaaatttattctggcaaattctgcgagtgtgataatttcaactgtgatagatccaatggcttaatttgtggaggaaatggtgtttgcaagtgtcgtgtgtgtgagtgcaaccccaactacactggcagtgcatgtgactgttctttggatactagtacttgtgaagccagcaacggacagatctgcaatggccggggcatctgcgagtgtggtgtctgtaagtgtacagatccgaagtttcaagggcaaacgtgtgagatgtgtcagacctgccttggtgtctgtgctgagcataaagaatgtgttcagtgcagagccttcaataaaggagaaaagaaagacacatgcacacaggaatgttcctattttaacattaccaaggtagaaagtcgggacaaattaccccagccggtccaacctgatcctgtgtcccattgtaaggagaaggatgttgacgactgttggttctattttacgtattcagtgaatgggaacaacgaggtcatggttcatgttgtggagaatccagagtgtcccactggtccagacatcattccaattgtagctggtgtggttgctggaattgttcttattggccttgcattactgctgatatggaagcttttaatgataattcatgacagaagggagtttgctaaatttgaaaaggagaaaatgaatgccaaatgggacacgtctctctctgtcgcccagcctggagtgcagtggtgtgatatcagctcactgcaacctctgacttccagattccagcaattctcctgcctcagcctcccgagtacctgggattacagggtgaaaatcctatttataagagtgccgtaacaactgtggtcaatccgaagtatgagggaaaatgagtactgcccgtgcaaatcccacaacactgaatgcaaagtagcaatttccatagtcacagttaggtagctttagggcaatattgccatggttttactcatgtgcaggttttgaaaatgtacaatatgtataatttttaaaatgttttattattttgaaaataatgttgtaattcatgccagggactgacaaaagacttgagacaggatggttactcttgtcagctaaggtcacattgtgcctttttgaccttttcttcctggactattgaaatcaagcttattggattaagtgatatttctatagcgattgaaagggcaatagttaaagtaatgagcatgatgagagtttctgttaatcatgtattaaaactgatttttagctttacaaatatgtcagtttgcagttatgcagaatccaaagtaaatgtcctgctagctagttaaggattgttttaaatctgttattttgctatttgcctgttagacatgactgatgacatatctgaaagacaagtatgttgagagttgctggtgtaaaatacgtttgaaatagttgatctacaaaggccatgggaaaaattcagagagttaggaaggaaaaaccaatagctttaaaacctgtgtgccattttaagagttacttaatgtttggtaacttttatgccttcactttacaaattcaagccttagataaaagaaccgagcaattttctgctaaaaagtccttgatttagcactatttacatacaggccatactttacaaagtatttgctgaatggggaccttttgagttgaatttattttattatttttattttgtttaatgtctggtgctttctgtcacctcttctaatcttttaatgtatttgtttgcaattttggggtaagactttttttatgagtactttttctttgaagttttagcggtcaatttgcctttttaatgaacatgtgaagttatactgtggctatgcaacagctctcacctacgcgagtcttactttgagttagtgccataacagaccactgtatgtttacttctcaccatttgagttgcccatcttgtttcacactagtcacattcttgttttaagtgcctttagttttaacagttcactttttacagtgctatttactgaagttatttattaaatatgcctaaaatactt

SEQ ID NO: 2076 - DNA, 3784 bp, Homo sapiens
  source 1..3784: mol_type = genomic DNA
gagccagcccagccgcgttccgaacgtgagggtcgccggcctgggcgctgtcacgtcggggctgccggagctgcgggggaccgggcccgaacggcccctgacacctgcggtctcccgccgggctgggcaagcgcagatgaatttacaaccaattttctggattggactgatcagttcagtttgctgtgtgtttgctcaaacagatgaaaatagatgtttaaaagcaaatgccaaatcatgtggagaatgtatacaagcagggccaaattgtgggtggtgcacaaattcaacatttttacaggaaggaatgcctacttctgcacgatgtgatgatttagaagccttaaaaaagaagggttgccctccagatgacatagaaaatcccagaggctccaaagatataaagaaaaataaaaatgtaaccaaccgtagcaaaggaacagcagagaagctcaagccagaggatattactcagatccaaccacagcagttggttttgcgattaagatcaggggagccacagacatttacattaaaattcaagagagctgaagactatcccattgacctctactaccttatggacctgtcttactcaatgaaagacgatttggagaatgtaaaaagtcttggaacagatctgatgaatgaaatgaggaggattacttcggacttcagaattggatttggctcatttgtggaaaagactgtgatgccttacattagcacaacaccagctaagctcaggaacccttgcacaagtgaacagaactgcaccagcccatttagctacaaaaatgtgctcagtcttactaataaaggagaagtatttaatgaacttgttggaaaacagcgcatatctggaaatttggattctccagaaggtggtttcgatgccatcatgcaagttgcagtttgtggatcactgattggctggaggaatgttacacggctgctggtgttttccacagatgccgggtttcactttgctggagatgggaaacttggtggcattgttttaccaaatgatggacaatgtcacctggaaaataatatgtacacaatgagccattattatgattatccttctattgctcaccttgtccagaaactgagtgaaaataatattcagacaatttttgcagttactgaagaatttcagcctgtttacaaggagctgaaaaacttgatccctaagtcagcagtaggaacattatctgcaaattctagcaatgtaattcagttgatcattgatgcatacaattccctttcctcagaagtcattttggaaaacggcaaattgtcagaaggcgtaacaataagttacaaatcttactgcaagaacggggtgaatggaacaggggaaaatggaagaaaatgttccaatatttccattggagatgaggttcaatttgaaattagcataacttcaaataagtgtccaaaaaaggattctgacagctttaaaattaggcctctgggctttacggaggaagtagaggttattcttcagtacatctgtgaatgtgaatgccaaagcgaaggcatccctgaaagtcccaagtgtcatgaaggaaatgggacatttgagtgtggcgcgtgcaggtgcaatgaagggcgtgttggtagacattgtgaatgcagcacagatgaagttaacagtgaagacatggatgcttactgcaggaaagaaaacagttcagaaatctgcagtaacaatggagagtgcgtctgcggacagtgtgtttgtaggaagagggataatacaaatgaaatttattctggcaaattctgcgagtgtgataatttcaactgtgatagatccaatggcttaatttgtggaggaaatggtgtttgcaagtgtcgtgtgtgtgagtgcaaccccaactacactggcagtgcatgtgactgttctttggatactagtacttgtgaagccagcaacggacagatctgcaatggccggggcatctgcgagtgtggtgtctgtaagtgtacagatccgaagtttcaagggcaaacgtgtgagatgtgtcagacctgccttggtgtctgtgctgagcataaagaatgtgttcagtgcagagccttcaataaaggagaaaagaaagacacatgcacacaggaatgttcctattttaacattaccaaggtagaaagtcgggacaaattaccccagccggtccaacctgatcctgtgtcccattgtaaggagaaggatgttgacgactgttggttctattttacgtattcagtgaatgggaacaacgaggtcatggttcatgttgtggagaatccagagtgtcccactggtccagacatcattccaattgtagctggtgtggttgctggaattgttcttattggccttgcattactgctgatatggaagcttttaatgataattcatgacagaagggagtttgctaaatttgaaaaggagaaaatgaatgccaaatgggacacgggtgaaaatcctatttataagagtgccgtaacaactgtggtcaatccgaagtatgagggaaaatgagtactgcccgtgcaaatcccacaacactgaatgcaaagtagcaatttccatagtcacagttaggtagctttagggcaatattgccatggttttactcatgtgcaggttttgaaaatgtacaatatgtataatttttaaaatgttttattattttgaaaataatgttgtaattcatgccagggactgacaaaagacttgagacaggatggttactcttgtcagctaaggtcacattgtgcctttttgaccttttcttcctggactattgaaatcaagcttattggattaagtgatatttctatagcgattgaaagggcaatagttaaagtaatgagcatgatgagagtttctgttaatcatgtattaaaactgatttttagctttacaaatatgtcagtttgcagttatgcagaatccaaagtaaatgtcctgctagctagttaaggattgttttaaatctgttattttgctatttgcctgttagacatgactgatgacatatctgaaagacaagtatgttgagagttgctggtgtaaaatacgtttgaaatagttgatctacaaaggccatgggaaaaattcagagagttaggaaggaaaaaccaatagctttaaaacctgtgtgccattttaagagttacttaatgtttggtaacttttatgccttcactttacaaattcaagccttagataaaagaaccgagcaattttctgctaaaaagtccttgatttagcactatttacatacaggccatactttacaaagtatttgctgaatggggaccttttgagttgaatttattttattatttttattttgtttaatgtctggtgctttctgtcacctcttctaatcttttaatgtatttgtttgcaattttggggtaagactttttttatgagtactttttctttgaagttttagcggtcaatttgcctttttaatgaacatgtgaagttatactgtggctatgcaacagctctcacctacgcgagtcttactttgagttagtgccataacagaccactgtatgtttacttctcaccatttgagttgcccatcttgtttcacactagtcacattcttgttttaagtgcctttagttttaacagttcactttttacagtgctatttactgaagttatttattaaatatgcctaaaatacttaaatcggatgtcttgactctgatgtattttatcaggttgtgtgcatgaaatttttatagattaaagaagttgaggaaaagc

SEQ ID NO: 2077 - DNA, 500 bp, Homo sapiens
  source 1..500: mol_type = genomic DNA
gaacagcaggcccgagcccaccgcgccgggccccggacgccgcgcggaaaagatacctgatcagagaagcagtttgatgtactaaaggcttctcgattgggagacaggaaacctgggtgtcagtgccgggtctgccactgaatttctgtgtgacctttgtcagagtactgtacttccagagcgttggtttccacatctaccctataaagcagcctgcatgtttctctcattctctcgttcgaggagttggaggatagctgctgcctgatggaaaggcaaaaaagtccgcaggcatagagagtggaaagaaggaacagcatactaggctggtttgaaaaacaatcaattgctagatgaatttacaaccaattttctggattggactgatcagttcagtttgctgtgtgtttgctcaaacagatgaaaatagatgtttaaaagcaaatgccaaatcatgtggagaatgtatacaagcagggccaaattgtgggtggtgcaca

SEQ ID NO: 2078 - DNA, 569 bp, Homo sapiens
  source 1..569: mol_type = genomic DNA
agcccgcgggagaggcccagcgggagtcgcggaacagcaggcccgagcccaccgcgccgggccccggacgccgcgcggaaaagatacctgatcagagaagcagtttgatgtactaaaggcttctcgattgggagacaggaaacctgggtgtcagtgccgggtctgccactgaatttctgtgtgacctttgtcagagtactgtacttccagagcgttggtttccacatctaccctataaagcagcctgcatgtttctctcattctctcgttcgaggagttggaggatagctgctgcctgatatgaatttacaaccaattttctggattggactgatcagttcagtttgctgtgtgtttgctcaaacagatgaaaatagatgtttaaaagcaaatgccaaatcatgtggagaatgtatacaagcagggccaaattgtgggtggtgcacaaattcaacatttttacaggaaggaatgcctacttctgcacgatgtgatgatttagaagccttaaaaaagaagggttgccctccagatgacatagaaaatcccagaggctccaaagatataaa

SEQ ID NO: 2079 - DNA, 3729 bp, Homo sapiens
  source 1..3729: mol_type = genomic DNA
atgaatttacaaccaattttctggattggactgatcagttcagtttgctgtgtgtttgctcaaacagatgaaaatagatgtttaaaagcaaatgccaaatcatgtggagaatgtatacaagcagggccaaattgtgggtggtgcacaaattcaacatttttacaggaaggaatgcctacttctgcacgatgtgatgatttagaagccttaaaaaagaagggttgccctccagatgacatagaaaatcccagaggctccaaagatataaagaaaaataaaaatgtaaccaaccgtagcaaaggaacagcagagaagctcaagccagaggatattactcagatccaaccacagcagttggttttgcgattaagatcaggggagccacagacatttacattaaaattcaagagagctgaagactatcccattgacctctactaccttatggacctgtcttactcaatgaaagacgatttggagaatgtaaaaagtcttggaacagatctgatgaatgaaatgaggaggattacttcggacttcagaattggatttggctcatttgtggaaaagactgtgatgccttacattagcacaacaccagctaagctcaggaacccttgcacaagtgaacagaactgcaccagcccatttagctacaaaaatgtgctcagtcttactaataaaggagaagtatttaatgaacttgttggaaaacagcgcatatctggaaatttggattctccagaaggtggtttcgatgccatcatgcaagttgcagtttgtggatcactgattggctggaggaatgttacacggctgctggtgttttccacagatgccgggtttcactttgctggagatgggaaacttggtggcattgttttaccaaatgatggacaatgtcacctggaaaataatatgtacacaatgagccattattatgattatccttctattgctcaccttgtccagaaactgagtgaaaataatattcagacaatttttgcagttactgaagaatttcagcctgtttacaaggagctgaaaaacttgatccctaagtcagcagtaggaacattatctgcaaattctagcaatgtaattcagttgatcattgatgcatacaattccctttcctcagaagtcattttggaaaacggcaaattgtcagaaggcgtaacaataagttacaaatcttactgcaagaacggggtgaatggaacaggggaaaatggaagaaaatgttccaatatttccattggagatgaggttcaatttgaaattagcataacttcaaataagtgtccaaaaaaggattctgacagctttaaaattaggcctctgggctttacggaggaagtagaggttattcttcagtacatctgtgaatgtgaatgccaaagcgaaggcatccctgaaagtcccaagtgtcatgaaggaaatgggacatttgagtgtggcgcgtgcaggtgcaatgaagggcgtgttggtagacattgtgaatgcagcacagatgaagttaacagtgaagacatggatgcttactgcaggaaagaaaacagttcagaaatctgcagtaacaatggagagtgcgtctgcggacagtgtgtttgtaggaagagggataatacaaatgaaatttattctggcaaattctgcgagtgtgataatttcaactgtgatagatccaatggcttaatttgtggaggaaatggtgtttgcaagtgtcgtgtgtgtgagtgcaaccccaactacactggcagtgcatgtgactgttctttggatactagtacttgtgaagccagcaacggacagatctgcaatggccggggcatctgcgagtgtggtgtctgtaagtgtacagatccgaagtttcaagggcaaacgtgtgagatgtgtcagacctgccttggtgtctgtgctgagcataaagaatgtgttcagtgcagagccttcaataaaggagaaaagaaagacacatgcacacaggaatgttcctattttaacattaccaaggtagaaagtcgggacaaattaccccagccggtccaacctgatcctgtgtcccattgtaaggagaaggatgttgacgactgttggttctattttacgtattcagtgaatgggaacaacgaggtcatggttcatgttgtggagaatccagagtgtcccactggtccagacatcattccaattgtagctggtgtggttgctggaattgttcttattggccttgcattactgctgatatggaagcttttaatgataattcatgacagaagggagtttgctaaatttgaaaaggagaaaatgaatgccaaatgggacacgcaagaaaatccgatttacaagagtcctattaataatttcaagaatccaaactacggacgtaaagctggtctctaaattgccggtgaaaatcctatttataagagtgccgtaacaactgtggtcaatccgaagtatgagggaaaatgagtactgcccgtgcaaatcccacaacactgaatgcaaagtagcaatttccatagtcacagttaggtagctttagggcaatattgccatggttttactcatgtgcaggttttgaaaatgtacaatatgtataatttttaaaatgttttattattttgaaaataatgttgtaattcatgccagggactgacaaaagacttgagacaggatggttactcttgtcagctaaggtcacattgtgcctttttgaccttttcttcctggactattgaaatcaagcttattggattaagtgatatttctatagcgattgaaagggcaatagttaaagtaatgagcatgatgagagtttctgttaatcatgtattaaaactgatttttagctttacaaatatgtcagtttgcagttatgcagaatccaaagtaaatgtcctgctagctagttaaggattgttttaaatctgttattttgctatttgcctgttagacatgactgatgacatatctgaaagacaagtatgttgagagttgctggtgtaaaatacgtttgaaatagttgatctacaaaggccatgggaaaaattcagagagttaggaaggaaaaaccaatagctttaaaacctgtgtgccattttaagagttacttaatgtttggtaacttttatgccttcactttacaaattcaagccttagataaaagaaccgagcaattttctgctaaaaagtccttgatttagcactatttacatacaggccatactttacaaagtatttgctgaatggggaccttttgagttgaatttattttattatttttattttgtttaatgtctggtgctttctgtcacctcttctaatcttttaatgtatttgtttgcaattttggggtaagactttttttatgagtactttttctttgaagttttagcggtcaatttgcctttttaatgaacatgtgaagttatactgtggctatgcaacagctctcacctacgcgagtcttactttgagttagtgccataacagaccactgtatgtttacttctcaccatttgagttgcccatcttgtttcacactagtcacattcttgttttaagtgcctttagttttaacagttcactttttacagtgctatttactgaagttatttattaaatatgcctaaaatacttaaatcggatgtcttgactctgatgtattttatcaggttgtgtgcatgaaatttttatagattaaagaagttgaggaaaagc

SEQ ID NO: 2080 - DNA, 445 bp, Homo sapiens
  source 1..445: mol_type = genomic DNA
acacctgcggtctcccgccgggctgggcaagcgcagatgaatttacaaccaattttctggattggactgatcagttcagtttgctgtgtgtttgctcaaacagatgaaaatagatgtttaaaagcaaatgccaaatcatgtggagaatgtatacaagcagggccaaattgtgggtggtgcacaaattcaacatttttacaggaaggaatgcctacttctgcacgatgtgatgatttagaagccttaaaaaagaagggttgccctccagatgacatagaaaatcccagaggctccaaagatataaagaaaaataaaaatgtaaccaaccgtagcaaaggaacagcagagaagctcaagccagaggatattactcagatccaaccacagcagttggttttgcgattaagatcaggggagccacagacatttacattaaaattcaaga

SEQ ID NO: 2081 - DNA, 552 bp, Homo sapiens
  source 1..552: mol_type = genomic DNA
agtgcaaacgcagtgagtcatccgcagggcgtgcggagtgtgccggctgggtccctgcagcccccaagcccggagggatgcgggaaaatcgctcttggaagatgcaattgctttaataatcgactttcacccttagtagcagaaaaacgaccgtggccacagtaccacaaagtctctgatgaatttacaaccaattttctggattggactgatcagttcagtttgctgtgtgtttgctcaaacagatgaaaatagatgtttaaaagcaaatgccaaatcatgtggagaatgtatacaagcagggccaaattgtgggtggtgcacaaattcaacatttttacaggaaggaatgcctacttctgcacgatgtgatgatttagaagccttaaaaaagaagggttgccctccagatgacatagaaaatcccagaggctccaaagatataaagaaaaataaaaatgtaaccaaccgtagcaaaggaacagcagagaagctcaagccagaggatattactcagatccaaccacagcagttggttttgcgattaagatc

SEQ ID NO: 2082 - DNA, 585 bp, Homo sapiens
  source 1..585: mol_type = genomic DNA
aatgaaaagtggtcaaacaacttaacatggtgccagttttcctaagcgtgcttgccactgattgtaatgcttttattgtttggcttcttgataaatgaatttacaaccaattttctggattggactgatcagttcagtttgctgtgtgtttgctcaaacagatgaaaatagatgtttaaaagcaaatgccaaatcatgtggagaatgtatacaagcagggccaaattgtgggtggtgcacaaattcaacatttttacaggaaggaatgcctacttctgcacgatgtgatgatttagaagccttaaaaaagaagggttgccctccagatgacatagaaaatcccagaggctccaaagatataaagaaaaataaaaatgtaaccaaccgtagcaaaggaacagcagagaagctcaagccagaggatattactcagatccaaccacagcagttggttttgcgattaagatcaggggagccacagacatttacattaaaattcaagagagctgaagactatcccattgacctctactaccttatggacctgtcttactcaatgaaagacgatttggagaatgtaaaaag

SEQ ID NO: 2083 - DNA, 540 bp, Homo sapiens
  source 1..540: mol_type = genomic DNA
agcccgcgggagaggcccagcgggagtcgcggaacagcaggcccgagcccaccgcgccgggccccggacgccgcgcggaaaagatgaatttacaaccaattttctggattggactgatcagttcagtttgctgtgtgtttgctcaaacagatgaaaatagatgtttaaaagcaaatgccaaatcatgtggagaatgtatacaagcagggccaaattgtgggtggtgcacaaattcagtaagtaagacatttttacaggaaggaatgcctacttctgcacgatgtgatgatttagaagccttaaaaaagaagggttgccctccagatgacatagaaaatcccagaggctccaaagatataaagaaaaataaaaatgtaaccaaccgtagcaaaggaacagcagagaagctcaagccagaggatattactcagatccaaccacagcagttggttttgcgattaagatcaggggagccacagacatttacattaaaattcaagagagctgaagactatcccattgacctctactaccttatgg

SEQ ID NO: 2084 - DNA, 546 bp, Homo sapiens
  source 1..546: mol_type = genomic DNA
agaaatcttaaagtagaagcgtcacaggacttgttcttccaaatgctgcatggcaaatattattaggaaatatacttaacatttatttatttttattctcaataaggagttacattcaaagtaactggaagtgacggatgagaaaaatatatctaggttggtgcacacagccatctggtcgaccttagacacgggaaggcaagcaccccctggttgaccttagacatggaaagatgaatttacaaccaattttctggattggactgatcagttcagtttgctgtgtgtttgctcaaacagatgaaaatagatgtttaaaagcaaatgccaaatcatgtggagaatgtatacaagcagggccaaattgtgggtggtgcacaaattcaacatttttacaggaaggaatgcctacttctgcacgatgtgatgatttagaagccttaaaaaagaagggttgccctccagatgacatagaaaatcccagaggctccaaagatataaagaaaaataaaaatgtaaccaaccgtagcaaaggaacagcagaga

SEQ ID NO: 2085 - DNA, 562 bp, Homo sapiens
  source 1..562: mol_type = genomic DNA
gagtttctgtgcacacactctcctgcctgctgccacgtaagacgtgccttttgcctgccgccatgtaatatgtgcctttgctcctccttcgccttctgccatgattgtgaggtctccccagccatgctgaactatgaatttacaaccaattttctggattggactgatcagttcagtttgctgtgtgtttgctcaaacagatgaaaatagatgtttaaaagcaaatgccaaatcatgtggagaatgtatacaagcagggccaaattgtgggtggtgcacaaattcaacatttttacaggaaggaatgcctacttctgcacgatgtgatgatttagaagccttaaaaaagaagggttgccctccagatgacatagaaaatcccagaggctccaaagatataaagaaaaataaaaatgtaaccaaccgtagcaaaggaacagcagagaagctcaagccagaggatattactcagatccaaccacagcagttggttttgcgattaagatcaggggagccacagacatttacattaaaattcaagagagctgaagactatcccatt

SEQ ID NO: 2086 - DNA, 2955 bp, Homo sapiens
  source 1..2955: mol_type = genomic DNA
gggccgctctctgacatcagagctgctgtagagcggagaggggcaggggtgaagggccacggtggtgcaacccaccacttcctccaaggaggagctgagaggaacaggaagtgtcaggactttacgacccgcgcctccagctgaggtttctagacgtgacccagggcagactggtagcaaagcccccacgcccagccaggagcaccgccgaggactccagcacaccgagggacatgctgggcctgcgccccccactgctcgccctggtggggctgctctccctcgggtgcgtcctctctcaggagtgcacgaagttcaaggtcagcagctgccgggaatgcatcgagtcggggcccggctgcacctggtgccagaagctgaacttcacagggccgggggatcctgactccattcgctgcgacacccggccacagctgctcatgaggggctgtgcggctgacgacatcatggaccccacaagcctcgctgaaacccaggaagaccacaatgggggccagaagcagctgtccccacaaaaagtgacgctttacctgcgaccaggccaggcagcagcgttcaacgtgaccttccggcgggccaagggctaccccatcgacctgtactatctgatggacctctcctactccatgcttgatgacctcaggaatgtcaagaagctaggtggcgacctgctccgggccctcaacgagatcaccgagtccggccgcattggcttcgggtccttcgtggacaagaccgtgctgccgttcgtgaacacgcaccctgataagctgcgaaacccatgccccaacaaggagaaagagtgccagcccccgtttgccttcaggcacgtgctgaagctgaccaacaactccaaccagtttcagaccgaggtcgggaagcagctgatttccggaaacctggatgcacccgagggtgggctggacgccatgatgcaggtcgccgcctgcccggaggaaatcggctggcgcaacgtcacgcggctgctggtgtttgccactgatgacggcttccatttcgcgggcgacgggaagctgggcgccatcctgacccccaacgacggccgctgtcacctggaggacaacttgtacaagaggagcaacgaattcgactacccatcggtgggccagctggcgcacaagctggctgaaaacaacatccagcccatcttcgcggtgaccagtaggatggtgaagacctacgagaaactcaccgagatcatccccaagtcagccgtgggggagctgtctgaggactccagcaatgtggtccaactcattaagaatgcttacaataaactctcctccagggtcttcctggatcacaacgccctccccgacaccctgaaagtcacctacgactccttctgcagcaatggagtgacgcacaggaaccagcccagaggtgactgtgatggcgtgcagatcaatgtcccgatcaccttccaggtgaaggtcacggccacagagtgcatccaggagcagtcgtttgtcatccgggcgctgggcttcacggacatagtgaccgtgcaggttcttccccagtgtgagtgccggtgccgggaccagagcagagaccgcagcctctgccatggcaagggcttcttggagtgcggcatctgcaggtgtgacactggctacattgggaaaaactgtgagtgccagacacagggccggagcagccaggagctggaaggaagctgccggaaggacaacaactccatcatctgctcagggctgggggactgtgtctgcgggcagtgcctgtgccacaccagcgacgtccccggcaagctgatatacgggcagtactgcgagtgtgacaccatcaactgtgagcgctacaacggccaggtctgcggcggcccggggagggggctctgcttctgcgggaagtgccgctgccacccgggctttgagggctcagcgtgccagtgcgagaggaccactgagggctgcctgaacccgcggcgtgttgagtgtagtggtcgtggccggtgccgctgcaacgtatgcgagtgccattcaggctaccagctgcctctgtgccaggagtgccccggctgcccctcaccctgtggcaagtacatctcctgcgccgagtgcctgaagttcgaaaagggcccctttgggaagaactgcagcgcggcgtgtccgggcctgcagctgtcgaacaaccccgtgaagggcaggacctgcaaggagagggactcagagggctgctgggtggcctacacgctggagcagcaggacgggatggaccgctacctcatctatgtggatgagagccgagagtgtgtggcaggccccaacatcgccgccatcgtcgggggcaccgtggcaggcatcgtgctgatcggcattctcctgctggtcatctggaaggctctgatccacctgagcgacctccgggagtacaggcgctttgagaaggagaagctcaagtcccagtggaacaatgataatccccttttcaagagcgccaccacgacggtcatgaaccccaagtttgctgagagttaggagcacttggtgaagacaaggccgtcaggacccaccatgtctgccccatcacgcggccgagacatggcttgccacagctcttgaggatgtcaccaattaaccagaaatccagttattttccgccctcaaaatgacagccatggccggccgggtgcttctgggggctcgtcggggggacagctccactctgactggcacagtctttgcatggagacttgaggagggagggcttgaggttggtgaggttaggtgcgtgtttcctgtgcaagtcaggacatcagtctgattaaaggtggtgccaatttatttacatttaaacttgtcagggtataaaatgacatcccattaattatattgttaatcaatcacgtgtatagaaaaaaaataaaacttcaatacaggctgtccatgg

SEQ ID NO: 2087 - DNA, 966 bp, Homo sapiens
  source 1..966: mol_type = genomic DNA
gggaggctggggaaggaccttgccactggggtcctctctcaggagtgcacgaagttcaaggtcagcagctgccgggaatgcatcgagtcggggcccggctgcacctggtgccagaagctgaacttcacagggccgggggatcctgactccattcgctgcgacacccggccacagctgctcatgaggggctgtgcggctgacgacatcatggaccccacaagcctcgctgaaacccaggaagaccacaatgggggccagaagcagctgtccccacaaaaagtgacgctttacctgcgaccaggccaggcagcagcgttcaacgtgaccttccggcgggccaagggctaccccatcgacctgtactatctgatggacctctcctactccatgcttgatgacctcaggaatgtcaagaagctaggtggcgacctgctccgggccctcaacgagatcaccgagtccggccgcattggcttcgggtccttcgtggacaagaccgtgctgccgttcgtgaacacgcaccctgataagctgcgaaacccatgccccaacaaggagaaagagtgccagcccccgtttgccttcaggcacgtgctgaagctgaccaacaactccaaccagtttcagaccgaggtcgggaagcagctgatttccggaaacctggatgcacccgagggtgggctggacgccatgatgcaggtcgccgcctgcccggaggaaatcggctggcgcaacgtcacgcggctgctggtgtttgccactgatgacggcttccatttcgcgggcgacgggaagctgggcgccatcctgacccccaacgacggccgctgtcacctggaggacaacttgtacaagaggagcaacgaattcgactacccatcggtgggccagctggcgcacaagctggctgaaaacaacatccagcccatcttcgcggtgaccagtaggatggtgaagacctacgag

SEQ ID NO: 2088 - DNA, 2913 bp, Homo sapiens
  source 1..2913: mol_type = genomic DNA
atccagggtgaggaaggcagcccacacttttcttggagacacatccccaaagaagtcctcacgtggctccgtttgggcagaaaccatgaattgaacgggaaaagaaatatgtcaagtatcagaaagaagagtggcatgctttgacagcaagtggactccgagtccagggcagagcctcagttagggacatgctgggcctgcgccccccactgctcgccctggtggggctgctctccctcgggtgcgtcctctctcaggagtgcacgaagttcaaggtcagcagctgccgggaatgcatcgagtcggggcccggctgcacctggtgccagaagctgaacttcacagggccgggggatcctgactccattcgctgcgacacccggccacagctgctcatgaggggctgtgcggctgacgacatcatggaccccacaagcctcgctgaaacccaggaagaccacaatgggggccagaagcagctgtccccacaaaaagtgacgctttacctgcgaccaggccaggcagcagcgttcaacgtgaccttccggcgggccaagggctaccccatcgacctgtactatctgatggacctctcctactccatgcttgatgacctcaggaatgtcaagaagctaggtggcgacctgctccgggccctcaacgagatcaccgagtccggccgcattggcttcgggtccttcgtggacaagaccgtgctgccgttcgtgaacacgcaccctgataagctgcgaaacccatgccccaacaaggagaaagagtgccagcccccgtttgccttcaggcacgtgctgaagctgaccaacaactccaaccagtttcagaccgaggtcgggaagcagctgatttccggaaacctggatgcacccgagggtgggctggacgccatgatgcaggtcgccgcctgcccggaggaaatcggctggcgcaacgtcacgcggctgctggtgtttgccactgatgacggcttccatttcgcgggcgacgggaagctgggcgccatcctgacccccaacgacggccgctgtcacctggaggacaacttgtacaagaggagcaacgaattcgactacccatcggtgggccagctggcgcacaagctggctgaaaacaacatccagcccatcttcgcggtgaccagtaggatggtgaagacctacgagaaactcaccgagatcatccccaagtcagccgtgggggagctgtctgaggactccagcaatgtggtccaactcattaagaatgcttacaataaactctcctccagggtcttcctggatcacaacgccctccccgacaccctgaaagtcacctacgactccttctgcagcaatggagtgacgcacaggaaccagcccagaggtgactgtgatggcgtgcagatcaatgtcccgatcaccttccaggtgaaggtcacggccacagagtgcatccaggagcagtcgtttgtcatccgggcgctgggcttcacggacatagtgaccgtgcaggttcttccccagtgtgagtgccggtgccgggaccagagcagagaccgcagcctctgccatggcaagggcttcttggagtgcggcatctgcaggtgtgacactggctacattgggaaaaactgtgagtgccagacacagggccggagcagccaggagctggaaggaagctgccggaaggacaacaactccatcatctgctcagggctgggggactgtgtctgcgggcagtgcctgtgccacaccagcgacgtccccggcaagctgatatacgggcagtactgcgagtgtgacaccatcaactgtgagcgctacaacggccaggtctgcggcggcccggggagggggctctgcttctgcgggaagtgccgctgccacccgggctttgagggctcagcgtgccagtgcgagaggaccactgagggctgcctgaacccgcggcgtgttgagtgtagtggtcgtggccggtgccgctgcaacgtatgcgagtgccattcaggctaccagctgcctctgtgccaggagtgccccggctgcccctcaccctgtggcaagtacatctcctgcgccgagtgcctgaagttcgaaaagggcccctttgggaagaactgcagcgcggcgtgtccgggcctgcagctgtcgaacaaccccgtgaagggcaggacctgcaaggagagggactcagagggctgctgggtggcctacacgctggagcagcaggacgggatggaccgctacctcatctatgtggatgagagccgagagtgtgtggcaggccccaacatcgccgccatcgtcgggggcaccgtggcaggcatcgtgctgatcggcattctcctgctggtcatctggaaggctctgatccacctgagcgacctccgggagtacaggcgctttgagaaggagaagctcaagtcccagtggaacaatgataatccccttttcaagagcgccaccacgacggtcatgaaccccaagtttgctgagagttaggagcacttggtgaagacaaggccgtcaggacccaccatgtctgccccatcacgcggccgagacatggcttgccacagctcttgaggatgtcaccaattaaccagaaatccagttattttccgccctcaaaatgacagccatggccggccgggtgcttctgggggctcgtcggggggacagctccactctgactggcacagtctttgcatggagacttgaggagggagggcttgaggttggtgaggttaggtgcgtgtttcctgtgcaagtcaggacatcagtctgattaaaggtggtgccaatttatttacatttaaacttgtcagggtataaaatgacatcccattaattatattgttaatcaatcacgtgtatagaaaaaaaataaaacttcaatacaggctgtccatggaaa

SEQ ID NO: 2089 - DNA, 3178 bp, Homo sapiens
  source 1..3178: mol_type = genomic DNA
acaggcatccagggtgaggaaggctgcccacaggcatccagggtgaggaaggcagcccacacttttcttggagacacatccccaaagaagtcctcacgtggctccgtttgggcagaaaccatgaattgaacgggaaaagaaatatgtcaagtatcagaaagaagagtggcatgctttgacagcaagtggactccgagtccagggcagagcctcagttagggggccgctctctgacatcagagctgctgtagagcggagaggggcaggggtgaagggccacggtggtgcaacccaccacttcctccaaggaggagctgagaggaacaggaagtgtcaggactttacgacccgcgcctccagctgaggtttctagacgtgacccagggcagactggtagcaaagcccccacgcccagccaggagcaccgccgaggactccagcacaccgagggacatgctgggcctgcgccccccactgctcgccctggtggggctgctctccctcgggtgcgtcctctctcaggagtgcacgaagttcaaggtcagcagctgccgggaatgcatcgagtcggggcccggctgcacctggtgccagaagctgaacttcacagggccgggggatcctgactccattcgctgcgacacccggccacagctgctcatgaggggctgtgcggctgacgacatcatggaccccacaagcctcgctgaaacccaggaagaccacaatgggggccagaagcagctgtccccacaaaaagtgacgctttacctgcgaccaggccaggcagcagcgttcaacgtgaccttccggcgggccaagggctaccccatcgacctgtactatctgatggacctctcctactccatgcttgatgacctcaggaatgtcaagaagctaggtggcgacctgctccgggccctcaacgagatcaccgagtccggccgcattggcttcgggtccttcgtggacaagaccgtgctgccgttcgtgaacacgcaccctgataagctgcgaaacccatgccccaacaaggagaaagagtgccagcccccgtttgccttcaggcacgtgctgaagctgaccaacaactccaaccagtttcagaccgaggtcgggaagcagctgatttccggaaacctggatgcacccgagggtgggctggacgccatgatgcaggtcgccgcctgcccggaggaaatcggctggcgcaacgtcacgcggctgctggtgtttgccactgatgacggcttccatttcgcgggcgacgggaagctgggcgccatcctgacccccaacgacggccgctgtcacctggaggacaacttgtacaagaggagcaacgaattcgactacccatcggtgggccagctggcgcacaagctggctgaaaacaacatccagcccatcttcgcggtgaccagtaggatggtgaagacctacgagaaactcaccgagatcatccccaagtcagccgtgggggagctgtctgaggactccagcaatgtggtccaactcattaagaatgcttacaataaactctcctccagggtcttcctggatcacaacgccctccccgacaccctgaaagtcacctacgactccttctgcagcaatggagtgacgcacaggaaccagcccagaggtgactgtgatggcgtgcagatcaatgtcccgatcaccttccaggtgaaggtcacggccacagagtgcatccaggagcagtcgtttgtcatccgggcgctgggcttcacggacatagtgaccgtgcaggttcttccccagtgtgagtgccggtgccgggaccagagcagagaccgcagcctctgccatggcaagggcttcttggagtgcggcatctgcaggtgtgacactggctacattgggaaaaactgtgagtgccagacacagggccggagcagccaggagctggaaggaagctgccggaaggacaacaactccatcatctgctcagggctgggggactgtgtctgcgggcagtgcctgtgccacaccagcgacgtccccggcaagctgatatacgggcagtactgcgagtgtgacaccatcaactgtgagcgctacaacggccaggtctgcggcggcccggggagggggctctgcttctgcgggaagtgccgctgccacccgggctttgagggctcagcgtgccagtgcgagaggaccactgagggctgcctgaacccgcggcgtgttgagtgtagtggtcgtggccggtgccgctgcaacgtatgcgagtgccattcaggctaccagctgcctctgtgccaggagtgccccggctgcccctcaccctgtggcaagtacatctcctgcgccgagtgcctgaagttcgaaaagggcccctttgggaagaactgcagcgcggcgtgtccgggcctgcagctgtcgaacaaccccgtgaagggcaggacctgcaaggagagggactcagagggctgctgggtggcctacacgctggagcagcaggacgggatggaccgctacctcatctatgtggatgagagccgagagtgtgtggcaggccccaacatcgccgccatcgtcgggggcaccgtggcaggcatcgtgctgatcggcattctcctgctggtcatctggaaggctctgatccacctgagcgacctccgggagtacaggcgctttgagaaggagaagctcaagtcccagtggaacaatgataatccccttttcaagagcgccaccacgacggtcatgaaccccaagtttgctgagagttaggagcacttggtgaagacaaggccgtcaggacccaccatgtctgccccatcacgcggccgagacatggcttgccacagctcttgaggatgtcaccaattaaccagaaatccagttattttccgccctcaaaatgacagccatggccggccgggtgcttctgggggctcgtcggggggacagctccactctgactggcacagtctttgcatggagacttgaggagggagggcttgaggttggtgaggttaggtgcgtgtttcctgtgcaagtcaggacatcagtctgattaaaggtggtgccaatttatttacatttaaacttgtcagggtataaaatgacatcccattaattatattgttaatcaatcacgtgtatagaaaaaaaataaaacttcaatacaggctgtccatggaaa

SEQ ID NO: 2090 - DNA, 2769 bp, Homo sapiens
  source 1..2769: mol_type = genomic DNA
gttgggcctgagaccgtcaccaagaccccttccctccacaggacatgctgggcctgcgccccccactgctcgccctggtggggctgctctccctcgggtgcgtcctctctcaggagtgcacgaagttcaaggtcagcagctgccgggaatgcatcgagtcggggcccggctgcacctggtgccagaagctgaacttcacagggccgggggatcctgactccattcgctgcgacacccggccacagctgctcatgaggggctgtgcggctgacgacatcatggaccccacaagcctcgctgaaacccaggaagaccacaatgggggccagaagcagctgtccccacaaaaagtgacgctttacctgcgaccaggccaggcagcagcgttcaacgtgaccttccggcgggccaagggctaccccatcgacctgtactatctgatggacctctcctactccatgcttgatgacctcaggaatgtcaagaagctaggtggcgacctgctccgggccctcaacgagatcaccgagtccggccgcattggcttcgggtccttcgtggacaagaccgtgctgccgttcgtgaacacgcaccctgataagctgcgaaacccatgccccaacaaggagaaagagtgccagcccccgtttgccttcaggcacgtgctgaagctgaccaacaactccaaccagtttcagaccgaggtcgggaagcagctgatttccggaaacctggatgcacccgagggtgggctggacgccatgatgcaggtcgccgcctgcccggaggaaatcggctggcgcaacgtcacgcggctgctggtgtttgccactgatgacggcttccatttcgcgggcgacgggaagctgggcgccatcctgacccccaacgacggccgctgtcacctggaggacaacttgtacaagaggagcaacgaattcgactacccatcggtgggccagctggcgcacaagctggctgaaaacaacatccagcccatcttcgcggtgaccagtaggatggtgaagacctacgagaaactcaccgagatcatccccaagtcagccgtgggggagctgtctgaggactccagcaatgtggtccaactcattaagaatgcttacaataaactctcctccagggtcttcctggatcacaacgccctccccgacaccctgaaagtcacctacgactccttctgcagcaatggagtgacgcacaggaaccagcccagaggtgactgtgatggcgtgcagatcaatgtcccgatcaccttccaggtgaaggtcacggccacagagtgcatccaggagcagtcgtttgtcatccgggcgctgggcttcacggacatagtgaccgtgcaggttcttccccagtgtgagtgccggtgccgggaccagagcagagaccgcagcctctgccatggcaagggcttcttggagtgcggcatctgcaggtgtgacactggctacattgggaaaaactgtgagtgccagacacagggccggagcagccaggagctggaaggaagctgccggaaggacaacaactccatcatctgctcagggctgggggactgtgtctgcgggcagtgcctgtgccacaccagcgacgtccccggcaagctgatatacgggcagtactgcgagtgtgacaccatcaactgtgagcgctacaacggccaggtctgcggcggcccggggagggggctctgcttctgcgggaagtgccgctgccacccgggctttgagggctcagcgtgccagtgcgagaggaccactgagggctgcctgaacccgcggcgtgttgagtgtagtggtcgtggccggtgccgctgcaacgtatgcgagtgccattcaggctaccagctgcctctgtgccaggagtgccccggctgcccctcaccctgtggcaagtacatctcctgcgccgagtgcctgaagttcgaaaagggcccctttgggaagaactgcagcgcggcgtgtccgggcctgcagctgtcgaacaaccccgtgaagggcaggacctgcaaggagagggactcagagggctgctgggtggcctacacgctggagcagcaggacgggatggaccgctacctcatctatgtggatgagagccgagagtgtgtggcaggccccaacatcgccgccatcgtcgggggcaccgtggcaggcatcgtgctgatcggcattctcctgctggtcatctggaaggctctgatccacctgagcgacctccgggagtacaggcgctttgagaaggagaagctcaagtcccagtggaacaatgataatccccttttcaagagcgccaccacgacggtcatgaaccccaagtttgctgagagttaggagcacttggtgaagacaaggccgtcaggacccaccatgtctgccccatcacgcggccgagacatggcttgccacagctcttgaggatgtcaccaattaaccagaaatccagttattttccgccctcaaaatgacagccatggccggccgggtgcttctgggggctcgtcggggggacagctccactctgactggcacagtctttgcatggagacttgaggagggagggcttgaggttggtgaggttaggtgcgtgtttcctgtgcaagtcaggacatcagtctgattaaaggtggtgccaatttatttacatttaaacttgtcagggtataaaatgacatcccattaattatattgttaatcaatcacgtgtatagaaaaaaaataaaacttcaatacaggctgtccatggaaa

SEQ ID NO: 2091 - DNA, 2813 bp, Homo sapiens
  source 1..2813: mol_type = genomic DNA
gacagggccaagcccagctctcctccaagcacaggctctgctcacggaggacctggggcacactggggcagagtgcacacaccgggacatgctgggcctgcgccccccactgctcgccctggtggggctgctctccctcgggtgcgtcctctctcaggagtgcacgaagttcaaggtcagcagctgccgggaatgcatcgagtcggggcccggctgcacctggtgccagaagctgaacttcacagggccgggggatcctgactccattcgctgcgacacccggccacagctgctcatgaggggctgtgcggctgacgacatcatggaccccacaagcctcgctgaaacccaggaagaccacaatgggggccagaagcagctgtccccacaaaaagtgacgctttacctgcgaccaggccaggcagcagcgttcaacgtgaccttccggcgggccaagggctaccccatcgacctgtactatctgatggacctctcctactccatgcttgatgacctcaggaatgtcaagaagctaggtggcgacctgctccgggccctcaacgagatcaccgagtccggccgcattggcttcgggtccttcgtggacaagaccgtgctgccgttcgtgaacacgcaccctgataagctgcgaaacccatgccccaacaaggagaaagagtgccagcccccgtttgccttcaggcacgtgctgaagctgaccaacaactccaaccagtttcagaccgaggtcgggaagcagctgatttccggaaacctggatgcacccgagggtgggctggacgccatgatgcaggtcgccgcctgcccggaggaaatcggctggcgcaacgtcacgcggctgctggtgtttgccactgatgacggcttccatttcgcgggcgacgggaagctgggcgccatcctgacccccaacgacggccgctgtcacctggaggacaacttgtacaagaggagcaacgaattcgactacccatcggtgggccagctggcgcacaagctggctgaaaacaacatccagcccatcttcgcggtgaccagtaggatggtgaagacctacgagaaactcaccgagatcatccccaagtcagccgtgggggagctgtctgaggactccagcaatgtggtccaactcattaagaatgcttacaataaactctcctccagggtcttcctggatcacaacgccctccccgacaccctgaaagtcacctacgactccttctgcagcaatggagtgacgcacaggaaccagcccagaggtgactgtgatggcgtgcagatcaatgtcccgatcaccttccaggtgaaggtcacggccacagagtgcatccaggagcagtcgtttgtcatccgggcgctgggcttcacggacatagtgaccgtgcaggttcttccccagtgtgagtgccggtgccgggaccagagcagagaccgcagcctctgccatggcaagggcttcttggagtgcggcatctgcaggtgtgacactggctacattgggaaaaactgtgagtgccagacacagggccggagcagccaggagctggaaggaagctgccggaaggacaacaactccatcatctgctcagggctgggggactgtgtctgcgggcagtgcctgtgccacaccagcgacgtccccggcaagctgatatacgggcagtactgcgagtgtgacaccatcaactgtgagcgctacaacggccaggtctgcggcggcccggggagggggctctgcttctgcgggaagtgccgctgccacccgggctttgagggctcagcgtgccagtgcgagaggaccactgagggctgcctgaacccgcggcgtgttgagtgtagtggtcgtggccggtgccgctgcaacgtatgcgagtgccattcaggctaccagctgcctctgtgccaggagtgccccggctgcccctcaccctgtggcaagtacatctcctgcgccgagtgcctgaagttcgaaaagggcccctttgggaagaactgcagcgcggcgtgtccgggcctgcagctgtcgaacaaccccgtgaagggcaggacctgcaaggagagggactcagagggctgctgggtggcctacacgctggagcagcaggacgggatggaccgctacctcatctatgtggatgagagccgagagtgtgtggcaggccccaacatcgccgccatcgtcgggggcaccgtggcaggcatcgtgctgatcggcattctcctgctggtcatctggaaggctctgatccacctgagcgacctccgggagtacaggcgctttgagaaggagaagctcaagtcccagtggaacaatgataatccccttttcaagagcgccaccacgacggtcatgaaccccaagtttgctgagagttaggagcacttggtgaagacaaggccgtcaggacccaccatgtctgccccatcacgcggccgagacatggcttgccacagctcttgaggatgtcaccaattaaccagaaatccagttattttccgccctcaaaatgacagccatggccggccgggtgcttctgggggctcgtcggggggacagctccactctgactggcacagtctttgcatggagacttgaggagggagggcttgaggttggtgaggttaggtgcgtgtttcctgtgcaagtcaggacatcagtctgattaaaggtggtgccaatttatttacatttaaacttgtcagggtataaaatgacatcccattaattatattgttaatcaatcacgtgtatagaaaaaaaataaaacttcaatacaggctgtccatggaaa

SEQ ID NO: 2092 - DNA, 571 bp, Homo sapiens
  source 1..571: mol_type = genomic DNA
agaaagaagagtggcatgctttgacagcaagtggactccgagtccagggcagagcctcagttagggaggagctgagaggaacaggaagtgtcaggactttacgacccgcgcctccagctgaggtttctagacgtgacccagggcagactggtagcaaagcccccacgcccagccaggagcaccgccgaggactccagcacaccgagggacatgctgggcctgcgccccccactgctcgccctggtggggctgctctccctcgggtgcgtcctctctcaggagtgcacgaagttcaaggtcagcagctgccgggaatgcatcgagtcggggcccggctgcacctggtgccagaagctgaacttcacagggccgggggatcctgactccattcgctgcgacacccggccacagctgctcatgaggggctgtgcggctgacgacatcatggaccccacaagcctcgctgaaacccaggaagaccacaatgggggccagaagcagctgtccccacaaaaagtgacgctttacctgcgaccaggccaggcagcagcgttcaacgtgaccttccggc

SEQ ID NO: 2093 - DNA, 527 bp, Homo sapiens
  source 1..527: mol_type = genomic DNA
ctctcccaagtgtgaatctgatggaagcaggtccttctcgccgggacctcatgtgagaaatgacatgtcccacctgtctcaaggggccgctctctgacatcagagctgctgtagagcggagaggggcaggggtgaagggccacggtggtgcaacccaccacttcctccaaggaggagctgagaggaacaggaagtgtcaggactttacgacccgcgcctccagctgaggtttctagacgtgacccagggcagactggtagcaaagcccccacgcccagccaggagcaccgccgaggactccagcacaccgagggacatgctgggcctgcgccccccactgctcgccctggtggggctgctctccctcgggtgcgtcctctctcaggagtgcacgaagttcaaggtcagcagctgccgggaatgcatcgagtcggggcccggctgcacctggtgccagaagctgaacttcacagggccgggggatcctgactccattcgctgcgacacccggccacagctgctcatga

SEQ ID NO: 2094 - DNA, 556 bp, Homo sapiens
  source 1..556: mol_type = genomic DNA
agccacgttccagggcacctggctgggacctgccgcagcctctgcgcgcagcgggctccatcccccgggccacggattgggagactgaggcaggcgcgaagcccgccgcccagcctccgctagggagaccccggccacctccaggcagttttcctgaagcccggggccaggagaaggggccgctctctgacatcagagctgctgtagagcggagaggggcaggggtgaagggccacggtggtgcaacccaccacttcctccaaggaggagctgagaggaacaggaagtgtcaggactttacgacccgcgcctccagctgaggtttctagacgtgacccagggcagactggtagcaaagcccccacgcccagccaggagcaccgccgaggactccagcacaccgagggacatgctgggcctgcgccccccactgctcgccctggtggggctgctctccctcgggtgcgtcctctctcaggagtgcacgaagttcaaggtcagcagctgccgggaatgcatcgagtcggggcccggctgcacctggtgccagaagctg

SEQ ID NO: 2095 - DNA, 573 bp, Homo sapiens
  source 1..573: mol_type = genomic DNA
aagggcgactctgatgcaaggttctgagaggcctgtggggctgtggattcctaagcagcctcagctttgggttttgcaccttaggtcttggacatgctgggcctgcgccccccactgctcgccctggtggggctgctctccctcgggtgcgtcctctctcaggagtgcacgaagttcaaggtcagcagctgccgggaatgcatcgagtcggggcccggctgcacctggtgccagaagctgaacttcacagggccgggggatcctgactccattcgctgcgacacccggccacagctgctcatgaggggctgtgcggctgacgacatcatggaccccacaagcctcgctgaaacccaggaagaccacaatgggggccagaagcagctgtccccacaaaaagtgacgctttacctgcgaccaggccaggcagcagcgttcaacgtgaccttccggcgggccaagggctaccccatcgacctgtactatctgatggacctctcctactccatgcttgatgacctcaggaatgtcaagaagctaggtggcgacctgctccgggccctcaacgagatc

SEQ ID NO: 2096 - DNA, 680 bp, Homo sapiens
  source 1..680: mol_type = genomic DNA
atgcatgtatatgtgtggtgtgtgcatgcacgtggtgtgtacatgcagtcaggcacacatctgtatgcacgtacacgtgcatgtgtggtgtgtgtacacgtctgcatgtgtgtgtgtgcctgtgttgtgtgcctctgcaggggcccgctgcagctgtcctgggtgcctggctgagcaggacatgctgggcctgcgccccccactgctcgccctggtggggctgctctccctcgggtgcgtcctctctcaggagtgcacgaagttcaaggtcagcagctgccgggaatgcatcgagtcggggcccggctgcacctggtgccagaagctgaacttcacagggccgggggatcctgactccattcgctgcgacacccggccacagctgctcatgaggggctgtgcggctgacgacatcatggaccccacaagcctcgctgaaacccaggaagaccacaatgggggccagaagcagctgtccccacaaaaagtgacgctttacctgcgaccaggccaggcagcagcgttcaacgtgaccttccggcgggccaagggctaccccatcgacctgtactatctgatggacctctcctactccatgcttgatgacctcaggaatgtcaagaagctaggtggcgacctgctccgggccctcaacgagatcaccgagtccggccgcattg

SEQ ID NO: 2097 - DNA, 2200 bp, Homo sapiens
  source 1..2200: mol_type = genomic DNA
gcccccacgcccagccaggagcaccgccgaggactccagcacaccgagggacatgctgggcctgcgccccccactgctcgccctggtggggctgctctccctcgggtgcgtcctctctcaggagtgcacgaagttcaaggtcagcagctgccgggaatgcatcgagtcggggcccggctgcacctggtgccagaagctgaacttcacagggccgggggatcctgactccattcgctgcgacacccggccacagctgctcatgaggggctgtgcggctgacgacatcatggaccccacaagcctcgctgaaacccaggaagaccacaatgggggccagaagcagctgtccccacaaaaagtgacgctttacctgcgaccaggcttcgggtccttcgtggacaagaccgtgctgccgttcgtgaacacgcaccctgataagctgcgaaacccatgccccaacaaggagaaagagtgccagcccccgtttgccttcaggcacgtgctgaagctgaccaacaactccaaccagtttcagaccgaggtcgggaagcagctgatttccggaaacctggatgcacccgagggtgggctggacgccatgatgcaggtcgccgcctgcccggaggaaatcggctggcgcaacgtcacgcggctgctggtgtttgccactgatgacggcttccatttcgcgggcgacgggaagctgggcgccatcctgacccccaacgacggccgctgtcacctggaggacaacttgtacaagaggagcaacgaattcgactacccatcggtgggccagctggcgcacaagctggctgaaaacaacatccagcccatcttcgcggtgaccagtaggatggtgaagacctacgagaaactcaccgagatcatccccaagtcagccgtgggggagctgtctgaggactccagcaatgtggtccaactcattaagaatgcttacaataaactctcctccagggtcttcctggatcacaacgccctccccgacaccctgaaagtcacctacgactccttctgcagcaatggagtgacgcacaggaaccagcccagaggtgactgtgatggcgtgcagatcaatgtcccgatcaccttccaggtgaaggtcacggccacagagtgcatccaggagcagtcgtttgtcatcgggcgctgggcttcacggacatagtgaccgtgcaggttcttccccagtgtgagtgccggtgccgggaccagagcagagaccgcagcctctgccatggcaagggcttcttggagtgcggcatctgcaggtgtgacactggctacattgggaaaaactgtgagtgccagacacagggccggagcagccaggagctggaaggaagctgccggaaggacaacaactccatcatctgctcagggctgggggactgtgtctgcgggcagtgcctgtgccacaccagcgacgtccccggcaagctgatatacgggcagtactgcgagtgtgacaccatcaactgtgagcgctacaacggccaggtctgcggcggcccggggagggggctctgcttctgcgggaagtgccgctgccacccgggctttgagggctcagcgtgccagtgcgagaggaccactgagggctgcctgaacccgcggcgtgttgagtgtagtggtcgtggccggtgccgctgcaacgtatgcgagtgccattcaggctaccagctgcctctgtgccaggagtgccccggctgcccctcaccctgtggcaagtacatctcctgcgccgagtgcctgaagttcgaaaagggcccctttgggaagaactgcagcgcggcgtgtccgggcctgcagctgtcgaacaaccccgtgaagggcaggacctgcaaggagagggactcagagggctgctgggtggcctacacgctggagcagcaggacgggatggaccgctacctcatctatgtggatgagagccgagagtgtgtggcaggccccaacatcgccgccatcgtcgggggcaccgtggcaggcatcgtgctgatcggcattctcctgctggtcatctggaaggctctgatccacctgagcgacctccgggagtacaggcgctttgagaaggagaagctcaagtcccagtggaacaatgataatccccttttcaagagcgccaccacgacggtcatgaaccccaagtttgctgagagttaggagcacttgg

SEQ ID NO: 2098 - DNA, 4894 bp, Homo sapiens
  source 1..4894: mol_type = genomic DNA
cgccgcgggaggcggacgagatgcgagcgcggccgcggccccggccgctctgggcgactgtgctggcgctgggggcgctggcgggcgttggcgtaggagggcccaacatctgtaccacgcgaggtgtgagctcctgccagcagtgcctggctgtgagccccatgtgtgcctggtgctctgatgaggccctgcctctgggctcacctcgctgtgacctgaaggagaatctgctgaaggataactgtgccccagaatccatcgagttcccagtgagtgaggcccgagtactagaggacaggcccctcagcgacaagggctctggagacagctcccaggtcactcaagtcagtccccagaggattgcactccggctccggccagatgattcgaagaatttctccatccaagtgcggcaggtggaggattaccctgtggacatctactacttgatggacctgtcttactccatgaaggatgatctgtggagcatccagaacctgggtaccaagctggccacccagatgcgaaagctcaccagtaacctgcggattggcttcggggcatttgtggacaagcctgtgtcaccatacatgtatatctccccaccagaggccctcgaaaacccctgctatgatatgaagaccacctgcttgcccatgtttggctacaaacacgtgctgacgctaactgaccaggtgacccgcttcaatgaggaagtgaagaagcagagtgtgtcacggaaccgagatgccccagagggtggctttgatgccatcatgcaggctacagtctgtgatgaaaagattggctggaggaatgatgcatcccacttgctggtgtttaccactgatgccaagactcatatagcattggacggaaggctggcaggcattgtccagcctaatgacgggcagtgtcatgttggtagtgacaatcattactctgcctccactaccatggattatccctctttggggctgatgactgagaagctatcccagaaaaacatcaatttgatctttgcagtgactgaaaatgtagtcaatctctatcagaactatagtgagctcatcccagggaccacagttggggttctgtccatggattccagcaatgtcctccagctcattgttgatgcttatgggaaaatccgttctaaagtagagctggaagtgcgtgacctccctgaagagttgtctctatccttcaatgccacctgcctcaacaatgaggtcatccctggcctcaagtcttgtatgggactcaagattggagacacggtgagcttcagcattgaggccaaggtgcgaggctgtccccaggagaaggagaagtcctttaccataaagcccgtgggcttcaaggacagcctgatcgtccaggtcacctttgattgtgactgtgcctgccaggcccaagctgaacctaatagccatcgctgcaacaatggcaatgggacctttgagtgtggggtatgccgttgtgggcctggctggctgggatcccagtgtgagtgctcagaggaggactatcgcccttcccagcaggacgaatgcagcccccgggagggtcagcccgtctgcagccagcggggcgagtgcctctgtggtcaatgtgtctgccacagcagtgactttggcaagatcacgggcaagtactgcgagtgtgacgacttctcctgtgtccgctacaagggggagatgtgctcaggccatggccagtgcagctgtggggactgcctgtgtgactccgactggaccggctactactgcaactgtaccacgcgtactgacacctgcatgtccagcaatgggctgctgtgcagcggccgcggcaagtgtgaatgtggcagctgtgtctgtatccagccgggctcctatggggacacctgtgagaagtgccccacctgcccagatgcctgcacctttaagaaagaatgtgtggagtgtaagaagtttgaccggggagccctacatgacgaaaatacctgcaaccgttactgccgtgacgagattgagtcagtgaaagagcttaaggacactggcaaggatgcagtgaattgtacctataagaatgaggatgactgtgtcgtcagattccagtactatgaagattctagtggaaagtccatcctgtatgtggtagaagagccagagtgtcccaagggccctgacatcctggtggtcctgctctcagtgatgggggccattctgctcattggccttgccgccctgctcatctggaaactcctcatcaccatccacgaccgaaaagaattcgctaaatttgaggaagaacgcgccagagcaaaatgggacacagccaacaacccactgtataaagaggccacgtctaccttcaccaatatcacgtaccggggcacttaatgataagcagtcatcctcagatcattatcagcctgtgccacgattgcaggagtccctgccatcatgtttacagaggacagtatttgtggggagggatttggggctcagagtggggtaggttgggagaatgtcagtatgtggaagtgtgggtctgtgtgtgtgtatgtgggggtctgtgtgtttatgtgtgtgtgttgtgtgtgggagtgtgtaatttaaaattgtgatgtgtcctgataagctgagctccttagcctttgtcccagaatgcctcctgcagggattcttcctgcttagcttgagggtgactatggagctgagcaggtgttcttcattacctcagtgagaagccagctttcctcatcaggccattgtccctgaagagaagggcagggctgaggcctctcattccagaggaagggacaccaagccttggctctaccctgagttcataaatttatggttctcaggcctgactctcagcagctatggtaggaactgctgggcttggcagcccgggtcatctgtacctctgcctcctttcccctccctcaggccgaaggaggagtcagggagagctgaactattagagctgcctgtgccttttgccatcccctcaacccagctatggttctctcgcaagggaagtccttgcaagctaattctttgacctgttgggagtgaggatgtctgggccactcaggggtcattcatggcctgggggatgtaccagcatctcccagttcataatcacaacccttcagatttgccttattggcagctctactctggaggtttgtttagaagaagtgtgtcacccttaggccagcaccatctctttacctcctaattccacaccctcactgctgtagacatttgctatgagctggggatgtctctcatgaccaaatgcttttcctcaaagggagagagtgctattgtagagccagaggtctggccctatgcttccggcctcctgtccctcatccatagcacctccacatacctggccctgtgccttggtgtgctgtatccatccatggggctgattgtatttaccttctacctcttggctgccttgtgaaggaattattcccatgagttggctgggaataagtgccaggatggaatgatgggtcagttgtatcagcacgtgtggcctgttcttctatgggttggacaacctcattttaactcagtctttaatctgagaggccacagtgcaattttattttatttttctcatgatgaggttttcttaacttaaaagaacatgtatataaacatgcttgcattatatttgtaaatttatgtgatggcaaagaaggagagcataggaaaccacacagacttgggcagggtacagacactcccacttggcatcattcacagcaagtcactggccagtggctggatctgtgaggggctctctcatgatagaaggctatggggatagatgtgtggacacattggacctttcctgaggaagagggactgttcttttgtcccagaaaagcagtggctccattggtgttgacatacatccaacattaaaagccacccccaaatgcccaagaaaaaaagaaagacttatcaacatttgttccatgagcagaaaactggagctctggcctcagtgttacagctaaataatctttaattaaggcaagtcactttcttcttcttaaagctgttttctagtttgagaaatgatgggattttagcagccagtcttgaaggtctctttcagtatcaacattctaagatgctgggacttactgtgtcatcaaatgtgcggttaagattctctgggatattgatactgtttgtgtttttagttgggagatctgagagacctggctttggcaagagcagatgtcattccatatcacctttctcaatgaaagtctcattctatcctctctccaaacccgttttccaacatttgttaatagttacgtctctcctgatgtagcacttaagcttcatttagttattatttctttcttcactttgcacacatttgcatccacatattagggaagaggaatccataagtagctgaaatatctattctgtattattgtgttaacattgagaataagccttggaattagatatggggcaatgactgagccctgtctcacccatggattactccttactgtagggaatggcagtatggtagagggataaatagggggcggggagggatagtcatggatccaagaagtccttagaaatagtggcagggaacaggtgtggaagctcatgcctgtaattataaccttcagctactaagacaggtgtggtggctcacgcctgtgattataatcttcagttactaagacagagtccatgagagtgttaatgggacattttctttagataagatgttttatatgaagaaactgtatcaaagggggaagaaaatgtatttaacaggtgaatcaaatcaggaatcttgtctgagctactggaatgaagttcacaggtcttgaagacca

SEQ ID NO: 2099 - DNA, 2785 bp, Homo sapiens
  source 1..2785: mol_type = genomic DNA
gactgtgctggcgctgggggcgctggcgggcgttggcgtaggagggcccaacatctgtaccacgcgaggtgtgagctcctgccagcagtgcctggctgtgagccccatgtgtgcctggtgctctgatgaggccctgcctctgggctcacctcgctgtgacctgaaggagaatctgctgaaggataactgtgccccagaatccatcgagttcccagtgagtgaggcccgagtactagaggacaggcccctcagcgacaagggctctggagacagctcccaggtcactcaagtcagtccccagaggattgcactccggctccggccagatgattcgaagaatttctccatccaagtgcggcaggtggaggattaccctgtggacatctactacttgatggacctgtcttactccatgaaggatgatctgtggagcatccagaacctgggtaccaagctggccacccagatgcgaaagctcaccagtaacctgcggattggcttcggggcatttgtggacaagcctgtgtcaccatacatgtatatctccccaccagaggccctcgaaaacccctgctatgatatgaagaccacctgcttgcccatgtttggctacaaacacgtgctgacgctaactgaccaggtgacccgcttcaatgaggaagtgaagaagcagagtgtgtcacggaaccgagatgccccagagggtggctttgatgccatcatgcaggctacagtctgtgatgaaaagattggctggaggaatgatgcatcccacttgctggtgtttaccactgatgccaagactcatatagcattggacggaaggctggcaggcattgtccagcctaatgacgggcagtgtcatgttggtagtgacaatcattactctgcctccactaccatggattatccctctttggggctgatgactgagaagctatcccagaaaaacatcaatttgatctttgcagtgactgaaaatgtagtcaatctctatcagaactatagtgagctcatcccagggaccacagttggggttctgtccatggattccagcaatgtcctccagctcattgttgatgcttatgggaaaatccgttctaaagtagagctggaagtgcgtgacctccctgaagagttgtctctatccttcaatgccacctgcctcaacaatgaggtcatccctggcctcaagtcttgtatgggactcaagattggagacacggtgagcttcagcattgaggccaaggtgcgaggctgtccccaggagaaggagaagtcctttaccataaagcccgtgggcttcaaggacagcctgatcgtccaggtcacctttgattgtgactgtgcctgccaggcccaagctgaacctaatagccatcgctgcaacaatggcaatgggacctttgagtgtggggtatgccgttgtgggcctggctggctgggatcccagtgtgagtgctcagaggaggactatcgcccttcccagcaggacgaatgcagcccccgggagggtcagcccgtctgcagccagcggggcgagtgcctctgtggtcaatgtgtctgccacagcagtgactttggcaagatcacgggcaagtactgcgagtgtgacgacttctcctgtgtccgctacaagggggagatgtgctcaggccatggccagtgcagctgtggggactgcctgtgtgactccgactggaccggctactactgcaactgtaccacgcgtactgacacctgcatgtccagcaatgggctgctgtgcagcggccgcggcaagtgtgaatgtggcagctgtgtctgtatccagccgggctcctatggggacacctgtgagaagtgccccacctgcccagatgcctgcacctttaagaaagaatgtgtggagtgtaagaagtttgaccggggagccctacatgacgaaaatacctgcaaccgttactgccgtgacgagattgagtcagtgaaagagcttaaggacactggcaaggatgcagtgaattgtacctataagaatgaggatgactgtgtcgtcagattccagtactatgaagattctagtggaaagtccatcctgtatgtggtagaagagccagagtgtcccaagggccctgacatcctggtggtcctgctctcagtgatgggggccattctgctcattggccttgccgccctgctcatctggaaactcctcatcaccatccacgaccgaaaagaattcgctaaatttgaggaagaacgcgccagagcaaaatgggacacagaaatccttttgtactattgctcattcatacttgttcatcaaagcctggagtccttaaggacagaatttacctctaaacagaaagatggaaactaaagtacatttattctgccaggcagaggaaaatattgacttattagatgatggctctaattcttttgcaactgacttgtcatcaggaactattaaccacaagaaatacatcaagttttctaaaacaatagagaaggaaatttcaccggaaattaggagtttgagcccagaatataaaaaaatatttgaaacatcaataatcttttgtggagaagaaaagtcctctgatttttcaggagaaaaaaaagttgggagaaagagtttacaagtacaacagcacagtaaaagaactgagattatccctccttttctgaagctgtcaaaggagaaggtgacaaggaaagaaaactctttatgcaagttgccgaatcagtacagcgttcacaagacttcatcacctctttgtacatcttctgcaattactcg

SEQ ID NO: 2100 - DNA, 3995 bp, Homo sapiens
  source 1..3995: mol_type = genomic DNA
gcgggaggcggacgagatgcgagcgcggccgcggccccggccgctctgggcgactgtgctggcgctgggggcgctggcgggcgttggcgtaggagggcccaacatctgtaccacgcgaggtgtgagctcctgccagcagtgcctggctgtgagccccatgtgtgcctggtgctctgatgaggccctgcctctgggctcacctcgctgtgacctgaaggagaatctgctgaaggataactgtgccccagaatccatcgagttcccagtgagtgaggcccgagtactagaggacaggcccctcagcgacaagggctctggagacagctcccaggtcactcaagtcagtccccagaggattgcactccggctccggccagatgattcgaagaatttctccatccaagtgcggcaggtggaggattaccctgtggacatctactacttgatggacctgtcttactccatgaaggatgatctgtggagcatccagaacctgggtaccaagctggccacccagatgcgaaagctcaccagtaacctgcggattggcttcggggcatttgtggacaagcctgtgtcaccatacatgtatatctccccaccagaggccctcgaaaacccctgctatgatatgaagaccacctgcttgcccatgtttggctacaaacacgtgctgacgctaactgaccaggtgacccgcttcaatgaggaagtgaagaagcagagtgtgtcacggaaccgagatgccccagagggtggctttgatgccatcatgcaggctacagtctgtgatgaaaagattggctggaggaatgatgcatcccacttgctggtgtttaccactgatgccaagactcatatagcattggacggaaggctggcaggcattgtccagcctaatgacgggcagtgtcatgttggtagtgacaatcattactctgcctccactaccatggattatccctctttggggctgatgactgagaagctatcccagaaaaacatcaatttgatctttgcagtgactgaaaatgtagtcaatctctatcagaactatagtgagctcatcccagggaccacagttggggttctgtccatggattccagcaatgtcctccagctcattgttgatgcttatgggaaaatccgttctaaagtagagctggaagtgcgtgacctccctgaagagttgtctctatccttcaatgccacctgcctcaacaatgaggtcatccctggcctcaagtcttgtatgggactcaagattggagacacggtgagcttcagcattgaggccaaggtgcgaggctgtccccaggagaaggagaagtcctttaccataaagcccgtgggcttcaaggacagcctgatcgtccaggtcacctttgattgtgactgtgcctgccaggcccaagctgaacctaatagccatcgctgcaacaatggcaatgggacctttgagtgtggggtatgccgttgtgggcctggctggctgggatcccagtgtgagtgctcagaggaggactatcgcccttcccagcaggacgaatgcagcccccgggagggtcagcccgtctgcagccagcggggcgagtgcctctgtggtcaatgtgtctgccacagcagtgactttggcaagatcacgggcaagtactgcgagtgtgacgacttctcctgtgtccgctacaagggggagatgtgctcaggccatggccagtgcagctgtggggactgcctgtgtgactccgactggaccggctactactgcaactgtaccacgcgtactgacacctgcatgtccagcaatgggctgctgtgcagcggccgcggcaagtgtgaatgtggcagctgtgtctgtatccagccgggctcctatggggacacctgtgagaagtgccccacctgcccagatgcctgcacctttaagaaagaatgtgtggagtgtaagaagtttgaccggggagccctacatgacgaaaatacctgcaaccgttactgccgtgacgagattgagtcagtgaaagagcttaaggacactggcaaggatgcagtgaattgtacctataagaatgaggatgactgtgtcgtcagattccagtactatgaagattctagtggaaagtccatcctgtatgtggtagaagagccagagtgtcccaagggccctgacatcctggtggtcctgctctcagtgatgggggccattctgctcattggccttgccgccctgctcatctggaaactcctcatcaccatccacgaccgaaaagaattcgctaaatttgaggaagaacgcgccagagcaaaatgggacacagccaacaacccactgtataaagaggccacgtctaccttcaccaatatcacgtaccggggcacttaatgataagcagtcatcctcagatcattatcagcctgtgccacgattgcaggagtccctgccatcatgtttacagaggacagtatttgtggggagggatttggggctcagagtggggtaggttgggagaatgtcagtatgtggaagtgtgggtctgtgtgtgtgtatgtgggggtctgtgtgtttatgtgtgtgtgttgtgtgtgggagtgtgtaatttaaaattgtgatgtgtcctgataagctgagctccttagcctttgtcccagaatgcctcctgcagggattcttcctgcttagcttgagggtgactatggagctgagcaggtgttcttcattacctcagtgagaagccagctttcctcatcaggccattgtccctgaagagaagggcagggctgaggcctctcattccagaggaagggacaccaagccttggctctaccctgagttcataaatttatggttctcaggcctgactctcagcagctatggtaggaactgctgggcttggcagcccgggtcatctgtacctctgcctcctttcccctccctcaggccgaaggaggagtcagggagagctgaactattagagctgcctgtgccttttgccatcccctcaacccagctatggttctctcgcaagggaagtccttgcaagctaattctttgacctgttgggagtgaggatgtctgggccactcaggggtcattcatggcctgggggatgtaccagcatctcccagttcataatcacaacccttcagatttgccttattggcagctctactctggaggtttgtttagaagaagtgtgtcacccttaggccagcaccatctctttacctcctaattccacaccctcactgctgtagacatttgctatgagctggggatgtctctcatgaccaaatgcttttcctcaaagggagagagtgctattgtagagccagaggtctggccctatgcttccggcctcctgtccctcatccatagcacctccacatacctggccctgtgccttggtgtgctgtatccatccatggggctgattgtatttaccttctacctcttggctgccttgtgaaggaattattcccatgagttggctgggaataagtgccaggatggaatgatgggtcagttgtatcagcacgtgtggcctgttcttctatgggttggacaacctcattttaactcagtctttaatctgagaggccacagtgcaattttattttatttttctcatgatgaggttttcttaacttaaaagaacatgtatataaacatgcttgcattatatttgtaaatttatgtgatggcaaagaaggagagcataggaaaccacacagacttgggcagggtacagacactcccacttggcatcattcacagcaagtcactggccagtggctggatctgtgaggggctctctcatgatagaaggctatggggatagatgtgtggacacattggacctttcctgaggaagagggactgttcttttgtcccagaaaagcagtggctccattggtgttgacatacatccaacattaaaagccacccccaaatgcccaagaaaaaaagaaagacttatcaacatttgttccatgag

SEQ ID NO: 2101 - DNA, 1802 bp, Homo sapiens
  source 1..1802: mol_type = genomic DNA
aagagcgccacgggcggggcggggccggcggcgggctgcgggcgcggccggacgggagttccccggagaaggatcctgcagcccgagtcccgaggataaagcttggggttcatcctccttccctggatcactccacagtcctcaggcttccccaatccaggggactcggcgccgggacgctgctatggacgacattttcactcagtgccgggagggcaacgcagtcgccgttcgcctgtggctggacaacacggagaacgacctcaaccagggggacgatcatggcttctcccccttgcactgggcctgccgagagggccgctctgctgtggttgagatgttgatcatgcggggggcacggatcaatgtaatgaaccgtggggatgacacccccctgcatctggcagccagtcatggacaccgtgatattgtacagaagctattgcagtacaaggcagacatcaatgcagtgaatgaacacgggaatgtgcccctgcactatgcctgtttttggggccaagatcaagtggcagaggacctggtggcaaatggggcccttgtcagcatctgtaacaagtatggagagatgcctgtggacaaagccaaggcacccctgagagagcttctccgagagcgggcagagaagatgggccagaatctcaaccgtattccatacaaggacacattctggaaggggaccacccgcactcggccccgaaatggaaccctgaacaaacactctggcattgacttcaaacagcttaacttcctgacgaagctcaacgagaatcactctggagagctatggaagggccgctggcagggcaatgacattgtcgtgaaggtgctgaaggttcgagactggagtacaaggaagagcagggacttcaatgaagagtgtccccggctcaggattttctcgcatccaaatgtgctcccagtgctaggtgcctgccagtctccacctgctcctcatcctactctcatcacacactggatgccgtatggatccctctacaatgtactacatgaaggcaccaatttcgtcgtggaccagagccaggctgtgaagtttgctttggacatggcaaggggcatggccttcctacacacactagagcccctcatcccacgacatgcactcaatagccgtagtgtaatgattgatgaggacatgactgcccgaattagcatggctgatgtcaagttctctttccaatgtcctggtcgcatgtatgcacctgcctgggtagcccccgaagctctgcagaagaagcctgaagacacaaacagacgctcagcagacatgtggagttttgcagtgcttctgtgggaactggtgacacgggaggtaccctttgctgacctctccaatatggagattggaatgaaggtggcattggaaggccttcggcctaccatcccaccaggtatttcccctcatgtgtgtaagctcatgaagatctgcatgaatgaagaccctgcaaagcgacccaaatttgacatgattgtgcctatccttgagaagatgcaggacaagtaggactggaaggtccttgcctgaactccagaggtgtcgggacatggttgggggaatgcacctccccaaagcagcaggcctctggttgcctcccccgcctccagtcatggtactaccccagccatggggtccatccccttcccccatccctaccactgtggccccaagaggggcgggctcagagctttgtcacttgccacatggtgtctcccaacatgggagggatcagccccgcctgtcacaataaagtttattatgaaaa

SEQ ID NO: 2102 - DNA, 2074 bp, Homo sapiens
  source 1..2074: mol_type = genomic DNA
agtcccggtgagtgcgagaggacccgcgccccctgtcacccctcacttctcctgagtcccaagtaaggaacggagccaaccctggggaggacccccggtcccctctcccagagtatacggagcctgaacctccccacttcccccaactctgttcgcggatagggtctagttgcctgctctcggacatccgttcagcagacactacctcttcgtcaccccctgcccaccctgacccgcctttacctcgcgtctagaggacacagccagggatcatcccgcagccccgaactccttcacagacccccactagccggggacgcagctcaggccccctacccccaacacaaacacttctctcctgtagaggataaagcttggggttcatcctccttccctggatcactccacagtcctcaggcttccccaatccaggggactcggcgccgggacgctgctatggacgacattttcactcagtgccgggagggcaacgcagtcgccgttcgcctgtggctggacaacacggagaacgacctcaaccagggggacgatcatggcttctcccccttgcactgggcctgccgagagggccgctctgctgtggttgagatgttgatcatgcggggggcacggatcaatgtaatgaaccgtggggatgacacccccctgcatctggcagccagtcatggacaccgtgatattgtacagaagctattgcagtacaaggcagacatcaatgcagtgaatgaacacgggaatgtgcccctgcactatgcctgtttttggggccaagatcaagtggcagaggacctggtggcaaatggggcccttgtcagcatctgtaacaagtatggagagatgcctgtggacaaagccaaggcacccctgagagagcttctccgagagcgggcagagaagatgggccagaatctcaaccgtattccatacaaggacacattctggaaggggaccacccgcactcggccccgaaatggaaccctgaacaaacactctggcattgacttcaaacagcttaacttcctgacgaagctcaacgagaatcactctggagagctatggaagggccgctggcagggcaatgacattgtcgtgaaggtgctgaaggttcgagactggagtacaaggaagagcagggacttcaatgaagagtgtccccggctcaggattttctcgcatccaaatgtgctcccagtgctaggtgcctgccagtctccacctgctcctcatcctactctcatcacacactggatgccgtatggatccctctacaatgtactacatgaaggcaccaatttcgtcgtggaccagagccaggctgtgaagtttgctttggacatggcaaggggcatggccttcctacacacactagagcccctcatcccacgacatgcactcaatagccgtagtgtaatgattgatgaggacatgactgcccgaattagcatggctgatgtcaagttctctttccaatgtcctggtcgcatgtatgcacctgcctgggtagcccccgaagctctgcagaagaagcctgaagacacaaacagacgctcagcagacatgtggagttttgcagtgcttctgtgggaactggtgacacgggaggtaccctttgctgacctctccaatatggagattggaatgaaggtggcattggaaggccttcggcctaccatcccaccaggtatttcccctcatgtgtgtaagctcatgaagatctgcatgaatgaagaccctgcaaagcgacccaaatttgacatgattgtgcctatccttgagaagatgcaggacaagtaggactggaaggtccttgcctgaactccagaggtgtcgggacatggttgggggaatgcacctccccaaagcagcaggcctctggttgcctcccccgcctccagtcatggtactaccccagccatggggtccatccccttcccccatccctaccactgtggccccaagaggggcgggctcagagctttgtcacttgccacatggtgtctcccaacatgggagggatcagccccgcctgtcacaataaagtttattatgaaaa

SEQ ID NO: 2103 - DNA, 1692 bp, Homo sapiens
  source 1..1692: mol_type = genomic DNA
gcggcgggctgcgggcgcggccggacgggagttccccggagaaggatcctgcagcccgagtcccgtcctcaggcttccccaatccaggggactcggcgccgggacgctgctatggacgacattttcactcagtgccgggagggcaacgcagtcgccgttcgcctgtggctggacaacacggagaacgacctcaaccagggggacgatcatggcttctcccccttgcactgggcctgccgagagggccgctctgctgtggttgagatgttgatcatgcggggggcacggatcaatgtaatgaaccgtggggatgacacccccctgcatctggcagccagtcatggacaccgtgatattgtacagaagctattgcagtacaaggcagacatcaatgcagtgaatgaacacgggaatgtgcccctgcactatgcctgtttttggggccaagatcaagtggcagaggacctggtggcaaatggggcccttgtcagcatctgtaacaagtatggagagatgcctgtggacaaagccaaggcacccctgagagagcttctccgagagcgggcagagaagatgggccagaatctcaaccgtattccatacaaggacacattctggaaggggaccacccgcactcggccccgaaatggaaccctgaacaaacactctggcattgacttcaaacagcttaacttcctgacgaagctcaacgagaatcactctggagagctatggaagggccgctggcagggcaatgacattgtcgtgaaggtgctgaaggttcgagactggagtacaaggaagagcagggacttcaatgaagagtgtccccggctcaggattttctcgcatccaaatgtgctcccagtgctaggtgcctgccagtctccacctgctcctcatcctactctcatcacacactggatgccgtatggatccctctacaatgtactacatgaaggcaccaatttcgtcgtggaccagagccaggctgtgaagtttgctttggacatggcaaggggcatggccttcctacacacactagagcccctcatcccacgacatgcactcaatagccgtagtgtaatgattgatgaggacatgactgcccgaattagcatggctgatgtcaagttctctttccaatgtcctggtcgcatgtatgcacctgcctgggtagcccccgaagctctgcagaagaagcctgaagacacaaacagacgctcagcagacatgtggagttttgcagtgcttctgtgggaactggtgacacgggaggtaccctttgctgacctctccaatatggagattggaatgaaggtggcattggaaggccttcggcctaccatcccaccaggtatttcccctcatgtgtgtaagctcatgaagatctgcatgaatgaagaccctgcaaagcgacccaaatttgacatgattgtgcctatccttgagaagatgcaggacaagtaggactggaaggtccttgcctgaactccagaggtgtcgggacatggttgggggaatgcacctccccaaagcagcaggcctctggttgcctcccccgcctccagtcatggtactaccccagccatggggtccatccccttcccccatccctaccactgtggccccaagaggggcgggctcagagctttgtcacttgccacatggtgtctcccaacatgggaggga

SEQ ID NO: 2104 - DNA, 1591 bp, Homo sapiens
  source 1..1591: mol_type = genomic DNA
aagagcgccacgggcggggcggggccggcggcgggctgcgggcgcggccggacgggagttccccggagaaggatcctgcagcccgagtcccgtcctcaggcttccccaatccaggggactcggcgccgggacgctgctatggacgacattttcactcagtgccgggagggcaacgcagtcgccgttcgcctgtggctggacaacacggagaacgacctcaaccagggctattgcagtacaaggcagacatcaatgcagtgaatgaacacgggaatgtgcccctgcactatgcctgtttttggggccaagatcaagtggcagaggacctggtggcaaatggggcccttgtcagcatctgtaacaagtatggagagatgcctgtggacaaagccaaggcacccctgagagagcttctccgagagcgggcagagaagatgggccagaatctcaaccgtattccatacaaggacacattctggaaggggaccacccgcactcggccccgaaatggaaccctgaacaaacactctggcattgacttcaaacagcttaacttcctgacgaagctcaacgagaatcactctggagagctatggaagggccgctggcagggcaatgacattgtcgtgaaggtgctgaaggttcgagactggagtacaaggaagagcagggacttcaatgaagagtgtccccggctcaggattttctcgcatccaaatgtgctcccagtgctaggtgcctgccagtctccacctgctcctcatcctactctcatcacacactggatgccgtatggatccctctacaatgtactacatgaaggcaccaatttcgtcgtggaccagagccaggctgtgaagtttgctttggacatggcaaggggcatggccttcctacacacactagagcccctcatcccacgacatgcactcaatagccgtagtgtaatgattgatgaggacatgactgcccgaattagcatggctgatgtcaagttctctttccaatgtcctggtcgcatgtatgcacctgcctgggtagcccccgaagctctgcagaagaagcctgaagacacaaacagacgctcagcagacatgtggagttttgcagtgcttctgtgggaactggtgacacgggaggtaccctttgctgacctctccaatatggagattggaatgaaggtggcattggaaggccttcggcctaccatcccaccaggtatttcccctcatgtgtgtaagctcatgaagatctgcatgaatgaagaccctgcaaagcgacccaaatttgacatgattgtgcctatccttgagaagatgcaggacaagtaggactggaaggtccttgcctgaactccagaggtgtcgggacatggttgggggaatgcacctccccaaagcagcaggcctctggttgcctcccccgcctccagtcatggtactaccccagccatggggtccatccccttcccccatccctaccactgtggccccaagaggggcgggctcagagctttgtcacttgccacatggtgtctcccaacatgggagggatcagccccgcctgtcacaataaagtttattatgaaaac

SEQ ID NO: 2105 - DNA, 3579 bp, Homo sapiens
  source 1..3579: mol_type = genomic DNA
tgctcggtggcgccgctgccctggcagagctcgccactccttagtcgaggcaagacgtgcgcccgagccccgccgaaccgaggccacccggagccgtgcccagtccacgccggccgtgcccggcggccttaagaacccggcaacctctgccttcttccctcttccactcggagtcgcgctccgcgcgccctcactgcagcccctgcgtcgccgggaccctcgcgcgcgaccgccgaatcgctcctgcagcagagccaacatgcccatcactcggatgcgcatgagaccctggctagagatgcagattaattccaaccaaatcccggggctcatctggattaataaagaggagatgatcttccagatcccatggaagcatgctgccaagcatggctgggacatcaacaaggatgcctgtttgttccggagctgggccattcacacaggccgatacaaagcaggggaaaaggagccagatcccaagacgtggaaggccaactttcgctgtgccatgaactccctgccagatatcgaggaggtgaaagaccagagcaggaacaagggcagctcagctgtgcgagtgtaccggatgcttccacctctcaccaagaaccagagaaaagaaagaaagtcgaagtccagccgagatgctaagagcaaggccaagaggaagtcatgtggggattccagccctgataccttctctgatggactcagcagctccactctgcctgatgaccacagcagctacacagttccaggctacatgcaggacttggaggtggagcaggccctgactccagcactgtcgccatgtgctgtcagcagcactctccccgactggcacatcccagtggaagttgtgccggacagcaccagtgatctgtacaacttccaggtgtcacccatgccctccacctctgaagctacaacagatgaggatgaggaagggaaattacctgaggacatcatgaagctcttggagcagtcggagtggcagccaacaaacgtggatgggaaggggtacctactcaatgaacctggagtccagcccacctctgtctatggagactttagctgtaaggaggagccagaaattgacagcccagggggggatattgggctgagtctacagcgtgtcttcacagatctgaagaacatggatgccacctggctggacagcctgctgaccccagtccggttgccctccatccaggccattccctgtgcaccgtagcagggcccctgggcccctcttattcctctaggcaagcaggacctggcatcatggtggatatggtgcagagaagctggacttctgtgggcccctcaacagccaagtgtgaccccactgccaagtggggatggggcctccctccttgggtcattgacctctcagggcctggcaggccagtgtctgggtttttcttgtggtgtaaagctggccctgcctcctgggaagatgaggttctgagaccagtgtatcaggtcagggacttggacaggagtcagtgtctggctttttcctctgagcccagctgcctggagagggtctcgctgtcactggctggctcctaggggaacagaccagtgaccccagaaaagcataacaccaatcccagggctggctctgcactaagagaaaattgcactaaatgaatctcgttcccaaagaactacccccttttcagctgagccctggggactgttccaaagccagtgaaatgtgaaggaaagtggggtccttcggggcgatgctccctcagcctcagaggagctctaccctgctccctgctttggctgaggggcttgggaaaaaaacttggcactttttcgtgtggatcttgccacatttctgatcagaggtgtacactaacatttcccccgagctcttggcctttgcatttatttatacagtgccttgctcggcgcccaccaccccctcaagccccagcagccctcaacaggcccagggagggaagtgtgagcgccttggtatgacttaaaattggaaatgtcatctaaccattaagtcatgtgtgaacacataaggacgtgtgtaaatatgtacatttgtctttttataaaaagtaaattgtttataaggggtgtggcctttttagagagaaatttaacttgtagatgattttactttttatggaaacactgatggacttattattggcatcccgcctgaacttgactttggggtgaacagggacatgcatctattataaaatcctttcggccaggcgcggtggctcacacctgtaatcccagcactttgggaggccgagatgggtggatcacctgaggtcaggagttcgagaccagcctggtgaaactccatttctactaaaaatgcaaaaattagctgggcgtggttgcgggtgcttgtaatcccagctactcaggaggctgaggcaagagaatcgcttgaacctgggaggtggaggttgcagtgagccgagaacatgccattgcactccagcccgggcaccaaaaaaaaaaaaaaaaaaaaaaacctttcatttggccgggcatggtggcttatgcctgtaatcctggcactttgggaggccaaggtgggcagatcacctgaggtcaggagtttgagaccagcctggccaacatggtgaaacctcatctctactaaaaatacaaaaattaggccgggcacggtggctcacgcctgtaatcccagcactttgggaggcagaggcgggcggatcacgaggtcaggagatcaagaccatcctggctaacacggtgaaaccccgtctctactaaaaatataaaaaattagccgggcctagtggcgggtgcctgtagtcccagctactcgggaggctgaggcaggagaatggcatgaaccccggaggcagagcttgcagtgagccgagattgcaccactgcactacagcctgggcgacagagcgagactccgtctcaaaaaaaaaaaaaaaaattagccgggcctggtggcgggcgcctgtaatcccagctactgtggaggctgaagcacaagaatcacttgaacccgggagatggaggttgcagtgagctgagactgtgccactgcactccagcctgggtgacaagagtgagactttgtctcaaaaaaaaaaaaatccttttgtttatgttcacatagacaatggcagaaggaggggacattcctgtcataggaacatgcttatataaacatagtcacctgtccttgactatcaccagggctgtcagttgattctgggctcctggggcccaaggagtgttaagttttgaggcatgtgccataggtgatgtgtcctgctaacacacagatgctgctccaaaaagtcagttgatatgacacagtcacagacagaacagtcagcagcccaagaaaggtcctcacggctgctgtgctgggtagcacttgccatccagtttctagagtgatgaaatgctctgtctgtaccgttcaatacagtaggcactggcactagccacatgtgccagctaagcacttgaaatgtggccagtgcaataaggaattgaacttttaattgcatttaataaactgtatgtaaatagtca

SEQ ID NO: 2106 - DNA, 2032 bp, Homo sapiens
  source 1..2032: mol_type = genomic DNA
gccgtgccggggaccgagtgtcagcccacgcgtgggcgcccagtgctcccggctttcggcggtcccagctccgcgcccaggcgacaggttttgggctccctgtgctggtggcaagggctggcttactgcccaggtggctggagggaatcgtgacctacggagactgcgggaagaggcgccacagccaacatgcccatcactcggatgcgcatgagaccctggctagagatgcagattaattccaaccaaatcccggggctcatctggattaataaagaggagatgatcttccagatcccatggaagcatgctgccaagcatggctgggacatcaacaaggatgcctgtttgttccggagctgggccattcacacaggccgatacaaagcaggggaaaaggagccagatcccaagacgtggaaggccaactttcgctgtgccatgaactccctgccagatatcgaggaggtgaaagaccagagcaggaacaagggcagctcagctgtgcgagtgtaccggatgcttccacctctcaccaagaaccagagaaaagaaagaaagtcgaagtccagccgagatgctaagagcaaggccaagaggaagtcatgtggggattccagccctgataccttctctgatggactcagcagctccactctgcctgatgaccacagcagctacacagttccaggctacatgcaggacttggaggtggagcaggccctgactccagcactgtcgccatgtgctgtcagcagcactctccccgactggcacatcccagtggaagttgtgccggacagcaccagtgatctgtacaacttccaggtgtcacccatgccctccacctctgaagctacaacagatgaggatgaggaagggaaattacctgaggacatcatgaagctcttggagcagtcggagtggcagccaacaaacgtggatgggaaggggtacctactcaatgaacctggagtccagcccacctctgtctatggagactttagctgtaaggaggagccagaaattgacagcccagggggggatattgggctgagtctacagcgtgtcttcacagatctgaagaacatggatgccacctggctggacagcctgctgaccccagtccggttgccctccatccaggccattccctgtgcaccgtagcagggcccctgggcccctcttattcctctaggcaagcaggacctggcatcatggtggatatggtgcagagaagctggacttctgtgggcccctcaacagccaagtgtgaccccactgccaagtggggatggggcctccctccttgggtcattgacctctcagggcctggcaggccagtgtctgggtttttcttgtggtgtaaagctggccctgcctcctgggaagatgaggttctgagaccagtgtatcaggtcagggacttggacaggagtcagtgtctggctttttcctctgagcccagctgcctggagagggtctcgctgtcactggctggctcctaggggaacagaccagtgaccccagaaaagcataacaccaatcccagggctggctctgcactaagagaaaattgcactaaatgaatctcgttcccaaagaactacccccttttcagctgagccctggggactgttccaaagccagtgaaatgtgaaggaaagtggggtccttcggggcgatgctccctcagcctcagaggagctctaccctgctccctgctttggctgaggggcttgggaaaaaaacttggcactttttcgtgtggatcttgccacatttctgatcagaggtgtacactaacatttcccccgagctcttggcctttgcatttatttatacagtgccttgctcggcgcccaccaccccctcaagccccagcagccctcaacaggcccagggagggaagtgtgagcgccttggtatgacttaaaattggaaatgtcatctaaccattaagtcatgtgtgaacacataaggacgtgtgtaaatatgtacatttgtctttttataaaaagtaaattgttta

SEQ ID NO: 2107 - DNA, 885 bp, Homo sapiens
  source 1..885: mol_type = genomic DNA
cgcagatctgcgtgcgcgcagccgccaggggcctgtaggtggcccgctatgttcgtcccgcgcatccacacgccgtgccggggaccgagtgtcagcccacgcgtgggcgcccagtgctcccggctttcggcggtcccagctccgcgcccaggcgacaggttttgggctccctgtgctggtggcaagggctggcttactgcccaggtggctggagggaatcgtgacctacggagactgcgggaagaggcgccacaggtgttccttgggccacttctccagaggaggggaaaccgggccggaaggccaacatgcccatcactcggatgcgcatgagaccctggctagagatgcagattaattccaaccaaatcccggggctcatctggattaataaagaggagatgatcttccagatcccatggaagcatgctgccaagcatggctgggacatcaacaaggatgcctgtttgttccggagctgggccattcacacaggccgatacaaagcaggggaaaaggagccagatcccaagacgtggaaggccaactttcgctgtgccatgaactccctgccagatatcgaggaggtgaaagaccagagcaggaacaagggcagctcagctgtgcgagtgtaccggatgcttccacctctcaccaagaaccagagaaaagaaagaaagtcgaagtccagccgagatgctaagagcaaggccaagaggaagtcatgtggggattccagccctgataccttctctgatggactcagcagctccactctgcctgatgaccacagcagctacacagttccaggctacatgcaggacttggaggtggagcaggccctgactccagcactgtcgccatgtgctgtcagcagcactctcc

SEQ ID NO: 2108 - DNA, 5331 bp, Homo sapiens
  source 1..5331: mol_type = genomic DNA
acctcgcactctcagtttcaccgctcgatcttgggacccaccgctgccctcagctccgagtccagggcgagtgcagagcagagcgggcggaggaccccgggcgcgggcgcggacggcacgcggggcatgaacctggagggcggcggccgaggcggagagttcggcatgagcgcggtgagctgcggcaacgggaagctccgccagtggctgatcgaccagatcgacagcggcaagtaccccgggctggtgtgggagaacgaggagaagagcatcttccgcatcccctggaagcacgcgggcaagcaggactacaaccgcgaggaggacgccgcgctcttcaaggcttgggcactgtttaaaggaaagttccgagaaggcatcgacaagccggaccctcccacctggaagacgcgcctgcggtgcgctttgaacaagagcaatgactttgaggaactggttgagcggagccagctggacatctcagacccgtacaaagtgtacaggattgttcctgagggagccaaaaaaggagccaagcagctcaccctggaggacccgcagatgtccatgagccacccctacaccatgacaacgccttacccttcgctcccagcccagcaggttcacaactacatgatgccacccctcgaccgaagctggagggactacgtcccggatcagccacacccggaaatcccgtaccaatgtcccatgacgtttggaccccgcggccaccactggcaaggcccagcttgtgaaaatggttgccaggtgacaggaaccttttatgcttgtgccccacctgagtcccaggctcccggagtccccacagagccaagcataaggtctgccgaagccttggcgttctcagactgccggctgcacatctgcctgtactaccgggaaatcctcgtgaaggagctgaccacgtccagccccgagggctgccggatctcccatggacatacgtatgacgccagcaacctggaccaggtcctgttcccctacccagaggacaatggccagaggaaaaacattgagaagctgctgagccacctggagaggggcgtggtcctctggatggcccccgacgggctctatgcgaaaagactgtgccagagcaggatctactgggacgggcccctggcgctgtgcaacgaccggcccaacaaactggagagagaccagacctgcaagctctttgacacacagcagttcttgtcagagctgcaagcgtttgctcaccacggccgctccctgccaagattccaggtgactctatgctttggagaggagtttccagaccctcagaggcaaagaaagctcatcacagctcacgtagaacctctgctagccagacaactatattattttgctcaacaaaacagtggacatttcctgaggggctacgatttaccagaacacatcagcaatccagaagattaccacagatctatccgccattcctctattcaagaatgaaaaatgtcaagatgagtggttttctttttcctttttttttttttttttttgatacggggatacggggtcttgctctgtctcccaggctggagtgcagtgacacaatctcagctcactgtgacctccgcctcctgggttcaagagactctcctgcctcagcctccctggtagctgggattacaggtgtgagccactgcacccacccaagacaagtgattttcattgtaaatatttgactttagtgaaagcgtccaattgactgccctcttactgttttgaggaattcagaagtggagatttcagttcagcggttgaggagaattgcggcgagacaagcatggaaaatcagtgacatctgattggcagatgagcttatttcaaaaggaagggtggctttgcatttcttgtgttctgtagactgccatcattgatgatcactgtgaaaattgaccaagtgatgtgtttacatttactgaaatgcgctctttaatttgttgtagattaggtcttgctggaagacagagaaaacttgcctttcagtattgacactgactagagtgatgactgcttgtaggtatgtctgtgccatttctcagggaagtaagatgtaaattgaagaagcctcacacgtaaaagaaatgtattaatgtatgtaggagctgcagttcttgtggaagacacttgctgagtgaaggaaatgaatctttgactgaagccgtgcctgtagccttggggaggcccatcccccacctgccagcggtttcctggtgtgggtccctctgccccgccctccttcccattggctttctctccttggcctttcctggaagccagttagtaaacttcctattttcttgagtcaaaaaacatgagcgctactcttggatgggacatttttgtctgtcctacaatctagtaatgtctaagtaatggttaagttttcttgtttctgcatctttttgaccctcattctttagagatgctaaaattcttcgcataaagaagaagaaattaaggaacataaatcttaatacttgaactgttgcccttctgtccaagtacttaactatctgttcccttcctctgtgccacgctcctctgtttgtttggctgtccagcgatcagccatggcgacactaaaggaggaggagccggggactcccaggctggagagcactgccaggacccaccactggaagcaggatggagctgactacggaactgcacactcagtgggctgtttctgcttatttcatctgttctatgcttcctcgtgccaattatagtttgacagggccttaaaattacttggctttttccaaatgcttctatttatagaatcccaaagacctccacttgcttaagtatacctatcacttacatttttgtggttttgagaaagtacagcagtagactggggcgtcacctccaggccgtttctcatactacaggatatttactattactcccaggatcagcagaagattgcgtagctctcaaatgtgtgttcctgcttttctaatggatattttaaattcattcaacaagcacctagtaagtgcctgctgtatccctacattacacagttcagcctttatcaagcttagtgagcagtgagcactgaaacattattttttaatgtttaaaaagtttctaatattaaagtcagaatattaatacaattaatattaatattaactacagaaaagacaaacagtagagaacagcaaaaaaataaaaaggatctccttttttcccagcccaaattctcctctctaaaagtgtccacaagaaggggtgtttattcttccaacacatttcacttttctgtaaatatacataaacttaaaaagaaaacctcatggagtcatcttgcacacactttcatgcagtgctctttgtagctaacagtgaagatttacctcgttctgctcagaggccttgctgtggagctccactgccatgtacccagtagggtttgacatttcattagccatgcaacatggatatgtattgggcagcagactgtgtttcgtgaactgcagtgatgtatacatcttatagatgcaaagtattttggggtatattatcctaagggaagataaagatgatattaagaactgctgtttcacggggcccttacctgtgaccctctttgctgaagaatatttaaccccacacagcacttcaaagaagctgtcttggaagtctgtctcaggagcaccctgtcttcttaattctccaagcggatgctccatttcaattgctttgtgacttcttcttctttgtttttttaaatattatgctgctttaacagtggagctgaattttctggaaaatgcttcttggctggggccactacctcctttcctatctttacatctatgtgtatgttgactttttaaaattctgagtgatccagggtatgacctagggaatgaactagctatgaaatactcagggttaggaatcctagcacttgtctcaggactctgaaaaggaacggcttcctcattccttgtcttgataaagtggaattggcaaactagaatttagtttgtactcagtggacagtgctgttgaagatttgaggacttgttaaagagcactgggtcatatggaaaaaatgtatgtgtctcccaggtgcatttcttggtttatgtcttgttcttgagattttgtatatttaggaaaacctcaagcagtaattaatatctcctggaacactatagagaaccaagtgaccgactcatttacaactgaaacctaggaagcccctgagtcctgagcgaaaacaggagagttagtcgccctacagaaaacccagctagactattgggtatgaactaaaaagagactgtgccatggtgagaaaaatgtaaaatcctacagtgaaatgagcagcccttacagtattgttaccaccaagggcaggtaggtattagtgtttgaaaaagctggtctttgagcgagggcataaatacagctagccccaggggtggaacaactctgggagtcttgggtactcgcacctcttggctttgttgatgctccgccaggaaggccacttgtgtgtgcgtgtcagttacttttttagtaacaattcagatccagtgtaaacttccgttcattgctctccagtcacatgcccccacttccccacaggtgaaagtttttctgaaagtgttgggattggttaaggtctttatttgtattacgtatctcccgaagtcctctgtggccagctgcatctgtctgaatggtgcgtgaaggctctcagaccttacacaccattttgtaagttatgttttacatgccccgtttttgagactgatctcgatgcaggtggatctccttgagatcctgatagcctgttacaggaatgaagtaaaggtcagtttttttttgtattgattttcacagctttgaggaacatgcataagaaatgtagctgaagtagaggggacgtgagagaagggccaggccggcaggccaaccctcctccaatggaaattcccgtgttgcttcaaactgagacagatgggacttaacaggcaatggggtccacttccccctcttcagcatcccccgtaccccactttctgctgaaagaactgccagcaggtaggaccccagaggcccccaaatgaaagcttgaatttcccctactggctctgcgttttgctgagatctgtaggaaaggatgcttcacaaactgaggtagataatgctatgctgtcgttggtatacatcatgaatttttatgtaaattgctctgcaaagcaaattgatatgtttgataaatttatgtttttaggtaaataaaaacttttaaaaatttgttatgga

SEQ ID NO: 2109 - DNA, 5305 bp, Homo sapiens
  source 1..5305: mol_type = genomic DNA
agtttcaccgctcgatcttgggacccaccgctgccctcagctccgagtccagggcgagggcagcgcaggcgggcggaggaccccgggcgcgggcgcggacgcggggcatgaacctggagggcggcggccgaggcggagagttcggcatgagcgcggtgagctgcggcaacgggaagctccgccagtggctgatcgaccagatcgacagcggcaagtaccccgggctggtgtgggagaacgaggagaagagcatcttccgcatcccctggaagcacgcgggcaagcaggactacaaccgcgaggaggacgccgcgctcttcaaggcttgggcactgtttaaaggaaagttccgagaaggcatcgacaagccggaccctcccacctggaagacgcgcctgcggtgcgctttgaacaagagcaatgactttgaggaactggttgagcggagccagctggacatctcagacccgtacaaagtgtacaggattgttcctgagggagccaaaaaaggagccaagcagctcaccctggaggacccgcagatgtccatgagccacccctacaccatgacaacgccttacccttcgctcccagcccaggttcacaactacatgatgccacccctcgaccgaagctggagggactacgtcccggatcagccacacccggaaatcccgtaccaatgtcccatgacgtttggaccccgcggccaccactggcaaggcccagcttgtgaaaatggttgccaggtgacaggaaccttttatgcttgtgccccacctgagtcccaggctcccggagtccccacagagccaagcataaggtctgccgaagccttggcgttctcagactgccggctgcacatctgcctgtactaccgggaaatcctcgtgaaggagctgaccacgtccagccccgagggctgccggatctcccatggacatacgtatgacgccagcaacctggaccaggtcctgttcccctacccagaggacaatggccagaggaaaaacattgagaagctgctgagccacctggagaggggcgtggtcctctggatggcccccgacgggctctatgcgaaaagactgtgccagagcaggatctactgggacgggcccctggcgctgtgcaacgaccggcccaacaaactggagagagaccagacctgcaagctctttgacacacagcagttcttgtcagagctgcaagcgtttgctcaccacggccgctccctgccaagattccaggtgactctatgctttggagaggagtttccagaccctcagaggcaaagaaagctcatcacagctcacgtagaacctctgctagccagacaactatattattttgctcaacaaaacagtggacatttcctgaggggctacgatttaccagaacacatcagcaatccagaagattaccacagatctatccgccattcctctattcaagaatgaaaaatgtcaagatgagtggttttctttttcctttttttttttttttttttgatacggggatacggggtcttgctctgtctcccaggctggagtgcagtgacacaatctcagctcactgtgacctccgcctcctgggttcaagagactctcctgcctcagcctccctggtagctgggattacaggtgtgagccactgcacccacccaagacaagtgattttcattgtaaatatttgactttagtgaaagcgtccaattgactgccctcttactgttttgaggaattcagaagtggagatttcagttcagcggttgaggagaattgcggcgagacaagcatggaaaatcagtgacatctgattggcagatgagcttatttcaaaaggaagggtggctttgcatttcttgtgttctgtagactgccatcattgatgatcactgtgaaaattgaccaagtgatgtgtttacatttactgaaatgcgctctttaatttgttgtagattaggtcttgctggaagacagagaaaacttgcctttcagtattgacactgactagagtgatgactgcttgtaggtatgtctgtgccatttctcagggaagtaagatgtaaattgaagaagcctcacacgtaaaagaaatgtattaatgtatgtaggagctgcagttcttgtggaagacacttgctgagtgaaggaaatgaatctttgactgaagccgtgcctgtagccttggggaggcccatcccccacctgccagcggtttcctggtgtgggtccctctgccccgccctccttcccattggctttctctccttggcctttcctggaagccagttagtaaacttcctattttcttgagtcaaaaaacatgagcgctactcttggatgggacatttttgtctgtcctacaatctagtaatgtctaagtaatggttaagttttcttgtttctgcatctttttgaccctcattctttagagatgctaaaattcttcgcataaagaagaagaaattaaggaacataaatcttaatacttgaactgttgcccttctgtccaagtacttaactatctgttcccttcctctgtgccacgctcctctgtttgtttggctgtccagcgatcagccatggcgacactaaaggaggaggagccggggactcccaggctggagagcactgccaggacccaccactggaagcaggatggagctgactacggaactgcacactcagtgggctgtttctgcttatttcatctgttctatgcttcctcgtgccaattatagtttgacagggccttaaaattacttggctttttccaaatgcttctatttatagaatcccaaagacctccacttgcttaagtatacctatcacttacatttttgtggttttgagaaagtacagcagtagactggggcgtcacctccaggccgtttctcatactacaggatatttactattactcccaggatcagcagaagattgcgtagctctcaaatgtgtgttcctgcttttctaatggatattttaaattcattcaacaagcacctagtaagtgcctgctgtatccctacattacacagttcagcctttatcaagcttagtgagcagtgagcactgaaacattattttttaatgtttaaaaagtttctaatattaaagtcagaatattaatacaattaatattaatattaactacagaaaagacaaacagtagagaacagcaaaaaaataaaaaggatctccttttttcccagcccaaattctcctctctaaaagtgtccacaagaaggggtgtttattcttccaacacatttcacttttctgtaaatatacataaacttaaaaagaaaacctcatggagtcatcttgcacacactttcatgcagtgctctttgtagctaacagtgaagatttacctcgttctgctcagaggccttgctgtggagctccactgccatgtacccagtagggtttgacatttcattagccatgcaacatggatatgtattgggcagcagactgtgtttcgtgaactgcagtgatgtatacatcttatagatgcaaagtattttggggtatattatcctaagggaagataaagatgatattaagaactgctgtttcacggggcccttacctgtgaccctctttgctgaagaatatttaaccccacacagcacttcaaagaagctgtcttggaagtctgtctcaggagcaccctgtcttcttaattctccaagcggatgctccatttcaattgctttgtgacttcttcttctttgtttttttaaatattatgctgctttaacagtggagctgaattttctggaaaatgcttcttggctggggccactacctcctttcctatctttacatctatgtgtatgttgactttttaaaattctgagtgatccagggtatgacctagggaatgaactagctatgaaatactcagggttaggaatcctagcacttgtctcaggactctgaaaaggaacggcttcctcattccttgtcttgataaagtggaattggcaaactagaatttagtttgtactcagtggacagtgctgttgaagatttgaggacttgttaaagagcactgggtcatatggaaaaaatgtatgtgtctcccaggtgcatttcttggtttatgtcttgttcttgagattttgtatatttaggaaaacctcaagcagtaattaatatctcctggaacactatagagaaccaagtgaccgactcatttacaactgaaacctaggaagcccctgagtcctgagcgaaaacaggagagttagtcgccctacagaaaacccagctagactattgggtatgaactaaaaagagactgtgccatggtgagaaaaatgtaaaatcctacagtgaaatgagcagcccttacagtattgttaccaccaagggcaggtaggtattagtgtttgaaaaagctggtctttgagcgagggcataaatacagctagccccaggggtggaacaactctgggagtcttgggtactcgcacctcttggctttgttgatgctccgccaggaaggccacttgtgtgtgcgtgtcagttacttttttagtaacaattcagatccagtgtaaacttccgttcattgctctccagtcacatgcccccacttccccacaggtgaaagtttttctgaaagtgttgggattggttaaggtctttatttgtattacgtatctcccgaagtcctctgtggccagctgcatctgtctgaatggtgcgtgaaggctctcagaccttacacaccattttgtaagttatgttttacatgccccgtttttgagactgatctcgatgcaggtggatctccttgagatcctgatagcctgttacaggaatgaagtaaaggtcagtttttttttgtattgattttcacagctttgaggaacatgcataagaaatgtagctgaagtagaggggacgtgagagaagggccaggccggcaggccaaccctcctccaatggaaattcccgtgttgcttcaaactgagacagatgggacttaacaggcaatggggtccacttccccctcttcagcatcccccgtaccccactttctgctgaaagaactgccagcaggtaggaccccagaggcccccaaatgaaagcttgaatttcccctactggctctgcgttttgctgagatctgtaggaaaggatgcttcacaaactgaggtagataatgctatgctgtcgttggtatacatcatgaatttttatgtaaattgctctgcaaagcaaattgatatgtttgataaatttatgtttttaggtaaataaaaacttttaaaaatttgtta

SEQ ID NO: 2110 - DNA, 2749 bp, Homo sapiens
  source 1..2749: mol_type = genomic DNA
gtccagctgcgcctggaaagcgagctcggacccctctgccatgaaccagtccatcccagtggctcccaccccaccccgccgcgtgcggctgaagccctggctggtggcccaggtgaacagctgccagtacccagggcttcaatgggtcaacggggaaaagaaattattctgcatcccctggaggcatgccacaaggcatggtcccagccaggacggagataacaccatcttcaaggcctgggccaaggagacagggaaatacaccgaaggcgtggatgaagccgatccggccaagtggaaggccaacctgcgctgtgcccttaacaagagccgggacttccgcctcatctacgacgggccccgggacatgccacctcagccctacaagatctacgaggtctgctccaatggccctgctcccacagactcccagccccctgaggattactcttttggtgcaggagaggaggaggaagaagaggaagagctgcagaggatgttgccaagcctgagcctcacagaggatgtcaagtggccgcccactctgcagccgcccactctgcggccgcctactctgcagccgcccactctgcagccgcccgtggtgctgggtccccctgctccagaccccagccccctggctcctccccctggcaaccctgctggcttcagggagcttctctctgaggtcctggagcctgggcccctgcctgccagcctgccccctgcaggcgaacagctcctgccagacctgctgatcagcccccacatgctgcctctgaccgacctggagatcaagtttcagtaccgggggcggccaccccgggccctcaccatcagcaacccccatggctgccggctcttctacagccagctggaggccacccaggagcaggtggaactcttcggccccataagcctggagcaagtgcgcttccccagccctgaggacatccccagtgacaagcagcgcttctacacgaaccagctgctggatgtcctggaccgcgggctcatcctccagctacagggccaggacctttatgccatccgcctgtgtcagtgcaaggtgttctggagcgggccttgtgcctcagcccatgactcatgccccaaccccatccagcgggaggtcaagaccaagcttttcagcctggagcattttctcaatgagctcatcctgttccaaaagggccagaccaacaccccaccacccttcgagatcttcttctgctttggggaagaatggcctgaccgcaaaccccgagagaagaagctcattactgtacaggtggtgcctgtagcagctcgactgctgctggagatgttctcaggggagctatcttggtcagctgatagtatccggctacagatctcaaacccagacctcaaagaccgcatggtggagcaattcaaggagctccatcacatctggcagtcccagcagcggttgcagcctgtggcccaggcccctcctggagcaggccttggtgttggccaggggccctggcctatgcacccagctggcatgcaataacaaggctgcagacggtgactggccctggcttcctgggtggcggtgcggactgatgtggagatgtgacagccccgatgagcacctggctggctgcagggtcctacctctgggtttcctggaagtggatttgggccaagaaggagagggagaaaggcccgagcccctgccttcccgggcctttctctcctgggctgtctctggtctggtcagcctggctctcgggaaattcagccatgagcagggaaagaactctcccaaccctggggcctagctgtataggaggaattgcctaagggtggcccactcttgtgattgccccatttcctctggcaacaaaagccagagtgttgtgggccaagtccccccacagggcctctgcagggcatggccctgatttccctggtttgagactcacttcctcatctccctgtcctctgagataatatgagtgagcacttaggtatcatatcagatgctcaaggctggcagctacccccttcttgagagtccaagaacctggagcagaaataatttttatgtatttttggattaatgaatgttaaaaacagactcagctgtttctttccttttactactaccagttgctcccatgctgctccaccaggccctgtttcggatgccaactggcccactccccaagcacttgcccccagcttgcgaccattggcactgggagggcctggcttctgggctgatgggtcagttgggccttcataaacactcacctggctggctttgccttccaggaggaagctggctgaagcaagggtgtggaattttaaatgtgtgcacagtctggaaaactgtcagaatcagttttcccataaaagggtgggctagcattgcagctgcatttgggaccattcaaatctgtcactctcttgtgtatattcctgtgctattaaatatatcagggcagtgcatgtaaatcatcctgatatatttaatatatttattatattgtcccccgaggtggggacagtgagtgagttctcttagtccccccagagctggttgttaaagagcctggcacctacccgctctcacttcatctgtgtcatctctgcacactccagcccactttctgccttcagccattgagtggaagctgccccaggcccttaccaggtgcagatgcccaatcttgatgcccagccatcagaactgtgagccaaataaacctttttctgt

SEQ ID NO: 2111 - DNA, 1680 bp, Homo sapiens
  source 1..1680: mol_type = genomic DNA
gcccggcaggttggcggaccggcgggaggcgcagcctgggcagagctcagcttggtcccgccgcccggccggtgctccctggcgcagccacgcaggcgcaccgcagacagacccctctgccatgaaccagtccatcccagtggctcccaccccaccccgccgcgtgcggctgaagccctggctggtggcccaggtgaacagctgccagtacccagggcttcaatgggtcaacggggaaaagaaattattctgcatcccctggaggcatgccacaaggcatggtcccagccaggacggagataacaccatcttcaaggcctgggccaaggagacagggaaatacaccgaaggcgtggatgaagccgatccggccaagtggaaggccaacctgcgctgtgcccttaacaagagccgggacttccgcctcatctacgacgggccccgggacatgccacctcagccctacaagatctacgaggtctgctccaatggccctgctcccacagactcccagccccctgaggattactcttttggtgcaggagaggaggaggaagaagaggaagagctgcagaggatgttgccaagcctgagcctcacagatgcagtgcagtctggcccccacatgacaccctattctttactcaaagaggatgtcaagtggccgcccactctgcagccgcccactctgcggccgcctactctgcagccgcccactctgcagccgcccgtggtgctgggtccccctgctccagaccccagccccctggctcctccccctggcaaccctgctggcttcagggagcttctctctgaggtcctggagcctgggcccctgcctgccagcctgccccctgcaggcgaacagctcctgccagacctgctgatcagcccccacatgctgcctctgaccgacctggagatcaagtttcagtaccgggggcggccaccccgggccctcaccatcagcaacccccatggctgccggctcttctacagccagctggaggccacccaggagcaggtggaactcttcggccccataagcctggagcaagtgcgcttccccagccctgaggacatccccagtgacaagcagcgcttctacacgaaccagctgctggatgtcctggaccgcgggctcatcctccagctacagggccaggacctttatgccatccgcctgtgtcagtgcaaggtgttctggagcgggccttgtgcctcagcccatgactcatgccccaaccccatccagcgggaggtcaagaccaagcttttcagcctggagcattttctcaatgagctcatcctgttccaaaagggccagaccaacaccccaccacccttcgagatcttcttctgctttggggaagaatggcctgaccgcaaaccccgagagaagaagctcattactgtacaggtggtgcctgtagcagctcgactgctgctggagatgttctcaggggagctatcttggtcagctgatagtatccggctacagatctcaaacccagacctcaaagaccgcatggtggagcaattcaaggagctccatcacatctggcagtcccagcagcggttgcagcctgtggcccaggcccctcctggagcaggccttggtgttggccaggggccctggcctatgcacccagctggcatgcaataacaaggctgcagacg

SEQ ID NO: 2112 - DNA, 2786 bp, Homo sapiens
  source 1..2786: mol_type = genomic DNA
gcttggtcccgccgcccggccggtgctccctggcgcagccacgcaggcgcaccgcagacagacccctctgccatgaaccagtccatcccagtggctcccaccccaccccgccgcgtgcggctgaagccctggctggtggcccaggtgaacagctgccagtacccagggcttcaatgggtcaacggggaaaagaaattattctgcatcccctggaggcatgccacaaggcatggtcccagccaggacggagataacaccatcttcaaggcctgggccaaggagacagggaaatacaccgaaggcgtggatgaagccgatccggccaagtggaaggccaacctgcgctgtgcccttaacaagagccgggacttccgcctcatctacgacgggccccgggacatgccacctcagccctacaagatctacgaggtctgctccaatggccctgctcccacagactcccagccccctgaggattactcttttggtgcaggagaggaggaggaagaagaggaagagctgcagaggatgttgccaagcctgagcctcacagaggatgtcaagtggccgcccactctgcagccgcccactctgcggccgcctactctgcagccgcccactctgcagccgcccgtggtgctgggtccccctgctccagaccccagccccctggctcctccccctggcaaccctgctggcttcagggagcttctctctgaggtcctggagcctgggcccctgcctgccagcctgccccctgcaggcgaacagctcctgccagacctgctgatcagcccccacatgctgcctctgaccgacctggagatcaagtttcagtaccgggggcggccaccccgggccctcaccatcagcaacccccatggctgccggctcttctacagccagctggaggccacccaggagcaggtggaactcttcggccccataagcctggagcaagtgcgcttccccagccctgaggacatccccagtgacaagcagcgcttctacacgaaccagctgctggatgtcctggaccgcgggctcatcctccagctacagggccaggacctttatgccatccgcctgtgtcagtgcaaggtgttctggagcgggccttgtgcctcagcccatgactcatgccccaaccccatccagcgggaggtcaagaccaagcttttcagcctggagcattttctcaatgagctcatcctgttccaaaagggccagaccaacaccccaccacccttcgagatcttcttctgctttggggaagaatggcctgaccgcaaaccccgagagaagaagctcattactgtacaggtggtgcctgtagcagctcgactgctgctggagatgttctcaggggagctatcttggtcagctgatagtatccggctacagatctcaaacccagacctcaaagaccgcatggtggagcaattcaaggagctccatcacatctggcagtcccagcagcggttgcagcctgtggcccaggcccctcctggagcaggccttggtgttggccaggggccctggcctatgcacccagctggcatgcaataacaaggctgcagacggtgactggccctggcttcctgggtggcggtgcggactgatgtggagatgtgacagccccgatgagcacctggctggctgcagggtcctacctctgggtttcctggaagtggatttgggccaagaaggagagggagaaaggcccgagcccctgccttcccgggcctttctctcctgggctgtctctggtctggtcagcctggctctcgggaaattcagccatgagcagggaaagaactctcccaaccctggggcctagctgtataggaggaattgcctaagggtggcccactcttgtgattgccccatttcctctggcaacaaaagccagagtgttgtgggccaagtccccccacagggcctctgcagggcatggccctgatttccctggtttgagactcacttcctcatctccctgtcctctgagataatatgagtgagcacttaggtatcatatcagatgctcaaggctggcagctacccccttcttgagagtccaagaacctggagcagaaataatttttatgtatttttggattaatgaatgttaaaaacagactcagctgtttctttccttttactactaccagttgctcccatgctgctccaccaggccctgtttcggatgccaactggcccactccccaagcacttgcccccagcttgcgaccattggcactgggagggcctggcttctgggctgatgggtcagttgggccttcataaacactcacctggctggctttgccttccaggaggaagctggctgaagcaagggtgtggaattttaaatgtgtgcacagtctggaaaactgtcagaatcagttttcccataaaagggtgggctagcattgcagctgcatttgggaccattcaaatctgtcactctcttgtgtatattcctgtgctattaaatatatcagggcagtgcatgtaaatcatcctgatatatttaatatatttattatattgtcccccgaggtggggacagtgagtgagttctcttagtccccccagagctggttgttaaagagcctggcacctacccgctctcacttcatctgtgtcatctctgcacactccagcccactttctgccttcagccattgagtggaagctgccccaggcccttaccaggtgcagatgcccaatcttgatgcccagccatcagaactgtgagccaaataaacctttttctgtataaa

SEQ ID NO: 2113 - DNA, 2077 bp, Homo sapiens
  source 1..2077: mol_type = genomic DNA
agctcagaggcggcactaggcaggtgcaaccccaaaagacccctctgccatgaaccagtccatcccagtggctcccaccccaccccgccgcgtgcggctgaagccctggctggtggcccaggtgaacagctgccagtacccagggcttcaatgggtcaacggggaaaagaaattattctgcatcccctggaggcatgccacaaggcatggtcccagccaggacggagataacaccatcttcaaggcctgggccaaggagacagggaaatacaccgaaggcgtggatgaagccgatccggccaagtggaaggccaacctgcgctgtgcccttaacaagagccgggacttccgcctcatctacgacgggccccgggacatgccacctcagccctacaagatctacgaggtctgctccaatggccctgctcccacagactcccagccccctgaggattactcttttggtgcaggagaggaggaggaagaagaggaagagctgcagaggatgttgccaagcctgagcctcacagaggatgtcaagtggccgcccactctgcagccgcccactctgcagccgcccgtggtgctgggtccccctgctccagaccccagccccctggctcctccccctggcaaccctgctggcttcagggagcttctctctgaggtcctggagcctgggcccctgcctgccagcctgccccctgcaggcgaacagctcctgccagacctgctgatcagcccccacatgctgcctctgaccgacctggagatcaagtttcagtaccgggggcggccaccccgggccctcaccatcagcaacccccatggctgccggctcttctacagccagctggaggccacccaggagcaggtggaactcttcggccccataagcctggagcaagtgcgcttccccagccctgaggacatccccagtgacaagcagcgcttctacacgaaccagctgctggatgtcctggaccgcgggctcatcctccagctacagggccaggacctttatgccatccgcctgtgtcagtgcaaggtgttctggagcgggccttgtgcctcagcccatgactcatgccccaaccccatccagcgggaggtcaagaccaagcttttcagcctggagcattttctcaatgagctcatcctgttccaaaagggccagaccaacaccccaccacccttcgagatcttcttctgctttggggaagaatggcctgaccgcaaaccccgagagaagaagctcattactgtacaggtggtgcctgtagcagctcgactgctgctggagatgttctcaggggagctatcttggtcagctgatagtatccggctacagatctcaaacccagacctcaaagaccgcatggtggagcaattcaaggagctccatcacatctggcagtcccagcagcggttgcagcctgtggcccaggcccctcctggagcaggccttggtgttggccaggggccctggcctatgcacccagctggcatgcaataacaaggctgcagacggtgactggccctggcttcctgggtggcggtgcggactgatgtggagatgtgacagccccgatgagcacctggctggctgcagggtcctacctctgggtttcctggaagtggatttgggccaagaaggagagggagaaaggcccgagcccctgccttcccgggcctttctctcctgggctgtctctggtctggtcagcctggctctcgggaaattcagccatgagcagggaaagaactctcccaaccctggggcctagctgtataggaggaattgcctaagggtggcccactcttgtgattgccccatttcctctggcaacaaaagccagagtgttgtgggccaagtccccccacagggcctctgcagggcatggccctgatttccctggtttgagactcacttcctcatctccctgtcctctgagataatatgagtgagcacttaggtatcatatcagatgctcaaggctggcagctacccccttcttgagagtccaagaacctggagcagaaataatttttatgtatttttggattaatgaatgtt

SEQ ID NO: 2114 - DNA, 2796 bp, Homo sapiens
  source 1..2796: mol_type = genomic DNA
gcccggcaggttggcggaccggcgggaggcgcagcctgggcagagctcagcttggtcccgccgcccggccggtgctccctggcgcagccacgcaggcgcaccgcagacagacccctctgccatgaaccagtccatcccagtggctcccaccccaccccgccgcgtgcggctgaagccctggctggtggcccaggtgaacagctgccagtacccagggcttcaatgggtcaacggggaaaagaaattattctgcatcccctggaggcatgccacaaggcatggtcccagccaggacggagataacaccatcttcaaggcctgggccaaggagacagggaaatacaccgaaggcgtggatgaagccgatccggccaagtggaaggccaacctgcgctgtgcccttaacaagagccgggacttccgcctcatctacgacgggccccgggacatgccacctcagccctacaagatctacgaggtctgctccaatggccctgctcccacagactcccagccccctgaggattactcttttggtgcaggagaggaggaggaagaagaggaagagaggatgtcaagtggccgcccactctgcagccgcccactctgcggccgcctactctgcagccgcccactctgcagccgcccgtggtgctgggtccccctgctccagaccccagccccctggctcctccccctggcaaccctgctggcttcagggagcttctctctgaggtcctggagcctgggcccctgcctgccagcctgccccctgcaggcgaacagctcctgccagacctgctgatcagcccccacatgctgcctctgaccgacctggagatcaagtttcagtaccgggggcggccaccccgggccctcaccatcagcaacccccatggctgccggctcttctacagccagctggaggccacccaggagcaggtggaactcttcggccccataagcctggagcaagtgcgcttccccagccctgaggacatccccagtgacaagcagcgcttctacacgaaccagctgctggatgtcctggaccgcgggctcatcctccagctacagggccaggacctttatgccatccgcctgtgtcagtgcaaggtgttctggagcgggccttgtgcctcagcccatgactcatgccccaaccccatccagcgggaggtcaagaccaagcttttcagcctggagcattttctcaatgagctcatcctgttccaaaagggccagaccaacaccccaccacccttcgagatcttcttctgctttggggaagaatggcctgaccgcaaaccccgagagaagaagctcattactgtacaggtggtgcctgtagcagctcgactgctgctggagatgttctcaggggagctatcttggtcagctgatagtatccggctacagatctcaaacccagacctcaaagaccgcatggtggagcaattcaaggagctccatcacatctggcagtcccagcagcggttgcagcctgtggcccaggcccctcctggagcaggccttggtgttggccaggggccctggcctatgcacccagctggcatgcaataacaaggctgcagacggtgactggccctggcttcctgggtggcggtgcggactgatgtggagatgtgacagccccgatgagcacctggctggctgcagggtcctacctctgggtttcctggaagtggatttgggccaagaaggagagggagaaaggcccgagcccctgccttcccgggcctttctctcctgggctgtctctggtctggtcagcctggctctcgggaaattcagccatgagcagggaaagaactctcccaaccctggggcctagctgtataggaggaattgcctaagggtggcccactcttgtgattgccccatttcctctggcaacaaaagccagagtgttgtgggccaagtccccccacagggcctctgcagggcatggccctgatttccctggtttgagactcacttcctcatctccctgtcctctgagataatatgagtgagcacttaggtatcatatcagatgctcaaggctggcagctacccccttcttgagagtccaagaacctggagcagaaataatttttatgtatttttggattaatgaatgttaaaaacagactcagctgtttctttccttttactactaccagttgctcccatgctgctccaccaggccctgtttcggatgccaactggcccactccccaagcacttgcccccagcttgcgaccattggcactgggagggcctggcttctgggctgatgggtcagttgggccttcataaacactcacctggctggctttgccttccaggaggaagctggctgaagcaagggtgtggaattttaaatgtgtgcacagtctggaaaactgtcagaatcagttttcccataaaagggtgggctagcattgcagctgcatttgggaccattcaaatctgtcactctcttgtgtatattcctgtgctattaaatatatcagggcagtgcatgtaaatcatcctgatatatttaatatatttattatattgtcccccgaggtggggacagtgagtgagttctcttagtccccccagagctggttgttaaagagcctggcacctacccgctctcacttcatctgtgtcatctctgcacactccagcccactttctgccttcagccattgagtggaagctgccccaggcccttaccaggtgcagatgcccaatcttgatgcccagccatcagaactgtgagccaaataaacctttttctgt

SEQ ID NO: 2115 - DNA, 514 bp, Homo sapiens
  source 1..514: mol_type = genomic DNA
gtccagctgcgcctggaaagcgagctcggacccctctgccatgaaccagtccatcccagtggctcccaccccaccccgccgcgtgcggctgaagccctggctggtggcccaggtgaacagctgccagtacccagggcttcaatgggtcaacggggaaaagaaattattctgcatcccctggaggcatgccacaaggcatggtcccagccaggacggagataacaccatcttcaaggcctgggccaaggagacagggaaatacaccgaaggcgtggatgaagccgatccggccaagtggaaggccaacctgcgctgtgcccttaacaagagccgggacttccgcctcatctacgacgggccccgggacatgccacctcagccctacaagatctacgaggtctgctccaatggccctgctcccacagactcccagccccctgaggattactcttttggtgcaggagaggaggaggaagaagaggaagagatgcagtgcagtctggcccccacatga

SEQ ID NO: 2116 - DNA, 553 bp, Homo sapiens
  source 1..553: mol_type = genomic DNA
agcctgggcagagctcagcttggtcccgccgcccggccggtgctccctggcgcagccacgcaggcgcaccgcagacagccttcctaacaggctccggcaggcgttagggccttcctaagtgctacccgaatgcgtgtccagtgggaggagaagggggaggaccaagaacctagatgaatggccctagagaggtaacatctgtttggtgcctgctgtcattggagacccctctgccatgaaccagtccatcccagtggctcccaccccaccccgccgcgtgcggctgaagccctggctggtggcccaggtgaacagctgccagtacccagggcttcaatgggtcaacggggaaaagaaattattctgcatcccctggaggcatgccacaaggcatggtcccagccaggacggagataacaccatcttcaaggcctgggccaaggagacagggaaatacaccgaaggcgtggatgaagccgatccggccaagtggaaggccaacctgcgctgtgcccttaacaagagccgggacttccgcctcatctacgacggg

SEQ ID NO: 2117 - DNA, 560 bp, Homo sapiens
  source 1..560: mol_type = genomic DNA
attaaacagccgtgttgggcagggccagactgctggactgacagtagggggcaggcagccggaccctctgagctccccaacggcaccagcgcctgcacggcctcagcccagggggtcattagggaagctctccccgattctgtgcagacagagcttcctctgtccacccttgctcggccagaattgtgtgccgctggtgactggcacccctctattctagggccaaggcctctcaggggtctacagatacaactatggccttcctaacaggctccggcaggcgttagggccttcctaagtgctacccgaatgcgtgtccagtgggaggagaagggggaggaccaagaacctagatgaatggccctagagagacccctctgccatgaaccagtccatcccagtggctcccaccccaccccgccgcgtgcggctgaagccctggctggtggcccaggtgaacagctgccagtacccagggcttcaatgggtcaacggggaaaagaaattattctgcatcccctggaggcatgccacaaggcatggtcccagccaggacggag

SEQ ID NO: 2118 - DNA, 2282 bp, Homo sapiens
  source 1..2282: mol_type = genomic DNA
agaaagcggaactgagcccgcgtgttctgaggccagggcagggctggagcgttctgaacacctccccgtcccagcccctgggccaggcaagggccggccttacctctcctgggttggtggcagcagagctgggctctgagggaggcctgcaatgtgagacagtagcagctcagaggcggcactaggcaggtgcaaccccaaaagacccctctgccatgaaccagtccatcccagtggctcccaccccaccccgccgcgtgcggctgaagccctggctggtggcccaggtgaacagctgccagtacccagggcttcaatgggtcaacggggaaaagaaattattctgcatcccctggaggcatgccacaaggcatggtcccagccaggacggagataacaccatcttcaaggcctgggccaaggagacagggaaatacaccgaaggcgtggatgaagccgatccggccaagtggaaggccaacctgcgctgtgcccttaacaagagccgggacttccgcctcatctacgacgggccccgggacatgccacctcagccctacaagatctacgaggtctgctccaatggccctgctcccacagactcccagccccctgaggattactcttttggtgcaggagaggaggaggaagaagaggaagagctgcagaggatgttgccaagcctgagcctcacagaggatgtcaagtggccgcccactctgcagccgcccactctgcggccgcctactctgcagccgcccactctgcagccgcccgtggtgctgggtccccctgctccagaccccagccccctggctcctccccctggcaaccctgctggcttcagggagcttctctctgaggtcctggagcctgggcccctgcctgccagcctgccccctgcaggcgaacagctcctgccagacctgctgatcagcccccacatgctgcctctgaccgacctggagatcaagtttcagtaccgggggcggccaccccgggccctcaccatcagcaacccccatggctgccggctcttctacagccagctggaggccacccaggagcaggtggaactcttcggccccataagcctggagcaagtgcgcttccccagccctgaggacatccccagtgacaagcagcgcttctacacgaaccagctgctggatgtcctggaccgcgggctcatcctccagctacagggccaggacctttatgccatccgcctgtgtcagtgcaaggtgttctggagcgggccttgtgcctcagcccatgactcatgccccaaccccatccagcgggaggtcaagaccaagcttttcagcctggagcattttctcaatgagctcatcctgttccaaaagggccagaccaacaccccaccacccttcgagatcttcttctgctttggggaagaatggcctgaccgcaaaccccgagagaagaagctcattactgtacaggtggtgcctgtagcagctcgactgctgctggagatgttctcaggggagctatcttggtcagctgatagtatccggctacagatctcaaacccagacctcaaagaccgcatggtggagcaattcaaggagctccatcacatctggcagtcccagcagcggttgcagcctgtggcccaggcccctcctggagcaggccttggtgttggccaggggccctggcctatgcacccagctggcatgcaataacaaggctgcagacggtgactggccctggcttcctgggtggcggtgcggactgatgtggagatgtgacagccccgatgagcacctggctggctgcagggtcctacctctgggtttcctggaagtggatttgggccaagaaggagagggagaaaggcccgagcccctgccttcccgggcctttctctcctgggctgtctctggtctggtcagcctggctctcgggaaattcagccatgagcagggaaagaactctcccaaccctggggcctagctgtataggaggaattgcctaagggtggcccactcttgtgattgccccatttcctctggcaacaaaagccagagtgttgtgggccaagtccccccacagggcctctgcagggcatggccctgatttccctggtttgagactcacttcctcatctccctgtcctctgagataatatgagtgagcacttaggtatcatatcagatgctcaaggctggcagctacccccttcttgagagtccaagaacctggagcagaaataatttttatgtatttttggattaatgaatgttaaaaacaga

SEQ ID NO: 2119 - DNA, 637 bp, Homo sapiens
  source 1..637: mol_type = genomic DNA
cgggaggcgcagcctgggcagagctcagcttggtcccgccgcccggccggtgctccctggcgcagccacgcaggcgcaccgcagacagccttcctaacaggctccggcaggcgttagggccttcctaagtgctacccgaatgcgtgtccagtgggaggagaagggggaggaccaagaacctagatgaatggccctagagagacccctctgccatgaaccagtccatcccagtggctcccaccccaccccgccgcgtgcggctgaagccctggctggtggcccaggtgaacagctgccagtacccagggcttcaatgggtcaacggggaaaagaaattattctgcatcccctggaggcatgccacaaggcatggtcccagccaggacggagataacaccatcttcaaggcctgggccaaggagacagggaaatacaccgaaggcgtggatgaagccgatccggccaagtggaaggccaacctgcgctgtgcccttaacaagagccgggacttccgcctcatctacgacgggccccgggacatgccacctcagccctacaagatctacgaggtctgctccaatggccctgctcccacagactcccagccccctgaggattactcttttggtgcaggaga

SEQ ID NO: 2120 - DNA, 689 bp, Homo sapiens
  source 1..689: mol_type = genomic DNA
ctcatttgtgtgcagccccggaggaccagagtggggaagcaccccaccctctcccagggcccaactgagcactgcagcgggaggtacggggttgtcaaatgacagttttgccattccagattgccaaaagagccagtggccagtctagggcaccgcgccgtctggcatctccctggaggccctgggcctggcccgaggctcagcccggatctgcagttgccagacccctctgccatgaaccagtccatcccagtggctcccaccccaccccgccgcgtgcggctgaagccctggctggtggcccaggtgaacagctgccagtacccagggcttcaatgggtcaacggggaaaagaaattattctgcatcccctggaggcatgccacaaggcatggtcccagccaggacggagataacaccatcttcaaggcctgggccaaggagacagggaaatacaccgaaggcgtggatgaagccgatccggccaagtggaaggccaacctgcgctgtgcccttaacaagagccgggacttccgcctcatctacgacgggccccgggacatgccacctcagccctacaagatctacgaggtctgctccaatggccctgctcccacagactcccagccccctgaggattactcttttggtgcaggagaggaggaggaagaagaggaagaggtgagtgt

SEQ ID NO: 2121 - DNA, 1374 bp, Homo sapiens
  source 1..1374: mol_type = genomic DNA
gcccggcaggttggcggaccggcgggaggcgcagcctgggcagagctcagcttggtcccgccgcccggccggtgctccctggcgcagccacgcaggcgcaccgcagacagacccctctgccatgaaccagtccatcccagtggctcccaccccaccccgccgcgtgcggctgaagccctggctggtggcccaggtgaacagctgccagtacccagggcttcaatgggtcaacggggaaaagaaattattctgcatcccctggaggcatgccacaaggcatggtcccagccaggacggagataacaccatcttcaaggcctgggccaaggagacagggaaatacaccgaaggcgtggatgaagccgatccggccaagtggaaggccaacctgcgctgtgcccttaacaagagccgggacttccgcctcatctacgacgggccccgggacatgccacctcagccctacaagatctacgaggtctgctccaatggccctgctcccacagactcccagccccctgaggattactcttttggtgcaggagaggaggaggaagaagaggaagagctgcagaggatgttgccaagcctgagcctcacagtgaccgacctggagatcaagtttcagtaccgggggcggccaccccgggccctcaccatcagcaacccccatggctgccggctcttctacagccagctggaggccacccaggagcaggtggaactcttcggccccataagcctggagcaagtgcgcttccccagccctgaggacatccccagtgacaagcagcgcttctacacgaaccagctgctggatgtcctggaccgcgggctcatcctccagctacagggccaggacctttatgccatccgcctgtgtcagtgcaaggtgttctggagcgggccttgtgcctcagcccatgactcatgccccaaccccatccagcgggaggtcaagaccaagcttttcagcctggagcattttctcaatgagctcatcctgttccaaaagggccagaccaacaccccaccacccttcgagatcttcttctgctttggggaagaatggcctgaccgcaaaccccgagagaagaagctcattactgtacaggtggtgcctgtagcagctcgactgctgctggagatgttctcaggggagctatcttggtcagctgatagtatccggctacagatctcaaacccagacctcaaagaccgcatggtggagcaattcaaggagctccatcacatctggcagtcccagcagcggttgcagcctgtggcccaggcccctcctggagcaggccttggtgttggccaggggccctggcctatgcacccagctggcatgcaataacaaggctgcagacg

SEQ ID NO: 2122 - DNA, 876 bp, Homo sapiens
  source 1..876: mol_type = genomic DNA
agaacctagagcccaaggttcagagtcacccatctcagcaagcccagaagtatctgcaatatctacgatggcctcgccctttgctttactgatggtcctggtggtgctcagctgcaagtcaagctgctctctgggctgtgatctccctgagacccacagcctggataacaggaggaccttgatgctcctggcacaaatgagcagaatctctccttcctcctgtctgatggacagacatgactttggatttccccaggaggagtttgatggcaaccagttccagaaggctccagccatctctgtcctccatgagctgatccagcagatcttcaacctctttaccacaaaagattcatctgctgcttgggatgaggacctcctagacaaattctgcaccgaactctaccagcagctgaatgacttggaagcctgtgtgatgcaggaggagagggtgggagaaactcccctgatgaatgcggactccatcttggctgtgaagaaatacttccgaagaatcactctctatctgacagagaagaaatacagcccttgtgcctgggaggttgtcagagcagaaatcatgagatccctctctttatcaacaaacttgcaagaaagattaaggaggaaggaataacatctggtccaacatgaaaacaattcttattgactcatacaccaggtcacgctttcatgaattctgtcatttcaaagactctcacccctgctataactatgaccatgctgataaactgatttatctatttaaatatttatttaactattcataagatttaaattatttttgttcatataacgtcatgtgcacctttacactgtggttagtgtaataaaacatgttccttatatttactc

SEQ ID NO: 2123 - DNA, 1218 bp, Homo sapiens
  source 1..1218: mol_type = genomic DNA
gtgcagcacattgttctgatcatctgaagatcagctattagaagagaaagatcagttaagtcctttggacctgatcagcttgatacaagaactactgatttcaacttctttggcttaattctctcggaaacgatgaaatatacaagttatatcttggcttttcagctctgcatcgttttgggttctcttggctgttactgccaggacccatatgtaaaagaagcagaaaaccttaagaaatattttaatgcaggtcattcagatgtagcggataatggaactcttttcttaggcattttgaagaattggaaagaggagagtgacagaaaaataatgcagagccaaattgtctccttttacttcaaactttttaaaaactttaaagatgaccagagcatccaaaagagtgtggagaccatcaaggaagacatgaatgtcaagtttttcaatagcaacaaaaagaaacgagatgacttcgaaaagctgactaattattcggtaactgacttgaatgtccaacgcaaagcaatacatgaactcatccaagtgatggctgaactgtcgccagcagctaaaacagggaagcgaaaaaggagtcagatgctgtttcgaggtcgaagagcatcccagtaatggttgtcctgcctgcaatatttgaattttaaatctaaatctatttattaatatttaacattatttatatggggaatatatttttagactcatcaatcaaataagtatttataatagcaacttttgtgtaatgaaaatgaatatctattaatatatgtattatttataattcctatatcctgtgactgtctcacttaatcctttgttttctgactaattaggcaaggctatgtgattacaaggctttatctcaggggccaactaggcagccaacctaagcaagatcccatgggttgtgtgtttatttcacttgatgatacaatgaacacttataagtgaagtgatactatccagttactgccggtttgaaaatatgcctgcaatctgagccagtgctttaatggcatgtcagacagaacttgaatgtgtcaggtgaccctgatgaaaacatagcatctcaggagatttcatgcctggtgcttccaaatattgttgacaactgtgactgtacccaaatggaaagtaactcatttgttaaaattatcaatatctaatatatatgaataaagtgtaagttcacaacta

SEQ ID NO: 2124 - DNA, 1810 bp, Homo sapiens
  source 1..1810: mol_type = genomic DNA
agctccaccctgggagggactgtggcccaggtactgcccgggtgctactttatgggcagcagctcagttgagttagagtctggaagacctcagaagacctcctgtcctatgaggccctccccatggctttagctgacttgtatgaagaaggaggtggaggaggaggagaaggtgaagacaatgctgactcaaaggagacgatctgccgaccctctgggagaaaatccagcaagatgcaagccttcagaatctgggatgttaaccagaagaccttctatctgaggaacaaccaactagttgctggatacttgcaaggaccaaatgtcaatttagaagaaaagatagatgtggtacccattgagcctcatgctctgttcttgggaatccatggagggaagatgtgcctgtcctgtgtcaagtctggtgatgagaccagactccagctggaggcagttaacatcactgacctgagcgagaacagaaagcaggacaagcgcttcgccttcatccgctcagacagtggccccaccaccagttttgagtctgccgcctgccccggttggttcctctgcacagcgatggaagctgaccagcccgtcagcctcaccaatatgcctgacgaaggcgtcatggtcaccaaattctacttccaggaggacgagtagtactgcccaggcctgcctgttcccattcttgcatggcaaggactgcagggactgccagtccccctgccccagggctcccggctatgggggcactgaggaccagccattgaggggtggaccctcagaaggcgtcacaacaacctggtcacaggactctgcctcctcttcaactgaccagcctccatgctgcctccagaatggtctttctaatgtgtgaatcagagcacagcagcccctgcacaaagcccttccatgtcgcctctgcattcaggatcaaaccccgaccacctgcccaacctgctctcctcttgccactgcctcttcctccctcattccaccttcccatgccctggatccatcaggccacttgatgacccccaaccaagtggctcccacaccctgttttacaaaaaagaaaagaccagtccatgagggaggtttttaagggtttgtggaaaatgaaaattaggatttcatgatttttttttttcagtccccgtgaaggagagcccttcatttggagattatgttctttcggggagaggctgaggacttaaaatattcctgcatttgtgaaatgatggtgaaagtaagtggtagcttttcccttctttttcttctttttttgtgatgtcccaacttgtaaaaattaaaagttatggtactatgttagccccataattttttttttccttttaaaacacttccataatctggactcctctgtccaggcactgctgcccagcctccaagctccatctccactccagattttttacagctgcctgcagtactttacctcctatcagaagtttctcagctcccaaggctctgagcaaatgtggctcctgggggttctttcttcctctgctgaaggaataaattgctccttgacattgtagagcttctggcacttggagacttgtatgaaagatggctgtgcctctgcctgtctcccccaccgggctgggagctctgcagagcaggaaacatgactcgtatatgtctcaggtccctgcagggccaagcacctagcctcgctcttggcaggtactcagcgaatgaatgctgtatatgttgggtgcaaagttccctacttcctgtgacttcagctctgttttacaataaaatcttgaaaatgccta

SEQ ID NO: 2125 - DNA, 1747 bp, Homo sapiens
  source 1..1747: mol_type = genomic DNA
agctccaccctgggagggactgtggcccaggtactgcccgggtgctactttatgggcagcagctcagttgagttagagtctggaagacctcagaagacctcctgtcctatgaggccctccccatggctttagagacgatctgccgaccctctgggagaaaatccagcaagatgcaagccttcagaatctgggatgttaaccagaagaccttctatctgaggaacaaccaactagttgctggatacttgcaaggaccaaatgtcaatttagaagaaaagatagatgtggtacccattgagcctcatgctctgttcttgggaatccatggagggaagatgtgcctgtcctgtgtcaagtctggtgatgagaccagactccagctggaggcagttaacatcactgacctgagcgagaacagaaagcaggacaagcgcttcgccttcatccgctcagacagtggccccaccaccagttttgagtctgccgcctgccccggttggttcctctgcacagcgatggaagctgaccagcccgtcagcctcaccaatatgcctgacgaaggcgtcatggtcaccaaattctacttccaggaggacgagtagtactgcccaggcctgcctgttcccattcttgcatggcaaggactgcagggactgccagtccccctgccccagggctcccggctatgggggcactgaggaccagccattgaggggtggaccctcagaaggcgtcacaacaacctggtcacaggactctgcctcctcttcaactgaccagcctccatgctgcctccagaatggtctttctaatgtgtgaatcagagcacagcagcccctgcacaaagcccttccatgtcgcctctgcattcaggatcaaaccccgaccacctgcccaacctgctctcctcttgccactgcctcttcctccctcattccaccttcccatgccctggatccatcaggccacttgatgacccccaaccaagtggctcccacaccctgttttacaaaaaagaaaagaccagtccatgagggaggtttttaagggtttgtggaaaatgaaaattaggatttcatgatttttttttttcagtccccgtgaaggagagcccttcatttggagattatgttctttcggggagaggctgaggacttaaaatattcctgcatttgtgaaatgatggtgaaagtaagtggtagcttttcccttctttttcttctttttttgtgatgtcccaacttgtaaaaattaaaagttatggtactatgttagccccataattttttttttccttttaaaacacttccataatctggactcctctgtccaggcactgctgcccagcctccaagctccatctccactccagattttttacagctgcctgcagtactttacctcctatcagaagtttctcagctcccaaggctctgagcaaatgtggctcctgggggttctttcttcctctgctgaaggaataaattgctccttgacattgtagagcttctggcacttggagacttgtatgaaagatggctgtgcctctgcctgtctcccccaccgggctgggagctctgcagagcaggaaacatgactcgtatatgtctcaggtccctgcagggccaagcacctagcctcgctcttggcaggtactcagcgaatgaatgctgtatatgttgggtgcaaagttccctacttcctgtgacttcagctctgttttacaataaaatcttgaaaatgccta

SEQ ID NO: 2126 - DNA, 848 bp, Homo sapiens
  source 1..848: mol_type = genomic DNA
atttctttataaaccacaactctgggcccgcaatggcagtccactgccttgctgcagtcacagaatggaaatctgcagaggcctccgcagtcacctaatcactctcctcctcttcctgttccattcagagacgatctgccgaccctctgggagaaaatccagcaagatgcaagccttcagaatctgggatgttaaccagaagaccttctatctgaggaacaaccaactagttgctggatacttgcaaggaccaaatgtcaatttagaagaaaagatagatgtggtacccattgagcctcatgctctgttcttgggaatccatggagggaagatgtgcctgtcctgtgtcaagtctggtgatgagaccagactccagctggaggcagttaacatcactgacctgagcgagaacagaaagcaggacaagcgcttcgccttcatccgctcagacagtggccccaccaccagttttgagtctgccgcctgccccggttggttcctctgcacagcgatggaagctgaccagcccgtcagcctcaccaatatgcctgacgaaggcgtcatggtcaccaaattctacttccaggaggacgagtagtactgcccaggcctgcctgttcccattcttgcatggcaaggactgcagggactgccagtccccctgccccagggctcccggctatgggggcactgaggaccagccattgaggggtggaccctcagaaggcgtcacaacaacctggtcacaggactctgcctcctcttcaactgaccagcctccatgctgcctccagaatggtctttctaatgtgtgaatcagagcacagcagcccctgcacaaagccctt

SEQ ID NO: 2127 - DNA, 1922 bp, Homo sapiens
  source 1..1922: mol_type = genomic DNA
gggcagctccaccctgggagggactgtggcccaggtactgcccgggtgctactttatgggcagcagctcagttgagttagagtctggaagacctcagaagacctcctgtcctatgaggccctccccatggctttagggggattataaaactaatcatcaaagccaagaaggcaagagcaagcatgtaccgctgaaaacacaagataactgcataagtaatgactttcagtgcagattcatagctaacccataaactgctggggcaaaaatcatcttggaaggctctgaacctcagaaaggattcacaagacgatctgccgaccctctgggagaaaatccagcaagatgcaagccttcagaatctgggatgttaaccagaagaccttctatctgaggaacaaccaactagttgctggatacttgcaaggaccaaatgtcaatttagaagaaaagatagatgtggtacccattgagcctcatgctctgttcttgggaatccatggagggaagatgtgcctgtcctgtgtcaagtctggtgatgagaccagactccagctggaggcagttaacatcactgacctgagcgagaacagaaagcaggacaagcgcttcgccttcatccgctcagacagtggccccaccaccagttttgagtctgccgcctgccccggttggttcctctgcacagcgatggaagctgaccagcccgtcagcctcaccaatatgcctgacgaaggcgtcatggtcaccaaattctacttccaggaggacgagtagtactgcccaggcctgcctgttcccattcttgcatggcaaggactgcagggactgccagtccccctgccccagggctcccggctatgggggcactgaggaccagccattgaggggtggaccctcagaaggcgtcacaacaacctggtcacaggactctgcctcctcttcaactgaccagcctccatgctgcctccagaatggtctttctaatgtgtgaatcagagcacagcagcccctgcacaaagcccttccatgtcgcctctgcattcaggatcaaaccccgaccacctgcccaacctgctctcctcttgccactgcctcttcctccctcattccaccttcccatgccctggatccatcaggccacttgatgacccccaaccaagtggctcccacaccctgttttacaaaaaagaaaagaccagtccatgagggaggtttttaagggtttgtggaaaatgaaaattaggatttcatgatttttttttttcagtccccgtgaaggagagcccttcatttggagattatgttctttcggggagaggctgaggacttaaaatattcctgcatttgtgaaatgatggtgaaagtaagtggtagcttttcccttctttttcttctttttttgtgatgtcccaacttgtaaaaattaaaagttatggtactatgttagccccataattttttttttccttttaaaacacttccataatctggactcctctgtccaggcactgctgcccagcctccaagctccatctccactccagattttttacagctgcctgcagtactttacctcctatcagaagtttctcagctcccaaggctctgagcaaatgtggctcctgggggttctttcttcctctgctgaaggaataaattgctccttgacattgtagagcttctggcacttggagacttgtatgaaagatggctgtgcctctgcctgtctcccccaccgggctgggagctctgcagagcaggaaacatgactcgtatatgtctcaggtccctgcagggccaagcacctagcctcgctcttggcaggtactcagcgaatgaatgctgtatatgttgggtgcaaagttccctacttcctgtgacttcagctctgttttacaataaaatcttgaaaatgccta

SEQ ID NO: 2128 - DNA, 4907 bp, Homo sapiens
  source 1..4907: mol_type = genomic DNA
tagacgcaccctctgaagatggtgactccctcctgagaagctggaccccttggtaaaagacaaggccttctccaagaagaatatgaaagtgttactcagacttatttgtttcatagctctactgatttcttctctggaggctgataaatgcaaggaacgtgaagaaaaaataattttagtgtcatctgcaaatgaaattgatgttcgtccctgtcctcttaacccaaatgaacacaaaggcactataacttggtataaagatgacagcaagacacctgtatctacagaacaagcctccaggattcatcaacacaaagagaaactttggtttgttcctgctaaggtggaggattcaggacattactattgcgtggtaagaaattcatcttactgcctcagaattaaaataagtgcaaaatttgtggagaatgagcctaacttatgttataatgcacaagccatatttaagcagaaactacccgttgcaggagacggaggacttgtgtgcccttatatggagttttttaaaaatgaaaataatgagttacctaaattacagtggtataaggattgcaaacctctacttcttgacaatatacactttagtggagtcaaagataggctcatcgtgatgaatgtggctgaaaagcatagagggaactatacttgtcatgcatcctacacatacttgggcaagcaatatcctattacccgggtaatagaatttattactctagaggaaaacaaacccacaaggcctgtgattgtgagcccagctaatgagacaatggaagtagacttgggatcccagatacaattgatctgtaatgtcaccggccagttgagtgacattgcttactggaagtggaatgggtcagtaattgatgaagatgacccagtgctaggggaagactattacagtgtggaaaatcctgcaaacaaaagaaggagtaccctcatcacagtgcttaatatatcggaaattgaaagtagattttataaacatccatttacctgttttgccaagaatacacatggtatagatgcagcatatatccagttaatatatccagtcactaatttccagaagcacatgattggtatatgtgtcacgttgacagtcataattgtgtgttctgttttcatctataaaatcttcaagattgacattgtgctttggtacagggattcctgctatgattttctcccaataaaagcttcagatggaaagacctatgacgcatatatactgtatccaaagactgttggggaagggtctacctctgactgtgatatttttgtgtttaaagtcttgcctgaggtcttggaaaaacagtgtggatataagctgttcatttatggaagggatgactacgttggggaagacattgttgaggtcattaatgaaaacgtaaagaaaagcagaagactgattatcattttagtcagagaaacatcaggcttcagctggctgggtggttcatctgaagagcaaatagccatgtataatgctcttgttcaggatggaattaaagttgtcctgcttgagctggagaaaatccaagactatgagaaaatgccagaatcgattaaattcattaagcagaaacatggggctatccgctggtcaggggactttacacagggaccacagtctgcaaagacaaggttctggaagaatgtcaggtaccacatgccagtccagcgacggtcaccttcatctaaacaccagttactgtcaccagccactaaggagaaactgcaaagagaggctcacgtgcctctcgggtagcatggagaagttgccaagagttctttaggtgcctcctgtcttatggcgttgcaggccaggttatgcctcatgctgacttgcagagttcatggaatgtaactatatcatcctttatccctgaggtcacctggaatcagattattaagggaataagccatgacgtcaatagcagcccagggcacttcagagtagagggcttgggaagatcttttaaaaaggcagtaggcccggtgtggtggctcacgcctataatcccagcactttgggaggctgaagtgggtggatcaccagaggtcaggagttcgagaccagcccagccaacatggcaaaaccccatctctactaaaaatacaaaaatgagctaggcatggtggcacacgcctgtaatcccagctacacctgaggctgaggcaggagaattgcttgaaccggggagacggaggttgcagtgagccgagtttgggccactgcactctagcctggcaacagagcaagactccgtctcaaaaaaagggcaataaatgccctctctgaatgtttgaactgccaagaaaaggcatggagacagcgaactagaagaaagggcaagaaggaaatagccaccgtctacagatggcttagttaagtcatccacagcccaagggcggggctatgccttgtctggggaccctgtagagtcactgaccctggagcggctctcctgagaggtgctgcaggcaaagtgagactgacacctcactgaggaagggagacatattcttggagaactttccatctgcttgtattttccatacacatccccagccagaagttagtgtccgaagaccgaattttattttacagagcttgaaaactcacttcaatgaacaaagggattctccaggattccaaagttttgaagtcatcttagctttccacaggagggagagaacttaaaaaagcaacagtagcagggaattgatccacttcttaatgctttcctccctggcatgaccatcctgtcctttgttattatcctgcattttacgtctttggaggaacagctccctagtggcttcctccgtctgcaatgtcccttgcacagcccacacatgaaccatccttcccatgatgccgctcttctgtcatcccgctcctgctgaaacacctcccaggggctccacctgttcaggagctgaagcccatgctttcccaccagcatgtcactcccagaccacctccctgccctgtcctccagcttcccctcgctgtcctgctgtgtgaattcccaggttggcctggtggccatgtcgcctgcccccagcactcctctgtctctgctcttgcctgcacccttcctcctcctttgcctaggaggccttctcgcattttctctagctgatcagaattttaccaaaattcagaacatcctccaattccacagtctctgggagactttccctaagaggcgacttcctctccagccttctctctctggtcaggcccactgcagagatggtggtgagcacatctgggaggctggtctccctccagctggaattgctgctctctgagggagaggctgtggtggctgtctctgtccctcactgccttccaggagcaatttgcacatgtaacatagatttatgtaatgctttatgtttaaaaacattccccaattatcttatttaatttttgcaattattctaattttatatatagagaaagtgacctattttttaaaaaaatcacactctaagttctattgaacctaggacttgagcctccatttctggcttctagtctggtgttctgagtacttgatttcaggtcaataacggtcccccctcactccacactggcacgtttgtgagaagaaatgacattttgctaggaagtgaccgagtctaggaatgcttttattcaagacaccaaattccaaacttctaaatgttggaattttcaaaaattgtgtttagattttatgaaaaactcttctactttcatctattctttccctagaggcaaacatttcttaaaatgtttcattttcattaaaaatgaaagccaaatttatatgccaccgattgcaggacacaagcacagttttaagagttgtatgaacatggagaggacttttggtttttatatttctcgtatttaatatgggtgaacaccaacttttatttggaataataattttcctcctaaacaaaaacacattgagtttaagtctctgactcttgcctttccacctgctttctcctgggcccgctttgcctgcttgaaggaacagtgctgttctggagctgctgttccaacagacagggcctagctttcatttgacacacagactacagccagaagcccatggagcagggatgtcacgtcttgaaaagcctattagatgttttacaaatttaattttgcagattattttagtctgtcatccagaaaatgtgtcagcatgcatagtgctaagaaagcaagccaatttggaaacttaggttagtgacaaaattggccagagagtgggggtgatgatgaccaagaattacaagtagaatggcagctggaatttaaggagggacaagaatcaatggataagcgtgggtggaggaagatccaaacagaaaagtgcaaagttattccccatcttccaagggttgaattctggaggaagaagacacattcctagttccccgtgaacttcctttgacttattgtccccactaaaacaaaacaaaaaacttttaatgccttccacattaattagattttcttgcagtttttttatggcatttttttaaagatgccctaagtgttgaagaagagtttgcaaatgcaacaaaatatttaattaccggttgttaaaactggtttagcacaatttatattttccctctcttgcctttcttatttgcaataaaaggtattgagccattttttaaatgacatttttgataaattatgtttgtactagttgatgaaggagttttttttaacctgtttatataattttgcagcagaagccaaattttttgtatattaaagcaccaaattcatgtacagcatgcatcacggatcaatagactgtacttattttccaataaaattttcaaactttgtactgtta

SEQ ID NO: 2129 - DNA, 5143 bp, Homo sapiens
  source 1..5143: mol_type = genomic DNA
gccggagccgactcggagcgcgcggcgccggccgggaggagccggagagcggccgggccgggcggtgggggcgccggcctgccccgcgcgccccagggagcggcaggaatgtgacaatcgcgcgcccgcgcaccgaagcactcctcgctcggctcctagggctctcgcccctctgagctgagccgggttccgcccggggctgggatcccatcaccctccacggccgtccgtccaggtagacgcaccctctgaagatggtgactccctcctgagaagctggaccccttggtaaaagacaaggccttctccaagaagaatatgaaagtgttactcagacttatttgtttcatagctctactgatttcttctctggaggctgataaatgcaaggaacgtgaagaaaaaataattttagtgtcatctgcaaatgaaattgatgttcgtccctgtcctcttaacccaaatgaacacaaaggcactataacttggtataaagatgacagcaagacacctgtatctacagaacaagcctccaggattcatcaacacaaagagaaactttggtttgttcctgctaaggtggaggattcaggacattactattgcgtggtaagaaattcatcttactgcctcagaattaaaataagtgcaaaatttgtggagaatgagcctaacttatgttataatgcacaagccatatttaagcagaaactacccgttgcaggagacggaggacttgtgtgcccttatatggagttttttaaaaatgaaaataatgagttacctaaattacagtggtataaggattgcaaacctctacttcttgacaatatacactttagtggagtcaaagataggctcatcgtgatgaatgtggctgaaaagcatagagggaactatacttgtcatgcatcctacacatacttgggcaagcaatatcctattacccgggtaatagaatttattactctagaggaaaacaaacccacaaggcctgtgattgtgagcccagctaatgagacaatggaagtagacttgggatcccagatacaattgatctgtaatgtcaccggccagttgagtgacattgcttactggaagtggaatgggtcagtaattgatgaagatgacccagtgctaggggaagactattacagtgtggaaaatcctgcaaacaaaagaaggagtaccctcatcacagtgcttaatatatcggaaattgaaagtagattttataaacatccatttacctgttttgccaagaatacacatggtatagatgcagcatatatccagttaatatatccagtcactaatttccagaagcacatgattggtatatgtgtcacgttgacagtcataattgtgtgttctgttttcatctataaaatcttcaagattgacattgtgctttggtacagggattcctgctatgattttctcccaataaaagcttcagatggaaagacctatgacgcatatatactgtatccaaagactgttggggaagggtctacctctgactgtgatatttttgtgtttaaagtcttgcctgaggtcttggaaaaacagtgtggatataagctgttcatttatggaagggatgactacgttggggaagacattgttgaggtcattaatgaaaacgtaaagaaaagcagaagactgattatcattttagtcagagaaacatcaggcttcagctggctgggtggttcatctgaagagcaaatagccatgtataatgctcttgttcaggatggaattaaagttgtcctgcttgagctggagaaaatccaagactatgagaaaatgccagaatcgattaaattcattaagcagaaacatggggctatccgctggtcaggggactttacacagggaccacagtctgcaaagacaaggttctggaagaatgtcaggtaccacatgccagtccagcgacggtcaccttcatctaaacaccagttactgtcaccagccactaaggagaaactgcaaagagaggctcacgtgcctctcgggtagcatggagaagttgccaagagttctttaggtgcctcctgtcttatggcgttgcaggccaggttatgcctcatgctgacttgcagagttcatggaatgtaactatatcatcctttatccctgaggtcacctggaatcagattattaagggaataagccatgacgtcaatagcagcccagggcacttcagagtagagggcttgggaagatcttttaaaaaggcagtaggcccggtgtggtggctcacgcctataatcccagcactttgggaggctgaagtgggtggatcaccagaggtcaggagttcgagaccagcccagccaacatggcaaaaccccatctctactaaaaatacaaaaatgagctaggcatggtggcacacgcctgtaatcccagctacacctgaggctgaggcaggagaattgcttgaaccggggagacggaggttgcagtgagccgagtttgggccactgcactctagcctggcaacagagcaagactccgtctcaaaaaaagggcaataaatgccctctctgaatgtttgaactgccaagaaaaggcatggagacagcgaactagaagaaagggcaagaaggaaatagccaccgtctacagatggcttagttaagtcatccacagcccaagggcggggctatgccttgtctggggaccctgtagagtcactgaccctggagcggctctcctgagaggtgctgcaggcaaagtgagactgacacctcactgaggaagggagacatattcttggagaactttccatctgcttgtattttccatacacatccccagccagaagttagtgtccgaagaccgaattttattttacagagcttgaaaactcacttcaatgaacaaagggattctccaggattccaaagttttgaagtcatcttagctttccacaggagggagagaacttaaaaaagcaacagtagcagggaattgatccacttcttaatgctttcctccctggcatgaccatcctgtcctttgttattatcctgcattttacgtctttggaggaacagctccctagtggcttcctccgtctgcaatgtcccttgcacagcccacacatgaaccatccttcccatgatgccgctcttctgtcatcccgctcctgctgaaacacctcccaggggctccacctgttcaggagctgaagcccatgctttcccaccagcatgtcactcccagaccacctccctgccctgtcctccagcttcccctcgctgtcctgctgtgtgaattcccaggttggcctggtggccatgtcgcctgcccccagcactcctctgtctctgctcttgcctgcacccttcctcctcctttgcctaggaggccttctcgcattttctctagctgatcagaattttaccaaaattcagaacatcctccaattccacagtctctgggagactttccctaagaggcgacttcctctccagccttctctctctggtcaggcccactgcagagatggtggtgagcacatctgggaggctggtctccctccagctggaattgctgctctctgagggagaggctgtggtggctgtctctgtccctcactgccttccaggagcaatttgcacatgtaacatagatttatgtaatgctttatgtttaaaaacattccccaattatcttatttaatttttgcaattattctaattttatatatagagaaagtgacctattttttaaaaaaatcacactctaagttctattgaacctaggacttgagcctccatttctggcttctagtctggtgttctgagtacttgatttcaggtcaataacggtcccccctcactccacactggcacgtttgtgagaagaaatgacattttgctaggaagtgaccgagtctaggaatgcttttattcaagacaccaaattccaaacttctaaatgttggaattttcaaaaattgtgtttagattttatgaaaaactcttctactttcatctattctttccctagaggcaaacatttcttaaaatgtttcattttcattaaaaatgaaagccaaatttatatgccaccgattgcaggacacaagcacagttttaagagttgtatgaacatggagaggacttttggtttttatatttctcgtatttaatatgggtgaacaccaacttttatttggaataataattttcctcctaaacaaaaacacattgagtttaagtctctgactcttgcctttccacctgctttctcctgggcccgctttgcctgcttgaaggaacagtgctgttctggagctgctgttccaacagacagggcctagctttcatttgacacacagactacagccagaagcccatggagcagggatgtcacgtcttgaaaagcctattagatgttttacaaatttaattttgcagattattttagtctgtcatccagaaaatgtgtcagcatgcatagtgctaagaaagcaagccaatttggaaacttaggttagtgacaaaattggccagagagtgggggtgatgatgaccaagaattacaagtagaatggcagctggaatttaaggagggacaagaatcaatggataagcgtgggtggaggaagatccaaacagaaaagtgcaaagttattccccatcttccaagggttgaattctggaggaagaagacacattcctagttccccgtgaacttcctttgacttattgtccccactaaaacaaaacaaaaaacttttaatgccttccacattaattagattttcttgcagtttttttatggcatttttttaaagatgccctaagtgttgaagaagagtttgcaaatgcaacaaaatatttaattaccggttgttaaaactggtttagcacaatttatattttccctctcttgcctttcttatttgcaataaaaggtattgagccattttttaaatgacatttttgataaattatgtttgtactagttgatgaaggagttttttttaacctgtttatataattttgcagcagaagccaaattttttgtatattaaagcaccaaattcatgtacagcatgcatcacggatcaatagactgtacttattttccaataaaattttcaaactttgtactgtta

SEQ ID NO: 2130 - DNA, 709 bp, Homo sapiens
  source 1..709: mol_type = genomic DNA
gtgactccctcctgagaagctggaccccttggtaaaagacaaggccttctccaagacttaaaacacacttcacgcagtcacagaaagagctcatagaccagactgcggggcttcaaagccttctatcttatttaatcatctgtaaatagtttaaagaagaatatgaaagtgttactcagacttatttgtttcatagctctactgatttcttctctggaggctgataaatgcaaggaacgtgaagaaaaaataattttagtgtcatctgcaaatgaaattgatgttcgtccctgtcctcttaacccaaatgaacacaaaggcactataacttggtataaagatgacagcaagacacctgtatctacagaacaagcctccaggattcatcaacacaaagagaaactttggtttgttcctgctaaggtggaggattcaggacattactattgcgtggtaagaaattcatcttactgcctcagaattaaaataagtgcaaaatttgtggagaatgagcctaacttatgttataatgcacaagccatatttaagcagaaactacccgttgcaggagacggaggacttgtgtgcccttatatggagttttttaaaaatgaaaataatgagttacctaaattacagtggtataaggattgcaaacctctacttcttgacaatatacactttagtggagtcaaagataggctcatcg

SEQ ID NO: 2131 - DNA, 577 bp, Homo sapiens
  source 1..577: mol_type = genomic DNA
agtcggagagagcccctggccaggcaccaagctccagaggtcgctctggcgagcgtttgcttcgggatctgatgccctggagtcgccaactcaattcgcgggtcgcagccaggctccatgggggtagtagagccaggtcgtagtggctaggtagacgcaccctctgaagatggtgactccctcctgagaagctggaccccttggtaaaagacaaggccttctccaagaagaatatgaaagtgttactcagacttatttgtttcatagctctactgatttcttctctggaggctgataaatgcaaggaacgtgaagaaaaaataattttagtgtcatctgcaaatgaaattgatgttcgtccctgtcctcttaacccaaatgaacacaaaggcactataacttggtataaagatgacagcaagacacctgtatctacagaacaagcctccaggattcatcaacacaaagagaaactttggtttgttcctgctaaggtggaggattcaggacattactattgcgtggtaagaaattcatcttactgcctcagaattaaaataagtgcaaaatttgtgga

SEQ ID NO: 2132 - DNA, 549 bp, Homo sapiens
  source 1..549: mol_type = genomic DNA
cttcttggaggatggcccatgaagacctccaaacaagctggaggggccagtcacttgctgaagactagcgaagtggagggggaaagcccgagggagctgcagactcgaccactgcgccctcccctcctctccctgcaaggagcccaaggtagacgcaccctctgaagatggtgactccctcctgagaagctggaccccttggtaaaagacaaggccttctccaagaagaatatgaaagtgttactcagacttatttgtttcatagctctactgatttcttctctggaggctgataaatgcaaggaacgtgaagaaaaaataattttagtgtcatctgcaaatgaaattgatgttcgtccctgtcctcttaacccaaatgaacacaaaggcactataacttggtataaagatgacagcaagacacctgtatctacagaacaagcctccaggattcatcaacacaaagagaaactttggtttgttcctgctaaggtggaggattcaggacattactattgcgtggtaagaaattcatcttactgcctcaga

SEQ ID NO: 2133 - DNA, 609 bp, Homo sapiens
  source 1..609: mol_type = genomic DNA
gaaacatttaccagatgtgtggcttgagtgtccattcccgcaacaaaaacgctctgcagtaaagctccgagatggctgtgtttgtgttggactgctctagatgcacaaccctcctggacaaagcgtttttcctcagccttcaccacccatggaggaggtgtgattacctctattcacagaaaggagactgggacccaaccaaggcaagtcatttgcttcagaccacagagcaaagaatcattctgtcattccagaaatatttgtcaggcgcccctggtgtgtcaggtagacgcaccctctgaagatggtgactccctcctgagaagctggaccccttggtaaaagacaaggccttctccaagaagaatatgaaagtgttactcagacttatttgtttcatagctctactgatttcttctctggaggctgataaatgcaaggaacgtgaagaaaaaataattttagtgtcatctgcaaatgaaattgatgttcgtccctgtcctcttaacccaaatgaacacaaaggcactataacttggtataaagatgacagcaagacacctgtatctacagaacaagcctccaggattcatcaacacaaagagaaac

SEQ ID NO: 2134 - DNA, 1631 bp, Homo sapiens
  source 1..1631: mol_type = genomic DNA
accaatactcttttcccctttcctttaacttgattgtgaaatcaggtattcaacagagaaatttctcagcctcctacttctgcttttgaaagccataaaaacagcgagggagaaactggcagataccaaacctcttcgaggcacaaggcacaacaggctgctctgggattctcttcagccaatcttcattgctcaagtgtctgaagcagccatggcagaagtacctgagctcgccagtgaaatgatggcttattacagtggcaatgaggatgacttgttctttgaagctgatggccctaaacagatgaagtgctccttccaggacctggacctctgccctctggatggcggcatccagctacgaatctccgaccaccactacagcaagggcttcaggcaggccgcgtcagttgttgtggccatggacaagctgaggaagatgctggttccctgcccacagaccttccaggagaatgacctgagcaccttctttcccttcatctttgaagaagaacctatcttcttcgacacatgggataacgaggcttatgtgcacgatgcacctgtacgatcactgaactgcacgctccgggactcacagcaaaaaagcttggtgatgtctggtccatatgaactgaaagctctccacctccagggacaggatatggagcaacaagtggtgttctccatgtcctttgtacaaggagaagaaagtaatgacaaaatacctgtggccttgggcctcaaggaaaagaatctgtacctgtcctgcgtgttgaaagatgataagcccactctacagctggagagtgtagatcccaaaaattacccaaagaagaagatggaaaagcgatttgtcttcaacaagatagaaatcaataacaagctggaatttgagtctgcccagttccccaactggtacatcagcacctctcaagcagaaaacatgcccgtcttcctgggagggaccaaaggcggccaggatataactgacttcaccatgcaatttgtgtcttcctaaagagagctgtacccagagagtcctgtgctgaatgtggactcaatccctagggctggcagaaagggaacagaaaggtttttgagtacggctatagcctggactttcctgttgtctacaccaatgcccaactgcctgccttagggtagtgctaagaggatctcctgtccatcagccaggacagtcagctctctcctttcagggccaatccccagcccttttgttgagccaggcctctctcacctctcctactcacttaaagcccgcctgacagaaaccacggccacatttggttctaagaaaccctctgtcattcgctcccacattctgatgagcaaccgcttccctatttatttatttatttgtttgtttgttttattcattggtctaatttattcaaagggggcaagaagtagcagtgtctgtaaaagagcctagtttttaatagctatggaatcaattcaatttggactggtgtgctctctttaaatcaagtcctttaattaagactgaaaatatataagctcagattatttaaatgggaatatttataaatgagcaaatatcatactgttcaatggttctgaaataaacttcactgaagaaaaaaaaa

SEQ ID NO: 2135 - DNA, 580 bp, Homo sapiens
  source 1..580: mol_type = genomic DNA
actttaatcttccttacaactaggtgctaagggagtctctctgtctctctgcctctttgtgtgtatgcatattctctctctctctctctttctttctctgtctctccctctccttccctctctgcctccctctctcagctttttgcaaaaatgccaggtgtaatataatgcttatgactcgggaaatattctgggaatggatactgcttatctaacagctgacaccctaaaggtgtctgaagcagccatggcagaagtacctgagctcgccagtgaaatgatggcttattacagtggcaatgaggatgacttgttctttgaagctgatggccctaaacagatgaagtgctccttccaggacctggacctctgccctctggatggcggcatccagctacgaatctccgaccaccactacagcaagggcttcaggcaggccgcgtcagttgttgtggccatggacaagctgaggaagatgctggttccctgcccacagaccttccaggagaatgacctgagcaccttctttcccttcatctttgaagaagaacctatcttcttcgacacatgggataacgag

SEQ ID NO: 2136 - DNA, 581 bp, Homo sapiens
  source 1..581: mol_type = genomic DNA
gaaagccataaaaacagcgagggagaaactggcagataccaaacctcttcgaggcacaaggcacaacaggctgctctgggattctcttcagccaatcttcattgctcaagtatgactttaatcttccttacaactaggtgtctgaagcagccatggcagaagtacctgagctcgccagtgaaatgatggcttattacagtggcaatgaggatgacttgttctttgaagctgatggccctaaacagatgaagtgctccttccaggacctggacctctgccctctggatggcggcatccagctacgaatctccgaccaccactacagcaagggcttcaggcaggccgcgtcagttgttgtggccatggacaagctgaggaagatgctggttccctgcccacagaccttccaggagaatgacctgagcaccttctttcccttcatctttgaagaagaacctatcttcttcgacacatgggataacgaggcttatgtgcacgatgcacctgtacgatcactgaactgcacgctccgggactcacagcaaaaaagcttggtgatgtctggtccatatgaactgaaa

SEQ ID NO: 2137 - DNA, 581 bp, Homo sapiens
  source 1..581: mol_type = genomic DNA
aatacattgctagttggggtttggtttagcaaatgcttttctctagacccaaaggacttctctttcacacattcattcatttactcagagatcatttctttgcatgactgccatgcactggatgctgagagaaatcacacatgaacgtagccgtcatggggaagtcactcattttctcctttttacacaggtgtctgaagcagccatggcagaagtacctgagctcgccagtgaaatgatggcttattacagtggcaatgaggatgacttgttctttgaagctgatggccctaaacagatgaagtgctccttccaggacctggacctctgccctctggatggcggcatccagctacgaatctccgaccaccactacagcaagggcttcaggcaggccgcgtcagttgttgtggccatggacaagctgaggaagatgctggttccctgcccacagaccttccaggagaatgacctgagcaccttctttcccttcatctttgaagaagaacctatcttcttcgacacatgggataacgaggcttatgtgcacgatgcacctgtacgatcactgaactgcacgc

SEQ ID NO: 2138 - DNA, 1522 bp, Homo sapiens
  source 1..1522: mol_type = genomic DNA
acggggcgtccggctaaggccggggacccagggtggtgggcggggtgtcccgcccgcctgtggaccccgcgcagtaactgcgaacatttcgctttcattttgggccgagctggaggcggcggggccgtcccggaacggctgcggccgggcaccccgggagttaatccgaaagcgccgcaagccccgcgggccggccgcaccgcacgtgtcaccgagaagctgatgtagagagagacacagaaggagacagaaagcaagagaccagagtcccgggaaagtcctgccgcgcctcgggacaattataaaaatgtggccccctgggtcagcctcccagccaccgccctcacctgccgcggccacaggtctgcatccagcggctcgccctgtgtccctgcagtgccggctcagcatgtgtccagcgcgcagcctcctccttgtggctaccctggtcctcctggaccacctcagtttggccagaaacctccccgtggccactccagacccaggaatgttcccatgccttcaccactcccaaaacctgctgagggccgtcagcaacatgctccagaaggccagacaaactctagaattttacccttgcacttctgaagagattgatcatgaagatatcacaaaagataaaaccagcacagtggaggcctgtttaccattggaattaaccaagaatgagagttgcctaaattccagagagacctctttcataactaatgggagttgcctggcctccagaaagacctcttttatgatggccctgtgccttagtagtatttatgaagacttgaagatgtaccaggtggagttcaagaccatgaatgcaaagcttctgatggatcctaagaggcagatctttctagatcaaaacatgctggcagttattgatgagctgatgcaggccctgaatttcaacagtgagactgtgccacaaaaatcctcccttgaagaaccggatttttataaaactaaaatcaagctctgcatacttcttcatgctttcagaattcgggcagtgactattgatagagtgatgagctatctgaatgcttcctaaaaagcgaggtccctccaaaccgttgtcatttttataaaactttgaaatgaggaaactttgataggatgtggattaagaactagggagggggaaagaaggatgggactattacatccacatgatacctctgatcaagtatttttgacatttactgtggataaattgtttttaagttttcatgaatgaattgctaagaagggaaaatatccatcctgaaggtgtttttcattcactttaatagaagggcaaatatttataagctatttctgtaccaaagtgtttgtggaaacaaacatgtaagcataacttattttaaaatatttatttatataacttggtaatcatgaaagcatctgagctaacttatatttatttatgttatatttattaaattatttatcaagtgtatttgaaaaatatttttaagtgttctaaaaataaaagtattgaatt

SEQ ID NO: 2139 - DNA, 1283 bp, Homo sapiens
  source 1..1283: mol_type = genomic DNA
cgtgtcaccgagaagctgatgtagagagagacacagaaggagacagaaagcaagagaccagagtcccgggaaagtcctgccgcgcctcgggacaattataaaaatgtggccccctgggtcagcctcccagccaccgccctcacctgccgcggccacaggtctgcatccagcggctcgccctgtgtccctgcagtgccggctcagcatgtgtccagcgcgcagcctcctccttgtggctaccctggtcctcctggaccacctcagtttggccagaaacctccccgtggccactccagacccaggaatgttcccatgccttcaccactcccaaaacctgctgagggccgtcagcaacatgctccagaaggccagacaaactctagaattttacccttgcacttctgaagagattgatcatgaagatatcacaaaagataaaaccagcacagtggaggcctgtttaccattggaattaaccaagaatgggagttgcctggcctccagaaagacctcttttatgatggccctgtgccttagtagtatttatgaagacttgaagatgtaccaggtggagttcaagaccatgaatgcaaagcttctgatggatcctaagaggcagatctttctagatcaaaacatgctggcagttattgatgagctgatgcaggccctgaatttcaacagtgagactgtgccacaaaaatcctcccttgaagaaccggatttttataaaactaaaatcaagctctgcatacttcttcatgctttcagaattcgggcagtgactattgatagagtgatgagctatctgaatgcttcctaaaaagcgaggtccctccaaaccgttgtcatttttataaaactttgaaatgaggaaactttgataggatgtggattaagaactagggagggggaaagaaggatgggactattacatccacatgatacctctgatcaagtatttttgacatttactgtggataaattgtttttaagttttcatgaatgaattgctaagaagggaaaatatccatcctgaaggtgtttttcattcactttaatagaagggcaaatatttataagctatttctgtaccaaagtgtttgtggaaacaaacatgtaagcataacttattttaaaatatttatttatataacttggtaatcatgaaagcatctgagctaacttatatttatttatgttatatttattaaattatttatcaagtgtatttgaaaaatatttttaagtgttctaaaaataaaagtattgaattaaagtga

SEQ ID NO: 2140 - DNA, 863 bp, Homo sapiens
  source 1..863: mol_type = genomic DNA
cgtgtcaccgagaagctgatgtagagagagacacagaaggagacagaaagcaagagaccagagtcccgggaaagtcctgccgcgcctcgggacaattataaaaatgtggccccctgggtcagcctcccagccaccgccctcacctgccgcggccacaggtctgcatccagcggctcgccctgtgtccctgcagtgccggctcagcatgtgtccagcgcgcagcctcctccttgtggctaccctggtcctcctggaccacctcagtttggccagaaacctccccgtggccactccagacccaggaatgttcccatgccttcaccactcccaaaacctgctgagggccgtcagcaacatgctccagaagaatgagagttgcctaaattccagagagacctctttcataactaatgggagttgcctggcctccagaaagacctcttttatgatggccctgtgccttagtagtatttatgaagacttgaagatgtaccaggtggagttcaagaccatgaatgcaaagcttctgatggatcctaagaggcagatctttctagatcaaaacatgctggcagttattgatgagctgatgcaggccctgaatttcaacagtgagactgtgccacaaaaatcctcccttgaagaaccggatttttataaaactaaaatcaagctctgcatacttcttcatgctttcagaattcgggcagtgactattgatagagtgatgagctatctgaatgcttcctaaaaagcgaggtccctccaaaccgttgtcatttttataaaactttgaaatgaggaaactttgataggatgtggattaagaactagggagggggaaagaaggatgggactattac

SEQ ID NO: 2141 - DNA, 2472 bp, Homo sapiens
  source 1..2472: mol_type = genomic DNA
actccgggtggcaggcgcccgggggaatcccagctgactcgctcactgccttcgaagtccggcgccccccgggagggaactgggtggccgcaccctcccggctgcggtggctgtcgccccccaccctgcagccaggactcgatggaggtacagagctcggcttctttgccttgggaggggagtggtggtggttgaaagggcgatggaattttccccgaaagcctacgcccagggcccctcccagctccagcgttaccctccggtctatcctactggccgagctgccccgccttctcatggggaaaacttagccgcaacttcaatttttggtttttcctttaatgacacttctgaggctctcctagccatcctcccgcttccggaggagcgcagatcgcaggtccctttgcccctggcgtgcgactccctactgcgctgcgctcttacggcgttccaggctgctggctagcgcaaggcgggccgggcaccccgcgctccgctgggagggtgagggacgcgcgtctggcggccccagccaagctgcgggtttctgagaagacgctgtcccgcagccctgagggctgagttctgcacccagtcaagctcaggaaggccaagaaaagaatccattccaatatatggccatgtggctctttggagcaatgttccatcatgttccatgctgctgacgtcacatggagcacagaaatcaatgttagcagatagccagcccatacaagatcgtattgtattgtaggaggcattgtggatggatggctgctggaaaccccttgccatagccagctcttcttcaatacttaaggatttaccgtggctttgagtaatgagaatttcgaaaccacatttgagaagtatttccatccagtgctacttgtgtttacttctaaacagtcattttctaactgaagctggcattcatgtcttcattttgggctgtttcagtgcagggcttcctaaaacagaagccaactgggtgaatgtaataagtgatttgaaaaaaattgaagatcttattcaatctatgcatattgatgctactttatatacggaaagtgatgttcaccccagttgcaaagtaacagcaatgaagtgctttctcttggagttacaagttatttcacttgagtccggagatgcaagtattcatgatacagtagaaaatctgatcatcctagcaaacaacagtttgtcttctaatgggaatgtaacagaatctggatgcaaagaatgtgaggaactggaggaaaaaaatattaaagaatttttgcagagttttgtacatattgtccaaatgttcatcaacacttcttgattgcaattgattctttttaaagtgtttctgttattaacaaacatcactctgctgcttagacataacaaaacactcggcatttcaaatgtgctgtcaaaacaagtttttctgtcaagaagatgatcagaccttggatcagatgaactcttagaaatgaaggcagaaaaatgtcattgagtaatatagtgactatgaacttctctcagacttactttactcatttttttaatttattattgaaattgtacatatttgtggaataatgtaaaatgttgaataaaaatatgtacaagtgttgttttttaagttgcactgatattttacctcttattgcaaaatagcatttgtttaagggtgatagtcaaattatgtattggtggggctgggtaccaatgctgcaggtcaacagctatgctggtaggctcctgccagtgtggaaccactgactactggctctcattgacttccttactaagcatagcaaacagaggaagaatttgttatcagtaagaaaaagaagaactatatgtgaatcctcttctttatactgtaatttagttattgatgtataaagcaactgttatgaaataaagaaattgcaataactggcatataatgtccatcagtaaatcttggtggtggtggcaataataaacttctactgataggtagaatggtgtgcaagcttgtccaatcacggattgcaggccacatgcggcccaggacaactttgaatgtggcccaacacaaattcataaactttcatacatctcgtttttagctcatcagctatcattagcggtagtgtatttaaagtgtggcccaagacaattcttcttattccaatgtggcccagggaaatcaaaagattggatgcccctggtatagaaaactaatagtgacagtgttcatatttcatgctttcccaaatacaggtattttattttcacattctttttgccatgtttatataataataaagaaaaaccctgttgatttgttggagccattgttatctgacagaaaataattgtttatattttttgcactacactgtctaaaattagcaagctctcttctaatggaactgtaagaaagatgaaatatttttgttttattataaatttatttcaccttaa

SEQ ID NO: 2142 - DNA, 1447 bp, Homo sapiens
  source 1..1447: mol_type = genomic DNA
gggactccgggtggcaggcgcccgggggaatcccagctgactcgctcactgccttcgaagtccggcgccccccgggagggaactgggtggccgcaccctcccggctgcggtggctgtcgccccccaccctgcagccaggactcgatggagaatccattccaatatatggccatgtggctctttggagcaatgttccatcatgttccatgctgctgacgtcacatggagcacagaaatcaatgttagcagatagccagcccatacaagatcgtattgtattgtaggaggcattgtggatggatggctgctggaaaccccttgccatagccagctcttcttcaatacttaaggatttaccgtggctttgagtaatgagaatttcgaaaccacatttgagaagtatttccatccagtgctacttgtgtttacttctaaacagtcattttctaactgaagctggcattcatgtcttcattttgggctgtttcagtgcagggcttcctaaaacagaagccaactgggtgaatgtaataagtgatttgaaaaaaattgaagatcttattcaatctatgcatattgatgctactttatatacggaaagtgatgttcaccccagttgcaaagtaacagcaatgaagtgctttctcttggagttacaagttatttcacttgagtccggagatgcaagtattcatgatacagtagaaaatctgatcatcctagcaaacaacagtttgtcttctaatgggaatgtaacagaatctggatgcaaagaatgtgaggaactggaggaaaaaaatattaaagaatttttgcagagttttgtacatattgtccaaatgttcatcaacacttcttgattgcaattgattctttttaaagtgtttctgttattaacaaacatcactctgctgcttagacataacaaaacactcggcatttcaaatgtgctgtcaaaacaagtttttctgtcaagaagatgatcagaccttggatcagatgaactcttagaaatgaaggcagaaaaatgtcattgagtaatatagtgactatgaacttctctcagacttactttactcatttttttaatttattattgaaattgtacatatttgtggaataatgtaaaatgttgaataaaaatatgtacaagtgttgttttttaagttgcactgatattttacctcttattgcaaaatagcatttgtttaagggtgatagtcaaattatgtattggtggggctgggtaccaatgctgcaggtcaacagctatgctggtaggctcctgccagtgtggaaccactgactactggctctcattgacttccttactaagcatagcaaacagaggaagaatttgttatcagtaagaaaaagaagaactatatgtgaatcctcttctttatactgtaatttagttattgatgtataaagcaactgttatgaa

SEQ ID NO: 2143 - DNA, 1018 bp, Homo sapiens
  source 1..1018: mol_type = genomic DNA
atggtattgggaaccatagatttgtgcagctgtttcagtgcagggcttcctaaaacagaagccaactgggtgaatgtaataagtgatttgaaaaaaattgaagatcttattcaatctatgcatattgatgctactttatatacggaaagtgatgttcaccccagttgcaaagtaacagcaatgaagtgctttctcttggagttacaagttatttcacttgagtccggagatgcaagtattcatgatacagtagaaaatctgatcatcctagcaaacaacagtttgtcttctaatgggaatgtaacagaatctggatgcaaagaatgtgaggaactggaggaaaaaaatattaaagaatttttgcagagttttgtacatattgtccaaatgttcatcaacacttcttgattgcaattgattctttttaaagtgtttctgttattaacaaacatcactctgctgcttagacataacaaaacactcggcatttcaaatgtgctgtcaaaacaagtttttctgtcaagaagatgatcagaccttggatcagatgaactcttagaaatgaaggcagaaaaatgtcattgagtaatatagtgactatgaacttctctcagacttactttactcatttttttaatttattattgaaattgtacatatttgtggaataatgtaaaatgttgaataaaaatatgtacaagtgttgttttttaagttgcactgatattttacctcttattgcaaaatagcatttgtttaagggtgatagtcaaattatgtattggtggggctgggtaccaatgctgcaggtcaacagctatgctggtaggctcctgccagtgtggaaccactgactactggctctcattgacttccttactaagcatagcaaacagaggaagaatttgttatcagtaagaaaaagaagaactatatgtgaatcctcttctttatactgtaatttagttattgatgtataaagcaactgttatgaaataaagaaattgcaataactggc

SEQ ID NO: 2144 - DNA, 6026 bp, Homo sapiens
  source 1..6026: mol_type = genomic DNA
catttgatgtgtccatcattcccttttgctggatatacttcccttgactgacttctagaatatgatactcttcattttccccttattcagtagtcattccttttgatttttctttcctggtccttcttttataatccttgacctaattaatactgaagtatcccatgctcaggttttggtccttttctctacctacatcactccctcatgagcactctgatgagttgcatatctatttccagttcagacacattcctgaactcgagatttatgtatccaatggcatatttgatatttccttgtgcatatctaatgagcctttcaaactcagcatgtccagaactgaaactcctgacctgtcccctctcctcaaggcatcagctgtgtccaaggcttgcttttttcagttgatgtcagctccatcttctcaggtgttcagaggaaaagactcagagtcattctcattctctttttcctcctgtaccctgcaatctgtctggaaattatattagtcctatcataaaaaatgattccagactctaaccacatgtatctatctccactgctaccccaagcagattcaggtcctcctctcctccacctttctgacctcatctcagactactcttgcccttgctcattccactggcttcttttctgtcccttagactcatagccacacagttgcctctgccctagctattccctctgcttcaaatagtcttcactgagataccaccggggctcacaccctttctatctttaccctgactacccaaaatttcaacctcacccttcttaccttgtttcctttttcctagataatttttcactctctaataaaatacataattataataacttatttgtgcattttctatatggttcatctttctttctgaaatcaagattgtgttctgccatcattgatgtattccaaggtcataaaaaatgcctagcccataataaatattcagtgaatatttactaaatgaatcaaggaaagtgatgttgtcttatagtctctatattctattcagtctcggcttgtcttttctagtggtttgaatgaatggatgatgcatttaacccagaaaaccaatacttgtaaatcttttattcttgtatgtttaattaattttaaatgtgtgattagacaagttaataagcagaacaaaacatcaagtatgttagatcatctttcctcactgggaagaactataatattggtatagaatgtaagatgtttacagttattttcacaagcaatgatttgcttgggaaatagcaatggtgtgagccccgacagtatctgggtgaagaatatttgaagcagaaggaaaatctagagcagaggcaactgtgtgactacgagtctaagggacagttttcactccagaatgaaaactatagagatgcctgcctgcgttaacttgctcacctcactatgtattttccctgggcagtaccatcctgctaggatttcagtgctgccatgagtcagcagtcaccttgcagtgagatccaatcacaagattccaaacaattcctaccctgtgagctccttgaggacagggctgggatttagtctcttttatttcacaggcccagagttctaggatggcagaatggtttcgggtgccaggccccacctggttgctctccatgggcatactgcccagggctgccttgggacttggctccctacattttggtgcagcagtcttcagccaccccaactatggcttaagtggccccagctgcagcttgacccactgcttcacaagatacaggtggtaagccttggtgaaattcatgtagtgttaagcctgcagtctcacagaatacaagagctgagggggcatggcttcctccactttgatttcaaaagatgatgctgacttatttggggcacaggcagagactttgcacaggggtagaaccaccacagagagcccccaacagggcggtgcctcatggagccaaggaaatggggttgccaccaaaatcctagaattatggttaacagtgtagagctgcagtctggaaaagcttcaggcatgagactccaacccatgacagctgaagaataggctgagcctaggaaagctatgggagctgagctgcctgaggccttaggggtccaacccccacccagtgtgcccaggatgcagaatatggagtgaaaggaaattattctccaactttaagatttaatattgttctccctgttgggttttggacttgtttcagatgagttatccctcttttcttgcctatttccccattttagaatgggaatgtctcttctataccttcgcacattgtattttggaagcagatagcttattttgatttcacaggctcgtggttgcagaacatttgccttcaggatgaagtcacacccatatttgatttagataagtattacctagataactcgattaactagatttagataagtattaactaacagtattaagagttaatactggagtgacttttgagcctactaggatggaatgaatatattttgcattgtatgaaggatgtgaatttggcagagaggggagggtaggtgcagaatgctatggtttgaatgcctccaccaaaactcatgttgacatttaattgtgaatgtgacagttttaagaagtgggatctttaacaggtaattaggtatctctttaggcactttcattagacagggccctcatgaatggattaatgcagttatggagggagtgagtttgttattgcatgagtgggctccttattaaagggtgattttggctcagtttcctctctgtctcatgtgcttgctttcacttctacccttctgccacaggatgacccttagcagatgtcagtgccatgcacttgtacttcccagcctccagaactgtgagccaaatgagcttgtgtcccttgtaaattaagtttgtggtgttctcttatagcagcagaaaatggattcaggcagcaagcagagctataaaatacttctttttttttttttttgagatggagtttcacttttgttgcccaggctgtagtgcaaaggcatgatctcggctcaccacaacctctttctcccgggttcaagcaattgtctggcctcagcctcccgagtagctgggattacaggcatgcactatcacacccggctgattttgtatttttttgtaaagacggggtttcaccatgttggtcaggctgatctcaaactcccgacatcaggtgatcctcctgcctcggcctcccaaactgctgggattacaggcacgagccaccatgccctgccaatacttcttttcatctacactggcttccattatcatgattttgttagatacttttgaggacattttctattgcattcctccatgtttggcaaccacactctatggtggagtcttctggctaagcacttagtcttcttttacttataccagcaggatgtagttgagcagggtagtgaaaatccattgtgacattgtaaagcctcactgctataagaggccaggaatgaaattttcattgtttacaaaagtagcttcgtaaggcctaattaagaattatatcacccatggcattgctcaatcccaagtcaatattttttttttttgaaaaatgtggattcaaggataccacaactaaaagggatgtagggaatttaagaggctttggatgaaatgatgaagattacggtaaagttttataaaaaatttgaagcactgagataatatagacaaagggaataattataaaatgagagtgataaggaaggtttgctttaaataaaccaatcaatgagtgatttagatcatatgtaacaggaatattagatttgatatgttcttgtggacaaaaaggtatttctattggatacacctttgtatcttgcttaatacctaaataagtgttagctttttctttctatgagttatagacaatacattttaaagcagccattttttatatttcagaaacatctgaaaagtataataatttaattctttgtgtttatggaacttaattcagtgaatatttatgtcatgggttgtggcagattttggttttttgtggaagaggtcaccatgtatatactattttgaagggcagaaaatagttgtttctatttttgtatattttggttataaactgcttttaatggcatggagttgaatttagggatgtttaatcttcatattcttcacttgatttgagtgagaaaaaataaaattttcttggttataaaattctcaaatgattaacaatggtttctttaaaagactgaagatacatattcagtggctgtagaaatggctactgctattgtaaactggattaacaatcagtacttctacaaatctaagtatttgtttgtttttactttttactagtatgactctggaatttttcaattcagggaaataatagaatagaaaagctttgctaaggcattgtaatcagacagaactggcctcaaatcctggctgtcatgtacttgctatgggcctagagtagcttacctaaatgctactaaccttcctccataccattattgtaaagattaaaggtgatgcatctgttaagtaactaatagagtgcttattaaaaggtaggtgttcaataagtattaattccctccctttctttttcttactagtgcacttgtgtttttaatggatcatactttaccctagattgtattgtaggaggcattgtggatggatggctgctggaaaccccttgccatagccagctcttcttcaatacttaaggatttaccgtggctttgagtaatgagaatttcgaaaccacatttgagaagtatttccatccagtgctacttgtgtttacttctaaacagtcattttctaactgaagctggcattcatgtcttcattttgggatgcagctaatatacccagttggcccaaagcacctaacctatagttatataatctgactctcagttcagttttactctactaatgccttcatggtattgggaaccatagatttgtgcagctgtttcagtgcagggcttcctaaaacagaagccaactgggtgaatgtaataagtgatttgaaaaaaattgaagatcttattcaatctatgcatattgatgctactttatatacggaaagtgatgttcaccccagttgcaaagtaacagcaatgaagtgctttctcttggagttacaagttatttcacttgagtccggagatgcaagtattcatgatacagtagaaaatctgatcatcctagcaaacaacagtttgtcttctaatgggaatgtaacagaatctggatgcaaagaatgtgaggaactggaggaaaaaaatattaaagaatttttgcagagttttgtacatattgtccaaatgttcatcaacacttcttgattgcaattgattctttttaaagtgtttctgttattaacaaacatcactctgctgcttagacataacaaaacactcggcatttcaaatgtgctgtcaaaacaagtttttctgtcaagaagatgatcagaccttggatcagatgaactcttagaaatgaaggcagaaaaatgtcattgagtaatatagtgactatgaacttctctcagacttactttactcatttttttaatttattattgaaattgtacatatttgtggaataatgtaaaatgttgaataaaaatatgtacaagtgttgttttttaagttgcactgatattttacctcttattgcaaaatagcatttgtttaagggtgatagtcaaattatgtattggtggggctgggtaccaatgctgcaggtcaacagctatgctggtaggctcctgccagtgtggaaccactgactactggctctcattgacttccttactaagcatagcaaacagaggaagaatttgttatcagtaagaaaaagaagaactatatgtgaatcctcttctttatactgtaatttagttattgatgtataaagcaactgttatgaaataaagaaattgcaataactggc

SEQ ID NO: 2145 - DNA, 1388 bp, Homo sapiens
  source 1..1388: mol_type = genomic DNA
cctgcagccaggactcgatggagaatccattccaatatatggccatgtggctctttggagcaatgttccatcatgttccatgctgctgacgtcacatggagcacagaaatcaatgttagcagatagccagcccatacaagatcgttttcaactagtggccccactgtgtccggaattgatgggttcttggtctcactgacttcaagaatgaagccgcggaccctcgcggtgagtgttacagctcttaaggtggcgcatctggagtttgttccttctgatgttcggatgtgttcggagtttcttccttctggtgggttcgtggtctcgctggctcaggagtgaagctacagaccttcgcggaggcattgtggatggatggctgctggaaaccccttgccatagccagctcttcttcaatacttaaggatttaccgtggctttgagtaatgagaatttcgaaaccacatttgagaagtatttccatccagtgctacttgtgtttacttctaaacagtcattttctaactgaagctggcattcatgtcttcattttgggatgcagctaatatacccagttggcccaaagcacctaacctatagttatataatctgactctcagttcagttttactctactaatgccttcatggtattgggaaccatagatttgtgcagctgtttcagtgcagggcttcctaaaacagaagccaactgggtgaatgtaataagtgatttgaaaaaaattgaagatcttattcaatctatgcatattgatgctactttatatacggaaagtgatgttcaccccagttgcaaagtaacagcaatgaagtgctttctcttggagttacaagttatttcacttgagtccggagatgcaagtattcatgatacagtagaaaatctgatcatcctagcaaacaacagtttgtcttctaatgggaatgtaacagaatctggatgcaaagaatgtgaggaactggaggaaaaaaatattaaagaatttttgcagagttttgtacatattgtccaaatgttcatcaacacttcttgattgcaattgattctttttaaagtgtttctgttattaacaaacatcactctgctgcttagacataacaaaacactcggcatttcaaatgtgctgtcaaaacaagtttttctgtcaagaagatgatcagaccttggatcagatgaactcttagaaatgaaggcagaaaaatgtcattgagtaatatagtgactatgaacttctctcagacttactttactcatttttttaatttattattgaaattgtacatatttgtggaataatgtaaaatgttgaataaaaatatgtacaagtgttgttttttaagttgcactgatattttacctcttattgc

SEQ ID NO: 2146 - DNA, 1355 bp, Homo sapiens
  source 1..1355: mol_type = genomic DNA
cacttctgaggctctcctagccatcctcccgcttccggaggagcgcagatcgcaggtccctttgcccctggcgtgcgactccctactgcgctgcgctcttacggcgttccaggctgctggctagcgcaaggcgggccgggcaccccgcgctccgctgggagggtgagggacgcgcgtctggcggccccagccaagctgcgggtttctgagaagacgctgtcccgcagccctgagggctgagttctgcacccagtcaagctcaggaaggccaagaaaagtttcaactagtggccccactgtgtccggaattgatgggttcttggtctcactgacttcaagaatgaagccgcggaccctcgcggtgagtgttacagctcttaaggtggcgcatctggagtttgttccttctgatgttcggatgtgttcggagtttcttccttctggtgggttcgtggtctcgctggctcaggagtgaagctacagaccttcgcgattgtattgtaggaggcattgtggatggatggctgctggaaaccccttgccatagccagctcttcttcaatacttaaggatttaccgtggctttgagtaatgagaatttcgaaaccacatttgagaagtatttccatccagtgctacttgtgtttacttctaaacagtcattttctaactgaagctggcattcatgtcttcattttgggctgtttcagtgcagggcttcctaaaacagaagccaactgggtgaatgtaataagtgatttgaaaaaaattgaagatcttattcaatctatgcatattgatgctactttatatacggaaagtgatgttcaccccagttgcaaagtaacagcaatgaagtgctttctcttggagttacaagttatttcacttgagtccggagatgcaagtattcatgatacagtagaaaatctgatcatcctagcaaacaacagtttgtcttctaatgggaatgtaacagaatctggatgcaaagaatgtgaggaactggaggaaaaaaatattaaagaatttttgcagagttttgtacatattgtccaaatgttcatcaacacttcttgattgcaattgattctttttaaagtgtttctgttattaacaaacatcactctgctgcttagacataacaaaacactcggcatttcaaatgtgctgtcaaaacaagtttttctgtcaagaagatgatcagaccttggatcagatgaactcttagaaatgaaggcagaaaaatgtcattgagtaatatagtgactatgaacttctctcagacttactttactcatttttttaatttattattgaaattgtacatatttgtggaataatgtaaaatgttg

SEQ ID NO: 2147 - DNA, 1147 bp, Homo sapiens
  source 1..1147: mol_type = genomic DNA
attctctccccagcttgctgagccctttgctcccctggcgactgcctggacagtcagcaaggaattgtctcccagtgcattttgccctcctggctgccaactctggctgctaaagcggctgccacctgctgcagtctacacagcttcgggaagaggaaaggaacctcagaccttccagatcgcttcctctcgcaacaaactatttgtcgcaggaataaagatggctgctgaaccagtagaagacaattgcatcaactttgtggcaatgaaatttattgacaatacgctttactttatagctgaagatgatgaaaacctggaatcagattactttggcaagcttgaatctaaattatcagtcataagaaatttgaatgaccaagttctcttcattgaccaaggaaatcggcctctatttgaagatatgactgattctgactgtagagataatgcaccccggaccatatttattataagtatgtataaagatagccagcctagaggtatggctgtaactatctctgtgaagtgtgagaaaatttcaactctctcctgtgagaacaaaattatttcctttaaggaaatgaatcctcctgataacatcaaggatacaaaaagtgacatcatattctttcagagaagtgtcccaggacatgataataagatgcaatttgaatcttcatcatacgaaggatactttctagcttgtgaaaaagagagagacctttttaaactcattttgaaaaaagaggatgaattgggggatagatctataatgttcactgttcaaaacgaagactagctattaaaatttcatgccgggcgcagtggctcacgcctgtaatcccagccctttgggaggctgaggcgggcagatcaccagaggtcaggtgttcaagaccagcctgaccaacatggtgaaacctcatctctactaaaaatacaaaaaattagctgagtgtagtgacgcatgccctcaatcccagctactcaagaggctgaggcaggagaatcacttgcactccggaggtagaggttgtggtgagccgagattgcaccattgcgctctagcctgggcaacaacagcaaaactccatctcaaaaaataaaataaataaataaacaaataaaaaattcataatgtgaa

SEQ ID NO: 2148 - DNA, 1090 bp, Homo sapiens
  source 1..1090: mol_type = genomic DNA
gcctggacagtcagcaaggaattgtctcccagtgcattttgccctcctggctgccaactctggctgctaaagcggctgccacctgctgcagtctacacagcttcgggaagaggaaaggaacctcagaccttccagatcgcttcctctcgcaacaaactatttgtcgcaggaataaagatggctgctgaaccagtagaagacaattgcatcaactttgtggcaatgaaatttattgacaatacgctttactttatagaaaacctggaatcagattactttggcaagcttgaatctaaattatcagtcataagaaatttgaatgaccaagttctcttcattgaccaaggaaatcggcctctatttgaagatatgactgattctgactgtagagataatgcaccccggaccatatttattataagtatgtataaagatagccagcctagaggtatggctgtaactatctctgtgaagtgtgagaaaatttcaactctctcctgtgagaacaaaattatttcctttaaggaaatgaatcctcctgataacatcaaggatacaaaaagtgacatcatattctttcagagaagtgtcccaggacatgataataagatgcaatttgaatcttcatcatacgaaggatactttctagcttgtgaaaaagagagagacctttttaaactcattttgaaaaaagaggatgaattgggggatagatctataatgttcactgttcaaaacgaagactagctattaaaatttcatgccgggcgcagtggctcacgcctgtaatcccagccctttgggaggctgaggcgggcagatcaccagaggtcaggtgttcaagaccagcctgaccaacatggtgaaacctcatctctactaaaaatacaaaaaattagctgagtgtagtgacgcatgccctcaatcccagctactcaagaggctgaggcaggagaatcacttgcactccggaggtagaggttgtggtgagccgagattgcaccattgcgctctagcctgggcaacaacagcaaaactccatctcaaaaaataaaataaataaataaacaaataaaaaattcataatgtg

SEQ ID NO: 2149 - DNA, 795 bp, Homo sapiens
  source 1..795: mol_type = genomic DNA
gctcccctggcgactgcctggacagtcagcaaggaattgtctcccagtgcattttgccctcctggctgccaactctggctgctaaagcggctgccacctgctgcagtctacacagcttcgggaagaggaaaggaacctcagaccttccagatcgcttcctctcgcaacaaactatttgtcgcagatggctctttgctttcattaggaataaagatggctgctgaaccagtagaagacaattgcatcaactttgtggcaatgaaatttattgacaatacgctttactttatagctgaagatgatgaaaacctggaatcagattactttggcaagcttgaatctaaattatcagtcataagaaatttgaatgaccaagttctcttcattgaccaaggaaatcggcctctatttgaagatatgactgattctgactgtagagataatgcaccccggaccatatttattataagtatgtataaagatagccagcctagaggtatggctgtaactatctctgtgaagtgtgagaaaatttcaactctctcctgtgagaacaaaattatttcctttaaggaaatgaatcctcctgataacatcaaggatacaaaaagtgacatcatattctttcagagaagtgtcccaggacatgataataagatgcaatttgaatcttcatcatacgaaggatactttctagcttgtgaaaaagagagagacctttttaaactcattttgaaaaaagaggatgaattgggggatagatctataatgttcactgttcaaaacgaagactag

SEQ ID NO: 2150 - DNA, 1029 bp, Homo sapiens
  source 1..1029: mol_type = genomic DNA
ctatcacctaagtgtgggctaatgtaacaaagagggatttcacctacatccattcagtcagtctttgggggtttaaagaaattccaaagagtcatcagaagaggaaaaatgaaggtaatgttttttcagacaggtaaagtctttgaaaatatgtgtaatatgtaaaacattttgacacccccataatatttttccagaattaacagtataaattgcatctcttgttcaagagttccctatcactctctttaatcactactcacagtaacctcaactcctgccacaatgtacaggatgcaactcctgtcttgcattgcactaagtcttgcacttgtcacaaacagtgcacctacttcaagttctacaaagaaaacacagctacaactggagcatttactgctggatttacagatgattttgaatggaattaataattacaagaatcccaaactcaccaggatgctcacatttaagttttacatgcccaagaaggccacagaactgaaacatcttcagtgtctagaagaagaactcaaacctctggaggaagtgctaaatttagctcaaagcaaaaactttcacttaagacccagggacttaatcagcaatatcaacgtaatagttctggaactaaagggatctgaaacaacattcatgtgtgaatatgctgatgagacagcaaccattgtagaatttctgaacagatggattaccttttgtcaaagcatcatctcaacactgacttgataattaagtgcttcccacttaaaacatatcaggccttctatttatttaaatatttaaattttatatttattgttgaatgtatggtttgctacctattgtaactattattcttaatcttaaaactataaatatggatcttttatgattctttttgtaagccctaggggctctaaaatggtttcacttatttatcccaaaatatttattattatgttgaatgttaaatatagtatctatgtagattggttagtaaaactatttaataaatttgataaatataaa

SEQ ID NO: 2151 - DNA, 616 bp, Homo sapiens
  source 1..616: mol_type = genomic DNA
tgcatcgttagcttctcctgataaactaattgcctcacattgtcactgcaaatcgacacctattaatgggtctcacctcccaactgcttccccctctgttcttcctgctagcatgtgccggcaactttgtccacggacacaagtgcgatatcaccttacaggagatcatcaaaactttgaacagcctcacagagcagaagactctgtgcaccgagttgaccgtaacagacatctttgctgcctccaagaacacaactgagaaggaaaccttctgcagggctgcgactgtgctccggcagttctacagccaccatgagaaggacactcgctgcctgggtgcgactgcacagcagttccacaggcacaagcagctgatccgattcctgaaacggctcgacaggaacctctggggcctggcgggcttgaattcctgtcctgtgaaggaagccaaccagagtacgttggaaaacttcttggaaaggctaaagacgatcatgagagagaaatattcaaagtgttcgagctgaatattttaatttatgagtttttgatagctttattttttaagtatttatatatttataactcatcataaaataaagtatatatagaatct

SEQ ID NO: 2152 - DNA, 414 bp, Homo sapiens
  source 1..414: mol_type = genomic DNA
atgggtctcacctcccaactgcttccccctctgttcttcctgctagcatgtgccggcaactttgtccacggacacaagtgcgatatcaccttacaggagatcatcaaaactttgaacagcctcacagagcagaagaacacaactgagaaggaaaccttctgcagggctgcgactgtgctccggcagttctacagccaccatgagaaggacactcgctgcctgggtgcgactgcacagcagttccacaggcacaagcagctgatccgattcctgaaacggctcgacaggaacctctggggcctggcgggcttgaattcctgtcctgtgaaggaagccaaccagagtacgttggaaaacttcttggaaaggctaaagacgatcatgagagagaaatattcaaagtgttcgagctga

SEQ ID NO: 2153 - DNA, 1170 bp, Homo sapiens
  source 1..1170: mol_type = genomic DNA
aatattagagtctcaacccccaataaatataggactggagatgtctgaggctcattctgccctcgagcccaccgggaacgaaagagaagctctatctcccctccaggagcccagctatgaactccttctccacaagcgccttcggtccagttgccttctccctggggctgctcctggtgttgcctgctgccttccctgccccagtacccccaggagaagattccaaagatgtagccgccccacacagacagccactcacctcttcagaacgaattgacaaacaaattcggtacatcctcgacggcatctcagccctgagaaaggagacatgtaacaagagtaacatgtgtgaaagcagcaaagaggcactggcagaaaacaacctgaaccttccaaagatggctgaaaaagatggatgcttccaatctggattcaatgaggagacttgcctggtgaaaatcatcactggtcttttggagtttgaggtatacctagagtacctccagaacagatttgagagtagtgaggaacaagccagagctgtgcagatgagtacaaaagtcctgatccagttcctgcagaaaaaggcaaagaatctagatgcaataaccacccctgacccaaccacaaatgccagcctgctgacgaagctgcaggcacagaaccagtggctgcaggacatgacaactcatctcattctgcgcagctttaaggagttcctgcagtccagcctgagggctcttcggcaaatgtagcatgggcacctcagattgttgttgttaatgggcattccttcttctggtcagaaacctgtccactgggcacagaacttatgttgttctctatggagaactaaaagtatgagcgttaggacactattttaattatttttaatttattaatatttaaatatgtgaagctgagttaatttatgtaagtcatatttatatttttaagaagtaccacttgaaacattttatgtattagttttgaaataataatggaaagtggctatgcagtttgaatatcctttgtttcagagccagatcatttcttggaaagtgtaggcttacctcaaataaatggctaacttatacatatttttaaagaaatatttatattgtatttatataatgtataaatggtttttataccaataaatggcatttt

SEQ ID NO: 2154 - DNA, 539 bp, Homo sapiens
  source 1..539: mol_type = genomic DNA
aatattagagtctcaacccccaataaatataggactggagatgtctgaggctcattctgccctcgagcccaccgggaacgaaagagaagctctatctcccctccaggagcccagctatgaactccttctccacaaacatgtaacaagagtaacatgtgtgaaagcagcaaagaggcactggcagaaaacaacctgaaccttccaaagatggctgaaaaagatggatgcttccaatctggattcaatgaggagacttgcctggtgaaaatcatcactggtcttttggagtttgaggtatacctagagtacctccagaacagatttgagagtagtgaggaacaagccagagctgtgcagatgagtacaaaagtcctgatccagttcctgcagaaaaaggtgggtgtgtcctcattccctcaacttggtgtgggggaagacaggctcaaagacagtgtcctggacaactcagggatgcaatgccacttccaaaagagaaggctacacgtaaacaaaagagtctgagaaatagtttctgattg

SEQ ID NO: 2155 - DNA, 1527 bp, Homo sapiens
  source 1..1527: mol_type = genomic DNA
aggtaacaccatgtttggtaaataagtgttttggtgttgtgcaagggtctggtttcagcctgaagccatctcagagctgtctgggtctctggagactggagggacaacctagtctagagcccatttgcatgagaccaaggatcctcctgcaagagacaccatcctgagggaagagggcttctgaaccagcttgacccaataagaaattcttgggtgccgacgcggaagcagattcagagcctagagccgtgcctgcgtccgtagtttccttctagcttcttttgatttcaaatcaagacttacagggagagggagcgataaacacaaactctgcaagatgccacaaggtcctcctttgacatccccaacaaagaggactggagatgtctgaggctcattctgccctcgagcccaccgggaacgaaagagaagctctatctcccctccaggagcccagctatgaactccttctccacaagcgccttcggtccagttgccttctccctggggctgctcctggtgttgcctgctgccttccctgccccagtacccccaggagaagattccaaagatgtagccgccccacacagacagccactcacctcttcagaacgaattgacaaacaaattcggtacatcctcgacggcatctcagccctgagaaaggagacatgtaacaagagtaacatgtgtgaaagcagcaaagaggcactggcagaaaacaacctgaaccttccaaagatggctgaaaaagatggatgcttccaatctggattcaatgaggagacttgcctggtgaaaatcatcactggtcttttggagtttgaggtatacctagagtacctccagaacagatttgagagtagtgaggaacaagccagagctgtgcagatgagtacaaaagtcctgatccagttcctgcagaaaaaggcaaagaatctagatgcaataaccacccctgacccaaccacaaatgccagcctgctgacgaagctgcaggcacagaaccagtggctgcaggacatgacaactcatctcattctgcgcagctttaaggagttcctgcagtccagcctgagggctcttcggcaaatgtagcatgggcacctcagattgttgttgttaatgggcattccttcttctggtcagaaacctgtccactgggcacagaacttatgttgttctctatggagaactaaaagtatgagcgttaggacactattttaattatttttaatttattaatatttaaatatgtgaagctgagttaatttatgtaagtcatatttatatttttaagaagtaccacttgaaacattttatgtattagttttgaaataataatggaaagtggctatgcagtttgaatatcctttgtttcagagccagatcatttcttggaaagtgtaggcttacctcaaataaatggctaacttatacatatttttaaagaaatatttatattgtatttatataatgtataaatggtttttataccaataaatggcattttaaaaaattcagcaa

SEQ ID NO: 2156 - DNA, 649 bp, Homo sapiens
  source 1..649: mol_type = genomic DNA
atctcccctccaggagcccagctatgaactccttctccacaagcgccttcggtccagttgccttctccctggggctgctcctggtgttgcctgctgccttccctgccccagtacccccaggagaagattccaaagatgtagccgccccacacagacagccactcacctcttcagaacgaattgacaaacaaattcggtacatcctcgacggcatctcagccctgagaaaggagacatgtaacaagagtaacatgtgtgaaagcagcaaagaggcactggcagaaaacaacctgaaccttccaaagatggctgaaaaagatggatgcttccaatctggattcaatgaggagacttgcctggtgaaaatcatcactggtcttttggagtttgaggtatacctagagtacctccagaacagatttgagagtagtgaggaacaagccagagctgtgcagatgagtacaaaagtcctgatccagttcctgcagaaaaaggtgggtgtgtcctcattccctcaacttggtgtgggggaagacaggctcaaagacagtgtcctggacaactcagggatgcaatgccacttccaaaagagaaggctacacgtaaacaaaagagtctgagaaatagtttctgattgttattgttaaat

SEQ ID NO: 2157 - DNA, 1493 bp, Homo sapiens
  source 1..1493: mol_type = genomic DNA
attctgccctcgagcccaccgggaacgaaagagaagctctatctcccctccaggagcccagctatgaactccttctccacaagtaagtgcaggaaatccttagccctggaactgccagcggcggtcgagccctgtgtgagggaggggtgtgtggcccagggagggctggcgggcggccagcagcagaggcaggctcccagctgtgctgtcagctcacccctgcgctcgctcccctccggcacaggcgccttcggtccagttgccttctccctggggctgctcctggtgttgcctgctgccttccctgccccagtacccccaggagaagattccaaagatgtagccgccccacacagacagccactcacctcttcagaacgaattgacaaacaaattcggtacatcctcgacggcatctcagccctgagaaaggagacatgtaacaagagtaacatgtgtgaaagcagcaaagaggcactggcagaaaacaacctgaaccttccaaagatggctgaaaaagatggatgcttccaatctggattcaatgaggagacttgcctggtgaaaatcatcactggtcttttggagtttgaggtatacctagagtacctccagaacagatttgagagtagtgaggaacaagccagagctgtgcagatgagtacaaaagtcctgatccagttcctgcagaaaaaggtgggtgtgtcctcattccctcaacttggtgtgggggaagacaggctcaaagacagtgtcctggacaactcagggatgcaatgccacttccaaaagagaaggctacacgtaaacaaaagagtctgagaaatagtttctgattgttattgttaaatctttttttgtttgtttggttggttggctctcttctgcaaaggacatcaataactgtattttaaactatatattaactgaggtggattttaacatcaatttttaatagtgcaagagatttaaaaccaaaggcgggggggcgggcagaaaaaagtgcatccaactccagccagtgatccacagaaacaaagaccaaggagcacaaaatgattttaagattttagtcattgccaagtgacattcttctcactgtggttgtttcaattctttttcctaccttttaccagagagttagttcagagaaatggtcagagactcaagggtggaaagaggtaccaaaggctttggccaccagtagctggctattcagacagcagggagtagacttgctggctagcatgtggaggagccaaagctcaataagaaggggcctagaatgaaacccttggtgctgatcctgcctctgccatttctacttaagccagggtttctcatatgttaacatgcatgggaattccctgggcatcttcttgtggtgtggagtctgacttagcaagcctcgggtgggtttgagggtcaaatttctaccaggcttatatccctggtgatgctgcagaattccaggaccacacttggaggtttaa

SEQ ID NO: 2158 - DNA, 574 bp, Homo sapiens
  source 1..574: mol_type = genomic DNA
aatattagagtctcaacccccaataaatataggactggagatgtctgaggctcattctgccctcgagcccaccgggaacgaaagagaagctctatctcccctccaggagcccagctatgaactccttctccacaagcgccttcggtccagttgccttctccctggggctgctcctggtgttgcctgctgccttccctgccccagtacccccaggagaagattccaaagatgtagccgccccacacagacagccactcacctcttcagaacgaattgacaaacaaattcggtacatcctcgacggcatctcagccctgagaaaggagacatgtaacaagagtaacatgtgtgaaagcagcaaagaggcactggcagaaaacaacctgaaccttccaaagatggctgaaaaagatggatgcttccaatctggattcaatgaggagacttgcctggtgaaaatcatcactggtcttttggagtttgaggtatacctagagtacctccagaacagatttgagagtagtgaggaacaagccagagctgtgcagatgagtacaaaagtcctgatccagtt

SEQ ID NO: 2159 - DNA, 1705 bp, Homo sapiens
  source 1..1705: mol_type = genomic DNA
gagggtgcataagttctctagtagggtgatgatataaaaagccaccggagcactccataaggcacaaactttcagagacagcagagcacacaagcttctaggacaagagccaggaagaaaccaccggaaggaaccatctcactgtgtgtaaacatgacttccaagctggccgtggctctcttggcagccttcctgatttctgcagctctgtgtgaaggtgcagttttgccaaggagtgctaaagaacttagatgtcagtgcataaagacatactccaaacctttccaccccaaatttatcaaagaactgagagtgattgagagtggaccacactgcgccaacacagaaattattgtaaagctttctgatggaagagagctctgtctggaccccaaggaaaactgggtgcagagggttgtggagaagtttttgaagagggctgagaattcataaaaaaattcattctctgtggtatccaagaatcagtgaagatgccagtgaaacttcaagcaaatctacttcaacacttcatgtattgtgtgggtctgttgtagggttgccagatgcaatacaagattcctggttaaatttgaatttcagtaaacaatgaatagtttttcattgtaccatgaaatatccagaacatacttatatgtaaagtattatttatttgaatctacaaaaaacaacaaataatttttaaatataaggattttcctagatattgcacgggagaatatacaaatagcaaaattgaggccaagggccaagagaatatccgaactttaatttcaggaattgaatgggtttgctagaatgtgatatttgaagcatcacataaaaatgatgggacaataaattttgccataaagtcaaatttagctggaaatcctggatttttttctgttaaatctggcaaccctagtctgctagccaggatccacaagtccttgttccactgtgccttggtttctcctttatttctaagtggaaaaagtattagccaccatcttacctcacagtgatgttgtgaggacatgtggaagcactttaagttttttcatcataacataaattattttcaagtgtaacttattaacctatttattatttatgtatttatttaagcatcaaatatttgtgcaagaatttggaaaaatagaagatgaatcattgattgaatagttataaagatgttatagtaaatttattttattttagatattaaatgatgttttattagataaatttcaatcagggtttttagattaaacaaacaaacaattgggtacccagttaaattttcatttcagataaacaacaaataattttttagtataagtacattattgtttatctgaaattttaattgaactaacaatcctagtttgatactcccagtcttgtcattgccagctgtgttggtagtgctgtgttgaattacggaataatgagttagaactattaaaacagccaaaactccacagtcaatattagtaatttcttgctggttgaaacttgtttattatgtacaaatagattcttataatattatttaaatgactgcatttttaaatacaaggctttatatttttaactttaagatgtttttatgtgctctccaaattttttttactgtttctgattgtatggaaatataaaagtaaatatgaaacatttaaaatataatttgttgtcaaagtaa

SEQ ID NO: 2160 - DNA, 3666 bp, Homo sapiens
  source 1..3666: mol_type = genomic DNA
gcgcaagatggcggcgggcccgggcaccgccccttccgccccgccgggcgtcgcacgaggccggctcgaaggggaagtgagtcagtgtccgcggacccggccggcccaggcccgcgcccgccgcggccctgagaggccccggcaggtcccggcccggcggcggcagccatggccggggggccgggcccgggggagcccgcagcccccggcgcccagcacttcttgtacgaggtgccgccctgggtcatgtgccgcttctacaaagtgatggacgccctggagcccgccgactggtgccagttcgccgccctgatcgtgcgcgaccagaccgagctgcggctgtgcgagcgctccgggcagcgcacggccagcgtcctgtggccctggatcaaccgcaacgcccgtgtggccgacctcgtgcacatcctcacgcacctgcagctgctccgtgcgcgggacatcatcacagcctggcaccctcccgccccgcttccgtccccaggcaccactgccccgaggcccagcagcatccctgcacccgccgaggccgaggcctggagcccccggaagttgccatcctcagcctccaccttcctctccccagcttttccaggctcccagacccattcagggcctgagctcggcctggtcccaagccctgcttccctgtggcctccaccgccatctccagccccttcttctaccaagccaggcccagagagctcagtgtccctcctgcagggagcccgcccctttccgttttgctggcccctctgtgagatttcccggggcacccacaacttctcggaggagctcaagatcggggagggtggctttgggtgcgtgtaccgggcggtgatgaggaacacggtgtatgctgtgaagaggctgaaggagaacgctgacctggagtggactgcagtgaagcagagcttcctgaccgaggtggagcagctgtccaggtttcgtcacccaaacattgtggactttgctggctactgtgctcagaacggcttctactgcctggtgtacggcttcctgcccaacggctccctggaggaccgtctccactgccagacccaggcctgcccacctctctcctggcctcagcgactggacatccttctgggtacagcccgggcaattcagtttctacatcaggacagccccagcctcatccatggagacatcaagagttccaacgtccttctggatgagaggctgacacccaagctgggagactttggcctggcccggttcagccgctttgccgggtccagccccagccagagcagcatggtggcccggacacagacagtgcggggcaccctggcctacctgcccgaggagtacatcaagacgggaaggctggctgtggacacggacaccttcagctttggggtggtagtgctagagaccttggctggtcagagggctgtgaagacgcacggtgccaggaccaagtatctgaaagacctggtggaagaggaggctgaggaggctggagtggctttgagaagcacccagagcacactgcaagcaggtctggctgcagatgcctgggctgctcccatcgccatgcagatctacaagaagcacctggaccccaggcccgggccctgcccacctgagctgggcctgggcctgggccagctggcctgctgctgcctgcaccgccgggccaaaaggaggcctcctatgacccaggtgtacgagaggctagagaagctgcaggcagtggtggcgggggtgcccgggcattcggaggccgccagctgcatccccccttccccgcaggagaactcctacgtgtccagcactggcagagcccacagtggggctgctccatggcagcccctggcagcgccatcaggagccagtgcccaggcagcagagcagctgcagagaggccccaaccagcccgtggagagtgacgagagcctaggcggcctctctgctgccctgcgctcctggcacttgactccaagctgccctctggacccagcacccctcagggaggccggctgtcctcagggggacacggcaggagaatcgagctgggggagtggcccaggatcccggcccacagccgtggaaggactggcccttggcagctctgcatcatcgtcgtcagagccaccgcagattatcatcaaccctgcccgacagaagatggtccagaagctggccctgtacgaggatggggccctggacagcctgcagctgctgtcgtccagctccctcccaggcttgggcctggaacaggacaggcaggggcccgaagaaagtgatgaatttcagagctgatgtgttcacctgggcagatcccccaaatccggaagtcaaagttctcatggtcagaagttctcatggtgcacgagtcctcagcactctgccggcagtgggggtgggggcccatgcccgcgggggagagaaggaggtggccctgctgttctaggctctgtgggcataggcaggcagagtggaaccctgcctccatgccagcatctgggggcaaggaaggctggcatcatccagtgaggaggctggcgcatgttgggaggctgctggctgcacagacccgtgaggggaggagaggggctgctgtgcaggggtgtggagtagggagctggctcccctgagagccatgcagggcgtctgcagcccaggcctctggcagcagctctttgcccatctctttggacagtggccaccctgcacaatggggccgacgaggcctagggccctcctacctgcttacaatttggaaaagtgtggccgggtgcggtggctcacgcctgtaatcccagcactttgggaggccaaggcaggaggatcgctggagcccagtaggtcaagaccagccagggcaacatgatgagaccctgtctctgccaaaaaattttttaaactattagcctggcgtggtagcgcacgcctgtggtcccagctgctggggaggctgaagtaggaggatcatttatgcttgggaggtcgaggctgcagtgagtcatgattgtatgactgcactccagcctgggtgacagagcaagaccctgtttcaaaaagaaaaaccctgggaaaagtgaagtatggctgtaagtctcatggttcagtcctagcaagaagcgagaattctgagatcctccagaaagtcgagcagcacccacctccaacctcgggccagtgtcttcaggctttactggggacctgcgagctggcctaatgtggtggcctgcaagccaggccatccctgggcgccacagacgagctccgagccaggtcaggcttcggaggccacaagctcagcctcaggcccaggcactgattgtggcagaggggccactacccaaggtctagctaggcccaagacctagttacccagacagtgagaagcccctggaaggcagaaaagttgggagcatggcagacagggaagggaaacattttcagggaaaagacatgtatcacatgtcttcagaagcaagtcaggtttcatgtaaccgagtgtcctcttgcgtgtccaaaagtagcccagggctgtagcacaggcttcacagtgattttgtgttcagccgtgagtcacactacatgcccccgtgaagctgggcattggtgacgtccaggttgtccttgagtaataaaaacgtatgttgcaatctcggg

SEQ ID NO: 2161 - DNA, 3432 bp, Homo sapiens
  source 1..3432: mol_type = genomic DNA
atggccggggggccgggcccgggggagcccgcagcccccggcgcccagcacttcttgtacgaggtgccgccctgggtcatgtgccgcttctacaaagtgatggacgccctggagcccgccgactggtgccagttcggtgggtggcggcgggctgccggggggcgggaggcgcgcgggctcctggcgccgacgcctgacgccccccgccccgcagccgccctgatcgtgcgcgaccagaccgagctgcggctgtgcgagcgctccgggcagcgcacggccagcgtcctgtggccctggatcaaccgcaacgcccgtgtggccgacctcgtgcacatcctcacgcacctgcagctgctccgtgcgcgggacatcatcacagcctggcaccctcccgccccgcttccgtccccaggcaccactgccccgaggcccagcagcatccctgcacccgccgaggccgaggcctggagcccccggaagttgccatcctcagcctccaccttcctctccccagcttttccaggctcccagacccattcagggcctgagctcggcctggtcccaagccctgcttccctgtggcctccaccgccatctccagccccttcttctaccaagccaggcccagagagctcagtgtccctcctgcagggagcccgcccctttccgttttgctggcccctctgtgagatttcccggggcacccacaacttctcggaggagctcaagatcggggagggtggctttgggtgcgtgtaccgggcggtgatgaggaacacggtgtatgctgtgaagaggctgaaggagaacgctgacctggagtggactgcagtgaagcagagcttcctgaccgaggtggagcagctgtccaggtttcgtcacccaaacattgtggactttgctggctactgtgctcagaacggcttctactgcctggtgtacggcttcctgcccaacggctccctggaggaccgtctccactgccagacccaggcctgcccacctctctcctggcctcagcgactggacatccttctgggtacagcccgggcaattcagtttctacatcaggacagccccagcctcatccatggagacatcaagagttccaacgtccttctggatgagaggctgacacccaagctgggagactttggcctggcccggttcagccgctttgccgggtccagccccagccagagcagcatggtggcccggacacagacagtgcggggcaccctggcctacctgcccgaggagtacatcaagacgggaaggctggctgtggacacggacaccttcagctttggggtggtagtgctagagaccttggctggtcagagggctgtgaagacgcacggtgccaggaccaagtatctgaaagacctggtggaagaggaggctgaggaggctggagtggctttgagaagcacccagagcacactgcaagcaggtctggctgcagatgcctgggctgctcccatcgccatgcagatctacaagaagcacctgggccagctggcctgctgctgcctgcaccgccgggccaaaaggaggcctcctatgacccaggagaactcctacgtgtccagcactggcagagcccacagtggggctgctccatggcagcccctggcagcgccatcaggagccagtgcccaggcagcagagcagctgcagagaggccccaaccagcccgtggagagtgacgagagcctaggcggcctctctgctgccctgcgctcctggcacttgactccaagctgccctctggacccagcacccctcagggaggccggctgtcctcagggggacacggcaggagaatcgagctgggggagtggcccaggatcccggcccacagccgtggaaggactggcccttggcagctctgcatcatcgtcgtcagagccaccgcagattatcatcaaccctgcccgacagaagatggtccagaagctggccctgtacgaggatggggccctggacagcctgcagctgctgtcgtccagctccctcccaggcttgggcctggaacaggacaggcaggggcccgaagaaagtgatgaatttcagagctgatgtgttcacctgggcagatcccccaaatccggaagtcaaagttctcatggtcagaagttctcatggtgcacgagtcctcagcactctgccggcagtgggggtgggggcccatgcccgcgggggagagaaggaggtggccctgctgttctaggctctgtgggcataggcaggcagagtggaaccctgcctccatgccagcatctgggggcaaggaaggctggcatcatccagtgaggaggctggcgcatgttgggaggctgctggctgcacagacccgtgaggggaggagaggggctgctgtgcaggggtgtggagtagggagctggctcccctgagagccatgcagggcgtctgcagcccaggcctctggcagcagctctttgcccatctctttggacagtggccaccctgcacaatggggccgacgaggcctagggccctcctacctgcttacaatttggaaaagtgtggccgggtgcggtggctcacgcctgtaatcccagcactttgggaggccaaggcaggaggatcgctggagcccagtaggtcaagaccagccagggcaacatgatgagaccctgtctctgccaaaaaattttttaaactattagcctggcgtggtagcgcacgcctgtggtcccagctgctggggaggctgaagtaggaggatcatttatgcttgggaggtcgaggctgcagtgagtcatgattgtatgactgcactccagcctgggtgacagagcaagaccctgtttcaaaaagaaaaaccctgggaaaagtgaagtatggctgtaagtctcatggttcagtcctagcaagaagcgagaattctgagatcctccagaaagtcgagcagcacccacctccaacctcgggccagtgtcttcaggctttactggggacctgcgagctggcctaatgtggtggcctgcaagccaggccatccctgggcgccacagacgagctccgagccaggtcaggcttcggaggccacaagctcagcctcaggcccaggcactgattgtggcagaggggccactacccaaggtctagctaggcccaagacctagttacccagacagtgagaagcccctggaaggcagaaaagttgggagcatggcagacagggaagggaaacattttcagggaaaagacatgtatcacatgtcttcagaagcaagtcaggtttcatgtaaccgagtgtcctcttgcgtgtccaaaagtagcccagggctgtagcacaggcttcacagtgattttgtgttcagccgtgagtcacactacatgcccccgtgaagctgggcattggtgacgtccaggttgtccttgagtaataaaaacgtatgttgc

SEQ ID NO: 2162 - DNA, 2049 bp, Homo sapiens
  source 1..2049: mol_type = genomic DNA
atggccggggggccgggcccgggggagcccgcagcccccggcgcccagcacttcttgtacgaggtgccgccctgggtcatgtgccgcttctacaaagtgatggacgccctggagcccgccgactggtgccagttcgccgccctgatcgtgcgcgaccagaccgagctgcggctgtgcgagcgctccgggcagcgcacggccagcgtcctgtggccctggatcaaccgcaacgcccgtgtggccgacctcgtgcacatcctcacgcacctgcagctgctccgtgcgcgggacatcatcacagcctggcaccctcccgccccgcttccgtccccaggcaccactgccccgaggcccagcagcatccctgcacccgccgaggccgaggcctggagcccccggaagttgccatcctcagcctccaccttcctctccccagcttttccaggctcccagacccattcagggcctgagctcggcctggtcccaagccctgcttccctgtggcctccaccgccatctccagccccttcttctaccaagccaggcccagagagctcagtgtccctcctgcagggagcccgcccctttccgttttgctggcccctctgtgagatttcccggggcacccacaacttctcggaggagctcaagatcggggagggtggctttgggtgcgtgtaccgggcggtgatgaggaacacggtgtatgctgtgaagaggctgaaggagaacgctgacctggagtggactgcagtgaagcagagcttcctgaccgaggtggagcagctgtccaggtttcgtcacccaaacattgtggactttgctggctactgtgctcagaacggcttctactgcctggtgtacggcttcctgcccaacggctccctggaggaccgtctccactgccagacccaggcctgcccacctctctcctggcctcagcgactggacatccttctgggtacagcccgggcaattcagtttctacatcaggacagccccagcctcatccatggagacatcaagagttccaacgtccttctggatgagaggctgacacccaagctgggagactttggcctggcccggttcagccgctttgccgggtccagccccagccagagcagcatggtggcccggacacagacagtgcggggcaccctggcctacctgcccgaggagtacatcaagacgggaaggctggctgtggacacggacaccttcagctttggggtggtagtgctagagaccttggctggtcagagggctgtgaagacgcacggtgccaggaccaagtatctgaaagacctggtggaagaggaggctgaggaggctggagtggctttgagaagcacccagagcacactgcaagcaggtctggctgcagatgcctgggctgctcccatcgccatgcagatctacaagaagcacctggaccccaggcccgggccctgcccacctgagctgggcctgggcctgggccagctggcctgctgctgcctgcaccgccgggccaaaaggaggcctcctatgacccaggagaactcctacgtgtccagcactggcagagcccacagtggggctgctccatggcagcccctggcagcgccatcaggagccagtgcccaggcagcagagcagctgcagagaggccccaaccagcccgtggagagtgacgagagcctaggcggcctctctgctgccctgcgctcctggcacttgactccaagctgccctctggacccagcacccctcagggaggccggctgtcctcagggggacacggcaggagaatcgagctgggggagtggcccaggatcccggcccacagccgtggaaggactggcccttggcagctctgcatcatcgtcgtcagagccaccgcagattatcatcaaccctgcccgacagaagatggtccagaagctggccctgtacgaggatggggccctggacagcctgcagctgctgtcgtccagctccctcccaggcttgggcctggaacaggacaggcaggggcccgaagaaagtgatgaatttcagagctga

SEQ ID NO: 2163 - DNA, 2127 bp, Homo sapiens
  source 1..2127: mol_type = genomic DNA
atggccggggggccgggcccgggggagcccgcagcccccggcgcccagcacttcttgtacgaggtgccgccctgggtcatgtgccgcttctacaaagtgatggacgccctggagcccgccgactggtgccagttcggtgggtggcggcgggctgccggggggcgggaggcgcgcgggctcctggcgccgacgcctgacgccccccgccccgcagccgccctgatcgtgcgcgaccagaccgagctgcggctgtgcgagcgctccgggcagcgcacggccagcgtcctgtggccctggatcaaccgcaacgcccgtgtggccgacctcgtgcacatcctcacgcacctgcagctgctccgtgcgcgggacatcatcacagcctggcaccctcccgccccgcttccgtccccaggcaccactgccccgaggcccagcagcatccctgcacccgccgaggccgaggcctggagcccccggaagttgccatcctcagcctccaccttcctctccccagcttttccaggctcccagacccattcagggcctgagctcggcctggtcccaagccctgcttccctgtggcctccaccgccatctccagccccttcttctaccaagccaggcccagagagctcagtgtccctcctgcagggagcccgcccctttccgttttgctggcccctctgtgagatttcccggggcacccacaacttctcggaggagctcaagatcggggagggtggctttgggtgcgtgtaccgggcggtgatgaggaacacggtgtatgctgtgaagaggctgaaggagaacgctgacctggagtggactgcagtgaagcagagcttcctgaccgaggtggagcagctgtccaggtttcgtcacccaaacattgtggactttgctggctactgtgctcagaacggcttctactgcctggtgtacggcttcctgcccaacggctccctggaggaccgtctccactgccagacccaggcctgcccacctctctcctggcctcagcgactggacatccttctgggtacagcccgggcaattcagtttctacatcaggacagccccagcctcatccatggagacatcaagagttccaacgtccttctggatgagaggctgacacccaagctgggagactttggcctggcccggttcagccgctttgccgggtccagccccagccagagcagcatggtggcccggacacagacagtgcggggcaccctggcctacctgcccgaggagtacatcaagacgggaaggctggctgtggacacggacaccttcagctttggggtggtagtgctagagaccttggctggtcagagggctgtgaagacgcacggtgccaggaccaagtatctgaaagacctggtggaagaggaggctgaggaggctggagtggctttgagaagcacccagagcacactgcaagcaggtctggctgcagatgcctgggctgctcccatcgccatgcagatctacaagaagcacctggaccccaggcccgggccctgcccacctgagctgggcctgggcctgggccagctggcctgctgctgcctgcaccgccgggccaaaaggaggcctcctatgacccaggagaactcctacgtgtccagcactggcagagcccacagtggggctgctccatggcagcccctggcagcgccatcaggagccagtgcccaggcagcagagcagctgcagagaggccccaaccagcccgtggagagtgacgagagcctaggcggcctctctgctgccctgcgctcctggcacttgactccaagctgccctctggacccagcacccctcagggaggccggctgtcctcagggggacacggcaggagaatcgagctgggggagtggcccaggatcccggcccacagccgtggaaggactggcccttggcagctctgcatcatcgtcgtcagagccaccgcagattatcatcaaccctgcccgacagaagatggtccagaagctggccctgtacgaggatggggccctggacagcctgcagctgctgtcgtccagctccctcccaggcttgggcctggaacaggacaggcaggggcccgaagaaagtgatgaatttcagagctga

SEQ ID NO: 2164 - DNA, 3319 bp, Homo sapiens
  source 1..3319: mol_type = genomic DNA
cccaggcccgcgcccgccgcggccctgagaggccccggcaggtcccggcccggcggcggcagccatggccggggggccgggcccgggggagcccgcagcccccggcgcccagcacttcttgtacgaggtgccgccctgggtcatgtgccgcttctacaaagtgatggacgccctggagcccgccgactggtgccagttcgccgccctgatcgtgcgcgaccagaccgagctgcggctgtgcgagcgctccgggcagcgcacggccagcgtcctgtggccctggatcaaccgcaacgcccgtgtggccgacctcgtgcacatcctcacgcacctgcagctgctccgtgcgcgggacatcatcacagcctggcaccctcccgccccgcttccgtccccaggcaccactgccccgaggcccagcagcatccctgcacccgccgaggccgaggcctggagcccccggaagttgccatcctcagcctccaccttcctctccccagcttttccaggctcccagacccattcagggcctgagctcggcctggtcccaagccctgcttccctgtggcctccaccgccatctccagccccttcttctaccaagccaggcccagagagctcagtgtccctcctgcagggagcccgcccctttccgttttgctggcccctctgtgagatttcccggggcacccacaacttctcggaggagctcaagatcggggagggtggctttgggtgcgtgtaccgggcggtgatgaggaacacggtgtatgctgtgaagaggctgaaggagaacgctgacctggagtggactgcagtgaagcagagcttcctgaccgaggtggagcagctgtccaggtttcgtcacccaaacattgtggactttgctggctactgtgctcagaacggcttctactgcctggtgtacggcttcctgcccaacggctccctggaggaccgtctccactgccagacccaggcctgcccacctctctcctggcctcagcgactggacatccttctgggtacagcccgggcaattcagtttctacatcaggacagccccagcctcatccatggagacatcaagagttccaacgtccttctggatgagaggctgacacccaagctgggagactttggcctggcccggttcagccgctttgccgggtccagccccagccagagcagcatggtggcccggacacagacagtgcggggcaccctggcctacctgcccgaggagtacatcaagacgggaaggctggctgtggacacggacaccttcagctttggggtggtagtgctagagaccttggctggtcagagggctgtgaagacgcacggtgccaggaccaagtatctggtgtacgagaggctagagaagctgcaggcagtggtggcgggggtgcccgggcattcggaggccgccagctgcatccccccttccccgcaggagaactcctacgtgtccagcactggcagagcccacagtggggctgctccatggcagcccctggcagcgccatcaggagccagtgcccaggcagcagagcagctgcagagaggccccaaccagcccgtggagagtgacgagagcctaggcggcctctctgctgccctgcgctcctggcacttgactccaagctgccctctggacccagcacccctcagggaggccggctgtcctcagggggacacggcaggagaatcgagctgggggagtggcccaggatcccggcccacagccgtggaaggactggcccttggcagctctgcatcatcgtcgtcagagccaccgcagattatcatcaaccctgcccgacagaagatggtccagaagctggccctgtacgaggatggggccctggacagcctgcagctgctgtcgtccagctccctcccaggcttgggcctggaacaggacaggcaggggcccgaagaaagtgatgaatttcagagctgatgtgttcacctgggcagatcccccaaatccggaagtcaaagttctcatggtcagaagttctcatggtgcacgagtcctcagcactctgccggcagtgggggtgggggcccatgcccgcgggggagagaaggaggtggccctgctgttctaggctctgtgggcataggcaggcagagtggaaccctgcctccatgccagcatctgggggcaaggaaggctggcatcatccagtgaggaggctggcgcatgttgggaggctgctggctgcacagacccgtgaggggaggagaggggctgctgtgcaggggtgtggagtagggagctggctcccctgagagccatgcagggcgtctgcagcccaggcctctggcagcagctctttgcccatctctttggacagtggccaccctgcacaatggggccgacgaggcctagggccctcctacctgcttacaatttggaaaagtgtggccgggtgcggtggctcacgcctgtaatcccagcactttgggaggccaaggcaggaggatcgctggagcccagtaggtcaagaccagccagggcaacatgatgagaccctgtctctgccaaaaaattttttaaactattagcctggcgtggtagcgcacgcctgtggtcccagctgctggggaggctgaagtaggaggatcatttatgcttgggaggtcgaggctgcagtgagtcatgattgtatgactgcactccagcctgggtgacagagcaagaccctgtttcaaaaagaaaaaccctgggaaaagtgaagtatggctgtaagtctcatggttcagtcctagcaagaagcgagaattctgagatcctccagaaagtcgagcagcacccacctccaacctcgggccagtgtcttcaggctttactggggacctgcgagctggcctaatgtggtggcctgcaagccaggccatccctgggcgccacagacgagctccgagccaggtcaggcttcggaggccacaagctcagcctcaggcccaggcactgattgtggcagaggggccactacccaaggtctagctaggcccaagacctagttacccagacagtgagaagcccctggaaggcagaaaagttgggagcatggcagacagggaagggaaacattttcagggaaaagacatgtatcacatgtcttcagaagcaagtcaggtttcatgtaaccgagtgtcctcttgcgtgtccaaaagtagcccagggctgtagcacaggcttcacagtgattttgtgttcagccgtgagtcacactacatgcccccgtgaagctgggcattggtgacgtccaggttgtccttgagtaataaaaacgtatgttgcaat

SEQ ID NO: 2165 - DNA, 2382 bp, Homo sapiens
  source 1..2382: mol_type = genomic DNA
ggcggggcctgggaggggacaaagccgggaagaggaaaagctcggacctaccctgtggtcccgggtttctgcagagtctacttcagaagcggaggcactgggagtccggtttgggattgccaggctgtggttgtgagtctgagcttgtgagcggctgtggcgccccaactcttcgccagcatatcatcccggcaggcgataaactacattcagttgagtctgcaagactgggaggaactggggtgataagaaatctattcactgtcaaggtttattgaagtcaaaatgtccaaaaaaatcagtggcggttctgtggtagagatgcaaggagatgaaatgacacgaatcatttgggaattgattaaagagaaactcatttttccctacgtggaattggatctacatagctatgatttaggcatagagaatcgtgatgccaccaacgaccaagtcaccaaggatgctgcagaagctataaagaagcataatgttggcgtcaaatgtgccactatcactcctgatgagaagagggttgaggagttcaagttgaaacaaatgtggaaatcaccaaatggcaccatacgaaatattctgggtggcacggtcttcagagaagccattatctgcaaaaatatcccccggcttgtgagtggatgggtaaaacctatcatcataggtcgtcatgcttatggggatcaatacagagcaactgattttgttgttcctgggcctggaaaagtagagataacctacacaccaagtgacggaacccaaaaggtgacatacctggtacataactttgaagaaggtggtggtgttgccatggggatgtataatcaagataagtcaattgaagattttgcacacagttccttccaaatggctctgtctaagggttggcctttgtatctgagcaccaaaaacactattctgaagaaatatgatgggcgttttaaagacatctttcaggagatatatgacaagcagtacaagtcccagtttgaagctcaaaagatctggtatgagcataggctcatcgacgacatggtggcccaagctatgaaatcagagggaggcttcatctgggcctgtaaaaactatgatggtgacgtgcagtcggactctgtggcccaagggtatggctctctcggcatgatgaccagcgtgctggtttgtccagatggcaagacagtagaagcagaggctgcccacgggactgtaacccgtcactaccgcatgtaccagaaaggacaggagacgtccaccaatcccattgcttccatttttgcctggaccagagggttagcccacagagcaaagcttgataacaataaagagcttgccttctttgcaaatgctttggaagaagtctctattgagacaattgaggctggcttcatgaccaaggacttggctgcttgcattaaaggtttacccaatgtgcaacgttctgactacttgaatacatttgagttcatggataaacttggagaaaacttgaagatcaaactagctcaggccaaactttaagttcatacctgagctaagaaggataattgtcttttggtaactaggtctacaggtttacatttttctgtgttacactcaaggataaaggcaaaatcaattttgtaatttgtttagaagccagagtttatcttttctataagtttacagcctttttcttatatatacagttattgccacctttgtgaacatggcaagggacttttttacaatttttattttattttctagtaccagcctaggaattcggttagtactcatttgtattcactgtcactttttctcatgttctaattataaatgaccaaaatcaagattgctcaaaagggtaaatgatagccacagtattgctccctaaaatatgcataaagtagaaattcactgccttcccctcctgtccatgaccttgggcacagggaagttctggtgtcatagatatcccgttttgtgaggtagagctgtgcattaaacttgcacatgactggaacgaagtaggagtgcaactcaaatgtgttgaagatactgcagtcatttttgtaaagaccttgctgaatgtttccaatagactaaatactgtttaggccgcaggagagtttggaatccggaataaatactacctggaggtttgtcctctccatttttctctttctcctcctggcctggcctgaatattatactactctaaatagcatatttcatccaagtgcaataatgtaagctgaatcttttttggacttctgctggcctgttttatttcttttatataaatgtgatttctcagaaattgatattaaacactatcttatcttctcctgaactgttgattttaattaaaattaagtgctaattaccatt

SEQ ID NO: 2166 - DNA, 942 bp, Homo sapiens
  source 1..942: mol_type = genomic DNA
ccagcaccagcgaggggaggggaggggaggggcgggcgtggagacctggaaggaggtaccgatccagccttgattgcagccctcttgcacaacggccataaggacgggtgcaggccaagagcaaggacatgcaaaccccaagacctgctaacgggcggcgaagcgggggcacgccctcgcacacgcagagataaattgtgctcccatgacctttatttggaaagtgcctgcgggcctaaaattggcctttgtcccaccgagtacactcagcactgtactttaaaccggataaactgggctgtctggcaggtactaaaaacagctaaattctcctgtgagtgttctgtatgttaacacttttattccttgttttgttttaggcgataaactacattcagttgagtctgcaagactgggaggaactggggtgataagaaatctattcactgtcaaggtttattgaagtcaaaatgtccaaaaaaatcagtggcggttctgtggtagagatgcaaggagatgaaatgacacgaatcatttgggaattgattaaagagaaactcatttttccctacgtggaattggatctacatagctatgatttaggcatagagaatcgtgatgccaccaacgaccaagtcaccaaggatgctgcagaagctataaagaagcataatgttggcgtcaaatgtgccactatcactcctgatgagaagagggttgaggagttcaagttgaaacaaatgtggaaatcaccaaatggcaccatacgaaatattctgggtggcacggtcttcagagaagccattatctgcaaaaatatcccccggcttgtgagtggatgggtaaaacctatcatcataggtcgtcatgcttatggggatcaatacagagcaactgattttgttgttcctgggcctggaaaagtagagataacctacacac

SEQ ID NO: 2167 - DNA, 2441 bp, Homo sapiens
  source 1..2441: mol_type = genomic DNA
aggggaggggaggggcgggcgtggagacctggaaggaggtaccgatccagccttgattgcagccctcttgcacaacggccataaggacgggtgcaggccaagagcaaggacatgcaaaccccaagacctgctaacgggcggcgaagcgggggcacgccctcgcacacgcagagataaattgtgctcccatgacctttatttggaaagtgcctgcgggcctaaaattggcctttgtcccaccgagtacactcagcactgtactttaaaccggataaactgggctgtctggcaggcgataaactacattcagttgagtctgcaagactgggaggaactggggtgataagaaatctattcactgtcaaggtttattgaagtcaaaatgtccaaaaaaatcagtggcggttctgtggtagagatgcaaggagatgaaatgacacgaatcatttgggaattgattaaagagaaactcatttttccctacgtggaattggatctacatagctatgatttaggcatagagaatcgtgatgccaccaacgaccaagtcaccaaggatgctgcagaagctataaagaagcataatgttggcgtcaaatgtgccactatcactcctgatgagaagagggttgaggagttcaagttgaaacaaatgtggaaatcaccaaatggcaccatacgaaatattctgggtggcacggtcttcagagaagccattatctgcaaaaatatcccccggcttgtgagtggatgggtaaaacctatcatcataggtcgtcatgcttatggggatcaatacagagcaactgattttgttgttcctgggcctggaaaagtagagataacctacacaccaagtgacggaacccaaaaggtgacatacctggtacataactttgaagaaggtggtggtgttgccatggggatgtataatcaagataagtcaattgaagattttgcacacagttccttccaaatggctctgtctaagggttggcctttgtatctgagcaccaaaaacactattctgaagaaatatgatgggcgttttaaagacatctttcaggagatatatgacaagcagtacaagtcccagtttgaagctcaaaagatctggtatgagcataggctcatcgacgacatggtggcccaagctatgaaatcagagggaggcttcatctgggcctgtaaaaactatgatggtgacgtgcagtcggactctgtggcccaagggtatggctctctcggcatgatgaccagcgtgctggtttgtccagatggcaagacagtagaagcagaggctgcccacgggactgtaacccgtcactaccgcatgtaccagaaaggacaggagacgtccaccaatcccattgcttccatttttgcctggaccagagggttagcccacagagcaaagcttgataacaataaagagcttgccttctttgcaaatgctttggaagaagtctctattgagacaattgaggctggcttcatgaccaaggacttggctgcttgcattaaaggtttacccaatgtgcaacgttctgactacttgaatacatttgagttcatggataaacttggagaaaacttgaagatcaaactagctcaggccaaactttaagttcatacctgagctaagaaggataattgtcttttggtaactaggtctacaggtttacatttttctgtgttacactcaaggataaaggcaaaatcaattttgtaatttgtttagaagccagagtttatcttttctataagtttacagcctttttcttatatatacagttattgccacctttgtgaacatggcaagggacttttttacaatttttattttattttctagtaccagcctaggaattcggttagtactcatttgtattcactgtcactttttctcatgttctaattataaatgaccaaaatcaagattgctcaaaagggtaaatgatagccacagtattgctccctaaaatatgcataaagtagaaattcactgccttcccctcctgtccatgaccttgggcacagggaagttctggtgtcatagatatcccgttttgtgaggtagagctgtgcattaaacttgcacatgactggaacgaagtaggagtgcaactcaaatgtgttgaagatactgcagtcatttttgtaaagaccttgctgaatgtttccaatagactaaatactgtttaggccgcaggagagtttggaatccggaataaatactacctggaggtttgtcctctccatttttctctttctcctcctggcctggcctgaatattatactactctaaatagcatatttcatccaagtgcaataatgtaagctgaatcttttttggacttctgctggcctgttttatttcttttatataaatgtgatttctcagaaattgatattaaacactatcttatcttctcctgaa

SEQ ID NO: 2168 - DNA, 702 bp, Homo sapiens
  source 1..702: mol_type = genomic DNA
cttgagcccaggaagtcaaggctgcagtgagcggtgatcgctccactgcactccagccagggcaacagagcaaggccctgtcttaaaaaagaaaataataagaatcccattcattatcttctaatgcaaacaatcaatggagtttctaaagacctagacataggtggtgtcaggacctgcttctgtaacttttccatcctttgcattaggcagcgcggaaccccctaggcgaccccgcgctggccgggagcactctttcttcagccaaagagtctacttcagaagcggaggcactgggagtccggtttgggattgccaggctgtggttgtgagtctgagcttgtgagcggctgtggcgccccaactcttcgccagcatatcatcccggcaggcgataaactacattcagttgagtctgcaagactgggaggaactggggtgataagaaatctattcactgtcaaggtttattgaagtcaaaatgtccaaaaaaatcagtggcggttctgtggtagagatgcaaggagatgaaatgacacgaatcatttgggaattgattaaagagaaactcatttttccctacgtggaattggatctacatagctatgatttaggcatagagaatcgtgatgccaccaacgaccaagtcaccaaggatgctgcagaagctataaagaagcataatgttggcgtcaaatgtgc

SEQ ID NO: 2169 - DNA, 2298 bp, Homo sapiens
  source 1..2298: mol_type = genomic DNA
agggggcgtggaggggcggagctccagcggccttcagaggggtcgctaggccacacggggcgagagggggctgggggaaacacccccgccagttccgggtgcctggagtttaaaaggcgataaactacattcagttgagtctgcaagactgggaggaactggggtgataagaaatctattcactgtcaaggtttattgaagtcaaaatgtccaaaaaaatcagtggcggttctgtggtagagatgcaaggagatgaaatgacacgaatcatttgggaattgattaaagagaaactcatttttccctacgtggaattggatctacatagctatgatttaggcatagagaatcgtgatgccaccaacgaccaagtcaccaaggatgctgcagaagctataaagaagcataatgttggcgtcaaatgtgccactatcactcctgatgagaagagggttgaggagttcaagttgaaacaaatgtggaaatcaccaaatggcaccatacgaaatattctgggtggcacggtcttcagagaagccattatctgcaaaaatatcccccggcttgtgagtggatgggtaaaacctatcatcataggtcgtcatgcttatggggatcaatacagagcaactgattttgttgttcctgggcctggaaaagtagagataacctacacaccaagtgacggaacccaaaaggtgacatacctggtacataactttgaagaaggtggtggtgttgccatggggatgtataatcaagataagtcaattgaagattttgcacacagttccttccaaatggctctgtctaagggttggcctttgtatctgagcaccaaaaacactattctgaagaaatatgatgggcgttttaaagacatctttcaggagatatatgacaagcagtacaagtcccagtttgaagctcaaaagatctggtatgagcataggctcatcgacgacatggtggcccaagctatgaaatcagagggaggcttcatctgggcctgtaaaaactatgatggtgacgtgcagtcggactctgtggcccaagggtatggctctctcggcatgatgaccagcgtgctggtttgtccagatggcaagacagtagaagcagaggctgcccacgggactgtaacccgtcactaccgcatgtaccagaaaggacaggagacgtccaccaatcccattgcttccatttttgcctggaccagagggttagcccacagagcaaagcttgataacaataaagagcttgccttctttgcaaatgctttggaagaagtctctattgagacaattgaggctggcttcatgaccaaggacttggctgcttgcattaaaggtttacccaatgtgcaacgttctgactacttgaatacatttgagttcatggataaacttggagaaaacttgaagatcaaactagctcaggccaaactttaagttcatacctgagctaagaaggataattgtcttttggtaactaggtctacaggtttacatttttctgtgttacactcaaggataaaggcaaaatcaattttgtaatttgtttagaagccagagtttatcttttctataagtttacagcctttttcttatatatacagttattgccacctttgtgaacatggcaagggacttttttacaatttttattttattttctagtaccagcctaggaattcggttagtactcatttgtattcactgtcactttttctcatgttctaattataaatgaccaaaatcaagattgctcaaaagggtaaatgatagccacagtattgctccctaaaatatgcataaagtagaaattcactgccttcccctcctgtccatgaccttgggcacagggaagttctggtgtcatagatatcccgttttgtgaggtagagctgtgcattaaacttgcacatgactggaacgaagtaggagtgcaactcaaatgtgttgaagatactgcagtcatttttgtaaagaccttgctgaatgtttccaatagactaaatactgtttaggccgcaggagagtttggaatccggaataaatactacctggaggtttgtcctctccatttttctctttctcctcctggcctggcctgaatattatactactctaaatagcatatttcatccaagtgcaataatgtaagctgaatcttttttggacttctgctggcctgttttatttcttttatataaatgtgatttctcagaaattgatattaaacactatcttatcttctcctgaactgttgattttaattaaaattaagtgctaatta

SEQ ID NO: 2170 - DNA, 563 bp, Homo sapiens
  source 1..563: mol_type = genomic DNA
aagaagccagggggactgcgcgcgtgagcgtcacgcatgcggggtcaacggatgggtgcttggtgctctgggcactgcaggggtgctggctggactgcggttaccgcagcgcggaaccccctaggcgaccccgcgctggccgggagcactctttcttcagccaaagagtctacttcagaagcggaggcactgggagtccggtttgggattgccaggctgtggttgtgagtctgagcttgtgagcggctgtggcgccccaactcttcgccagcatatcatcccggcaggcgataaactacattcagttgagtctgcaagactgggaggaactggggtgataagaaatctattcactgtcaaggtttattgaagtcaaaatgtccaaaaaaatcagtggcggttctgtggtagagatgcaaggagatgaaatgacacgaatcatttgggaattgattaaagagaaactcatttttccctacgtggaattggatctacatagctatgatttaggcatagagaatcgtgatgccaccaacgaccaagtcaccaaggatgctgcagaa

SEQ ID NO: 2171 - DNA, 2694 bp, Homo sapiens
  source 1..2694: mol_type = genomic DNA
gtgcccgcgcggccagcgcccgccaggcccagcgttagcccgcggccaggcagccgggaggagcggcgcgcgctcggacctctcccgccctgctcgttcgctctccagcttgggatggccggctacctgcgggtcgtgcgctcgctctgcagagcctcaggctcgcggccggcctgggcgccggcggccctgacagcccccacctcgcaagagcagccgcggcgccactatgccgacaaaaggatcaaggtggcgaagcccgtggtggagatggatggtgatgagatgacccgtattatctggcagttcatcaaggagaagctcatcctgccccacgtggacatccagctaaagtattttgacctcgggctcccaaaccgtgaccagactgatgaccaggtcaccattgactctgcactggccacccagaagtacagtgtggctgtcaagtgtgccaccatcacccctgatgaggcccgtgtggaagagttcaagctgaagaagatgtggaaaagtcccaatggaactatccggaacatcctgggggggactgtcttccgggagcccatcatctgcaaaaacatcccacgcctagtccctggctggaccaagcccatcaccattggcaggcacgcccatggcgaccagtacaaggccacagactttgtggcagaccgggccggcactttcaaaatggtcttcaccccaaaagatggcagtggtgtcaaggagtgggaagtgtacaacttccccgcaggcggcgtgggcatgggcatgtacaacaccgacgagtccatctcaggttttgcgcacagctgcttccagtatgccatccagaagaaatggccgctgtacatgagcaccaagaacaccatactgaaagcctacgatgggcgtttcaaggacatcttccaggagatctttgacaagcactataagaccgacttcgacaagaataagatctggtatgagcaccggctcattgatgacatggtggctcaggtcctcaagtcttcgggtggctttgtgtgggcctgcaagaactatgacggagatgtgcagtcagacatcctggcccagggctttggctcccttggcctgatgacgtccgtcctggtctgccctgatgggaagacgattgaggctgaggccgctcatgggaccgtcacccgccactatcgggagcaccagaagggccggcccaccagcaccaaccccatcgccagcatctttgcctggacacgtggcctggagcaccgggggaagctggatgggaaccaagacctcatcaggtttgcccagatgctggagaaggtgtgcgtggagacggtggagagtggagccatgaccaaggacctggcgggctgcattcacggcctcagcaatgtgaagctgaacgagcacttcctgaacaccacggacttcctcgacaccatcaagagcaacctggacagagccctgggcaggcagtagggggaggcgccacccatggctgcagtggaggggccagggctgagccggcgggtcctcctgagcgcggcagagggtgagcctcacagcccctctctggaggcctttctaggggatgtttttttataagccagatgtttttaaaagcatatgtgtgtttcccctcatggtgacgtgaggcaggagcagtgcgttttacctcagccagtcagtatgttttgcatactgtaatttatattgcccttggaacacatggtgccatatttagctactaaaaagctcttcacaaaattgtctgctgtgtttgtccctgaggggaggaggtagtgggaccctgaggcagaggccctgctagagctggcaggttcccctggggcagaccagagcacctcaggaaggggctgccacggcagggaagggaccaggcagccctgggagcccgcattccacaggggcccactgcggagttctcggacactcagggcacaggcctgtgggttccctggaattttctagcatgatccagtttctgtgtccagttctccattctgagagtcaatcagttcctgataggttgtcattgatttttttcttcgttggttttaaccttctaaacatctccaggccactttcttagcctttttctaggtactaaaaagaggtcctacccacacctgcctcacacttctcctttccaaggctgcctgagtttggaggggcttgggtgtgtgtgaacaagggccctgcattgtctaggcctgcagttcccaggcttgggttcactttcaccatgcattggcaaaactagaaaagtaagcttgtgacaaattgttctcggccgggcacagtggcgcacgcctataatccctgtactttgggaggctgaggtgggtggatcacttgaggccaggagttcgagaccagcctggccaacatggtgaaaccccatctctactcaaaatacaaaaattagccaggcgtggtgatgcgcacctgcagtcccagctactcgggaggctgaggcaggaaaatggcttgaacctgggaggcagaggttgcagtgagccgagactgcaccactgcactccagcctgggtgacagagcaagactctgtctcaaaaaaaaaaaaaaaaaaaaaaaaaaaaaaattgctctatgcaagttttttagccccatgtaaaaaggaaaaataaaagttgctctaaagctacatataatcaaaa

SEQ ID NO: 2172 - DNA, 1449 bp, Homo sapiens
  source 1..1449: mol_type = genomic DNA
agcccgcggccaggcagccgggaggagcggcgcgcgctcggacctctcccgccctgctcgttcgctctccagcttgggatggccggctacctgcgggtcgtgcgctcgctctgcagagcctcaggctcgcggccggcctgggcgccggcggccctgacagcccccacctcgcaagagcagccgcggcgccactagttcaagctgaagaagatgtggaaaagtcccaatggaactatccggaacatcctgggggggactgtcttccgggagcccatcatctgcaaaaacatcccacgcctagtccctggctggaccaagcccatcaccattggcaggcacgcccatggcgaccagtacaaggccacagactttgtggcagaccgggccggcactttcaaaatggtcttcaccccaaaagatggcagtggtgtcaaggagtgggaagtgtacaacttccccgcaggcggcgtgggcatgggcatgtacaacaccgacgagtccatctcaggttttgcgcacagctgcttccagtatgccatccagaagaaatggccgctgtacatgagcaccaagaacaccatactgaaagcctacgatgggcgtttcaaggacatcttccaggagatctttgacaagcactataagaccgacttcgacaagaataagatctggtatgagcaccggctcattgatgacatggtggctcaggtcctcaagtcttcgggtggctttgtgtgggcctgcaagaactatgacggagatgtgcagtcagacatcctggcccagggctttggctcccttggcctgatgacgtccgtcctggtctgccctgatgggaagacgattgaggctgaggccgctcatgggaccgtcacccgccactatcgggagcaccagaagggccggcccaccagcaccaaccccatcgccagcatctttgcctggacacgtggcctggagcaccgggggaagctggatgggaaccaagacctcatcaggtttgcccagatgctggagaaggtgtgcgtggagacggtggagagtggagccatgaccaaggacctggcgggctgcattcacggcctcagcaatgtgaagctgaacgagcacttcctgaacaccacggacttcctcgacaccatcaagagcaacctggacagagccctgggcaggcagtagggggaggcgccacccatggctgcagtggaggggccagggctgagccggcgggtcctcctgagcgcggcagagggtgagcctcacagcccctctctggaggcctttctaggggatgtttttttataagccagatgtttttaaaagcatatgtgtgtttcccctcatggtgacgtgaggcaggagcagtgcgttttacctcagccagtcagtatgttttgcatactgtaatttatattgcccttggaacacatggtgccatatttagctact

SEQ ID NO: 2173 - DNA, 1453 bp, Homo sapiens
  source 1..1453: mol_type = genomic DNA
aaggaaagaatattttggggctaaaagagccccgtgtctttgctgcctggtaattcctgcacgcatcttttcctattttgcaacgccataggcttccagcgactgctggtgatgtttctgatgccgacaaaaggatcaaggtggcgaagcccgtggtggagatggatggtgatgagatgacccgtattatctggcagttcatcaaggagaagctcatcctgccccacgtggacatccagctaaagtattttgacctcgggctcccaaaccgtgaccagactgatgaccaggtcaccattgactctgcactggccacccagaagtacagtgtggctgtcaagtgtgccaccatcacccctgatgaggcccgtgtggaagagttcaagctgaagaagatgtggaaaagtcccaatggaactatccggaacatcctgggggggactgtcttccgggagcccatcatctgcaaaaacatcccacgcctagtccctggctggaccaagcccatcaccattggcaggcacgcccatggcgaccagtacaaggccacagactttgtggcagaccgggccggcactttcaaaatggtcttcaccccaaaagatggcagtggtgtcaaggagtgggaagtgtacaacttccccgcaggcggcgtgggcatgggcatgtacaacaccgacgagtccatctcaggttttgcgcacagctgcttccagtatgccatccagaagaaatggccgctgtacatgagcaccaagaacaccatactgaaagcctacgatgggcgtttcaaggacatcttccaggagatctttgacaagcactataagaccgacttcgacaagaataagatctggtatgagcaccggctcattgatgacatggtggctcaggtcctcaagtcttcgggtggctttgtgtgggcctgcaagaactatgacggagatgtgcagtcagacatcctggcccagggctttggctcccttggcctgatgacgtccgtcctggtctgccctgatgggaagacgattgaggctgaggccgctcatgggaccgtcacccgccactatcgggagcaccagaagggccggcccaccagcaccaaccccatcgccagcatctttgcctggacacgtggcctggagcaccgggggaagctggatgggaaccaagacctcatcaggtttgcccagatgctggagaaggtgtgcgtggagacggtggagagtggagccatgaccaaggacctggcgggctgcattcacggcctcagcaatgtgaagctgaacgagcacttcctgaacaccacggacttcctcgacaccatcaagagcaacctggacagagccctgggcaggcagtagggggaggcgccacccatggctgcagtggaggggccagggctgagccggcgggtcctcctgagcgcggcagagggtgagcctcacagccc

SEQ ID NO: 2174 - DNA, 5901 bp, Homo sapiens
  source 1..5901: mol_type = genomic DNA
cacgcgtcattgtgttacctgcggccggcccgcgagctaggctggtttttttttttctcccctccctcccccctttttccatgcagctgatctaaaagggaataaaaggctgcgcataatcataataataaaagaaggggagcgcgagagaaggaaagaaagccgggaggtggaagaggagggggagcgtctcaaagaagcgatcagaataataaaaggaggccgggctctttgccttctggaacgggccgctcttgaaagggcttttgaaaagtggtgttgttttccagtcgtgcatgctccaatcggcggagtatattagagccgggacgcggcggccgcaggggcagcggcgacggcagcaccggcggcagcaccagcgcgaacagcagcggcggcgtcccgagtgcccgcggcgcgcggcgcagcgatgcgttccccacggacgcgcggccggtccgggcgccccctaagcctcctgctcgccctgctctgtgccctgcgagccaaggtgtgtggggcctcgggtcagttcgagttggagatcctgtccatgcagaacgtgaacggggagctgcagaacgggaactgctgcggcggcgcccggaacccgggagaccgcaagtgcacccgcgacgagtgtgacacatacttcaaagtgtgcctcaaggagtatcagtcccgcgtcacggccggggggccctgcagcttcggctcagggtccacgcctgtcatcgggggcaacaccttcaacctcaaggccagccgcggcaacgaccgcaaccgcatcgtgctgcctttcagtttcgcctggccgaggtcctatacgttgcttgtggaggcgtgggattccagtaatgacaccgttcaacctgacagtattattgaaaaggcttctcactcgggcatgatcaaccccagccggcagtggcagacgctgaagcagaacacgggcgttgcccactttgagtatcagatccgcgtgacctgtgatgactactactatggctttggctgcaataagttctgccgccccagagatgacttctttggacactatgcctgtgaccagaatggcaacaaaacttgcatggaaggctggatgggccccgaatgtaacagagctatttgccgacaaggctgcagtcctaagcatgggtcttgcaaactcccaggtgactgcaggtgccagtacggctggcaaggcctgtactgtgataagtgcatcccacacccgggatgcgtccacggcatctgtaatgagccctggcagtgcctctgtgagaccaactggggcggccagctctgtgacaaagatctcaattactgtgggactcatcagccgtgtctcaacgggggaacttgtagcaacacaggccctgacaaatatcagtgttcctgccctgaggggtattcaggacccaactgtgaaattgctgagcacgcctgcctctctgatccctgtcacaacagaggcagctgtaaggagacctccctgggctttgagtgtgagtgttccccaggctggaccggccccacatgctctacaaacattgatgactgttctcctaataactgttcccacgggggcacctgccaggacctggttaacggatttaagtgtgtgtgccccccacagtggactgggaaaacgtgccagttagatgcaaatgaatgtgaggccaaaccttgtgtaaacgccaaatcctgtaagaatctcattgccagctactactgcgactgtcttcccggctggatgggtcagaattgtgacataaatattaatgactgccttggccagtgtcagaatgacgcctcctgtcgggatttggttaatggttatcgctgtatctgtccacctggctatgcaggcgatcactgtgagagagacatcgatgaatgtgccagcaacccctgtttgaatgggggtcactgtcagaatgaaatcaacagattccagtgtctgtgtcccactggtttctctggaaacctctgtcagctggacatcgattattgtgagcctaatccctgccagaacggtgcccagtgctacaaccgtgccagtgactatttctgcaagtgccccgaggactatgagggcaagaactgctcacacctgaaagaccactgccgcacgaccccctgtgaagtgattgacagctgcacagtggccatggcttccaacgacacacctgaaggggtgcggtatatttcctccaacgtctgtggtcctcacgggaagtgcaagagtcagtcgggaggcaaattcacctgtgactgtaacaaaggcttcacgggaacatactgccatgaaaatattaatgactgtgagagcaacccttgtagaaacggtggcacttgcatcgatggtgtcaactcctacaagtgcatctgtagtgacggctgggagggggcctactgtgaaaccaatattaatgactgcagccagaacccctgccacaatgggggcacgtgtcgcgacctggtcaatgacttctactgtgactgtaaaaatgggtggaaaggaaagacctgccactcacgtgacagtcagtgtgatgaggccacgtgcaacaacggtggcacctgctatgatgagggggatgcttttaagtgcatgtgtcctggcggctgggaaggaacaacctgtaacatagcccgaaacagtagctgcctgcccaacccctgccataatgggggcacatgtgtggtcaacggcgagtcctttacgtgcgtctgcaaggaaggctgggaggggcccatctgtgctcagaataccaatgactgcagccctcatccctgttacaacagcggcacctgtgtggatggagacaactggtaccggtgcgaatgtgccccgggttttgctgggcccgactgcagaataaacatcaatgaatgccagtcttcaccttgtgcctttggagcgacctgtgtggatgagatcaatggctaccggtgtgtctgccctccagggcacagtggtgccaagtgccaggaagtttcagggagaccttgcatcaccatggggagtgtgataccagatggggccaaatgggatgatgactgtaatacctgccagtgcctgaatggacggatcgcctgctcaaaggtctggtgtggccctcgaccttgcctgctccacaaagggcacagcgagtgccccagcgggcagagctgcatccccatcctggacgaccagtgcttcgtccacccctgcactggtgtgggcgagtgtcggtcttccagtctccagccggtgaagacaaagtgcacctctgactcctattaccaggataactgtgcgaacatcacatttacctttaacaaggagatgatgtcaccaggtcttactacggagcacatttgcagtgaattgaggaatttgaatattttgaagaatgtttccgctgaatattcaatctacatcgcttgcgagccttccccttcagcgaacaatgaaatacatgtggccatttctgctgaagatatacgggatgatgggaacccgatcaaggaaatcactgacaaaataatcgatcttgttagtaaacgtgatggaaacagctcgctgattgctgccgttgcagaagtaagagttcagaggcggcctctgaagaacagaacagatttccttgttcccttgctgagctctgtcttaactgtggcttggatctgttgcttggtgacggccttctactggtgcctgcggaagcggcggaagccgggcagccacacacactcagcctctgaggacaacaccaccaacaacgtgcgggagcagctgaaccagatcaaaaaccccattgagaaacatggggccaacacggtccccatcaaggattatgagaacaagaactccaaaatgtctaaaataaggacacacaattctgaagtagaagaggacgacatggacaaacaccagcagaaagcccggtttgccaagcagccggcgtacacgctggtagacagagaagagaagccccccaacggcacgccgacaaaacacccaaactggacaaacaaacaggacaacagagacttggaaagtgcccagagcttaaaccgaatggagtacatcgtatagcagaccgcgggcactgccgccgctaggtagagtctgagggcttgtagttctttaaactgtcgtgtcatactcgagtctgaggccgttgctgacttagaatccctgtgttaatttaagttttgacaagctggcttacactggcaatggtagtttctgtggttggctgggaaatcgagtgccgcatctcacagctatgcaaaaagctagtcaacagtaccctggttgtgtgtccccttgcagccgacacggtctcggatcaggctcccaggagcctgcccagccccctggtctttgagctcccacttctgccagatgtcctaatggtgatgcagtcttagatcatagttttatttatatttattgactcttgagttgtttttgtatattggttttatgatgacgtacaagtagttctgtatttgaaagtgcctttgcagctcagaaccacagcaacgatcacaaatgactttattatttattttttttaattgtatttttgttgttgggggaggggagactttgatgtcagcagttgctggtaaaatgaagaatttaaagaaaaaaatgtcaaaagtagaactttgtatagttatgtaaataattcttttttattaatcactgtgtatatttgatttattaacttaataatcaagagccttaaaacatcattcctttttatttatatgtatgtgtttagaattgaaggtttttgatagcattgtaagcgtatggctttatttttttgaactcttctcattacttgttgcctataagccaaaattaaggtgtttgaaaatagtttattttaaaacaataggatgggcttctgtgcccagaatactgatggaatttttttgtacgacgtcagatgtttaaaacaccttctatagcatcacttaaaacacgttttaaggactgactgaggcagtttgaggattagtttagaacaggtttttttgtttgtttgttttttgtttttctgctttagacttgaaaagagacaggcaggtgatctgctgcagagcagtaagggaacaagttgagctatgacttaacatagccaaaatgtgagtggttgaatatgattaaaaatatcaaattaattgtgtgaacttggaagcacaccaatcttactttgtaaattctgatttcttttcaccattcgtacataatactgaaccacttgtagatttgatttttttttttaatctactgcatttagggagtattctaataagctagttgaatacttgaaccataaaatgtccagtaagatcactgtttagatttgccatagagtacactgcctgccttaagtgaggaaatcaaagtgctattacgaagttcaagatcaaaaaggcttataaaacagagtaatcttgttggttcaccattgagaccgtgaagatactttgtattgtcctattagtgttatatgaacatacaaatgcatctttgatgtgttgttcttggcaataaattttgaaaagtaatatttattaaatttttttgtatgaaaacatggaacagtgtggcctcttctgagcttacgtagttctaccggctttgccatgtgcttctgccaccctgctgagtctgttctggtaatcggggtataataggctctgcctgacagagggatggaggaagaactgaaaggcttttcaaccacaaaactcatctggagttctcaaagacctggggctgctgtgaagctggaactgcgggagccccatctaggggagccttgattcccttgttattcaacagcaagtgtgaatactgcttgaataaacaccactggattaatggcc

SEQ ID NO: 2175 - DNA, 3758 bp, Homo sapiens
  source 1..3758: mol_type = genomic DNA
attgaaacaatccacccggtagagtgaacagcttgaggttgatcctggcctgtgataagagccaggtcagtatacttgttagggacatgtgagagacctccccgccacactgcagcattcacagcacctttcctggacctcctgtcacctcgcaggtcagggagttatgtcccctgggaacccagggcttgtccagagctacccacagttgtctgcatttccaggtagcccgattttggggttctaggatgtttcatctcctgggggggtaatcaaatccctggaagaggacaagaaagactgagaacctgacagtattattgaaaaggcttctcactcgggcatgatcaaccccagccggcagtggcagacgctgaagcagaacacgggcgttgcccactttgagtatcagatccgcgtgacctgtgatgactactactatggctttggctgcaataagttctgccgccccagagatgacttctttggacactatgcctgtgaccagaatggcaacaaaacttgcatggaaggctggatgggccccgaatgtaacagagctatttgccgacaaggctgcagtcctaagcatgggtcttgcaaactcccaggtgactgcaggtgccagtacggctggcaaggcctgtactgtgataagtgcatcccacacccgggatgcgtccacggcatctgtaatgagccctggcagtgcctctgtgagaccaactggggcggccagctctgtgacaaagatctcaattactgtgggactcatcagccgtgtctcaacgggggaacttgtagcaacacaggccctgacaaatatcagtgttcctgccctgaggggtattcaggacccaactgtgaaattgctgagcacgcctgcctctctgatccctgtcacaacagaggcagctgtaaggagacctccctgggctttgagtgtgagtgttccccaggctggaccggccccacatgctctacaaacattgatgactgttctcctaataactgttcccacgggggcacctgccaggacctggttaacggatttaagtgtgtgtgccccccacagtggactgggaaaacgtgccagttagatgcaaatgaatgtgaggccaaaccttgtgtaaacgccaaatcctgtaagaatctcattgccagctactactgcgactgtcttcccggctggatgggtcagaattgtgacataaatattaatgactgccttggccagtgtcagaatgacgcctcctgtcgggatttggttaatggttatcgctgtatctgtccacctggctatgcaggcgatcactgtgagagagacatcgatgaatgtgccagcaacccctgtttgaatgggggtcactgtcagaatgaaatcaacagattccagtgtctgtgtcccactggtttctctggaaacctctgtcagctggacatcgattattgtgagcctaatccctgccagaacggtgcccagtgctacaaccgtgccagtgactatttctgcaagtgccccgaggactatgagggcaagaactgctcacacctgaaagaccactgccgcacgaccccctgtgaagtgattgacagctgcacagtggccatggcttccaacgacacacctgaaggggtgcggtatatttcctccaacgtctgtggtcctcacgggaagtgcaagagtcagtcgggaggcaaattcacctgtgactgtaacaaaggcttcacgggaacatactgccatgaaaatattaatgactgtgagagcaacccttgtagaaacggtggcacttgcatcgatggtgtcaactcctacaagtgcatctgtagtgacggctgggagggggcctactgtgaaaccaatattaatgactgcagccagaacccctgccacaatgggggcacgtgtcgcgacctggtcaatgacttctactgtgactgtaaaaatgggtggaaaggaaagacctgccactcacgtgacagtcagtgtgatgaggccacgtgcaacaacggtggcacctgctatgatgagggggatgcttttaagtgcatgtgtcctggcggctgggaaggaacaacctgtaacatagcccgaaacagtagctgcctgcccaacccctgccataatgggggcacatgtgtggtcaacggcgagtcctttacgtgcgtctgcaaggaaggctgggaggggcccatctgtgctcagaataccaatgactgcagccctcatccctgttacaacagcggcacctgtgtggatggagacaactggtaccggtgcgaatgtgccccgggttttgctgggcccgactgcagaataaacatcaatgaatgccagtcttcaccttgtgcctttggagcgacctgtgtggatgagatcaatggctaccggtgtgtctgccctccagggcacagtggtgccaagtgccaggaagtttcagggagaccttgcatcaccatggggagtgtgataccagatggggccaaatgggatgatgactgtaatacctgccagtgcctgaatggacggatcgcctgctcaaaggtctggtgtggccctcgaccttgcctgctccacaaagggcacagcgagtgccccagcgggcagagctgcatccccatcctggacgaccagtgcttcgtccacccctgcactggtgtgggcgagtgtcggtcttccagtctccagccggtgaagacaaagtgcacctctgactcctattaccaggataactgtgcgaacatcacatttacctttaacaaggagatgatgtcaccaggtcttactacggagcacatttgcagtgaattgaggaatttgaatattttgaagaatgtttccgctgaatattcaatctacatcgcttgcgagccttccccttcagcgaacaatgaaatacatgtggccatttctgctgaagatatacgggatgatgggaacccgatcaaggaaatcactgacaaaataatcgatcttgttagtaaacgtgatggaaacagctcgctgattgctgccgttgcagaagtaagagttcagaggcggcctctgaagaacagaacagatttccttgttcccttgctgagctctgtcttaactgtggcttggatctgttgcttggtgacggccttctactggtgcctgcggaagcggcggaagccgggcagccacacacactcagcctctgaggacaacaccaccaacaacgtgcgggagcagctgaaccagatcaaaaaccccattgagaaacatggggccaacacggtccccatcaaggattatgagaacaagaactccaaaatgtctaaaataaggacacacaattctgaagtagaagaggacgacatggacaaacaccagcagaaagcccggtttgccaagcagccggcgtacacgctggtagacagagaagagaagccccccaacggcacgccgacaaaacacccaaactggacaaacaaacaggacaacagagacttggaaagtgcccagagcttaaaccgaatggagtacatcgtatagcagaccgcgggcactgccgccgctagtgtggcctcttctgagcttacgtagttctaccggctttgccatgtgcttctgccaccctgctgagtctgttctggtaatcggggtataataggctctgcctgacagagggatggaggaagaactgaaaggcttttcaaccacaaaactcatctggagttctcaaagacctggggctgctgtgaagctggaactgcgggagccccatcta

SEQ ID NO: 2176 - DNA, 5285 bp, Homo sapiens
  source 1..5285: mol_type = genomic DNA
ctgcaggaaggagagaggaagaggagcagaagggggcagcagcggacgccgctaacggcctccctcggcgctgacaggctgggccggcgcccggctcgcttgggtgttcgcgtcgccacttcggcttctcggccggtcgggcccctcggcccgggcttgcggcgcgcgtcggggctgagggctgctgcggcgcagggagaggcctggtcctcgctgccgagggatgtgagtgggagctgagcccacactggagggcccccgagggcccagcctggaggtcgttcagagccgtgcccgtcccggggcttcgcagaccttgacccgccgggtaggagccgcccctgcgggctcgagggcgcgctctggtcgcccgatctgtgtagccggtttcagaagcaggcaacaggaacaagatgtgaactgtttctcttctgcagaaaaagaggctcttcctcctcctcccgcgacggcaaatgttctgaaaaagactctgcatgggaatggcctgccttacgatgacagaaatggagggaacatccacctcttctatatatcagaatggtgatatttctggaaatgccaattctatgaagcaaatagatccagttcttcaggtgtatctttaccattcccttgggaaatctgaggcagattatctgacctttccatctggggagtatgttgcagaagaaatctgtattgctgcttctaaagcttgtggtatcacacctgtgtatcataatatgtttgctttaatgagtgaaacagaaaggatctggtatccacccaaccatgtcttccatatagatgagtcaaccaggcataatgtactctacagaataagattttactttcctcgttggtattgcagtggcagcaacagagcctatcggcatggaatatctcgaggtgctgaagctcctcttcttgatgactttgtcatgtcttacctctttgctcagtggcggcatgattttgtgcacggatggataaaagtacctgtgactcatgaaacacaggaagaatgtcttgggatggcagtgttagatatgatgagaatagccaaagaaaacgatcaaaccccactggccatctataactctatcagctacaagacattcttaccaaaatgtattcgagcaaagatccaagactatcatattttgacaaggaagcgaataaggtacagatttcgcagatttattcagcaattcagccaatgcaaagccactgccagaaacttgaaacttaagtatcttataaatctggaaactctgcagtctgccttctacacagagaaatttgaagtaaaagaacctggaagtggtccttcaggtgaggagatttttgcaaccattataataactggaaacggtggaattcagtggtcaagagggaaacataaagaaagtgagacactgacagaacaggatttacagttatattgcgattttcctaatattattgatgtcagtattaagcaagcaaaccaagagggttcaaatgaaagccgagttgtaactatccataagcaagatggtaaaaatctggaaattgaacttagctcattaagggaagctttgtctttcgtgtcattaattgatggatattatagattaactgcagatgcacatcattacctctgtaaagaagtagcacctccagccgtgcttgaaaatatacaaagcaactgtcatggcccaatttcgatggattttgccattagtaaactgaagaaagcaggtaatcagactggactgtatgtacttcgatgcagtcctaaggactttaataaatattttttgacttttgctgtcgagcgagaaaatgtcattgaatataaacactgtttgattacaaaaaatgagaatgaagagtacaacctcagtgggacaaagaagaacttcagcagtcttaaagatcttttgaattgttaccagatggaaactgttcgctcagacaatataattttccagtttactaaatgctgtcccccaaagccaaaagataaatcaaaccttctagtcttcagaacgaatggtgtttctgatgtaccaacctcaccaacattacagaggcctactcatatgaaccaaatggtgtttcacaaaatcagaaatgaagatttgatatttaatgaaagccttggccaaggcacttttacaaagatttttaaaggcgtacgaagagaagtaggagactacggtcaactgcatgaaacagaagttcttttaaaagttctggataaagcacacagaaactattcagagtctttctttgaagcagcaagtatgatgagcaagctttctcacaagcatttggttttaaattatggagtatgtgtctgtggagacgagaatattctggttcaggagtttgtaaaatttggatcactagatacatatctgaaaaagaataaaaattgtataaatatattatggaaacttgaagttgctaaacagttggcatgggccatgcattttctagaagaaaacacccttattcatgggaatgtatgtgccaaaaatattctgcttatcagagaagaagacaggaagacaggaaatcctcctttcatcaaacttagtgatcctggcattagtattacagttttgccaaaggacattcttcaggagagaataccatgggtaccacctgaatgcattgaaaatcctaaaaatttaaatttggcaacagacaaatggagttttggtaccactttgtgggaaatctgcagtggaggagataaacctctaagtgctctggattctcaaagaaagctacaattttatgaagataggcatcagcttcctgcaccaaagtgggcagaattagcaaaccttataaataattgtatggattatgaaccagatttcaggccttctttcagagccatcatacgagatcttaacagtttgtttactccagattatgaactattaacagaaaatgacatgttaccaaatatgaggataggtgccctggggttttctggtgcctttgaagaccgggatcctacacagtttgaagagagacatttgaaatttctacagcaacttggcaagggtaattttgggagtgtggagatgtgccggtatgaccctctacaggacaacactggggaggtggtcgctgtaaaaaagcttcagcatagtactgaagagcacctaagagactttgaaagggaaattgaaatcctgaaatccctacagcatgacaacattgtaaagtacaagggagtgtgctacagtgctggtcggcgtaatctaaaattaattatggaatatttaccatatggaagtttacgagactatcttcaaaaacataaagaacggatagatcacataaaacttctgcagtacacatctcagatatgcaagggtatggagtatcttggtacaaaaaggtatatccacagggatctggcaacgagaaatatattggtggagaacgagaacagagttaaaattggagattttgggttaaccaaagtcttgccacaagacaaagaatactataaagtaaaagaacctggtgaaagtcccatattctggtatgctccagaatcactgacagagagcaagttttctgtggcctcagatgtttggagctttggagtggttctgtatgaacttttcacatacattgagaagagtaaaagtccaccagcggaatttatgcgtatgattggcaatgacaaacaaggacagatgatcgtgttccatttgatagaacttttgaagaataatggaagattaccaagaccagatggatgcccagatgagatctatatgatcatgacagaatgctggaacaataatgtaaatcaacgcccctcctttagggatctagctcttcgagtggatcaaataagggataacatggctggatgaaagaaatgaccttcattctgagaccaaagtagatttacagaacaaagttttatatttcacattgctgtggactattattacatatatcattattatataaatcatgatgctagccagcaaagatgtgaaaatatctgctcaaaactttcaaagtttagtaagtttttcttcatgaggccaccagtaaaagacattaatgagaattccttagcaaggattttgtaagaagtttcttaaacattgtcagttaacatcactcttgtctggcaaaagaaaaaaaatagactttttcaactcagctttttgagacctgaaaaaattattatgtaaattttgcaatgttaaagatgcacagaatatgtatgtatagtttttaccacagtggatgtataataccttggcatcttgtgtgatgttttacacacatgagggctggtgttcattaatactgttttctaatttttccatagttaatctataattaattacttcactatacaaacaaattaagatgttcagataattgaataagtacctttgtgtccttgttcatttatatcgctggccagcattataagcaggtgtatacttttagcttgtagttccatgtactgtaaatatttttcacataaagggaacaaatgtctagttttatttgtataggaaatttccctgaccctaaataatacattttgaaatgaaacaagcttacaaagatataatctattttattatggtttcccttgtatctatttgtggtgaatgtgttttttaaatggaactatctccaaatttttctaagactactatgaacagttttcttttaaaattttgagattaagaatgccaggaatattgtcatcctttgagctgctgactgccaataacattcttcgatctctgggatttatgctcatgaactaaatttaagcttaagccataaaatagattagattgttttttaaaaatggatagctcattaagaagtgcagcaggttaagaattttttcctaaagactgtatatttgaggggtttcagaattttgcattgcagtcatagaagagatttatttcctttttagaggggaaatgaggtaaataagtaaaaaagtatgcttgttaattttattcaagaatgccagtagaaaattcataacgtgtatctttaagaaaaatgagcatacatcttaaatcttttcaattaagtataaggggttgttcgttgttgtcatttgttatagtgctactccactttagacaccatagctaaaataaaatatggtgggttttgtgtgtgtgtgtgtgtgtgtgtgtgtgtgtgtgtgtgtgttatttatacaaaacttaaaatacttgctgttttgattaaaaagaaaatagtttcttacttta

SEQ ID NO: 2177 - DNA, 3535 bp, Homo sapiens
  source 1..3535: mol_type = genomic DNA
attcggggagactgcaggccaaccgggaggctgagttcgaagctagcagggcggcgaagccagtgtcgcccgcggcgttgagaagacggcaaatgttctgaaaaagactctgcatgggaatggcctgccttacgatgacagaaatggagggaacatccacctcttctatatatcagaatggtgatatttctggaaatgccaattctatgaagcaaatagatccagttcttcaggtgtatctttaccattcccttgggaaatctgaggcagattatctgacctttccatctggggagtatgttgcagaagaaatctgtattgctgcttctaaagcttgtggtatcacacctgtgtatcataatatgtttgctttaatgagtgaaacagaaaggatctggtatccacccaaccatgtcttccatatagatgagtcaaccaggcataatgtactctacagaataagattttactttcctcgttggtattgcagtggcagcaacagagcctatcggcatggaatatctcgaggtgctgaagctcctcttcttgatgactttgtcatgtcttacctctttgctcagtggcggcatgattttgtgcacggatggataaaagtacctgtgactcatgaaacacaggaagaatgtcttgggatggcagtgttagatatgatgagaatagccaaagaaaacgatcaaaccccactggccatctataactctatcagctacaagacattcttaccaaaatgtattcgagcaaagatccaagactatcatattttgacaaggaagcgaataaggtacagatttcgcagatttattcagcaattcagccaatgcaaagccactgccagaaacttgaaacttaagtatcttataaatctggaaactctgcagtctgccttctacacagagaaatttgaagtaaaagaacctggaagtggtccttcaggtgaggagatttttgcaaccattataataactggaaacggtggaattcagtggtcaagagggaaacataaagaaagtgagacactgacagaacaggatttacagttatattgcgattttcctaatattattgatgtcagtattaagcaagcaaaccaagagggttcaaatgaaagccgagttgtaactatccataagcaagatggtaaaaatctggaaattgaacttagctcattaagggaagctttgtctttcgtgtcattaattgatggatattatagattaactgcagatgcacatcattacctctgtaaagaagtagcacctccagccgtgcttgaaaatatacaaagcaactgtcatggcccaatttcgatggattttgccattagtaaactgaagaaagcaggtaatcagactggactgtatgtacttcgatgcagtcctaaggactttaataaatattttttgacttttgctgtcgagcgagaaaatgtcattgaatataaacactgtttgattacaaaaaatgagaatgaagagtacaacctcagtgggacaaagaagaacttcagcagtcttaaagatcttttgaattgttaccagatggaaactgttcgctcagacaatataattttccagtttactaaatgctgtcccccaaagccaaaagataaatcaaaccttctagtcttcagaacgaatggtgtttctgatgtaccaacctcaccaacattacagaggcctactcatatgaaccaaatggtgtttcacaaaatcagaaatgaagatttgatatttaatgaaagccttggccaaggcacttttacaaagatttttaaaggcgtacgaagagaagtaggagactacggtcaactgcatgaaacagaagttcttttaaaagttctggataaagcacacagaaactattcagagtctttctttgaagcagcaagtatgatgagcaagctttctcacaagcatttggttttaaattatggagtatgtgtctgtggagacgagaatattctggttcaggagtttgtaaaatttggatcactagatacatatctgaaaaagaataaaaattgtataaatatattatggaaacttgaagttgctaaacagttggcatgggccatgcattttctagaagaaaacacccttattcatgggaatgtatgtgccaaaaatattctgcttatcagagaagaagacaggaagacaggaaatcctcctttcatcaaacttagtgatcctggcattagtattacagttttgccaaaggacattcttcaggagagaataccatgggtaccacctgaatgcattgaaaatcctaaaaatttaaatttggcaacagacaaatggagttttggtaccactttgtgggaaatctgcagtggaggagataaacctctaagtgctctggattctcaaagaaagctacaattttatgaagataggcatcagcttcctgcaccaaagtgggcagaattagcaaaccttataaataattgtatggattatgaaccagatttcaggccttctttcagagccatcatacgagatcttaacagtttgtttactccagattatgaactattaacagaaaatgacatgttaccaaatatgaggataggtgccctggggttttctggtgcctttgaagaccgggatcctacacagtttgaagagagacatttgaaatttctacagcaacttggcaagggtaattttgggagtgtggagatgtgccggtatgaccctctacaggacaacactggggaggtggtcgctgtaaaaaagcttcagcatagtactgaagagcacctaagagactttgaaagggaaattgaaatcctgaaatccctacagcatgacaacattgtaaagtacaagggagtgtgctacagtgctggtcggcgtaatctaaaattaattatggaatatttaccatatggaagtttacgagactatcttcaaaaacataaagaacggatagatcacataaaacttctgcagtacacatctcagatatgcaagggtatggagtatcttggtacaaaaaggtatatccacagggatctggcaacgagaaatatattggtggagaacgagaacagagttaaaattggagattttgggttaaccaaagtcttgccacaagacaaagaatactataaagtaaaagaacctggtgaaagtcccatattctggtatgctccagaatcactgacagagagcaagttttctgtggcctcagatgtttggagctttggagtggttctgtatgaacttttcacatacattgagaagagtaaaagtccaccagcggaatttatgcgtatgattggcaatgacaaacaaggacagatgatcgtgttccatttgatagaacttttgaagaataatggaagattaccaagaccagatggatgcccagatgagatctatatgatcatgacagaatgctggaacaataatgtaaatcaacgcccctcctttagggatctagctcttcgagtggatcaaataagggataacatggctggatgaaagaaatgaccttcattctgaga

SEQ ID NO: 2178 - DNA, 3381 bp, Homo sapiens
  source 1..3381: mol_type = genomic DNA
gagaagctcgactacgactacctgcggaagctctccagctacctcttcgaccgaagcggcttcgtgttcgactctgagtacgaggggctcgggaagcccttggcgacccccatcagcagtgtccacaccgacctgccctcccagcctcagcttcgggacaaagatcagccgcacagcaaaaaccaggcgctgaactccaccaatggggagctgaacgcggacgaccccatggccggccactccagcgcccatcagggcgcctgcagagatggagattttactttcctcgttggtattgcagtggcagcaacagagcctatcggcatggaatatctcgaggtgctgaagctcctcttcttgatgactttgtcatgtcttacctctttgctcagtggcggcatgattttgtgcacggatggataaaagtacctgtgactcatgaaacacaggaagaatgtcttgggatggcagtgttagatatgatgagaatagccaaagaaaacgatcaaaccccactggccatctataactctatcagctacaagacattcttaccaaaatgtattcgagcaaagatccaagactatcatattttgacaaggaagcgaataaggtacagatttcgcagatttattcagcaattcagccaatgcaaagccactgccagaaacttgaaacttaagtatcttataaatctggaaactctgcagtctgccttctacacagagaaatttgaagtaaaagaacctggaagtggtccttcaggtgaggagatttttgcaaccattataataactggaaacggtggaattcagtggtcaagagggaaacataaagaaagtgagacactgacagaacaggatttacagttatattgcgattttcctaatattattgatgtcagtattaagcaagcaaaccaagagggttcaaatgaaagccgagttgtaactatccataagcaagatggtaaaaatctggaaattgaacttagctcattaagggaagctttgtctttcgtgtcattaattgatggatattatagattaactgcagatgcacatcattacctctgtaaagaagtagcacctccagccgtgcttgaaaatatacaaagcaactgtcatggcccaatttcgatggattttgccattagtaaactgaagaaagcaggtaatcagactggactgtatgtacttcgatgcagtcctaaggactttaataaatattttttgacttttgctgtcgagcgagaaaatgtcattgaatataaacactgtttgattacaaaaaatgagaatgaagagtacaacctcagtgggacaaagaagaacttcagcagtcttaaagatcttttgaattgttaccagatggaaactgttcgctcagacaatataattttccagtttactaaatgctgtcccccaaagccaaaagataaatcaaaccttctagtcttcagaacgaatggtgtttctgatgtaccaacctcaccaacattacagaggcctactcatatgaaccaaatggtgtttcacaaaatcagaaatgaagatttgatatttaatgaaagccttggccaaggcacttttacaaagatttttaaaggcgtacgaagagaagtaggagactacggtcaactgcatgaaacagaagttcttttaaaagttctggataaagcacacagaaactattcagagtctttctttgaagcagcaagtatgatgagcaagctttctcacaagcatttggttttaaattatggagtatgtgtctgtggagacgagaatattctggttcaggagtttgtaaaatttggatcactagatacatatctgaaaaagaataaaaattgtataaatatattatggaaacttgaagttgctaaacagttggcatgggccatgcattttctagaagaaaacacccttattcatgggaatgtatgtgccaaaaatattctgcttatcagagaagaagacaggaagacaggaaatcctcctttcatcaaacttagtgatcctggcattagtattacagttttgccaaaggacattcttcaggagagaataccatgggtaccacctgaatgcattgaaaatcctaaaaatttaaatttggcaacagacaaatggagttttggtaccactttgtgggaaatctgcagtggaggagataaacctctaagtgctctggattctcaaagaaagctacaattttatgaagataggcatcagcttcctgcaccaaagtgggcagaattagcaaaccttataaataattgtatggattatgaaccagatttcaggccttctttcagagccatcatacgagatcttaacagtttgtttactccagattatgaactattaacagaaaatgacatgttaccaaatatgaggataggtgccctggggttttctggtgcctttgaagaccgggatcctacacagtttgaagagagacatttgaaatttctacagcaacttggcaagggtaattttgggagtgtggagatgtgccggtatgaccctctacaggacaacactggggaggtggtcgctgtaaaaaagcttcagcatagtactgaagagcacctaagagactttgaaagggaaattgaaatcctgaaatccctacagcatgacaacattgtaaagtacaagggagtgtgctacagtgctggtcggcgtaatctaaaattaattatggaatatttaccatatggaagtttacgagactatcttcaaaaacataaagaacggatagatcacataaaacttctgcagtacacatctcagatatgcaagggtatggagtatcttggtacaaaaaggtatatccacagggatctggcaacgagaaatatattggtggagaacgagaacagagttaaaattggagattttgggttaaccaaagtcttgccacaagacaaagaatactataaagtaaaagaacctggtgaaagtcccatattctggtatgctccagaatcactgacagagagcaagttttctgtggcctcagatgtttggagctttggagtggttctgtatgaacttttcacatacattgagaagagtaaaagtccaccagcggaatttatgcgtatgattggcaatgacaaacaaggacagatgatcgtgttccatttgatagaacttttgaagaataatggaagattaccaagaccagatggatgcccagatgagatctatatgatcatgacagaatgctggaacaataatgtaaatcaacgcccctcctttagggatctagctcttcgagtggatcaaataagggataacatggctggatgaaagaaatgaccttcattctgagaccaaagtagatttacagaacaaagttttatatttc

SEQ ID NO: 2179 - DNA, 3125 bp, Homo sapiens
  source 1..3125: mol_type = genomic DNA
atctctctcgccccctctccctccgtcccgtcctcgccgctcccctcaccccgcctctctccccctcccccagcccctcctctcctcaccccacccggcctccctccctccctcgcccgcccggcgctcgcagagccgacaccaggggggctctcgatgtagcaccatgacaggcatcgccgccgcctccttcttctccaatacctgccgattcgggggctgcggactccacttccccaccctggccgacctcatcgagcacatcgaggacaaccacatcgatacagatccacgggttttagaaaaacaagaattacagcagccaacctatgttgccctgagttacataaatagattcatgacagatgctgcccgccgagagcaggagtccctaaagaagaagattcagccgaagctctcgctgactctgtccagctcagtgtctcgagggaatgtgtccactcccccacgccacagcagtggaagccttactccccccgtgaccccacccatcaccccctcctcttcattccgcagcagcactccgacaggcagcgagtatgacgaggaggaggtggactatgaggagtcggacagcgatgagtcctggaccacagagagtgccatcagctccgaagccatcctcagctccatgtgcatgaatggaggggaagagaagccttttgcctgcccagttcctggatgtaaaaagagatacaagaatgtgaatggcataaagtatcacgctaagaatggtcacagaacacagattcgtgtccgcaaaccattcaagtgtcgctgtgggaagagttacaagacagctcagggcctgcggcaccacacaatcaatttccatcccccggtgtcggctgagattatcaggaagatgcagcaataacatgctggtcataactgtgccaagaaatcctcaccagcagttgctgattttgaaaacagccaccttttttcaggggaagcattcagcaaccctttaaagaaaaagaattaaatgcatgctttaaattttttctgtaattttggaatgatgtatctttgtagagttaatgattttgtacatttgcacatgtaatcatcatacccattttcattactttgatataaggtgctaaacaaaaaaagctctaggttcttcagcacatttcccccaaaacaaaataaaattgagggcatgttgcatattgttgaattgtattgcggtggtatcaacctggggggaggaggggctggcactgagatttttttttcaagattgtaatgtgattgaagttttcaacacatcaactcacatatgttcaaaaccaaaataataccttcattatcaaactggttaccatgccttacataatggagttagtatttgtgagtagaaagactttaggtaatggaaatataaataagaaagaatgtttaacataatatgctaaaaatattttcatatttaaataacatacgtaaaggtgtgctttctgtgttttatattatcttgcaaatccttttgccctttaaaaagctgaaaatcttgccatctgacttactagtcattttagtgttataaatggcattttgtacaaaatagtctattcagttcgttcattcatttaacacacattgattgagtgcctgctgggtacaagggattcaatttatgcctattgatatctgcggaccaagatacccatttagtgaaatacttttttccctgaaatctgttagaaaagactttgaaatacttcagtgcaaagtgtgtgtgtgtgaagtttagttatatcttcatcttcagatgaagttttaaagcactttgtagttctctattgccaacaatttaatgtttatgtgttgccaattcttgcaaccactgccctaccaaacctgtgggttgcaaatcagaactaaaattctaagcacgtttcaaagatgaacacttttgttaagacccctattgcctcttcttcatgctcattttttactttttttaaaaggtacttttctcatcacattgtagagaggtctgcattctcattggaaatgtctgtttagctttataaaacaaacactttgctgaaataggaaaatgagccttattgacaattaagtgcttcttgcagcaggtggtcaaagaaaagcatgactaatacgacctattagagtaatctacatctggaccattccttaagtttttcctcaccgacagtaccatcatgccttgagtgttcttttctcccaagtgctattccttaaacacgagagtttaccagttgcctaataatgcaataaaaaatgctttgagatagctaactgcccataaaacaaactcaaattgcttataaagtttcttcccatgttcccatttgatgaaaagtcttacatcacatataactgggaagcaggggtccctcctcaattttcagacattttgaaaggatgacagttctgtttgttagatgagtaaacctctatattcataagttctaaaatccttcattatgagggattcaaagtatttataaaaacactgccctctaaaaatttcctcagatctgaagtatggtcttggtcctgaatatacagtgttatcctatgtttaaaagggtgatccagacatgagacgcaactagttggtgcataagaaggccccacttggctatttcatatctacctacaattgaccaaaaaaaattttttaggccagcaattattatttagcttcgctctttctagtgcaagaaactgcaggctggatcagtagttcaacagctaaacagtcataaaatagtcattgtgcatgttaaatttctttcaatgctttcaaagataaattccaatttctatttacttattcattgtgacagtattactaaacaggtaaggatgggaatattttgttatactgtgtatagtgaatgtattgtactgtgtctgtgaaaactgtgctttaaattatattttcatatgttttgttggggacagagcacattaagtctgaaagcaacagaggtttgttttagaactgaaggcaatttaatcaaaattcctgtcaagaaaagctgcttataaatgtaaatgaaatcacatttaaaataaactgcctctgacccaaaaataaa

SEQ ID NO: 2180 - DNA, 1815 bp, Homo sapiens
  source 1..1815: mol_type = genomic DNA
gagcggccaggccagcctcggagccagcagggagctgggagctgggggaaacgacgccaggaaagctatcgcgccagagagggcgacgggggctcgggaagcctgacagggcttttgcgcacagctgccggctggctgctacccgcccgcgccagcccccgagaacgcgcgaccaggcacccagtccggtcaccgcagcggagagctcgccgctcgctgcagcgaggcccggagcggccccgcagggaccctccccagaccgcctgggccgcccggatgtgcactaaaatggaacagcccttctaccacgacgactcatacacagctacgggatacggccgggcccctggtggcctctctctacacgactacaaactcctgaaaccgagcctggcggtcaacctggccgacccctaccggagtctcaaagcgcctggggctcgcggacccggcccagagggcggcggtggcggcagctacttttctggtcagggctcggacaccggcgcgtctctcaagctcgcctcttcggagctggaacgcctgattgtccccaacagcaacggcgtgatcacgacgacgcctacacccccgggacagtacttttacccccgcgggggtggcagcggtggaggtgcagggggcgcagggggcggcgtcaccgaggagcaggagggcttcgccgacggctttgtcaaagccctggacgatctgcacaagatgaaccacgtgacaccccccaacgtgtccctgggcgctaccggggggcccccggctgggcccgggggcgtctacgccggcccggagccacctcccgtttacaccaacctcagcagctactccccagcctctgcgtcctcgggaggcgccggggctgccgtcgggaccgggagctcgtacccgacgaccaccatcagctacctcccacacgcgccgcccttcgccggtggccacccggcgcagctgggcttgggccgcggcgcctccaccttcaaggaggaaccgcagaccgtgccggaggcgcgcagccgggacgccacgccgccggtgtcccccatcaacatggaagaccaagagcgcatcaaagtggagcgcaagcggctgcggaaccggctggcggccaccaagtgccggaagcggaagctggagcgcatcgcgcgcctggaggacaaggtgaagacgctcaaggccgagaacgcggggctgtcgagtaccgccggcctcctccgggagcaggtggcccagctcaaacagaaggtcatgacccacgtcagcaacggctgtcagctgctgcttggggtcaagggacacgccttctgaacgtcccctgcccctttacggacaccccctcgcttggacggctgggcacacgcctcccactggggtccagggagcaggcggtgggcacccaccctgggacctaggggcgccgcaaaccacactggactccggccctcctaccctgcgcccagtccttccacctcgacgtttacaagcccccccttccacttttttttgtatgttttttttctgctggaaacagactcgattcatattgaatataatatatttgtgtatttaacagggaggggaagagggggcgatcgcggcggagctggccccgccgcctggtactcaagcccgcggggacattgggaaggggacccccgccccctgccctcccctctctgcaccgtactgtggaaaagaaacacgcacttagtctctaaagagtttattttaagacgtgtttgtgtttgtgtgtgtttgttctttttattgaatctatttaagtaaaaaaaaaattggttcttt

SEQ ID NO: 2181 - DNA, 3321 bp, Homo sapiens
  source 1..3321: mol_type = genomic DNA
gacatcatgggctatttttaggggttgactggtagcagataagtgttgagctcgggctggataagggctcagagttgcactgagtgtggctgaagcagcgaggcgggagtggaggtgcgcggagtcaggcagacagacagacacagccagccagccaggtcggcagtatagtccgaactgcaaatcttattttcttttcaccttctctctaactgcccagagctagcgcctgtggctcccgggctggtgtttcgggagtgtccagagagcctggtctccagccgcccccgggaggagagccctgctgcccaggcgctgttgacagcggcggaaagcagcggtacccacgcgcccgccgggggaagtcggcgagcggctgcagcagcaaagaactttcccggctgggaggaccggagacaagtggcagagtcccggagccaacttttgcaagcctttcctgcgtcttaggcttctccacggcggtaaagaccagaaggcggcggagagccacgcaagagaagaaggacgtgcgctcagcttcgctcgcaccggttgttgaacttgggcgagcgcgagccgcggctgccgggcgccccctccccctagcagcggaggaggggacaagtcgtcggagtccgggcggccaagacccgccgccggccggccactgcagggtccgcactgatccgctccgcggggagagccgctgctctgggaagtgagttcgcctgcggactccgaggaaccgctgcgcacgaagagcgctcagtgagtgaccgcgacttttcaaagccgggtagcgcgcgcgagtcgacaagtaagagtgcgggaggcatcttaattaaccctgcgctccctggagcgagctggtgaggagggcgcagcggggacgacagccagcgggtgcgtgcgctcttagagaaactttccctgtcaaaggctccggggggcgcgggtgtcccccgcttgccacagccctgttgcggccccgaaacttgtgcgcgcagcccaaactaacctcacgtgaagtgacggactgttctatgactgcaaagatggaaacgaccttctatgacgatgccctcaacgcctcgttcctcccgtccgagagcggaccttatggctacagtaaccccaagatcctgaaacagagcatgaccctgaacctggccgacccagtggggagcctgaagccgcacctccgcgccaagaactcggacctcctcacctcgcccgacgtggggctgctcaagctggcgtcgcccgagctggagcgcctgataatccagtccagcaacgggcacatcaccaccacgccgacccccacccagttcctgtgccccaagaacgtgacagatgagcaggagggcttcgccgagggcttcgtgcgcgccctggccgaactgcacagccagaacacgctgcccagcgtcacgtcggcggcgcagccggtcaacggggcaggcatggtggctcccgcggtagcctcggtggcagggggcagcggcagcggcggcttcagcgccagcctgcacagcgagccgccggtctacgcaaacctcagcaacttcaacccaggcgcgctgagcagcggcggcggggcgccctcctacggcgcggccggcctggcctttcccgcgcaaccccagcagcagcagcagccgccgcaccacctgccccagcagatgcccgtgcagcacccgcggctgcaggccctgaaggaggagcctcagacagtgcccgagatgcccggcgagacaccgcccctgtcccccatcgacatggagtcccaggagcggatcaaggcggagaggaagcgcatgaggaaccgcatcgctgcctccaagtgccgaaaaaggaagctggagagaatcgcccggctggaggaaaaagtgaaaaccttgaaagctcagaactcggagctggcgtccacggccaacatgctcagggaacaggtggcacagcttaaacagaaagtcatgaaccacgttaacagtgggtgccaactcatgctaacgcagcagttgcaaacattttgaagagagaccgtcgggggctgaggggcaacgaagaaaaaaaataacacagagagacagacttgagaacttgacaagttgcgacggagagaaaaaagaagtgtccgagaactaaagccaagggtatccaagttggactgggttgcgtcctgacggcgcccccagtgtgcacgagtgggaaggacttggcgcgccctcccttggcgtggagccagggagcggccgcctgcgggctgccccgctttgcggacgggctgtccccgcgcgaacggaacgttggacttttcgttaacattgaccaagaactgcatggacctaacattcgatctcattcagtattaaaggggggagggggagggggttacaaactgcaatagagactgtagattgcttctgtagtactccttaagaacacaaagcggggggagggttggggaggggcggcaggagggaggtttgtgagagcgaggctgagcctacagatgaactctttctggcctgccttcgttaactgtgtatgtacatatatatattttttaatttgatgaaagctgattactgtcaataaacagcttcatgcctttgtaagttatttcttgtttgtttgtttgggtatcctgcccagtgttgtttgtaaataagagatttggagcactctgagtttaccatttgtaataaagtatataatttttttatgttttgtttctgaaaattccagaaaggatatttaagaaaatacaataaactattggaaagtactcccctaacctcttttctgcatcatctgtagatactagctatctaggtggagttgaaagagttaagaatgtcgattaaaatcactctcagtgcttcttactattaagcagtaaaaactgttctctattagactttagaaataaatgtacctgatgtacctgatgctatggtcaggttatactcctcctcccccagctatctatatggaattgcttaccaaaggatagtgcgatgtttcaggaggctggaggaaggggggttgcagtggagagggacagcccactgagaagtcaaacatttcaaagtttggattgtatcaagtggcatgtgctgtgaccatttataatgttagtagaaattttacaataggtgcttattctcaaagcaggaattggtggcagattttacaaaagatgtatccttccaatttggaatcttctctttgacaattcctagataaaaagatggcctttgcttatgaatatttataacagcattcttgtcacaataaatgtattcaaatacc

SEQ ID NO: 2182 - DNA, 3105 bp, Homo sapiens
  source 1..3105: mol_type = genomic DNA
catcctgccacccctagccttgctggggacgtgaaccctctccccgcgcctgggaagccttcttggcaccgggacccggagaatccccacggaagccagttccaaaagggatgaaaagggggcgtttcgggcactgggagaagcctgtattccagggcccctcccagagcaggaatctgggacccaggagtgccagcctcacccacgcagatcctggccatgagagctccgcacctccacctctccgccgcctctggcgcccgggctctggcgaagctgctgccgctgctgatggcgcaactctgggccgcagaggcggcgctgctcccccaaaacgacacgcgcttggaccccgaagcctatggctccccgtgcgcgcgcggctcgcagccctggcaggtctcgctcttcaacggcctctcgttccactgcgcgggtgtcctggtggaccagagttgggtgctgacggccgcgcactgcggaaacaagccactgtgggctcgagtaggggatgaccacctgctgcttcttcagggagagcagctccgccggaccactcgctctgttgtccatcccaagtaccaccagggctcaggccccatcctgccaaggcgaacggatgagcacgatctcatgttgctgaagctggccaggcccgtagtgctggggccccgcgtccgggccctgcagcttccctaccgctgtgctcagcccggagaccagtgccaggttgctggctggggcaccacggccgcccggagagtgaagtacaacaagggcctgacctgctccagcatcactatcctgagccctaaagagtgtgaggtcttctaccctggcgtggtcaccaacaacatgatatgtgctggactggaccggggccaggacccttgccagagtgactctggaggccccctggtctgtgacgagaccctccaaggcatcctctcgtggggtgtttacccctgtggctctgcccagcatccagctgtctacacccagatctgcaaatacatgtcctggatcaataaagtcatacgctccaactgatccagatgctacgctccagctgatccagatgttatgctcctgctgatccagatgcccagaggctccatcgtccatcctcttcctccccagtcggctgaactctccccttgtctgcactgttcaaacctctgccgccctccacacctctaaacatctcccctctcacctcattcccccacctatccccattctctgcctgtactgaagctgaaatgcaggaagtggtggcaaaggtttattccagagaagccaggaagccggtcatcacccagcctctgagagcagttactggggtcacccaacctgacttcctctgccactccctgctgtgtgactttgggcaagccaagtgccctctctgaacctcagtttcctcatctgcaaaatgggaacaatgacgtgcctacctcttagacatgttgtgaggagactatgatataacatgtgtatgtaaatcttcatggtgattgtcatgtaaggcttaacacagtgggtggtgagttctgactaaaggttacctgttgtcgtgatctgaccacgtcccggtgaaagcgtgtgtccagggaagaagtgcacagggtagcccccagtcccaaccttccatccccaacccttagggatgatggaagaatcattttcctcaccctagttccaagtcccaggaaacaccttttaaccacttccttctcatctcccactgtttcccacttctggttccacccaacaccagttcctccgagctaggctggccctgagtcattagcaccttctctgccttcatgaggccactgaactcaagggacctcaccttgcttctatcccagcctctaagaccagagggccgagggggtagtgaagattgggaaacccttgccacctcaactgcccagcttgtgccaagaaacctccctctgacatttaggggaaaatctttggtttgtctgttattaattggctgtgagattttcgtcctgaaaacttgggaggaggaattgtttgattctccctgaaattgggggagggaaggggagttaatacacagaatccaggtaaggctaatagaagcttcagtgtccgctgggtgtggtggctcacgcctgtaatcctagcactttgggaggccgaggaaagcagatcatctgaggtcaggtgttcgagaccagtctggccaaaatggtgaaatcccatctctactgaaaatacaaaaactagccaggcatggtggcaggcacctataatcccatctacttgggaggctgaggcagaagaatcacttgaacccggggggcagaggttgcagtgagccaagattgcaccattgcactccatccagcctggacaaaagagcaaaactccatctcaaaaaaagaagaagtttgagtgtctcagcttatcctgaactttgaagcagtaacataagctagctgaatataggcacaacagaaatttcccattaagcacggggtttttgtttgtttgtttgtcctttcagttaccaatttatggagcatctattatgtgccaggcccagtgctgggtgctggggacatacgtaggggtgatcacaaggtcccccaccctgcagagcccacaggaggttgatgtacaaggtctgagcacacagctcccttccgtggcctctttcccattctgcccccattagcacacgcaggaaatgtcagacaggcgtatcagctgggtttgtcatccaaagaccagaagcgaggtcggtggaaacttgaaaactcgattcattattaaaggcaactcacccgtccctttagtcactccacaatgtttatcgagccacgtcttatgccaggcctcaaagatgaatcagaccaggcactaccctcaaggagctgctagttaggtcagggagacaggccagtcttacattcctgtcattcaggtctccactcaaaagtcacctcctccgggaggccttcctgaattgcccaggctataggagtccacttttggtcatccagtcccgatgctctgttttttgtttgtttgtttttttttttaatagcacctattatacctgaaatt

SEQ ID NO: 2183 - DNA, 2967 bp, Homo sapiens
  source 1..2967: mol_type = genomic DNA
accagcggcagaccacaggcagggcagaggcacgtctgggtcccctccctccttcctatcggcgactcccagatcctggccatgagagctccgcacctccacctctccgccgcctctggcgcccgggctctggcgaagctgctgccgctgctgatggcgcaactctgggccgcagaggcggcgctgctcccccaaaacgacacgcgcttggaccccgaagcctatggctccccgtgcgcgcgcggctcgcagccctggcaggtctcgctcttcaacggcctctcgttccactgcgcgggtgtcctggtggaccagagttgggtgctgacggccgcgcactgcggaaacaagccactgtgggctcgagtaggggatgaccacctgctgcttcttcagggagagcagctccgccggaccactcgctctgttgtccatcccaagtaccaccagggctcaggccccatcctgccaaggcgaacggatgagcacgatctcatgttgctgaagctggccaggcccgtagtgctggggccccgcgtccgggccctgcagcttccctaccgctgtgctcagcccggagaccagtgccaggttgctggctggggcaccacggccgcccggagagtgaagtacaacaagggcctgacctgctccagcatcactatcctgagccctaaagagtgtgaggtcttctaccctggcgtggtcaccaacaacatgatatgtgctggactggaccggggccaggacccttgccagagtgactctggaggccccctggtctgtgacgagaccctccaaggcatcctctcgtggggtgtttacccctgtggctctgcccagcatccagctgtctacacccagatctgcaaatacatgtcctggatcaataaagtcatacgctccaactgatccagatgctacgctccagctgatccagatgttatgctcctgctgatccagatgcccagaggctccatcgtccatcctcttcctccccagtcggctgaactctccccttgtctgcactgttcaaacctctgccgccctccacacctctaaacatctcccctctcacctcattcccccacctatccccattctctgcctgtactgaagctgaaatgcaggaagtggtggcaaaggtttattccagagaagccaggaagccggtcatcacccagcctctgagagcagttactggggtcacccaacctgacttcctctgccactccctgctgtgtgactttgggcaagccaagtgccctctctgaacctcagtttcctcatctgcaaaatgggaacaatgacgtgcctacctcttagacatgttgtgaggagactatgatataacatgtgtatgtaaatcttcatggtgattgtcatgtaaggcttaacacagtgggtggtgagttctgactaaaggttacctgttgtcgtgatctgaccacgtcccggtgaaagcgtgtgtccagggaagaagtgcacagggtagcccccagtcccaaccttccatccccaacccttagggatgatggaagaatcattttcctcaccctagttccaagtcccaggaaacaccttttaaccacttccttctcatctcccactgtttcccacttctggttccacccaacaccagttcctccgagctaggctggccctgagtcattagcaccttctctgccttcatgaggccactgaactcaagggacctcaccttgcttctatcccagcctctaagaccagagggccgagggggtagtgaagattgggaaacccttgccacctcaactgcccagcttgtgccaagaaacctccctctgacatttaggggaaaatctttggtttgtctgttattaattggctgtgagattttcgtcctgaaaacttgggaggaggaattgtttgattctccctgaaattgggggagggaaggggagttaatacacagaatccaggtaaggctaatagaagcttcagtgtccgctgggtgtggtggctcacgcctgtaatcctagcactttgggaggccgaggaaagcagatcatctgaggtcaggtgttcgagaccagtctggccaaaatggtgaaatcccatctctactgaaaatacaaaaactagccaggcatggtggcaggcacctataatcccatctacttgggaggctgaggcagaagaatcacttgaacccggggggcagaggttgcagtgagccaagattgcaccattgcactccatccagcctggacaaaagagcaaaactccatctcaaaaaaagaagaagtttgagtgtctcagcttatcctgaactttgaagcagtaacataagctagctgaatataggcacaacagaaatttcccattaagcacggggtttttgtttgtttgtttgtcctttcagttaccaatttatggagcatctattatgtgccaggcccagtgctgggtgctggggacatacgtaggggtgatcacaaggtcccccaccctgcagagcccacaggaggttgatgtacaaggtctgagcacacagctcccttccgtggcctctttcccattctgcccccattagcacacgcaggaaatgtcagacaggcgtatcagctgggtttgtcatccaaagaccagaagcgaggtcggtggaaacttgaaaactcgattcattattaaaggcaactcacccgtccctttagtcactccacaatgtttatcgagccacgtcttatgccaggcctcaaagatgaatcagaccaggcactaccctcaaggagctgctagttaggtcagggagacaggccagtcttacattcctgtcattcaggtctccactcaaaagtcacctcctccgggaggccttcctgaattgcccaggctataggagtccacttttggtcatccagtcccgatgctctgttttttgtttgtttgtttttttttttaatagcacctattatacctgaaatt

SEQ ID NO: 2184 - DNA, 3006 bp, Homo sapiens
  source 1..3006: mol_type = genomic DNA
acaatctcccttttcaagccagcctctgtccctcctactcaacctgctttatctctaggccttcctccttcctcttccacagtctggcttctcacattgtcactctagcagatcctggccatgagagctccgcacctccacctctccgccgcctctggcgcccgggctctggcgaagctgctgccgctgctgatggcgcaactctgggccgcagaggcggcgctgctcccccaaaacgacacgcgcttggaccccgaagcctatggctccccgtgcgcgcgcggctcgcagccctggcaggtctcgctcttcaacggcctctcgttccactgcgcgggtgtcctggtggaccagagttgggtgctgacggccgcgcactgcggaaacaagccactgtgggctcgagtaggggatgaccacctgctgcttcttcagggagagcagctccgccggaccactcgctctgttgtccatcccaagtaccaccagggctcaggccccatcctgccaaggcgaacggatgagcacgatctcatgttgctgaagctggccaggcccgtagtgctggggccccgcgtccgggccctgcagcttccctaccgctgtgctcagcccggagaccagtgccaggttgctggctggggcaccacggccgcccggagagtgaagtacaacaagggcctgacctgctccagcatcactatcctgagccctaaagagtgtgaggtcttctaccctggcgtggtcaccaacaacatgatatgtgctggactggaccggggccaggacccttgccagagtgactctggaggccccctggtctgtgacgagaccctccaaggcatcctctcgtggggtgtttacccctgtggctctgcccagcatccagctgtctacacccagatctgcaaatacatgtcctggatcaataaagtcatacgctccaactgatccagatgctacgctccagctgatccagatgttatgctcctgctgatccagatgcccagaggctccatcgtccatcctcttcctccccagtcggctgaactctccccttgtctgcactgttcaaacctctgccgccctccacacctctaaacatctcccctctcacctcattcccccacctatccccattctctgcctgtactgaagctgaaatgcaggaagtggtggcaaaggtttattccagagaagccaggaagccggtcatcacccagcctctgagagcagttactggggtcacccaacctgacttcctctgccactccctgctgtgtgactttgggcaagccaagtgccctctctgaacctcagtttcctcatctgcaaaatgggaacaatgacgtgcctacctcttagacatgttgtgaggagactatgatataacatgtgtatgtaaatcttcatggtgattgtcatgtaaggcttaacacagtgggtggtgagttctgactaaaggttacctgttgtcgtgatctgaccacgtcccggtgaaagcgtgtgtccagggaagaagtgcacagggtagcccccagtcccaaccttccatccccaacccttagggatgatggaagaatcattttcctcaccctagttccaagtcccaggaaacaccttttaaccacttccttctcatctcccactgtttcccacttctggttccacccaacaccagttcctccgagctaggctggccctgagtcattagcaccttctctgccttcatgaggccactgaactcaagggacctcaccttgcttctatcccagcctctaagaccagagggccgagggggtagtgaagattgggaaacccttgccacctcaactgcccagcttgtgccaagaaacctccctctgacatttaggggaaaatctttggtttgtctgttattaattggctgtgagattttcgtcctgaaaacttgggaggaggaattgtttgattctccctgaaattgggggagggaaggggagttaatacacagaatccaggtaaggctaatagaagcttcagtgtccgctgggtgtggtggctcacgcctgtaatcctagcactttgggaggccgaggaaagcagatcatctgaggtcaggtgttcgagaccagtctggccaaaatggtgaaatcccatctctactgaaaatacaaaaactagccaggcatggtggcaggcacctataatcccatctacttgggaggctgaggcagaagaatcacttgaacccggggggcagaggttgcagtgagccaagattgcaccattgcactccatccagcctggacaaaagagcaaaactccatctcaaaaaaagaagaagtttgagtgtctcagcttatcctgaactttgaagcagtaacataagctagctgaatataggcacaacagaaatttcccattaagcacggggtttttgtttgtttgtttgtcctttcagttaccaatttatggagcatctattatgtgccaggcccagtgctgggtgctggggacatacgtaggggtgatcacaaggtcccccaccctgcagagcccacaggaggttgatgtacaaggtctgagcacacagctcccttccgtggcctctttcccattctgcccccattagcacacgcaggaaatgtcagacaggcgtatcagctgggtttgtcatccaaagaccagaagcgaggtcggtggaaacttgaaaactcgattcattattaaaggcaactcacccgtccctttagtcactccacaatgtttatcgagccacgtcttatgccaggcctcaaagatgaatcagaccaggcactaccctcaaggagctgctagttaggtcagggagacaggccagtcttacattcctgtcattcaggtctccactcaaaagtcacctcctccgggaggccttcctgaattgcccaggctataggagtccacttttggtcatccagtcccgatgctctgttttttgtttgtttgtttttttttttaatagcacctattatacctgaaatt

SEQ ID NO: 2185 - DNA, 969 bp, Homo sapiens
  source 1..969: mol_type = genomic DNA
tgtcaccatgtgggtcccggttgtcttcctcaccctgtccgtgacgtggattggtgctgcacccctcatcctgtctcggattgtgggaggctgggagtgcgagaagcattcccaaccctggcaggtgcttgtggcctctcgtggcagggcagtctgcggcggtgttctggtgcacccccagtgggtcctcacagctgcccactgcatcaggaagccaggtgatgactccagccacgacctcatgctgctccgcctgtcagagcctgccgagctcacggatgctgtgaaggtcatggacctgcccacccaggagccagcactggggaccacctgctacgcctcaggctggggcagcattgaaccagaggagttcttgaccccaaagaaacttcagtgtgtggacctccatgttatttccaatgacgtgtgtgcgcaagttcaccctcagaaggtgaccaagttcatgctgtgtgctggacgctggacagggggcaaaagcacctgctcgggtgattctgggggcccacttgtctgtaatggtgtgcttcaaggtatcacgtcatggggcagtgaaccatgtgccctgcccgaaaggccttccctgtacaccaaggtggtgcattaccggaagtggatcaaggacaccatcgtggccaacccctgagcacccctatcaaccccctattgtagtaaacttggaaccttggaaatgaccaggccaagactcaagcctccccagttctactgacctttgtccttaggtgtgaggtccagggttgctaggaaaagaaatcagcagacacaggtgtagaccagagtgtttcttaaatggtgtaattttgtcctctctgtgtcctggggaatactggccatgcctggagacatatcactcaatttctctgaggacacagataggatggggtgtctgtgttatttgtggggtacagagatgaaagaggggtgggatcc

SEQ ID NO: 2186 - DNA, 1979 bp, Homo sapiens
  source 1..1979: mol_type = genomic DNA
gccacacggtctttgagctgagtcgaggtggaccctttgaacgcagtcgccctacagccgctgattccccccgcatcgcctcccgtggaagcccaggcccgcttcgcagctttctccctttgtctcataaccatgtccaccaacgagaatgctaatacaccagctgcccgtcttcacagattcaagaacaagggaaaagacagtacagaaatgaggcgtcgcagaatagaggtcaatgtggagctgaggaaagctaagaaggatgaccagatgctgaagaggagaaatgtaagctcatttcctgatgatgctacttctccgctgcaggaaaaccgcaacaaccagggcactgtaaattggtctgttgatgacattgtcaaaggcataaatagcagcaatgtggaaaatcagctccaagctactcaagctgccaggaaactactttccagagaaaaacagccccccatagacaacataatccgggctggtttgattccgaaatttgtgtccttcttgggcagaactgattgtagtcccattcagtttgaatctgcttgggcactcactaacattgcttctgggacatcagaacaaaccaaggctgtggtagatggaggtgccatcccagcattcatttctctgttggcatctccccatgctcacatcagtgaacaagctgtctgggctctaggaaacattgcaggtgatggctcagtgttccgagacttggttattaagtacggtgcagttgacccactgttggctctccttgcagttcctgatatgtcatctttagcatgtggctacttacgtaatcttacctggacactttctaatctttgccgcaacaagaatcctgcacccccgatagatgctgttgagcagattcttcctaccttagttcggctcctgcatcatgatgatccagaagtattagcagatacctgctgggctatttcctaccttactgatggtccaaatgaacgaattggcatggtggtgaaaacaggagttgtgccccaacttgtgaagcttctaggagcttctgaattgccaattgtgactcctgccctaagagccatagggaatattgtcactggtacagatgaacagactcaggttgtgattgatgcaggagcactcgccgtctttcccagcctgctcaccaaccccaaaactaacattcagaaggaagctacgtggacaatgtcaaacatcacagccggccgccaggaccagatacagcaagttgtgaatcatggattagtcccattccttgtcagtgttctctctaaggcagattttaagacacaaaaggaagctgtgtgggccgtgaccaactataccagtggtggaacagttgaacagattgtgtaccttgttcactgtggcataatagaaccgttgatgaacctcttaactgcaaaagataccaagattattctggttatcctggatgccatttcaaatatctttcaggctgctgagaaactaggtgaaactgagaaacttagtataatgattgaagaatgtggaggcttagacaaaattgaagctctacaaaaccatgaaaatgagtctgtgtataaggcttcgttaagcttaattgagaagtatttctctgtagaggaagaggaagatcaaaacgttgtaccagaaactacctctgaaggctacactttccaagttcaggatggggctcctgggacctttaacttttagatcatgtagctgagacataaatttgttgtgtactacgtttggtattttgtcttattgtttctctactaagaactctttcttaaatgtggtttgttactgtagcactttttacactgaaactatacttgaacagttccaactgtacatacatactgtatgaagcttgtcctctgactaggtttctaatttctatgtggaatttcctatcttgcagcatcctgtaaataaacattcaagtccacccttttcttgacttc

SEQ ID NO: 2187 - DNA, 2197 bp, Homo sapiens
  source 1..2197: mol_type = genomic DNA
gacacctaggccccgggggtggctctgccaccaagtcgtaggcgagcgtaatgaaagcaaagatagcaaattgtaaggagggctttgacttttgtcatcttctgaatgacgcacagctgatgtcatcctaattaagcgcattcactcctagtctctggaaatgcaaatcaaatatgcgagatgcggcactgcatttttaatgttgaccataatgtaatgatgaagcaaatttttatttaattttcgagtctgcacctattttggccaagtaaagacagtaaaatagggagagcctcctgaggatctgaatttattgccctggcacataatttttagctctttctccctttgtctcataaccatgtccaccaacgagaatgctaatacaccagctgcccgtcttcacagattcaagaacaagggaaaagacagtacagaaatgaggcgtcgcagaatagaggtcaatgtggagctgaggaaagctaagaaggatgaccagatgctgaagaggagaaatgtaagctcatttcctgatgatgctacttctccgctgcaggaaaaccgcaacaaccagggcactgtaaattggtctgttgatgacattgtcaaaggcataaatagcagcaatgtggaaaatcagctccaagctactcaagctgccaggaaactactttccagagaaaaacagccccccatagacaacataatccgggctggtttgattccgaaatttgtgtccttcttgggcagaactgattgtagtcccattcagtttgaatctgcttgggcactcactaacattgcttctgggacatcagaacaaaccaaggctgtggtagatggaggtgccatcccagcattcatttctctgttggcatctccccatgctcacatcagtgaacaagctgtctgggctctaggaaacattgcaggtgatggctcagtgttccgagacttggttattaagtacggtgcagttgacccactgttggctctccttgcagttcctgatatgtcatctttagcatgtggctacttacgtaatcttacctggacactttctaatctttgccgcaacaagaatcctgcacccccgatagatgctgttgagcagattcttcctaccttagttcggctcctgcatcatgatgatccagaagtattagcagatacctgctgggctatttcctaccttactgatggtccaaatgaacgaattggcatggtggtgaaaacaggagttgtgccccaacttgtgaagcttctaggagcttctgaattgccaattgtgactcctgccctaagagccatagggaatattgtcactggtacagatgaacagactcaggttgtgattgatgcaggagcactcgccgtctttcccagcctgctcaccaaccccaaaactaacattcagaaggaagctacgtggacaatgtcaaacatcacagccggccgccaggaccagatacagcaagttgtgaatcatggattagtcccattccttgtcagtgttctctctaaggcagattttaagacacaaaaggaagctgtgtgggccgtgaccaactataccagtggtggaacagttgaacagattgtgtaccttgttcactgtggcataatagaaccgttgatgaacctcttaactgcaaaagataccaagattattctggttatcctggatgccatttcaaatatctttcaggctgctgagaaactaggtgaaactgagaaacttagtataatgattgaagaatgtggaggcttagacaaaattgaagctctacaaaaccatgaaaatgagtctgtgtataaggcttcgttaagcttaattgagaagtatttctctgtagaggaagaggaagatcaaaacgttgtaccagaaactacctctgaaggctacactttccaagttcaggatggggctcctgggacctttaacttttagatcatgtagctgagacataaatttgttgtgtactacgtttggtattttgtcttattgtttctctactaagaactctttcttaaatgtggtttgttactgtagcactttttacactgaaactatacttgaacagttccaactgtacatacatactgtatgaagcttgtcctctgactaggtttctaatttctatgtggaatttcctatcttgcagcatcctgtaaataaacattcaagtccaccctt

SEQ ID NO: 2188 - DNA, 3972 bp, Homo sapiens
  source 1..3972: mol_type = genomic DNA
attaagagcatgctactctgtacttcgctgctgcagaagagagagtgatatttgtgttactacagcatgttgtaaatgtgtgagattttgctcatctcagcttggaaataagaatagggaaaggagagcaacttgaatcagaagctactagaagaacctgcagagttctgaagcagtttatattcttcttacattttgccttctcctagctggaaagcagagggactggaatttttgaaacgggcttttcccataatggcattcttgatttgtgtggccagagcttgcacaggaggaaagcaggctgctgaatttagtcactgatctctattagcggtagcctaaggctatgctgaggtttatatcccatttgtattgttgcagctcaaaagaagattgttcagaggatgacaagtgtattctgagtaggtatgttgttgtttcattttcatatgaaacccatctatgttttttcttgctactattggtcagaaatcaggttaataggtgcagaatatagtacagtgctgcagtatccctgttaaggtagaacaatggtattgcaagcttaaaaaaaaaaagcctggctgcttttattaaataaagctgcattgtatggtatgcacagtgcagtcctaaaaaaatatactgcagtcaacgcttttctggcactattgttgagttggaatgattgaatcatcatattgctttaggggacagaagaatttaaggaggtaccttacagccctattttacagattggaagcatcggtttaagggcactggcagaatcctttgcttgttctccgcggcagccactgctgtgtcagtacagtgtggaatggaagtcttagttggtagtctgttatggaaacgctctttactgttattgtagtaccgtggtgacaacatgccattgaaatggaaaacgagctctcctgctatctggaaattcccagttcctgtgcttaaaacatccaggtcaactccactttctccagcatacatatctctcgtggaagaggaagaccaacacatgaaattgtcccttggaggcagcgaaatgggcctctcatcccatttgcagtcttccaaggcaggacctacacgcatctttaccagcaatacccacagttctgtggtgttacagggctttgaccagcttcgacttgaaggattgctttgtgatgtgaccctgatgccaggtgacacagatgatgctttccctgtgcatagagtcatgatggcatctgctagtgattacttcaaggctatgttcacaggtggaatgaaagaacaagatttaatgtgcattaaacttcatggtgtgagcaaagtcggtctaaggaaaattattgatttcatttatactgcaaagctttctcttaatatggacaaccttcaagacacgctggaagctgccagtttcctacagattctgccagttttggacttctgtaaagtgtttctcatatctggggtcactttagacaactgtgttgaagttggacggattgccaacacctacaatctaaccgaagtggataaatacgttaacagtttcgtcttgaagaattttcctgcattgctgagcacaggggagttcttgaaactcccttttgagcgtcttgccttcgtgctttccagtaatagccttaagcactgtactgaacttgagctctttaaggctacctgtcgttggcttcgcctggaagagcctcggatggactttgctgcaaaattaatgaagaacatacgatttccactgatgacaccacaggagctcattaattacgtgcaaacggtggatttcatgagaactgacaatacttgtgtgaatttgcttttggaagccagcaattaccaaatgatgccatatatgcagccagttatgcagtcagacaggactgccattaggtctgacaccactcacttggttacactaggaggagtgctgaggcagcagctggttgtcagtaaggaattgcgcatgtatgatgaaaaggcccatgagtggaaatcgttagcccccatggatgccccaaggtaccagcatggcatcgccgtcattggaaattttctctatgtggttggcggacagagtaattatgatacaaaaggaaaaacggcagttgatacagtcttcagatttgatcctcgatacaataaatggatgcaagttgcatctttaaatgaaaagcgcaccttcttccacctaagtgccctcaaaggatatctgtatgcagttggtgggcgaaatgcagcaggtgaactgcccacagtagaatgttacaatccaagaacaaatgaatggacctatgttgccaaaatgagtgagccccactatggccatgctggaactgtgtatggaggagtgatgtatatttcaggaggaattactcatgatactttccaaaaggagctcatgtgctttgaccctgatactgacaaatggatccagaaggcgccaatgaccactgtcagaggtctgcattgcatgtgtacagtgggagaaaggctctatgtcattggtggcaatcacttcagaggaacaagtgattatgatgatgtcctaagctgtgaatactattcacctatccttgaccagtggaccccaattgctgccatgttaagagggcagagtgatgttggggtcgctgtcttcgaaaataaaatctatgtggttggggggtattcttggaataatcgttgtatggtagagatagtgcagaaatatgatccagataaagatgaatggcataaggtttttgatctgccagaatcccttggtggcattcgtgcttgcacactcacagtttttccaccagaagaaaccacaccatcaccttctagagagtcccctctttctgcaccttaagatcatctctacaactaagatgctgtagttctatctttgcaatgtgtcataaattctcttctttttcccccttaagtagtatatatgttaggattaccctctggtaattgatacagatattggaaaaaagacaacattgatgttatttgtgctctttgtttggcctagaatgtttataaagtggtaacacaaccattctggaaatgtatcccatagaagctgatgtttaacatatgaaaaaaaaagtattgtctataaaatgtttcttcagtactttttaaatgctgtgtattgggtgtaaggtatttgtcatcttacattagtaaacccaataagccaagttgaaggtggattatagtaaatgtacaactgtgctcactaggcttcaagtaaaaagttttcctttcatctttgactgtaagatgtcaaagggaggcagcctgcttgaacaggaaacaatacacaaaaggttgccaactcgcatgagctacctccctcttttcataaagtatttttgacatatctgtcaacccacttgactgtgtgggtgcattgagaacacaaagtttcctagacacacaggagaagtagcttaaattcactaatattaatttaaaaagcagcatgaaccctctacttataaacaagggtttggtgtttttaaagtgtgtatacatacatacacatacacacatgcacatatgtcaaatataatttttttaaaaattgagtggcacatcaaagaaatgtgaaattaaaaagaattcttccaaaaagcagcttccattaaaatgggaattcagtatgcacatactgaatgcatatatgtagaaccatacagaatttaggtggataagggctagaaattttgagcaacaaaatttgtcacttgaccagattttatcttcaaaaactgtattctactccttctcctttgctgttgaggtaacttgcatattatatgtattctgtatactcagttcataaggttatttagcacaaagtatagcagcttcacctggagagctgcttttgctcagtaaattcaacttccatgttttatctttttttgttcaataaaaacatttaatgtc

SEQ ID NO: 2189 - DNA, 5331 bp, Homo sapiens
  source 1..5331: mol_type = genomic DNA
cttggaattactcagataatcattcctttaagcatagattgatataattgtggcttggggtttgcagagaagtgttacctccttgcaatgttgaagaacagtgctcttcacattcaatcaataaacttaataaaggggagatagatgggaatattgaatctgctaagaaggttaacatggcatgtactgttaccaaagcagaaattagtagggagtgttttgaatgttaaaaagtcaaaagatactgataaaacatcatgaaaaagataattttagtccaggcttcttcagcttttgaagtaattaattaaaaaggcaagcatattatgttggcaagaaagggctgcattttcactttttgctttctgtttttaagagcaagagacaaatgacaaagtaaataagttgttacttgtagtttactcaaaaaagcaatttccgggatatgtcattgtggcaatgtgaattcagctttactcctatcccttttacatctgcagtttcataagaatgataattgatggtcatttaagcactgcataataaagaaatgtctttggaatgatctacagaaagaagattctgtattcattcagaggacatatattaagtctttcgtgctaggctctgtgcagggaatacagaaactaataaaacagtctgcttgaatatcctattaatataatctggatgaatagacattttctggttagggataacagtcaccatcaatcaatttctgacttttccaattgattctgtaattttaaacgtctgtccacaaaagttgtttaaaattgtgtgtgtgtgctatatatcataaatataacttaattctctttaaagctatctctgaaactctggtggaaggctatatccagtttcttttatgctttttaaaatcttaagttattctcttctttattaaatatctatcagaattgaattaaacatggttatatattattaattcatttttggttatactatggctctaatatcattaagaagaattgatgtcatccttaaggccagaatttttgctaattattgcaagatttaaaaccacttagttggtgtcataattcaaaaagcagaatctttagtatggtctttttcttgttaaaactgatcaacttggggttttaggtatgacaggaaaaaaaggtgaaacctttctgatattggatagctcagttagacagttagaaaagcaaataattcaaaattgaggaaattacagaaaaaatgaagagttccagcacttgaaaatctgctctccttcttttttcctaatgtctattttagcagtctttttagcagtctgtatcatgaatgcagaaccaaattcatgagccatgggctccccactcttaggcaggtgatccagagattattttagcaatgtatacctatggagaaacacaagatctcttctaaggaatgatgaaaggttattaataatggcacatttttagtataacctgagatttttaaactatcaaatgtattgtcatattctctttgcatctaagtgacctactgactaaggttctcctattcttacttatgccccttgaaaatactattgctgcaatacatgcaaatacagaattgcctgtatttatatttttagtattcatttctttgaaaagatggaaatgtgactagattgtagctattaaacaatcccaaactggtaagtgagagatactgctagaaaaagaaattatatcatgtgaaaaattttgttcagttggggttgattagaactactactaataacagaagataaagtaatgcattaatatataacaattaatcttttacttttattaatgggggtttggagtgggaatcagactagacctagattcaaaccctgggccaaccactttaataagtggtttctgacccttctttagtctgtgtataaaattattggcaagtacctgctatataatgactattcaataaatggtagctatcatttttatcttttcaaaattaggtgttccaaattaattttaactatatgcagcataatttgatggcattgctatctaaatagtaacatatcaacagtaattactgtggcctttaaaaactctgtgactataattttgaaccaccttttaagttgatttctcagttatcatctgtatattctgtacttggaaaccattttacaaatatacatttcttctaagataaagagtggtacaagcgtataatatagtgaaacaatattcaccatattgcatggtcatatgattgcaatagtgactgattatttttctaaataatctcattgtaaattgtacaagttttaatttccccttctttcttatgtaaaaaaactttcagatctctcgtggaagaggaagaccaacacatgaaattgtcccttggaggcagcgaaatgggcctctcatcccatttgcagtcttccaaggcaggacctacacgcatctttaccagcaatacccacagttctgtggtgttacagggctttgaccagcttcgacttgaaggattgctttgtgatgtgaccctgatgccaggtgacacagatgatgctttccctgtgcatagagtcatgatggcatctgctagtgattacttcaaggctatgttcacaggtggaatgaaagaacaagatttaatgtgcattaaacttcatggtgtgagcaaagtcggtctaaggaaaattattgatttcatttatactgcaaagctttctcttaatatggacaaccttcaagacacgctggaagctgccagtttcctacagattctgccagttttggacttctgtaaagtgtttctcatatctggggtcactttagacaactgtgttgaagttggacggattgccaacacctacaatctaaccgaagtggataaatacgttaacagtttcgtcttgaagaattttcctgcattgctgagcacaggggagttcttgaaactcccttttgagcgtcttgccttcgtgctttccagtaatagccttaagcactgtactgaacttgagctctttaaggctacctgtcgttggcttcgcctggaagagcctcggatggactttgctgcaaaattaatgaagaacatacgatttccactgatgacaccacaggagctcattaattacgtgcaaacggtggatttcatgagaactgacaatacttgtgtgaatttgcttttggaagccagcaattaccaaatgatgccatatatgcagccagttatgcagtcagacaggactgccattaggtctgacaccactcacttggttacactaggaggagtgctgaggcagcagctggttgtcagtaaggaattgcgcatgtatgatgaaaaggcccatgagtggaaatcgttagcccccatggatgccccaaggtaccagcatggcatcgccgtcattggaaattttctctatgtggttggcggacagagtaattatgatacaaaaggaaaaacggcagttgatacagtcttcagatttgatcctcgatacaataaatggatgcaagttgcatctttaaatgaaaagcgcaccttcttccacctaagtgccctcaaaggatatctgtatgcagttggtgggcgaaatgcagcaggtgaactgcccacagtagaatgttacaatccaagaacaaatgaatggacctatgttgccaaaatgagtgagccccactatggccatgctggaactgtgtatggaggagtgatgtatatttcaggaggaattactcatgatactttccaaaaggagctcatgtgctttgaccctgatactgacaaatggatccagaaggcgccaatgaccactgtcagaggtctgcattgcatgtgtacagtgggagaaaggctctatgtcattggtggcaatcacttcagaggaacaagtgattatgatgatgtcctaagctgtgaatactattcacctatccttgaccagtggaccccaattgctgccatgttaagagggcagagtgatgttggggtcgctgtcttcgaaaataaaatctatgtggttggggggtattcttggaataatcgttgtatggtagagatagtgcagaaatatgatccagataaagatgaatggcataaggtttttgatctgccagaatcccttggtggcattcgtgcttgcacactcacagtttttccaccagaagaaaccacaccatcaccttctagagagtcccctctttctgcaccttaagatcatctctacaactaagatgctgtagttctatctttgcaatgtgtcataaattctcttctttttcccccttaagtagtatatatgttaggattaccctctggtaattgatacagatattggaaaaaagacaacattgatgttatttgtgctctttgtttggcctagaatgtttataaagtggtaacacaaccattctggaaatgtatcccatagaagctgatgtttaacatatgaaaaaaaaagtattgtctataaaatgtttcttcagtactttttaaatgctgtgtattgggtgtaaggtatttgtcatcttacattagtaaacccaataagccaagttgaaggtggattatagtaaatgtacaactgtgctcactaggcttcaagtaaaaagttttcctttcatctttgactgtaagatgtcaaagggaggcagcctgcttgaacaggaaacaatacacaaaaggttgccaactcgcatgagctacctccctcttttcataaagtatttttgacatatctgtcaacccacttgactgtgtgggtgcattgagaacacaaagtttcctagacacacaggagaagtagcttaaattcactaatattaatttaaaaagcagcatgaaccctctacttataaacaagggtttggtgtttttaaagtgtgtatacatacatacacatacacacatgcacatatgtcaaatataatttttttaaaaattgagtggcacatcaaagaaatgtgaaattaaaaagaattcttccaaaaagcagcttccattaaaatgggaattcagtatgcacatactgaatgcatatatgtagaaccatacagaatttaggtggataagggctagaaattttgagcaacaaaatttgtcacttgaccagattttatcttcaaaaactgtattctactccttctcctttgctgttgaggtaacttgcatattatatgtattctgtatactcagttcataaggttatttagcacaaagtatagcagcttcacctggagagctgcttttgctcagtaaattcaacttccatgttttatctttttttgttcaataaaaacatttaatgtc

SEQ ID NO: 2190 - DNA, 3234 bp, Homo sapiens
  source 1..3234: mol_type = genomic DNA
gcagagttctgaagcagtttatattcttcttacattttgccttctcctagctggaaagcagagggactggaatttttgaaacgggcttttcccataatggcattcttgatttgtgtggccagagcttgcacaggaggaaagcaggctgctgaatttagtcactgatctctattagcggtagcctaaggctatgctgaggtttatatcccatttgtattgttgcagctcaaaagaagattgttcagaggatgacaagtgtattctgagtagatctctcgtggaagaggaagaccaacacatgaaattgtcccttggaggcagcgaaatgggcctctcatcccatttgcagtcttccaaggcaggacctacacgcatctttaccagcaatacccacagttctgtggtgttacagggctttgaccagcttcgacttgaaggattgctttgtgatgtgaccctgatgccaggtgacacagatgatgctttccctgtgcatagagtcatgatggcatctgctagtgattacttcaaggctatgttcacaggtggaatgaaagaacaagatttaatgtgcattaaacttcatggtgtgagcaaagtcggtctaaggaaaattattgatttcatttatactgcaaagctttctcttaatatggacaaccttcaagacacgctggaagctgccagtttcctacagattctgccagttttggacttctgtaaagtgtttctcatatctggggtcactttagacaactgtgttgaagttggacggattgccaacacctacaatctaaccgaagtggataaatacgttaacagtttcgtcttgaagaattttcctgcattgctgagcacaggggagttcttgaaactcccttttgagcgtcttgccttcgtgctttccagtaatagccttaagcactgtactgaacttgagctctttaaggctacctgtcgttggcttcgcctggaagagcctcggatggactttgctgcaaaattaatgaagaacatacgatttccactgatgacaccacaggagctcattaattacgtgcaaacggtggatttcatgagaactgacaatacttgtgtgaatttgcttttggaagccagcaattaccaaatgatgccatatatgcagccagttatgcagtcagacaggactgccattaggtctgacaccactcacttggttacactaggaggagtgctgaggcagcagctggttgtcagtaaggaattgcgcatgtatgatgaaaaggcccatgagtggaaatcgttagcccccatggatgccccaaggtaccagcatggcatcgccgtcattggaaattttctctatgtggttggcggacagagtaattatgatacaaaaggaaaaacggcagttgatacagtcttcagatttgatcctcgatacaataaatggatgcaagttgcatctttaaatgaaaagcgcaccttcttccacctaagtgccctcaaaggatatctgtatgcagttggtgggcgaaatgcagcaggtgaactgcccacagtagaatgttacaatccaagaacaaatgaatggacctatgttgccaaaatgagtgagccccactatggccatgctggaactgtgtatggaggagtgatgtatatttcaggaggaattactcatgatactttccaaaaggagctcatgtgctttgaccctgatactgacaaatggatccagaaggcgccaatgaccactgtcagaggtctgcattgcatgtgtacagtgggagaaaggctctatgtcattggtggcaatcacttcagaggaacaagtgattatgatgatgtcctaagctgtgaatactattcacctatccttgaccagtggaccccaattgctgccatgttaagagggcagagtgatgttggggtcgctgtcttcgaaaataaaatctatgtggttggggggtattcttggaataatcgttgtatggtagagatagtgcagaaatatgatccagataaagatgaatggcataaggtttttgatctgccagaatcccttggtggcattcgtgcttgcacactcacagtttttccaccagaagaaaccacaccatcaccttctagagagtcccctctttctgcaccttaagatcatctctacaactaagatgctgtagttctatctttgcaatgtgtcataaattctcttctttttcccccttaagtagtatatatgttaggattaccctctggtaattgatacagatattggaaaaaagacaacattgatgttatttgtgctctttgtttggcctagaatgtttataaagtggtaacacaaccattctggaaatgtatcccatagaagctgatgtttaacatatgaaaaaaaaagtattgtctataaaatgtttcttcagtactttttaaatgctgtgtattgggtgtaaggtatttgtcatcttacattagtaaacccaataagccaagttgaaggtggattatagtaaatgtacaactgtgctcactaggcttcaagtaaaaagttttcctttcatctttgactgtaagatgtcaaagggaggcagcctgcttgaacaggaaacaatacacaaaaggttgccaactcgcatgagctacctccctcttttcataaagtatttttgacatatctgtcaacccacttgactgtgtgggtgcattgagaacacaaagtttcctagacacacaggagaagtagcttaaattcactaatattaatttaaaaagcagcatgaaccctctacttataaacaagggtttggtgtttttaaagtgtgtatacatacatacacatacacacatgcacatatgtcaaatataatttttttaaaaattgagtggcacatcaaagaaatgtgaaattaaaaagaattcttccaaaaagcagcttccattaaaatgggaattcagtatgcacatactgaatgcatatatgtagaaccatacagaatttaggtggataagggctagaaattttgagcaacaaaatttgtcacttgaccagattttatcttcaaaaactgtattctactccttctcctttgctgttgaggtaacttgcatattatatgtattctgtatactcagttcataaggttatttagcacaaagtatagcagcttcacctggagagctgcttttgctcagtaaattcaacttccatgttttatctttttttgttcaataaaaacatttaatgtc

SEQ ID NO: 2191 - DNA, 3256 bp, Homo sapiens
  source 1..3256: mol_type = genomic DNA
ggtcaggcggaggctctgccgctgcggccgcagtagctcagctcctattcctgggaagcctggaacggggacttttgaaaataactgcagcggcattcgggttagggtccgtgctctccgcctgcgccaggacagggtgaagtggtcggggcgagcagagggtgcgaaggtgcgggtgctggtgcctcgcagcaggagggagccccggctgcgccgcgcgactccctctttggccctcggagcgcagcacccggcggacaagcggcgggacgccaggacgcggcgagcaagatctctcgtggaagaggaagaccaacacatgaaattgtcccttggaggcagcgaaatgggcctctcatcccatttgcagtcttccaaggcaggacctacacgcatctttaccagcaatacccacagttctgtggtgttacagggctttgaccagcttcgacttgaaggattgctttgtgatgtgaccctgatgccaggtgacacagatgatgctttccctgtgcatagagtcatgatggcatctgctagtgattacttcaaggctatgttcacaggtggaatgaaagaacaagatttaatgtgcattaaacttcatggtgtgagcaaagtcggtctaaggaaaattattgatttcatttatactgcaaagctttctcttaatatggacaaccttcaagacacgctggaagctgccagtttcctacagattctgccagttttggacttctgtaaagtgtttctcatatctggggtcactttagacaactgtgttgaagttggacggattgccaacacctacaatctaaccgaagtggataaatacgttaacagtttcgtcttgaagaattttcctgcattgctgagcacaggggagttcttgaaactcccttttgagcgtcttgccttcgtgctttccagtaatagccttaagcactgtactgaacttgagctctttaaggctacctgtcgttggcttcgcctggaagagcctcggatggactttgctgcaaaattaatgaagaacatacgatttccactgatgacaccacaggagctcattaattacgtgcaaacggtggatttcatgagaactgacaatacttgtgtgaatttgcttttggaagccagcaattaccaaatgatgccatatatgcagccagttatgcagtcagacaggactgccattaggtctgacaccactcacttggttacactaggaggagtgctgaggcagcagctggttgtcagtaaggaattgcgcatgtatgatgaaaaggcccatgagtggaaatcgttagcccccatggatgccccaaggtaccagcatggcatcgccgtcattggaaattttctctatgtggttggcggacagagtaattatgatacaaaaggaaaaacggcagttgatacagtcttcagatttgatcctcgatacaataaatggatgcaagttgcatctttaaatgaaaagcgcaccttcttccacctaagtgccctcaaaggatatctgtatgcagttggtgggcgaaatgcagcaggtgaactgcccacagtagaatgttacaatccaagaacaaatgaatggacctatgttgccaaaatgagtgagccccactatggccatgctggaactgtgtatggaggagtgatgtatatttcaggaggaattactcatgatactttccaaaaggagctcatgtgctttgaccctgatactgacaaatggatccagaaggcgccaatgaccactgtcagaggtctgcattgcatgtgtacagtgggagaaaggctctatgtcattggtggcaatcacttcagaggaacaagtgattatgatgatgtcctaagctgtgaatactattcacctatccttgaccagtggaccccaattgctgccatgttaagagggcagagtgatgttggggtcgctgtcttcgaaaataaaatctatgtggttggggggtattcttggaataatcgttgtatggtagagatagtgcagaaatatgatccagataaagatgaatggcataaggtttttgatctgccagaatcccttggtggcattcgtgcttgcacactcacagtttttccaccagaagaaaccacaccatcaccttctagagagtcccctctttctgcaccttaagatcatctctacaactaagatgctgtagttctatctttgcaatgtgtcataaattctcttctttttcccccttaagtagtatatatgttaggattaccctctggtaattgatacagatattggaaaaaagacaacattgatgttatttgtgctctttgtttggcctagaatgtttataaagtggtaacacaaccattctggaaatgtatcccatagaagctgatgtttaacatatgaaaaaaaaagtattgtctataaaatgtttcttcagtactttttaaatgctgtgtattgggtgtaaggtatttgtcatcttacattagtaaacccaataagccaagttgaaggtggattatagtaaatgtacaactgtgctcactaggcttcaagtaaaaagttttcctttcatctttgactgtaagatgtcaaagggaggcagcctgcttgaacaggaaacaatacacaaaaggttgccaactcgcatgagctacctccctcttttcataaagtatttttgacatatctgtcaacccacttgactgtgtgggtgcattgagaacacaaagtttcctagacacacaggagaagtagcttaaattcactaatattaatttaaaaagcagcatgaaccctctacttataaacaagggtttggtgtttttaaagtgtgtatacatacatacacatacacacatgcacatatgtcaaatataatttttttaaaaattgagtggcacatcaaagaaatgtgaaattaaaaagaattcttccaaaaagcagcttccattaaaatgggaattcagtatgcacatactgaatgcatatatgtagaaccatacagaatttaggtggataagggctagaaattttgagcaacaaaatttgtcacttgaccagattttatcttcaaaaactgtattctactccttctcctttgctgttgaggtaacttgcatattatatgtattctgtatactcagttcataaggttatttagcacaaagtatagcagcttcacctggagagctgcttttgctcagtaaattcaacttccatgttttatctttttttgttcaataaaaacatttaatgtca

SEQ ID NO: 2192 - DNA, 3972 bp, Homo sapiens; identical to SEQ ID NO: 2188
  source 1..3972: mol_type = genomic DNA

SEQ ID NO: 2193 - DNA, 306 bp, Homo sapiens
  source 1..306: mol_type = genomic DNA
cattatccaacttttagaggtgatggatcatctgcatagaggggaattggttgctgcaatacttcgtaaccggagacggaggcaattgtcattaaaacaagccgatttcaaggatatattcaaaaaatcaacttcaggatctctcgtggaagaggaagaccaacacatgaaattgtcccttggaggcagcgaaatgggcctctcatcccatttgcagtcttccaaggcaggacctacacgcatctttaccagcaatacccacagttctgtggtgttacagggctttgaccagcttcgacttgaagg

SEQ ID NO: 2194 - DNA, 2353 bp, Homo sapiens
  source 1..2353: mol_type = genomic DNA
agagaatttgatgagagagggatccacaagaacatgacaaatgatgagagttcaaaccttaagagaaaaatgggcttattggagacggaggcaattgtcattaaaacaagccgatttcaaggatatattcaaaaaatcaacttcaggatctctcgtggaagaggaagaccaacacatgaaattgtcccttggaggcagcgaaatgggcctctcatcccatttgcagtcttccaaggcaggacctacacgcatctttaccagcaatacccacagttctgtggtgttacagggctttgaccagcttcgacttgaaggattgctttgtgatgtgaccctgatgccaggtgacacagatgatgctttccctgtgcatagagtcatgatggcatctgctagtgattacttcaaggctatgttcacaggtggaatgaaagaacaagatttaatgtgcattaaacttcatggtgtgagcaaagtcggtctaaggaaaattattgatttcatttatactgcaaagctttctcttaatatggacaaccttcaagacacgctggaagctgccagtttcctacagattctgccagttttggacttctgtaaagtgtttctcatatctggggtcactttagacaactgtgttgaagttggacggattgccaacacctacaatctaaccgaagtggataaatacgttaacagtttcgtcttgaagaattttcctgcattgctgagcacaggggagttcttgaaactcccttttgagcgtcttgccttcgtgctttccagtaatagccttaagcactgtactgaacttgagctctttaaggctacctgtcgttggcttcgcctggaagagcctcggatggactttgctgcaaaattaatgaagaacatacgatttccactgatgacaccacaggagctcattaattacgtgcaaacggtggatttcatgagaactgacaatacttgtgtgaatttgcttttggaagccagcaattaccaaatgatgccatatatgcagccagttatgcagtcagacaggactgccattaggtctgacaccactcacttggttacactaggaggagtgctgaggcagcagctggttgtcagtaaggaattgcgcatgtatgatgaaaaggcccatgagtggaaatcgttagcccccatggatgccccaaggtaccagcatggcatcgccgtcattggaaattttctctatgtggttggcggacagagtaattatgatacaaaaggaaaaacggcagttgatacagtcttcagatttgatcctcgatacaataaatggatgcaagttgcatctttaaatgaaaagcgcaccttcttccacctaagtgccctcaaaggatatctgtatgcagttggtgggcgaaatgcagcaggtgaactgcccacagtagaatgttacaatccaagaacaaatgaatggacctatgttgccaaaatgagtgagccccactatggccatgctggaactgtgtatggaggagtgatgtatatttcaggaggaattactcatgatactttccaaaaggagctcatgtgctttgaccctgatactgacaaatggatccagaaggcgccaatgaccactgtcagaggtctgcattgcatgtgtacagtgggagaaaggctctatgtcattggtggcaatcacttcagaggaacaagtgattatgatgatgtcctaagctgtgaatactattcacctatccttgaccagtggaccccaattgctgccatgttaagagggcagagtgatgttggggtcgctgtcttcgaaaataaaatctatgtggttggggggtattcttggaataatcgttgtatggtagagatagtgcagaaatatgatccagataaagatgaatggcataaggtttttgatctgccagaatcccttggtggcattcgtgcttgcacactcacagtttttccaccagaagaaaccacaccatcaccttctagagagtcccctctttctgcaccttaagatcatctctacaactaagatgctgtagttctatctttgcaatgtgtcataaattctcttctttttcccccttaagtagtatatatgttaggattaccctctggtaattgatacagatattggaaaaaagacaacattgatgttatttgtgctctttgtttggcctagaatgtttataaagtggtaacacaaccattctggaaatgtatcccatagaagctgatgtttaacatatgaaaaaaaaagtattgtctataaaatgtttcttcagtactttttaaatgctgtgtattgggtgtaaggtatttgtcatcttacattagtaaacccaataag

SEQ ID NO: 2195 - DNA, 3071 bp, Homo sapiens
  source 1..3071: mol_type = genomic DNA
atgatgagagttcaaaccttaagagaaaaatgggcttattggagacggaggcaattgtcattaaaacaagccgatttcaaggatatattcaaaaaatcaacttcaggatctctcgtggaagaggaagaccaacacatgaaattgtcccttggaggcagcgaaatgggcctctcatcccatttgcagtcttccaaggcaggacctacacgcatctttaccagcaatacccacagttctgtggtgttacagggctttgaccagcttcgacttgaaggattgctttgtgatgtgaccctgatgccaggtgacacagatgatgctttccctgtgcatagagtcatgatggcatctgctagtgattacttcaaggctatgttcacaggtggaatgaaagaacaagatttaatgtgcattaaacttcatggtgtgagcaaagtcggtctaaggaaaattattgatttcatttatactgcaaagctttctcttaatatggacaaccttcaagacacgctggaagctgccagtttcctacagattctgccagttttggacttctgtaaagtgtttctcatatctggggtcactttagacaactgtgttgaagttggacggattgccaacacctacaatctaaccgaagtggataaatacgttaacagtttcgtcttgaagaattttcctgcattgctgagcacaggggagttcttgaaactcccttttgagcgtcttgccttcgtgctttccagtaatagccttaagcactgtactgaacttgagctctttaaggctacctgtcgttggcttcgcctggaagagcctcggatggactttgctgcaaaattaatgaagaacatacgatttccactgatgacaccacaggagctcattaattacgtgcaaacggtggatttcatgagaactgacaatacttgtgtgaatttgcttttggaagccagcaattaccaaatgatgccatatatgcagccagttatgcagtcagacaggactgccattaggtctgacaccactcacttggttacactaggaggagtgctgaggcagcagctggttgtcagtaaggaattgcgcatgtatgatgaaaaggcccatgagtggaaatcgttagcccccatggatgccccaaggtaccagcatggcatcgccgtcattggaaattttctctatgtggttggcggacagagtaattatgatacaaaaggaaaaacggcagttgatacagtcttcagatttgatcctcgatacaataaatggatgcaagttgcatctttaaatgaaaagcgcaccttcttccacctaagtgccctcaaaggatatctgtatgcagttggtgggcgaaatgcagcaggtgaactgcccacagtagaatgttacaatccaagaacaaatgaatggacctatgttgccaaaatgagtgagccccactatggccatgctggaactgtgtatggaggagtgatgtatatttcaggaggaattactcatgatactttccaaaaggagctcatgtgctttgaccctgatactgacaaatggatccagaaggcgccaatgaccactgtcagaggtctgcattgcatgtgtacagtgggagaaaggctctatgtcattggtggcaatcacttcagaggaacaagtgattatgatgatgtcctaagctgtgaatactattcacctatccttgaccagtggaccccaattgctgccatgttaagagggcagagtgatgttggggtcgctgtcttcgaaaataaaatctatgtggttggggggtattcttggaataatcgttgtatggtagagatagtgcagaaatatgatccagataaagatgaatggcataaggtttttgatctgccagaatcccttggtggcattcgtgcttgcacactcacagtttttccaccagaagaaaccacaccatcaccttctagagagtcccctctttctgcaccttaagatcatctctacaactaagatgctgtagttctatctttgcaatgtgtcataaattctcttctttttcccccttaagtagtatatatgttaggattaccctctggtaattgatacagatattggaaaaaagacaacattgatgttatttgtgctctttgtttggcctagaatgtttataaagtggtaacacaaccattctggaaatgtatcccatagaagctgatgtttaacatatgaaaaaaaaagtattgtctataaaatgtttcttcagtactttttaaatgctgtgtattgggtgtaaggtatttgtcatcttacattagtaaacccaataagccaagttgaaggtggattatagtaaatgtacaactgtgctcactaggcttcaagtaaaaagttttcctttcatctttgactgtaagatgtcaaagggaggcagcctgcttgaacaggaaacaatacacaaaaggttgccaactcgcatgagctacctccctcttttcataaagtatttttgacatatctgtcaacccacttgactgtgtgggtgcattgagaacacaaagtttcctagacacacaggagaagtagcttaaattcactaatattaatttaaaaagcagcatgaaccctctacttataaacaagggtttggtgtttttaaagtgtgtatacatacatacacatacacacatgcacatatgtcaaatataatttttttaaaaattgagtggcacatcaaagaaatgtgaaattaaaaagaattcttccaaaaagcagcttccattaaaatgggaattcagtatgcacatactgaatgcatatatgtagaaccatacagaatttaggtggataagggctagaaattttgagcaacaaaatttgtcacttgaccagattttatcttcaaaaactgtattctactccttctcctttgctgttgaggtaacttgcatattatatgtattctgtatactcagttcataaggttatttagcacaaagtatagcagcttcacctggagagctgcttttgctcagtaaattcaacttccatgttttatctttttttgttcaataaaaacatttaatgtc

SEQ ID NO: 2196 - DNA, 3396 bp, Homo sapiens
  source 1..3396: mol_type = genomic DNA
actgccccctccctccccaactgggttcccgcccccctccctcagcagcccccccacaccctggtgaggtcaggcggaggctctgccgctgcggccgcagtagctcagctcctattcctgggaagcctggaacggggacttttgaaaataactgcagcggcattcgggttagggtccgtgctctccgcctgcgccaggacagggtgaagtggtcggggcgagcagagggtgcgaaggtgcgggtgctggtgcctcgcagcaggagggagccccggctgcgccgcgcgactccctctttggccctcggagcgcagcacccggcggacaagcggcgggacgccaggacgcggcgagcaaggtcattatccaacttttagaggtgatggatcatctgcatagaggggaattggttgctgcaatacttcgtaaccgatctctcgtggaagaggaagaccaacacatgaaattgtcccttggaggcagcgaaatgggcctctcatcccatttgcagtcttccaaggcaggacctacacgcatctttaccagcaatacccacagttctgtggtgttacagggctttgaccagcttcgacttgaaggattgctttgtgatgtgaccctgatgccaggtgacacagatgatgctttccctgtgcatagagtcatgatggcatctgctagtgattacttcaaggctatgttcacaggtggaatgaaagaacaagatttaatgtgcattaaacttcatggtgtgagcaaagtcggtctaaggaaaattattgatttcatttatactgcaaagctttctcttaatatggacaaccttcaagacacgctggaagctgccagtttcctacagattctgccagttttggacttctgtaaagtgtttctcatatctggggtcactttagacaactgtgttgaagttggacggattgccaacacctacaatctaaccgaagtggataaatacgttaacagtttcgtcttgaagaattttcctgcattgctgagcacaggggagttcttgaaactcccttttgagcgtcttgccttcgtgctttccagtaatagccttaagcactgtactgaacttgagctctttaaggctacctgtcgttggcttcgcctggaagagcctcggatggactttgctgcaaaattaatgaagaacatacgatttccactgatgacaccacaggagctcattaattacgtgcaaacggtggatttcatgagaactgacaatacttgtgtgaatttgcttttggaagccagcaattaccaaatgatgccatatatgcagccagttatgcagtcagacaggactgccattaggtctgacaccactcacttggttacactaggaggagtgctgaggcagcagctggttgtcagtaaggaattgcgcatgtatgatgaaaaggcccatgagtggaaatcgttagcccccatggatgccccaaggtaccagcatggcatcgccgtcattggaaattttctctatgtggttggcggacagagtaattatgatacaaaaggaaaaacggcagttgatacagtcttcagatttgatcctcgatacaataaatggatgcaagttgcatctttaaatgaaaagcgcaccttcttccacctaagtgccctcaaaggatatctgtatgcagttggtgggcgaaatgcagcaggtgaactgcccacagtagaatgttacaatccaagaacaaatgaatggacctatgttgccaaaatgagtgagccccactatggccatgctggaactgtgtatggaggagtgatgtatatttcaggaggaattactcatgatactttccaaaaggagctcatgtgctttgaccctgatactgacaaatggatccagaaggcgccaatgaccactgtcagaggtctgcattgcatgtgtacagtgggagaaaggctctatgtcattggtggcaatcacttcagaggaacaagtgattatgatgatgtcctaagctgtgaatactattcacctatccttgaccagtggaccccaattgctgccatgttaagagggcagagtgatgttggggtcgctgtcttcgaaaataaaatctatgtggttggggggtattcttggaataatcgttgtatggtagagatagtgcagaaatatgatccagataaagatgaatggcataaggtttttgatctgccagaatcccttggtggcattcgtgcttgcacactcacagtttttccaccagaagaaaccacaccatcaccttctagagagtcccctctttctgcaccttaagatcatctctacaactaagatgctgtagttctatctttgcaatgtgtcataaattctcttctttttcccccttaagtagtatatatgttaggattaccctctggtaattgatacagatattggaaaaaagacaacattgatgttatttgtgctctttgtttggcctagaatgtttataaagtggtaacacaaccattctggaaatgtatcccatagaagctgatgtttaacatatgaaaaaaaaagtattgtctataaaatgtttcttcagtactttttaaatgctgtgtattgggtgtaaggtatttgtcatcttacattagtaaacccaataagccaagttgaaggtggattatagtaaatgtacaactgtgctcactaggcttcaagtaaaaagttttcctttcatctttgactgtaagatgtcaaagggaggcagcctgcttgaacaggaaacaatacacaaaaggttgccaactcgcatgagctacctccctcttttcataaagtatttttgacatatctgtcaacccacttgactgtgtgggtgcattgagaacacaaagtttcctagacacacaggagaagtagcttaaattcactaatattaatttaaaaagcagcatgaaccctctacttataaacaagggtttggtgtttttaaagtgtgtatacatacatacacatacacacatgcacatatgtcaaatataatttttttaaaaattgagtggcacatcaaagaaatgtgaaattaaaaagaattcttccaaaaagcagcttccattaaaatgggaattcagtatgcacatactgaatgcatatatgtagaaccatacagaatttaggtggataagggctagaaattttgagcaacaaaatttgtcacttgaccagattttatcttcaaaaactgtattctactccttctcctttgctgttgaggtaacttgcatattatatgtattctgtatactcagttcataaggttatttagcacaaagtatagcagcttcacctggagagctgcttttgctcagtaaattcaacttccatgttttatctttttttgttcaataaaaacatttaatgtc

SEQ ID NO: 2197 - DNA, 3102 bp, Homo sapiens
  source 1..3102: mol_type = genomic DNA
tagaagagtgatatttgtgtgagagcctgggtcaggcttattttgagacgtgggccccactgaggtcattatccaacttttagaggtgatggatcatctgcatagaggggaattggttgctgcaatacttcgtaaccgatctctcgtggaagaggaagaccaacacatgaaattgtcccttggaggcagcgaaatgggcctctcatcccatttgcagtcttccaaggcaggacctacacgcatctttaccagcaatacccacagttctgtggtgttacagggctttgaccagcttcgacttgaaggattgctttgtgatgtgaccctgatgccaggtgacacagatgatgctttccctgtgcatagagtcatgatggcatctgctagtgattacttcaaggctatgttcacaggtggaatgaaagaacaagatttaatgtgcattaaacttcatggtgtgagcaaagtcggtctaaggaaaattattgatttcatttatactgcaaagctttctcttaatatggacaaccttcaagacacgctggaagctgccagtttcctacagattctgccagttttggacttctgtaaagtgtttctcatatctggggtcactttagacaactgtgttgaagttggacggattgccaacacctacaatctaaccgaagtggataaatacgttaacagtttcgtcttgaagaattttcctgcattgctgagcacaggggagttcttgaaactcccttttgagcgtcttgccttcgtgctttccagtaatagccttaagcactgtactgaacttgagctctttaaggctacctgtcgttggcttcgcctggaagagcctcggatggactttgctgcaaaattaatgaagaacatacgatttccactgatgacaccacaggagctcattaattacgtgcaaacggtggatttcatgagaactgacaatacttgtgtgaatttgcttttggaagccagcaattaccaaatgatgccatatatgcagccagttatgcagtcagacaggactgccattaggtctgacaccactcacttggttacactaggaggagtgctgaggcagcagctggttgtcagtaaggaattgcgcatgtatgatgaaaaggcccatgagtggaaatcgttagcccccatggatgccccaaggtaccagcatggcatcgccgtcattggaaattttctctatgtggttggcggacagagtaattatgatacaaaaggaaaaacggcagttgatacagtcttcagatttgatcctcgatacaataaatggatgcaagttgcatctttaaatgaaaagcgcaccttcttccacctaagtgccctcaaaggatatctgtatgcagttggtgggcgaaatgcagcaggtgaactgcccacagtagaatgttacaatccaagaacaaatgaatggacctatgttgccaaaatgagtgagccccactatggccatgctggaactgtgtatggaggagtgatgtatatttcaggaggaattactcatgatactttccaaaaggagctcatgtgctttgaccctgatactgacaaatggatccagaaggcgccaatgaccactgtcagaggtctgcattgcatgtgtacagtgggagaaaggctctatgtcattggtggcaatcacttcagaggaacaagtgattatgatgatgtcctaagctgtgaatactattcacctatccttgaccagtggaccccaattgctgccatgttaagagggcagagtgatgttggggtcgctgtcttcgaaaataaaatctatgtggttggggggtattcttggaataatcgttgtatggtagagatagtgcagaaatatgatccagataaagatgaatggcataaggtttttgatctgccagaatcccttggtggcattcgtgcttgcacactcacagtttttccaccagaagaaaccacaccatcaccttctagagagtcccctctttctgcaccttaagatcatctctacaactaagatgctgtagttctatctttgcaatgtgtcataaattctcttctttttcccccttaagtagtatatatgttaggattaccctctggtaattgatacagatattggaaaaaagacaacattgatgttatttgtgctctttgtttggcctagaatgtttataaagtggtaacacaaccattctggaaatgtatcccatagaagctgatgtttaacatatgaaaaaaaaagtattgtctataaaatgtttcttcagtactttttaaatgctgtgtattgggtgtaaggtatttgtcatcttacattagtaaacccaataagccaagttgaaggtggattatagtaaatgtacaactgtgctcactaggcttcaagtaaaaagttttcctttcatctttgactgtaagatgtcaaagggaggcagcctgcttgaacaggaaacaatacacaaaaggttgccaactcgcatgagctacctccctcttttcataaagtatttttgacatatctgtcaacccacttgactgtgtgggtgcattgagaacacaaagtttcctagacacacaggagaagtagcttaaattcactaatattaatttaaaaagcagcatgaaccctctacttataaacaagggtttggtgtttttaaagtgtgtatacatacatacacatacacacatgcacatatgtcaaatataatttttttaaaaattgagtggcacatcaaagaaatgtgaaattaaaaagaattcttccaaaaagcagcttccattaaaatgggaattcagtatgcacatactgaatgcatatatgtagaaccatacagaatttaggtggataagggctagaaattttgagcaacaaaatttgtcacttgaccagattttatcttcaaaaactgtattctactccttctcctttgctgttgaggtaacttgcatattatatgtattctgtatactcagttcataaggttatttagcacaaagtatagcagcttcacctggagagctgcttttgctcagtaaattcaacttccatgttttatctttttttgttcaataaaaacatttaatgtc

SEQ ID NO: 2198 - DNA, 3322 bp, Homo sapiens
  source 1..3322: mol_type = genomic DNA
actgccccctccctccccaactgggttcccgcccccctccctcagcagcccccccacaccctggtgaggtcaggcggaggctctgccgctgcggccgcagtagctcagctcctattcctgggaagcctggaacggggacttttgaaaataactgcagcggcattcgggttagggtccgtgctctccgcctgcgccaggacagggtgaagtggtcggggcgagcagagggtgcgaaggtgcgggtgctggtgcctcgcagcaggagggagccccggctgcgccgcgcgactccctctttggccctcggagcgcagcacccggcggacaagcggcgggacgccaggacgcggcgagcaagatctctcgtggaagaggaagaccaacacatgaaattgtcccttggaggcagcgaaatgggcctctcatcccatttgcagtcttccaaggcaggacctacacgcatctttaccagcaatacccacagttctgtggtgttacagggctttgaccagcttcgacttgaaggattgctttgtgatgtgaccctgatgccaggtgacacagatgatgctttccctgtgcatagagtcatgatggcatctgctagtgattacttcaaggctatgttcacaggtggaatgaaagaacaagatttaatgtgcattaaacttcatggtgtgagcaaagtcggtctaaggaaaattattgatttcatttatactgcaaagctttctcttaatatggacaaccttcaagacacgctggaagctgccagtttcctacagattctgccagttttggacttctgtaaagtgtttctcatatctggggtcactttagacaactgtgttgaagttggacggattgccaacacctacaatctaaccgaagtggataaatacgttaacagtttcgtcttgaagaattttcctgcattgctgagcacaggggagttcttgaaactcccttttgagcgtcttgccttcgtgctttccagtaatagccttaagcactgtactgaacttgagctctttaaggctacctgtcgttggcttcgcctggaagagcctcggatggactttgctgcaaaattaatgaagaacatacgatttccactgatgacaccacaggagctcattaattacgtgcaaacggtggatttcatgagaactgacaatacttgtgtgaatttgcttttggaagccagcaattaccaaatgatgccatatatgcagccagttatgcagtcagacaggactgccattaggtctgacaccactcacttggttacactaggaggagtgctgaggcagcagctggttgtcagtaaggaattgcgcatgtatgatgaaaaggcccatgagtggaaatcgttagcccccatggatgccccaaggtaccagcatggcatcgccgtcattggaaattttctctatgtggttggcggacagagtaattatgatacaaaaggaaaaacggcagttgatacagtcttcagatttgatcctcgatacaataaatggatgcaagttgcatctttaaatgaaaagcgcaccttcttccacctaagtgccctcaaaggatatctgtatgcagttggtgggcgaaatgcagcaggtgaactgcccacagtagaatgttacaatccaagaacaaatgaatggacctatgttgccaaaatgagtgagccccactatggccatgctggaactgtgtatggaggagtgatgtatatttcaggaggaattactcatgatactttccaaaaggagctcatgtgctttgaccctgatactgacaaatggatccagaaggcgccaatgaccactgtcagaggtctgcattgcatgtgtacagtgggagaaaggctctatgtcattggtggcaatcacttcagaggaacaagtgattatgatgatgtcctaagctgtgaatactattcacctatccttgaccagtggaccccaattgctgccatgttaagagggcagagtgatgttggggtcgctgtcttcgaaaataaaatctatgtggttggggggtattcttggaataatcgttgtatggtagagatagtgcagaaatatgatccagataaagatgaatggcataaggtttttgatctgccagaatcccttggtggcattcgtgcttgcacactcacagtttttccaccagaagaaaccacaccatcaccttctagagagtcccctctttctgcaccttaagatcatctctacaactaagatgctgtagttctatctttgcaatgtgtcataaattctcttctttttcccccttaagtagtatatatgttaggattaccctctggtaattgatacagatattggaaaaaagacaacattgatgttatttgtgctctttgtttggcctagaatgtttataaagtggtaacacaaccattctggaaatgtatcccatagaagctgatgtttaacatatgaaaaaaaaagtattgtctataaaatgtttcttcagtactttttaaatgctgtgtattgggtgtaaggtatttgtcatcttacattagtaaacccaataagccaagttgaaggtggattatagtaaatgtacaactgtgctcactaggcttcaagtaaaaagttttcctttcatctttgactgtaagatgtcaaagggaggcagcctgcttgaacaggaaacaatacacaaaaggttgccaactcgcatgagctacctccctcttttcataaagtatttttgacatatctgtcaacccacttgactgtgtgggtgcattgagaacacaaagtttcctagacacacaggagaagtagcttaaattcactaatattaatttaaaaagcagcatgaaccctctacttataaacaagggtttggtgtttttaaagtgtgtatacatacatacacatacacacatgcacatatgtcaaatataatttttttaaaaattgagtggcacatcaaagaaatgtgaaattaaaaagaattcttccaaaaagcagcttccattaaaatgggaattcagtatgcacatactgaatgcatatatgtagaaccatacagaatttaggtggataagggctagaaattttgagcaacaaaatttgtcacttgaccagattttatcttcaaaaactgtattctactccttctcctttgctgttgaggtaacttgcatattatatgtattctgtatactcagttcataaggttatttagcacaaagtatagcagcttcacctggagagctgcttttgctcagtaaattcaacttccatgttttatctttttttgttcaataaaaacatttaatgtc

SEQ ID NO: 2199 - DNA, 1662 bp, Homo sapiens
  source 1..1662: mol_type = genomic DNA
aaagcactcgcatccctttccaatttacccgagcaccttctcttcactcagccaactgctcgctcgctcacctccctcctctgcaccatgaccacctgcagccgccagttcacctcctccagctccatgaagggctcctgcggcatcgggggcggcatcgggggcggctccagccgcatctcctccgtcctggccggagggtcctgccgcgcccccagcacctacgggggcggcctgtctgtctcatcctcccgcttctcctctgggggagcctgcgggctggggggcggctatggcggtggcttcagcagcagcagcagcagctttggtagtggctttgggggaggatatggtggtggccttggtgctggcttgggtggtggctttggtggtggctttgctggtggtgatgggcttctggtgggcagtgagaaggtgaccatgcagaacctcaatgaccgcctggcctcctacctggacaaggtgcgtgctctggaggaggccaacgccgacctggaagtgaagatccgtgactggtaccagaggcagcggcctgctgagatcaaagactacagtccctacttcaagaccattgaggacctgaggaacaagattctcacagccacagtggacaatgccaatgtccttctgcagattgacaatgcccgtctggccgcggatgacttccgcaccaagtatgagacagagttgaacctgcgcatgagtgtggaagccgacatcaatggcctgcgcagggtgctggacgaactgaccctggccagagctgacctggagatgcagattgagagcctgaaggaggagctggcctacctgaagaagaaccacgaggaggagatgaatgccctgagaggccaggtgggtggagatgtcaatgtggagatggacgctgcacctggcgtggacctgagccgcattctgaacgagatgcgtgaccagtatgagaagatggcagagaagaaccgcaaggatgccgaggaatggttcttcaccaagacagaggagctgaaccgcgaggtggccaccaacagcgagctggtgcagagcggcaagagcgagatctcggagctccggcgcaccatgcagaacctggagattgagctgcagtcccagctcagcatgaaagcatccctggagaacagcctggaggagaccaaaggtcgctactgcatgcagctggcccagatccaggagatgattggcagcgtggaggagcagctggcccagctccgctgcgagatggagcagcagaaccaggagtacaagatcctgctggacgtgaagacgcggctggagcaggagatcgccacctaccgccgcctgctggagggcgaggacgcccacctctcctcctcccagttctcctctggatcgcagtcatccagagatgtgacctcctccagccgccaaatccgcaccaaggtcatggatgtgcacgatggcaaggtggtgtccacccacgagcaggtccttcgcaccaagaactgaggctgcccagccccgctcaggcctaggaggccccccgtgtggacacagatcccactggaagatcccctctcctgcccaagcacttcacagctggaccctgcttcaccctcaccccctcctggcaatcaatacagcttcattatctgagttgcataa

SEQ ID NO: 2200 - DNA, 1562 bp, Homo sapiens
  source 1..1562: mol_type = genomic DNA
cggagggcgcgggggtggggcccggggcggagcggcccggggcggagggcgcgggctccgagccgtccacctgtggctccggcttccgaagcggctccggggcgggggcggggcctcactctgcgatataactcgggtcgcgcggctcgcgcaggccgccaccgtcgtccgcaaagcctgagtcctgtcctttctctctccccggacagcatgagcttcaccactcgctccaccttctccaccaactaccggtccctgggctctgtccaggcgcccagctacggcgcccggccggtcagcagcgcggccagcgtctatgcaggcgctgggggctctggttcccggatctccgtgtcccgctccaccagcttcaggggcggcatggggtccgggggcctggccaccgggatagccgggggtctggcaggaatgggaggcatccagaacgagaaggagaccatgcaaagcctgaacgaccgcctggcctcttacctggacagagtgaggagcctggagaccgagaaccggaggctggagagcaaaatccgggagcacttggagaagaagggaccccaggtcagagactggagccattacttcaagatcatcgaggacctgagggctcagatcttcgcaaatactgtggacaatgcccgcatcgttctgcagattgacaatgcccgtcttgctgctgatgactttagagtcaagtatgagacagagctggccatgcgccagtctgtggagaacgacatccatgggctccgcaaggtcattgatgacaccaatatcacacgactgcagctggagacagagatcgaggctctcaaggaggagctgctcttcatgaagaagaaccacgaagaggaagtaaaaggcctacaagcccagattgccagctctgggttgaccgtggaggtagatgcccccaaatctcaggacctcgccaagatcatggcagacatccgggcccaatatgacgagctggctcggaagaaccgagaggagctagacaagtactggtctcagcagattgaggagagcaccacagtggtcaccacacagtctgctgaggttggagctgctgagacgacgctcacagagctgagacgtacagtccagtccttggagatcgacctggactccatgagaaatctgaaggccagcttggagaacagcctgagggaggtggaggcccgctacgccctacagatggagcagctcaacgggatcctgctgcaccttgagtcagagctggcacagacccgggcagagggacagcgccaggcccaggagtatgaggccctgctgaacatcaaggtcaagctggaggctgagatcgccacctaccgccgcctgctggaagatggcgaggactttaatcttggtgatgccttggacagcagcaactccatgcaaaccatccaaaagaccaccacccgccggatagtggatggcaaagtggtgtctgagaccaatgacaccaaagttctgaggcattaagccagcagaagcagggtaccctttggggagcaggaggccaataaaaagttcagagttca

SEQ ID NO: 2201 - DNA, 1420 bp, Homo sapiens
  source 1..1420: mol_type = genomic DNA
gcagcctcgagggccaacaacacctgctgtccgtgtccatgcccggttggccaccccgtttctgggggcatgagcttcaccactcgctccaccttctccaccaactaccggtccctgggctctgtccaggcgcccagctacggcgcccggccggtcagcagcgcggccagcgtctatgcaggcgctgggggctctggttcccggatctccgtgtcccgctccaccagcttcaggggcggcatggggtccgggggcctggccaccgggatagccgggggtctggcaggaatgggaggcatccagaacgagaaggagaccatgcaaagcctgaacgaccgcctggcctcttacctggacagagtgaggagcctggagaccgagaaccggaggctggagagcaaaatccgggagcacttggagaagaagggaccccaggtcagagactggagccattacttcaagatcatcgaggacctgagggctcagatcttcgcaaatactgtggacaatgcccgcatcgttctgcagattgacaatgcccgtcttgctgctgatgactttagagtcaagtatgagacagagctggccatgcgccagtctgtggagaacgacatccatgggctccgcaaggtcattgatgacaccaatatcacacgactgcagctggagacagagatcgaggctctcaaggaggagctgctcttcatgaagaagaaccacgaagaggaagtaaaaggcctacaagcccagattgccagctctgggttgaccgtggaggtagatgcccccaaatctcaggacctcgccaagatcatggcagacatccgggcccaatatgacgagctggctcggaagaaccgagaggagctagacaagtactggtctcagcagattgaggagagcaccacagtggtcaccacacagtctgctgaggttggagctgctgagacgacgctcacagagctgagacgtacagtccagtccttggagatcgacctggactccatgagaaatctgaaggccagcttggagaacagcctgagggaggtggaggcccgctacgccctacagatggagcagctcaacgggatcctgctgcaccttgagtcagagctggcacagacccgggcagagggacagcgccaggcccaggagtatgaggccctgctgaacatcaaggtcaagctggaggctgagatcgccacctaccgccgcctgctggaagatggcgaggactttaatcttggtgatgccttggacagcagcaactccatgcaaaccatccaaaagaccaccacccgccggatagtggatggcaaagtggtgtctgagaccaatgacaccaaagttctgaggcattaagccagcagaagcagggtaccctttggggagcaggaggccaataaaaagttcagagttc

SEQ ID NO: 2202 - DNA, 1390 bp, Homo sapiens
  source 1..1390: mol_type = genomic DNA
gctcctcccgcgaatcgcagcttctgagaccagggttgctccgtccgtgctccgcctcgccatgacttcctacagctatcgccagtcgtcggccacgtcgtccttcggaggcctgggcggcggctccgtgcgttttgggccgggggtcgcctttcgcgcgcccagcattcacgggggctccggcggccgcggcgtatccgtgtcctccgcccgctttgtgtcctcgtcctcctcgggggcctacggcggcggctacggcggcgtcctgaccgcgtccgacgggctgctggcgggcaacgagaagctaaccatgcagaacctcaacgaccgcctggcctcctacctggacaaggtgcgcgccctggaggcggccaacggcgagctagaggtgaagatccgcgactggtaccagaagcaggggcctgggccctcccgcgactacagccactactacacgaccatccaggacctgcgggacaagattcttggtgccaccattgagaactccaggattgtcctgcagatcgacaatgcccgtctggctgcagatgacttccgaaccaagtttgagacggaacaggctctgcgcatgagcgtggaggccgacatcaacggcctgcgcagggtgctggatgagctgaccctggccaggaccgacctggagatgcagatcgaaggcctgaaggaagagctggcctacctgaagaagaaccatgaggaggaaatcagtacgctgaggggccaagtgggaggccaggtcagtgtggaggtggattccgctccgggcaccgatctcgccaagatcctgagtgacatgcgaagccaatatgaggtcatggccgagcagaaccggaaggatgctgaagcctggttcaccagccggactgaagaattgaaccgggaggtcgctggccacacggagcagctccagatgagcaggtccgaggttactgacctgcggcgcacccttcagggtcttgagattgagctgcagtcacagctgagcatgaaagctgccttggaagacacactggcagaaacggaggcgcgctttggagcccagctggcgcatatccaggcgctgatcagcggtattgaagcccagctgggcgatgtgcgagctgatagtgagcggcagaatcaggagtaccagcggctcatggacatcaagtcgcggctggagcaggagattgccacctaccgcagcctgctcgagggacaggaagatcactacaacaatttgtctgcctccaaggtcctctgaggcagcaggctctggggcttctgctgtcctttggagggtgtcttctgggtagagggatgggaaggaagggacccttacccccggctcttctcctgacctgccaataaaaatttatggtccaaggga

SEQ ID NO: 2203 - DNA, 641 bp, Homo sapiens
  source 1..641: mol_type = genomic DNA
gcgaatcgcagcttctgagaccagggttgctccgtccgtgctccgcctcgccatgacttcctacagctatcgccagtcgtcggccacgtcgtccttcggaggcctgggcggcggctccgtgcgttttgggccgggggtcgcctttcgcgcgcccagcattcacgggggctccggcggccgcggcgtatccgtgtcctccgcccgctttgtgtcctcgtcctcctcgggggcctacggcggcggctacggcggcgtcctgaccgcgtccgacgggctgctggcgggcaacgagaagctaaccatgcagaacctcaacgaccgcctggcctcctacctggacaaggtgcgcgccctggaggcggccaacggcgagctagagattcttggtgccaccattgagaactccaggattgtcctgcagatcgacaatgcccgtctggctgcagatgacttccgaaccaagtttgagacggaacaggctctgcgcatgagcgtggaggccgacatcaacggcctgcgcagggtgctggatgagctgaccctggccaggaccgacctggagatgcagatcgaaggcctgaaggaagagctggcctacctgaagaagaaccatgaggaggaaatcagtacgctgaggggcc

SEQ ID NO: 2204 - DNA, 2531 bp, Homo sapiens
  source 1..2531: mol_type = genomic DNA
gcatcctttttgggctgctcacagcccccagcctctatggtgaagacatacttgctagcagcgtcaccaacttgctgccaagagatcagtgctgcaaggcaaggttatttctaactgagcagagcctgccaggaagaaagcgtttgcaccccacaccactgtgcaggtgtgaccggtgagctcacagctgccccccaggcatgcccagcccacttaatcattcacagctcgacagctctctcgcccagcccagttctggaagggataaaaagggggcatcaccgttcctgggtaacagagccaccttctgcgtcctgctgagctctgttctctccagcacctcccaacccactagtgcctggttctcttgctccaccaggaacaagccaccatgtctcgccagtcaagtgtgtccttccggagcgggggcagtcgtagcttcagcaccgcctctgccatcaccccgtctgtctcccgcaccagcttcacctccgtgtcccggtccgggggtggcggtggtggtggcttcggcagggtcagccttgcgggtgcttgtggagtgggtggctatggcagccggagcctctacaacctggggggctccaagaggatatccatcagcactagtggtggcagcttcaggaaccggtttggtgctggtgctggaggcggctatggctttggaggtggtgccggtagtggatttggtttcggcggtggagctggtggtggctttgggctcggtggcggagctggctttggaggtggcttcggtggccctggctttcctgtctgccctcctggaggtatccaagaggtcactgtcaaccagagtctcctgactcccctcaacctgcaaatcgaccccagcatccagagggtgaggaccgaggagcgcgagcagatcaagaccctcaacaataagtttgcctccttcatcgacaaggtgcggttcctggagcagcagaacaaggttctggacaccaagtggaccctgctgcaggagcagggcaccaagactgtgaggcagaacctggagccgttgttcgagcagtacatcaacaacctcaggaggcagctggacagcatcgtgggggaacggggccgcctggactcagagctgagaaacatgcaggacctggtggaagacttcaagaacaagtatgaggatgaaatcaacaagcgtaccactgctgagaatgagtttgtgatgctgaagaaggatgtagatgctgcctacatgaacaaggtggagctggaggccaaggttgatgcactgatggatgagattaacttcatgaagatgttctttgatgcggagctgtcccagatgcagacgcatgtctctgacacctcagtggtcctctccatggacaacaaccgcaacctggacctggatagcatcatcgctgaggtcaaggcccagtatgaggagattgccaaccgcagccggacagaagccgagtcctggtatcagaccaagtatgaggagctgcagcagacagctggccggcatggcgatgacctccgcaacaccaagcatgagatctctgagatgaaccggatgatccagaggctgagagccgagattgacaatgtcaagaaacagtgcgccaatctgcagaacgccattgcggatgccgagcagcgtggggagctggccctcaaggatgccaggaacaagctggccgagctggaggaggccctgcagaaggccaagcaggacatggcccggctgctgcgtgagtaccaggagctcatgaacaccaagctggccctggacgtggagatcgccacttaccgcaagctgctggagggcgaggaatgcagactcagtggagaaggagttggaccagtcaacatctctgttgtcacaagcagtgtttcctctggatatggcagtggcagtggctatggcggtggcctcggtggaggtcttggcggcggcctcggtggaggtcttgccggaggtagcagtggaagctactactccagcagcagtgggggtgtcggcctaggtggtgggctcagtgtggggggctctggcttcagtgcaagcagtggccgagggctgggggtgggctttggcagtggcgggggtagcagctccagcgtcaaatttgtctccaccacctcctcctcccggaagagcttcaagagctaagaacctgctgcaagtcactgccttccaagtgcagcaacccagcccatggagattgcctcttctaggcagttgctcaagccatgttttatccttttctggagagtagtctagaccaagccaattgcagaaccacattctttggttcccaggagagccccattcccagcccctggtctcccgtgccgcagttctatattctgcttcaaatcagccttcaggtttcccacagcatggcccctgctgacacgagaacccaaagttttcccaaatctaaatcatcaaaacagaatccccaccccaatcccaaattttgttttggttctaactacctccagaatgtgttcaataaaatgcttttataatataa

SEQ ID NO: 2205 - DNA, 2131 bp, Homo sapiens
  source 1..2131: mol_type = genomic DNA
aacagagccaccttctgcgtcctgctgagctctgttctctccagcacctcccaacccactagtgcctggttctcttgctccaccaggaacaagccaccatgtctcgccagtcaagtgtgtccttccggagcgggggcagtcgtagcttcagcaccgcctctgccatcaccccgtctgtctcccgcaccagcttcacctccgtgtcccggtccgggggtggcggtggtggtggcttcggcagggtcagccttgcgggtgcttgtggagtgggtggctatggctttggaggtggtgccggtagtggatttggtttcggcggtggagctggtggtggctttgggctcggtggcggagctggctttggaggtggcttcggtggccctggctttcctgtctgccctcctggaggtatccaagaggtcactgtcaaccagagtctcctgactcccctcaacctgcaaatcgaccccagcatccagagggtgaggaccgaggagcgcgagcagatcaagaccctcaacaataagtttgcctccttcatcgacaaggtgcggttcctggagcagcagaacaaggttctggacaccaagtggaccctgctgcaggagcagggcaccaagactgtgaggcagaacctggagccgttgttcgagcagtacatcaacaacctcaggaggcagctggacagcatcgtgggggaacggggccgcctggactcagagctgagaaacatgcaggacctggtggaagacttcaagaacaagtatgaggatgaaatcaacaagcgtaccactgctgagaatgagtttgtgatgctgaagaaggatgtagatgctgcctacatgaacaaggtggagctggaggccaaggttgatgcactgatggatgagattaacttcatgaagatgttctttgatgcggagctgtcccagatgcagacgcatgtctctgacacctcagtggtcctctccatggacaacaaccgcaacctggacctggatagcatcatcgctgaggtcaaggcccagtatgaggagattgccaaccgcagccggacagaagccgagtcctggtatcagaccaagtatgaggagctgcagcagacagctggccggcatggcgatgacctccgcaacaccaagcatgagatctctgagatgaaccggatgatccagaggctgagagccgagattgacaatgtcaagaaacagtgcgccaatctgcagaacgccattgcggatgccgagcagcgtggggagctggccctcaaggatgccaggaacaagctggccgagctggaggaggccctgcagaaggccaagcaggacatggcccggctgctgcgtgagtaccaggagctcatgaacaccaagctggccctggacgtggagatcgccacttaccgcaagctgctggagggcgaggaatgcagactcagtggagaaggagttggaccagtcaacatctctgttgtcacaagcagtgtttcctctggatatggcagtggcagtggctatggcggtggcctcggtggaggtcttggcggcggcctcggtggaggtcttgccggaggtagcagtggaagctactactccagcagcagtgggggtgtcggcctaggtggtgggctcagtgtggggggctctggcttcagtgcaagcagtggccgagggctgggggtgggctttggcagtggcgggggtagcagctccagcgtcaaatttgtctccaccacctcctcctcccggaagagcttcaagagctaagaacctgctgcaagtcactgccttccaagtgcagcaacccagcccatggagattgcctcttctaggcagttgctcaagccatgttttatccttttctggagagtagtctagaccaagccaattgcagaaccacattctttggttcccaggagagccccattcccagcccctggtctcccgtgccgcagttctatattctgcttcaaatcagccttcaggtttcccacagcatggcccctgctgacacgagaacccaaagttttcccaaatctaaatcatcaaaacagaatccccaccccaatcccaaattttgttttggttctaactacctccagaatgtgttcaataaaatgcttttataatat

SEQ ID NO: 2206 - DNA, 542 bp, Homo sapiens
  source 1..542: mol_type = genomic DNA
actgtgcaggtgtgaccggtgagctcacagctgccccccaggcatgcccagcccacttaatcattcacagctcgacagctctctcgcccagcccagttctggaagggataaaaagggggcatcaccgttcctgggaacaagccaccatgtctcgccagtcaagtgtgtccttccggagcgggggcagtcgtagcttcagcaccgcctctgccatcaccccgtctgtctcccgcaccagcttcacctccgtgtcccggtccgggggtggcggtggtggtggcttcggcagggtcagccttgcgggtgcttgtggagtgggtggctatggcagccggagcctctacaacctggggggctccaagaggatatccatcagcactagtggtggcagcttcaggaaccggtttggtgctggtgctggaggcggctatggctttggaggtggtgccggtagtggatttggtttcggcggtggagctggtggtggctttgggctcggtggcggagctggctttggaggtggcttcggtggccctggcttt

SEQ ID NO: 2207 - DNA, 1754 bp, Homo sapiens
  source 1..1754: mol_type = genomic DNA
agagggcggagggcggccccaggaggggcctggcagcagagaaaggtggcccgcggcagccccgcccctacctgtggaagcccagccgcccgctcccgcggataaaaggcgcggagtgtccccgaggtcagcgagtgcgcgctcctcctcgcccgccgctaggtccatcccggcccagccaccatgtccatccacttcagctccccggtattcacctcgcgctcagccgccttctcgggccgcggcgcccaggtgcgcctgagctccgctcgccccggcggccttggcagcagcagcctctacggcctcggcgcctcacggccgcgcgtggccgtgcgctctgcctatgggggcccggtgggcgccggcatccgcgaggtcaccattaaccagagcctgctggccccgctgcggctggacgccgacccctccctccagcgggtgcgccaggaggagagcgagcagatcaagaccctcaacaacaagtttgcctccttcatcgacaaggtgcggtttctggagcagcagaacaagctgctggagaccaagtggacgctgctgcaggagcagaagtcggccaagagcagccgcctcccagacatctttgaggcccagattgctggccttcggggtcagcttgaggcactgcaggtggatgggggccgcctggaggcggagctgcggagcatgcaggatgtggtggaggacttcaagaataagtacgaagatgaaattaaccaccgcacagctgctgagaatgagtttgtggtgctgaagaaggatgtggatgctgcctacatgagcaaggtggagctggaggccaaggtggatgccctgaatgatgagatcaacttcctcaggaccctcaatgagacggagttgacagagctgcagtcccagatctccgacacatctgtggtgctgtccatggacaacagtcgctccctggacctggacggcatcatcgctgaggtcaaggcgcagtatgaggagatggccaaatgcagccgggctgaggctgaagcctggtaccagaccaagtttgagaccctccaggcccaggctgggaagcatggggacgacctccggaatacccggaatgagatttcagagatgaaccgggccatccagaggctgcaggctgagatcgacaacatcaagaaccagcgtgccaagttggaggccgccattgccgaggctgaggagcgtggggagctggcgctcaaggatgctcgtgccaagcaggaggagctggaagccgccctgcagcggggcaagcaggatatggcacggcagctgcgtgagtaccaggaactcatgagcgtgaagctggccctggacatcgagatcgccacctaccgcaagctgctggagggcgaggagagccggttggctggagatggagtgggagccgtgaatatctctgtgatgaattccactggtggcagtagcagtggcggtggcattgggctgaccctcgggggaaccatgggcagcaatgccctgagcttctccagcagtgcgggtcctgggctcctgaaggcttattccatccggaccgcatccgccagtcgcaggagtgcccgcgactgagccgcctcccaccactccactcctccagccaccacccacaatcacaagaagattcccacccctgcctcccatgcctggtcccaagacagtgagacagtctggaaagtgatgtcagaatagcttccaataaagcagcctcattctgaggcctgagtgatcca

SEQ ID NO: 2208 - DNA, 1550 bp, Homo sapiens
  source 1..1550: mol_type = genomic DNA
agcgagtgcgcgctcctcctcgcccgccgctaggtccatcccggcccagccaccatgtccatccacttcagctccccggtattcacctcgcgctcagccgccttctcgggccgcggcgcccaggtgcgcctgagctccgctcgccccggcggccttggcagcagcagcctctacggcctcggcgcctcacggccgcgcgtggccccgctgcggctggacgccgacccctccctccagcgggtgcgccaggaggagagcgagcagatcaagaccctcaacaacaagtttgcctccttcatcgacaaggtgcggtttctggagcagcagaacaagctgctggagaccaagtggacgctgctgcaggagcagaagtcggccaagagcagccgcctcccagacatctttgaggcccagattgctggccttcggggtcagcttgaggcactgcaggtggatgggggccgcctggaggcggagctgcggagcatgcaggatgtggtggaggacttcaagaataggtacgaagatgaaattaaccaccgcacagctgctgagaatgagtttgtggtgctgaagaaggatgtggatgctgcctacatgagcaaggtggagctggaggccaaggtggatgccctgaatgatgagatcaacttcctcaggaccctcaatgagacggagttgacagagctgcagtcccagatctccgacacatctgtggtgctgtccatggacaacagtcgctccctggacctggacggcatcatcgctgaggtcaaggcgcagtatgaggagatggccaaatgcagccgggctgaggctgaagcctggtaccagaccaagtttgagaccctccaggcccaggctgggaagcatggggacgacctccggaatacccggaatgagatttcagagatgaaccgggccatccagaggctgcaggctgagatcgacaacatcaagaaccagcgtgccaagttggaggccgccattgccgaggctgaggagcgtggggagctggcgctcaaggatgctcgtgccaagcaggaggagctggaagccgccctgcagcggggcaagcaggatatggcacggcagctgcgtgagtaccaggaactcatgagcgtgaagctggccctggacatcgagatcgccacctaccgcaagctgctggagggcgaggagagccggttggctggagatggagtgggagccgtgaatatctctgtgatgaattccactggtggcagtagcagtggcggtggcattgggctgaccctcgggggaaccatgggcagcaatgccctgagcttctccagcagtgcgggtcctgggctcctgaaggcttattccatccggaccgcatccgccagtcgcaggagtgcccgcgactgagccgcctcccaccactccactcctccagccaccacccacaatcacaagaagattcccacccctgcctcccatgcctggtcccaagacagtgagacagtctggaaagtgatgtcagaatagcttccaataaagcagcctcattctgaggcctgagtgat

SEQ ID NO: 2209 - DNA, 1336 bp, Homo sapiens
  source 1..1336: mol_type = genomic DNA
cagccccgcccctacctgtggaagcccagccgcccgctcccgcggataaaaggcgcggagtgtccccgaggtcagcgagtgcgcgctcctcctcgcccgccgctaggtccatcccggcccagccaccatgtccatccacttcagctccccggtattcacctcgcgctcagccgccttctcgggccgcggcgcccaggtgcgcctgagctccgctcgccccggcggccttggcagcagcagcctctacggcctcggcgcctcacggccgcgcgtggccgtgcgctctgcctatgggggcccggtgggcgccggcatccgcgaggtcaccattaaccagagcctgctggccccgctgcggctggacgccgacccctccctccagcgggtgcgccaggaggagagcgagcagatcaagaccctcaacaacaagtttgcctccttcatcgacaaggtgcggtttctggagcagcagaacaagctgctggagaccaagtggacgctgctgcaggagcagaagtcggccaagagcagccgcctcccagacatctttgaggcccagattgctggccttcggggtcagcttgaggcactgcaggtggatgggggccgcctggaggcggagctgcggagcatgcaggatgtggtggaggacttcaagaataagtacgaagatgaaattaaccaccgcacagctgctgagaatgagtttgtggtgctgaagaaggatgtggatgctgcctacatgagcaaggtggagctggaggccaaggtggatgccctgaatgatgagatcaacttcctcaggaccctcaatgagacggagatccatgttctccaatcccacatctcagacacctctgtggttgtcaagctggacaacagccaggacctgaacatggactgcatcattgccgagatcaaggcacagtatgacgacattgtcacctgcagctgggccaaggctgagtcttggtaccatggctgcctggagatgaaggccacggtgatctggcacggggagactgtgggctgcaccaaggaggagatcaaggagctgacccacatgatccagaggctgatggccaaggtggagaatgccaagtgccagaactccaagctggaggtggaggtgacccagtctgagcagcagggtgaggtggcccttagcgataaccgctgcaagctggttgagctggagggcaccatgcagaaggccaggcagtaccaggaggtgatgaactccaagctgggcctcaatgtgaaggctgcctcttcttgccaccttctagatggtgaggagcagaggctgtgtgatggcatcagtgctgtgaatatc

SEQ ID NO: 2210 - DNA, 1777 bp, Homo sapiens
  source 1..1777: mol_type = genomic DNA
ctgagagctctcctcaccaagaagcagcttctccgctccttctaggatctccgcctggttcggcccgcctgcctccactcctgcctctaccatgtccatcagggtgacccagaagtcctacaaggtgtccacctctggcccccgggccttcagcagccgctcctacacgagtgggcccggttcccgcatcagctcctcgagcttctcccgagtgggcagcagcaactttcgcggtggcctgggcggcggctatggtggggccagcggcatgggaggcatcaccgcagttacggtcaaccagagcctgctgagcccccttgtcctggaggtggaccccaacatccaggccgtgcgcacccaggagaaggagcagatcaagaccctcaacaacaagtttgcctccttcatagacaaggtacggttcctggagcagcagaacaagatgctggagaccaagtggagcctcctgcagcagcagaagacggctcgaagcaacatggacaacatgttcgagagctacatcaacaaccttaggcggcagctggagactctgggccaggagaagctgaagctggaggcggagcttggcaacatgcaggggctggtggaggacttcaagaacaagtatgaggatgagatcaataagcgtacagagatggagaacgaatttgtcctcatcaagaaggatgtggatgaagcttacatgaacaaggtagagctggagtctcgcctggaagggctgaccgacgagatcaacttcctcaggcagctatatgaagaggagatccgggagctgcagtcccagatctcggacacatctgtggtgctgtccatggacaacagccgctccctggacatggacagcatcattgctgaggtcaaggcacagtacgaggatattgccaaccgcagccgggctgaggctgagagcatgtaccagatcaagtatgaggagctgcagagcctggctgggaagcacggggatgacctgcggcgcacaaagactgagatctctgagatgaaccggaacatcagccggctccaggctgagattgagggcctcaaaggccagagggcttccctggaggccgccattgcagatgccgagcagcgtggagagctggccattaaggatgccaacgccaagttgtccgagctggaggccgccctgcagcgggccaagcaggacatggcgcggcagctgcgtgagtaccaggagctgatgaacgtcaagctggccctggacatcgagatcgccacctacaggaagctgctggagggcgaggagagccggctggagtctgggatgcagaacatgagtattcatacgaagaccaccagcggctatgcaggtggtctgagctcggcctatgggggcctcacaagccccggcctcagctacagcctgggctccagctttggctctggcgcgggctccagctccttcagccgcaccagctcctccagggccgtggttgtgaagaagatcgagacacgtgatgggaagctggtgtctgagtcctctgacgtcctgcccaagtgaacagctgcggcagcccctcccagcctacccctcctgcgctgccccagagcctgggaaggaggccgctatgcagggtagcactgggaacaggagacccacctgaggctcagccctagccctcagcccacctggggagtttactacctggggaccccccttgcccatgcctccagctacaaaacaattcaattgctttttttttttggtccaaaataaaacctcagctagctctgc

SEQ ID NO: 2211 - DNA, 1165 bp, Homo sapiens
  source 1..1165: mol_type = genomic DNA
gtgtctcctcctctttacaggcctttccttacctccctccatgctgtccacttcctctgtaaagctctcaaccctgtccccttccccctctctcctgggaaagagccctcccatgcctagctgctgctcttagggaccctgtggctaggtgcgcggatggaaatccagccctcaggtcctcgatgatcttgaagtaatggctccagtctctgacctggggtcccttcttctccaagtgctcccggattttgctctccagcctccggttctcggtctccaggctcctcactctgtccaggatctccgcctggttcggcccgcctgcctccactcctgcctctaccatgtccatcagggtgacccagaagtcctacaaggtgtccacctctggcccccgggccttcagcagccgctcctacacgagtgggcccggttcccgcatcagctcctcgagcttctcccgagtgggcagcagcaactttcgcggtggcctgggcggcggctatggtggggccagcggcatgggaggcatcaccgcagttacggtcaaccagagcctgctgagcccccttgtcctggaggtggaccccaacatccaggccgtgcgcacccaggagaaggagcagatcaagaccctcaacaacaagtttgcctccttcatagacaaggtacggttcctggagcagcagaacaagatgctggagaccaagtggagcctcctgcagcagcagaagacggctcgaagcaacatggacaacatgttcgagagctacatcaacaaccttaggcggcagctggagactctgggccaggagaagctgaagctggaggcggagcttggcaacatgcaggggctggtggaggacttcaagaacaagtatgaggatgagatcaataagcgtacagagatggagaacgaatttgtcctcatcaagaaggatgtggatgaagcttacatgaacaaggtagagctggagtctcgcctggaagggctgaccgacgagatcaacttcctcaggcagctatatgaagaggagatccgggagctgcagtcccagatctcggacacatctgtggtgctgtccatggacaacagccgctccctggacatggacagcatcattgctgaggtcaaggcacagtacgaggatattgccaaccgcag

SEQ ID NO: 2212 - DNA, 1755 bp, Homo sapiens
  source 1..1755: mol_type = genomic DNA
gtaaagctctcaaccctgtccccttccccctctctcctgggaaagagccctcccatgcctagctgctgctcttagggaccctgtggctaggtgcgcggatggaaatccaggatctccgcctggttcggcccgcctgcctccactcctgcctctaccatgtccatcagggtgacccagaagtcctacaaggtgtccacctctggcccccgggccttcagcagccgctcctacacgagtgggcccggttcccgcatcagctcctcgagcttctcccgagtgggcagcagcaactttcgcggtggcctgggcggcggctatggtggggccagcggcatgggaggcatcaccgcagttacggtcaaccagagcctgctgagcccccttgtcctggaggtggaccccaacatccaggccgtgcgcacccaggagaaggagcagatcaagaccctcaacaacaagtttgcctccttcatagacaaggtacggttcctggagcagcagaacaagatgctggagaccaagtggagcctcctgcagcagcagaagacggctcgaagcaacatggacaacatgttcgagagctacatcaacaaccttaggcggcagctggagactctgggccaggagaagctgaagctggaggcggagcttggcaacatgcaggggctggtggaggacttcaagaacaagtatgaggatgagatcaataagcgtacagagatggagaacgaatttgtcctcatcaagaaggatgtggatgaagcttacatgaacaaggtagagctggagtctcgcctggaagggctgaccgacgagatcaacttcctcaggcagctatatgaagaggagatccgggagctgcagtcccagatctcggacacatctgtggtgctgtccatggacaacagccgctccctggacatggacagcatcattgctgaggtcaaggcacagtacgaggatattgccaaccgcagccgggctgaggctgagagcatgtaccagatcaagtatgaggagctgcagagcctggctgggaagcacggggatgacctgcggcgcacaaagactgagatctctgagatgaaccggaacatcagccggctccaggctgagattgagggcctcaaaggccagagggcttccctggaggccgccattgcagatgccgagcagcgtggagagctggccattaaggatgccaacgccaagttgtccgagctggaggccgccctgcagcgggccaagcaggacatggcgcggcagctgcgtgagtaccaggagctgatgaacgtcaagctggccctggacatcgagatcgccacctacaggaagctgctggagggcgaggagagccggctggagtctgggatgcagaacatgagtattcatacgaagaccaccagcggctatgcaggtggtctgagctcggcctatgggggcctcacaagccccggcctcagctacagcctgggctccagctttggctctggcgcgggctccagctccttcagccgcaccagctcctccagggccgtggttgtgaagaagatcgagacacgtgatgggaagctggtgtctgagtcctctgacgtcctgcccaagtgaacagctgcggcagcccctcccagcctacccctcctgcgctgccccagagcctgggaaggaggccgctatgcagggtagcactgggaacaggagacccacctgaggctcagccctagccctcagcccacctggggagtttactacctg

SEQ ID NO: 2213 - DNA, 729 bp, Homo sapiens
  source 1..729: mol_type = genomic DNA
gacctaaacctcctgccttccacccacagcatgccctgcctggccccacccaggcctggggtgccttgctcagctccccaatctccaacctcccacaggccattcctgagagctctcctcaccaagaagcagcttctccgctccttctaggatctccgcctggttcggcccgcctgcctccactcctgcctctaccatgtccatcagggtgacccagaagtcctacaaggtgtccacctctggcccccgggccttcagcagccgctcctacacgagtgggcccggttcccgcatcagctcctcgagcttctcccgagtgggcagcagcaactttcgcggtggcctgggcggcggctatggtggggccagcggcatgggaggcatcaccgcagttacggtcaaccagagcctgctgagcccccttgtcctggaggtggaccccaacatccaggccgtgcgcacccaggagaaggagcagatcaagaccctcaacaacaagtttgcctccttcatagacaaggtacggttcctggagcagcagaacaagatgctggagaccaagtggagcctcctgcagcagcagaagacggctcgaagcaacatggacaacatgttcgagagctacatcaacaaccttaggcggcagctggagactctgggccaggagaagctgaagctggaggcggagcttggcaacatgcaggggctggtggaggacttcaagaacaa

SEQ ID NO: 2214 - DNA, 1687 bp, Homo sapiens
  source 1..1687: mol_type = genomic DNA
attcagcaaatgtttgcggaatgaatggggtgagctggagccaggacctgcaggaagggatctccgcctggttcggcccgcctgcctccactcctgcctctaccatgtccatcagggtgacccagaagtcctacaaggtgtccacctctggcccccgggccttcagcagccgctcctacacgagtgggcccggttcccgcatcagctcctcgagcttctcccgagtgggcagcagcaactttcgcggtggcctgggcggcggctatggtggggccagcggcatgggaggcatcaccgcagttacggtcaaccagagcctgctgagcccccttgtcctggaggtggaccccaacatccaggccgtgcgcacccaggagaaggagcagatcaagaccctcaacaacaagtttgcctccttcatagacaaggtacggttcctggagcagcagaacaagatgctggagaccaagtggagcctcctgcagcagcagaagacggctcgaagcaacatggacaacatgttcgagagctacatcaacaaccttaggcggcagctggagactctgggccaggagaagctgaagctggaggcggagcttggcaacatgcaggggctggtggaggacttcaagaacaagtatgaggatgagatcaataagcgtacagagatggagaacgaatttgtcctcatcaagaaggatgtggatgaagcttacatgaacaaggtagagctggagtctcgcctggaagggctgaccgacgagatcaacttcctcaggcagctatatgaagaggagatccgggagctgcagtcccagatctcggacacatctgtggtgctgtccatggacaacagccgctccctggacatggacagcatcattgctgaggtcaaggcacagtacgaggatattgccaaccgcagccgggctgaggctgagagcatgtaccagatcaagtatgaggagctgcagagcctggctgggaagcacggggatgacctgcggcgcacaaagactgagatctctgagatgaaccggaacatcagccggctccaggctgagattgagggcctcaaaggccagagggcttccctggaggccgccattgcagatgccgagcagcgtggagagctggccattaaggatgccaacgccaagttgtccgagctggaggccgccctgcagcgggccaagcaggacatggcgcggcagctgcgtgagtaccaggagctgatgaacgtcaagctggccctggacatcgagatcgccacctacaggaagctgctggagggcgaggagagccggctggagtctgggatgcagaacatgagtattcatacgaagaccaccagcggctatgcaggtggtctgagctcggcctatgggggcctcacaagccccggcctcagctacagcctgggctccagctttggctctggcgcgggctccagctccttcagccgcaccagctcctccagggccgtggttgtgaagaagatcgagacacgtgatgggaagctggtgtctgagtcctctgacgtcctgcccaagtgaacagctgcggcagcccctcccagcctacccctcctgcgctgccccagagcctgggaaggaggccgctatgcagggtagcactgggaacaggagacccacctgaggctcagccctagccctcagcccacctg

SEQ ID NO: 2215 - DNA, 2120 bp, Homo sapiens
  source 1..2120: mol_type = genomic DNA
atgctgtccacttcctctgtaaagctctcaaccctgtccccttccccctctctcctgggaaagagccctcccatgcctagctgctgctcttagggaccctgtggctaggtgcgcggatggaaatccaggtatgcccaaccccctcccggtggagtaggggttgggtggttatggaatgacggaaagaggcaaaggagtgtataattggagggtcagacaaggctgggagttgaggtccctcctaccccttacctgagccctcaggtcctcgatgatcttgaagtaatggctccagtctctgacctggggtcccttcttctccaagtgctcccggattttgctctccagcctccggttctcggtctccaggctcctcactctgtccaggatctccgcctggttcggcccgcctgcctccactcctgcctctaccatgtccatcagggtgacccagaagtcctacaaggtgtccacctctggcccccgggccttcagcagccgctcctacacgagtgggcccggttcccgcatcagctcctcgagcttctcccgagtgggcagcagcaactttcgcggtggcctgggcggcggctatggtggggccagcggcatgggaggcatcaccgcagttacggtcaaccagagcctgctgagcccccttgtcctggaggtggaccccaacatccaggccgtgcgcacccaggagaaggagcagatcaagaccctcaacaacaagtttgcctccttcatagacaaggtacggttcctggagcagcagaacaagatgctggagaccaagtggagcctcctgcagcagcagaagacggctcgaagcaacatggacaacatgttcgagagctacatcaacaaccttaggcggcagctggagactctgggccaggagaagctgaagctggaggcggagcttggcaacatgcaggggctggtggaggacttcaagaacaagtatgaggatgagatcaataagcgtacagagatggagaacgaatttgtcctcatcaagaaggatgtggatgaagcttacatgaacaaggtagagctggagtctcgcctggaagggctgaccgacgagatcaacttcctcaggcagctatatgaagaggagatccgggagctgcagtcccagatctcggacacatctgtggtgctgtccatggacaacagccgctccctggacatggacagcatcattgctgaggtcaaggcacagtacgaggatattgccaaccgcagccgggctgaggctgagagcatgtaccagatcaagtatgaggagctgcagagcctggctgggaagcacggggatgacctgcggcgcacaaagactgagatctctgagatgaaccggaacatcagccggctccaggctgagattgagggcctcaaaggccagagggcttccctggaggccgccattgcagatgccgagcagcgtggagagctggccattaaggatgccaacgccaagttgtccgagctggaggccgccctgcagcgggccaagcaggacatggcgcggcagctgcgtgagtaccaggagctgatgaacgtcaagctggccctggacatcgagatcgccacctacaggaagctgctggagggcgaggagagccggctggagtctgggatgcagaacatgagtattcatacgaagaccaccagcggctatgcaggtggtctgagctcggcctatgggggcctcacaagccccggcctcagctacagcctgggctccagctttggctctggcgcgggctccagctccttcagccgcaccagctcctccagggccgtggttgtgaagaagatcgagacacgtgatgggaagctggtgtctgagtcctctgacgtcctgcccaagtgaacagctgcggcagcccctcccagcctacccctcctgcgctgccccagagcctgggaaggaggccgctatgcagggtagcactgggaacaggagacccacctgaggctcagccctagccctcagcccacctggggagtttactacctggggaccccccttgcccatgcctccagctacaaaacaattcaattgctttttttttttggtccaaaataaaacctcagctagctctgcc

SEQ ID NO: 2216 - DNA, 5831 bp, Homo sapiens
  source 1..5831: mol_type = genomic DNA
tcccgggaccccgggagagcggtcaatgtgtggtcgctgcgtttcctctgcctgcgccgggcatcacttgcgcgccgcagaaagtccgtctggcagcctggatatcctctcctaccggcacccgcagacgcccctgcagccgcggtcggcgcccgggctccctagccctgtgcgctcaactgtcctgcgctgcggggtgccgcgagttccacctccgcgcctccttctctagacaggcgctgggagaaagaaccggctcccgagttctgggcatttcgcccggctcgaggtgcaggatgcagagcaaggtgctgctggccgtcgccctgtggctctgcgtggagacccgggccgcctctgtgggtttgcctagtgtttctcttgatctgcccaggctcagcatacaaaaagacatacttacaattaaggctaatacaactcttcaaattacttgcaggggacagagggacttggactggctttggcccaataatcagagtggcagtgagcaaagggtggaggtgactgagtgcagcgatggcctcttctgtaagacactcacaattccaaaagtgatcggaaatgacactggagcctacaagtgcttctaccgggaaactgacttggcctcggtcatttatgtctatgttcaagattacagatctccatttattgcttctgttagtgaccaacatggagtcgtgtacattactgagaacaaaaacaaaactgtggtgattccatgtctcgggtccatttcaaatctcaacgtgtcactttgtgcaagatacccagaaaagagatttgttcctgatggtaacagaatttcctgggacagcaagaagggctttactattcccagctacatgatcagctatgctggcatggtcttctgtgaagcaaaaattaatgatgaaagttaccagtctattatgtacatagttgtcgttgtagggtataggatttatgatgtggttctgagtccgtctcatggaattgaactatctgttggagaaaagcttgtcttaaattgtacagcaagaactgaactaaatgtggggattgacttcaactgggaatacccttcttcgaagcatcagcataagaaacttgtaaaccgagacctaaaaacccagtctgggagtgagatgaagaaatttttgagcaccttaactatagatggtgtaacccggagtgaccaaggattgtacacctgtgcagcatccagtgggctgatgaccaagaagaacagcacatttgtcagggtccatgaaaaaccttttgttgcttttggaagtggcatggaatctctggtggaagccacggtgggggagcgtgtcagaatccctgcgaagtaccttggttacccacccccagaaataaaatggtataaaaatggaataccccttgagtccaatcacacaattaaagcggggcatgtactgacgattatggaagtgagtgaaagagacacaggaaattacactgtcatccttaccaatcccatttcaaaggagaagcagagccatgtggtctctctggttgtgtatgtcccaccccagattggtgagaaatctctaatctctcctgtggattcctaccagtacggcaccactcaaacgctgacatgtacggtctatgccattcctcccccgcatcacatccactggtattggcagttggaggaagagtgcgccaacgagcccagccaagctgtctcagtgacaaacccatacccttgtgaagaatggagaagtgtggaggacttccagggaggaaataaaattgaagttaataaaaatcaatttgctctaattgaaggaaaaaacaaaactgtaagtacccttgttatccaagcggcaaatgtgtcagctttgtacaaatgtgaagcggtcaacaaagtcgggagaggagagagggtgatctccttccacgtgaccaggggtcctgaaattactttgcaacctgacatgcagcccactgagcaggagagcgtgtctttgtggtgcactgcagacagatctacgtttgagaacctcacatggtacaagcttggcccacagcctctgccaatccatgtgggagagttgcccacacctgtttgcaagaacttggatactctttggaaattgaatgccaccatgttctctaatagcacaaatgacattttgatcatggagcttaagaatgcatccttgcaggaccaaggagactatgtctgccttgctcaagacaggaagaccaagaaaagacattgcgtggtcaggcagctcacagtcctagagcgtgtggcacccacgatcacaggaaacctggagaatcagacgacaagtattggggaaagcatcgaagtctcatgcacggcatctgggaatccccctccacagatcatgtggtttaaagataatgagacccttgtagaagactcaggcattgtattgaaggatgggaaccggaacctcactatccgcagagtgaggaaggaggacgaaggcctctacacctgccaggcatgcagtgttcttggctgtgcaaaagtggaggcatttttcataatagaaggtgcccaggaaaagacgaacttggaaatcattattctagtaggcacggcggtgattgccatgttcttctggctacttcttgtcatcatcctacggaccgttaagcgggccaatggaggggaactgaagacaggctacttgtccatcgtcatggatccagatgaactcccattggatgaacattgtgaacgactgccttatgatgccagcaaatgggaattccccagagaccggctgaagctaggtaagcctcttggccgtggtgcctttggccaagtgattgaagcagatgcctttggaattgacaagacagcaacttgcaggacagtagcagtcaaaatgttgaaagaaggagcaacacacagtgagcatcgagctctcatgtctgaactcaagatcctcattcatattggtcaccatctcaatgtggtcaaccttctaggtgcctgtaccaagccaggagggccactcatggtgattgtggaattctgcaaatttggaaacctgtccacttacctgaggagcaagagaaatgaatttgtcccctacaagaccaaaggggcacgattccgtcaagggaaagactacgttggagcaatccctgtggatctgaaacggcgcttggacagcatcaccagtagccagagctcagccagctctggatttgtggaggagaagtccctcagtgatgtagaagaagaggaagctcctgaagatctgtataaggacttcctgaccttggagcatctcatctgttacagcttccaagtggctaagggcatggagttcttggcatcgcgaaagtgtatccacagggacctggcggcacgaaatatcctcttatcggagaagaacgtggttaaaatctgtgactttggcttggcccgggatatttataaagatccagattatgtcagaaaaggagatgctcgcctccctttgaaatggatggccccagaaacaatttttgacagagtgtacacaatccagagtgacgtctggtcttttggtgttttgctgtgggaaatattttccttaggtgcttctccatatcctggggtaaagattgatgaagaattttgtaggcgattgaaagaaggaactagaatgagggcccctgattatactacaccagaaatgtaccagaccatgctggactgctggcacggggagcccagtcagagacccacgttttcagagttggtggaacatttgggaaatctcttgcaagctaatgctcagcaggatggcaaagactacattgttcttccgatatcagagactttgagcatggaagaggattctggactctctctgcctacctcacctgtttcctgtatggaggaggaggaagtatgtgaccccaaattccattatgacaacacagcaggaatcagtcagtatctgcagaacagtaagcgaaagagccggcctgtgagtgtaaaaacatttgaagatatcccgttagaagaaccagaagtaaaagtaatcccagatgacaaccagacggacagtggtatggttcttgcctcagaagagctgaaaactttggaagacagaaccaaattatctccatcttttggtggaatggtgcccagcaaaagcagggagtctgtggcatctgaaggctcaaaccagacaagcggctaccagtccggatatcactccgatgacacagacaccaccgtgtactccagtgaggaagcagaacttttaaagctgatagagattggagtgcaaaccggtagcacagcccagattctccagcctgactcggggaccacactgagctctcctcctgtttaaaaggaagcatccacacccccaactcctggacatcacatgagaggtgctgctcagattttcaagtgttgttctttccaccagcaggaagtagccgcatttgattttcatttcgacaacagaaaaaggacctcggactgcagggagccagtcttctaggcatatcctggaagaggcttgtgacccaagaatgtgtctgtgtcttctcccagtgttgacctgatcctctttttcattcatttaaaaagcatttatcatgccccctgctgcgggtctcaccatgggtttagaacaaagacgttcaagaaatggccccatcctcaaagaagtagcagtacctggggagctgacacttctgtaaaactagaagataaaccaggcaatgtaagtgttcgaggtgttgaagatgggaaggatttgcagggctgagtctatccaagaggctttgtttaggacgtgggtcccaagccaagccttaagtgtggaattcggattgatagaaaggaagactaacgttaccttgctttggagagtactggagcctgcaaatgcattgtgtttgctctggtggaggtgggcatggggtctgttctgaaatgtaaagggttcagacggggtttctggttttagaaggttgcgtgttcttcgagttgggctaaagtagagttcgttgtgctgtttctgactcctaatgagagttccttccagaccgttacgtgtctcctggccaagccccaggaaggaaatgatgcagctctggctccttgtctcccaggctgatcctttattcagaataccacaaagaaaggacattcagctcaaggctccctgccgtgttgaagagttctgactgcacaaaccagcttctggtttcttctggaatgaataccctcatatctgtcctgatgtgatatgtctgagactgaatgcgggaggttcaatgtgaagctgtgtgtggtgtcaaagtttcaggaaggattttacccttttgttcttccccctgtccccaacccactctcaccccgcaacccatcagtattttagttatttggcctctactccagtaaacctgattgggtttgttcactctctgaatgattattagccagacttcaaaattattttatagcccaaattataacatctattgtattatttagacttttaacatatagagctatttctactgatttttgcccttgttctgtcctttttttcaaaaaagaaaatgtgttttttgtttggtaccatagtgtgaaatgctgggaacaatgactataagacatgctatggcacatatatttatagtctgtttatgtagaaacaaatgtaatatattaaagccttatatataatgaactttgtactattcacattttgtatcagtattatgtagcataacaaaggtcataatgctttcagcaattgatgtcattttattaaagaacattgaaaaacttgaaggaa

SEQ ID NO: 2217 - DNA, 6957 bp, Homo sapiens
  source 1..6957: mol_type = genomic DNA
caatttaagcctgtggcatggaacctaaagactagaggcggttgtgtgagtcaggaagaggggccagatatctgagtgttcctctttagtttcttcaattgcagataatatggtgtctaattttatgttgttcaggaaagacagtggttcctgactcaggaagacagtctcagaaacatgtggaatgatattgagctgctaacaaatgatgataccggaagtgggtacctgagtgtcggttcaagaaaagaacatggaactgctttatatcaagtagatttgctagtgaagatctcttctgaaaaggcctcattaaatccaaagatacaggcatgcagcttaagtgatgggtttattattgtagccgaccaatcagtgatattgcttgacagtatttgtagatcacttcaattgcatcttgtctttgatactgaagtggatgtagttggcctttgtcaagaaggaaagtttcttttggttggcgagagaagtggcaacctacatcttattcatgtaacatcaaaacaaacactactcactaatgcatttgttcagaaagctaacgatgaaaatcggcggacttaccagaatcttgtcattgagaaggatggttcaaatgaaggtacctattatatgctacttcttacatacagtggatttttttgtattacaaaccttcagcttttaaaaattcaacaagcaattgagaatgtagacttcagtacagcaaaaaagttacaaggacaaatcaagtccagttttatttctactgaaaattatcatactcttggttgtctcagtcttgtggctggagatttagcaagtgaagttcctgtgataattgggggaaccggtaattgtgcattctcaaaatgggaaccagattcttccaagaaaggaatgacagttaagaaccttattgatgcagagattattaaaggtgcaaagaagttccagctgatagacaatctactttttgttcttgatactgataacgtgctgagtttatgggatatttacactctaactcctgtatggaactggccctctcttcacgtagaagagtttcttcttactacagaagcagactctccttcatcagtcacgtggcaaggaattacaaatctcaaattaatagctctgacagcttcagctaataagaagatgaaaaacctcatggtttattcattacctacaatggaaatactatattctttggaagtatctagtgtttcttctctggtccaaacaggaattagcacagataccatataccttttagaaggagtttgcaaaaatgatccaaaattgtctgaagactcagtctctgtgttagtactcagatgtcttacggaagctttaccagaaaacagattgagtcggttacttcacaaacacagatttgctgaagctgagagttttgccattcagtttggactagatgttgagcttgtttacaaggtcaagtcaaatcatatattggagaaactggcattgagttctgtggatgccagtgaacagaccgaatggcaacaacttgtagacgacgctaaggaaaatctacataagatccaggatgatgaatttgtggtgaattactgcctgaaagctcagtggataacctatgaaaccactcaagagatgctgaattatgccaaaaccaggcttttgaagaaagaagataaaactgctctcatttattctgatggcttgaaagaggtgctaagagctcatgcaaaattgactactttttatggagcatttggaccagaaaaattcagtggcagttcttggattgaatttctaaataatgaagatgatcttaaagatatttttttacagctaaaagaaggaaaccttgtttgtgcacagtatctttggcttcgacatcgggcaaactttgaaagcagatttgatgtgaaaatgctggagagcttgctcaactcaatgtctgcatcagtctctttgcaaaagctgtgtccatggtttaaaaatgatgtgattccatttgtaagaaggactgtgcctgaaggacagataattcttgcaaaatggttggaacaagcagccaggaaccttgaattaactgataaggcaaattggccagaaaatggacttcaattggcagagatattttttacagcagaaaaaacagacgagttgggattggcatcttcctggcattggatttccttgaaagattatcagaacacagaggaagtatgtcagctaaggactttggtaaataacttgcgagagttgatcacgttgcataggaagtacaactgcaaattagccctctctgattttgagaaggaaaatacaaccaccatagtgttccgaatgtttgataaagtgctggccccagagcttattccctccatcttagagaagtttataagagtttacatgagagaacatgacttgcaagaggaggaacttctcttgctgtacatagaggatttactgaatagatgcagctcaaagtccacatcactctttgaaacagcatgggaagcaaaggccatggcagtaatagcgtgtttatctgacacggacctcatatttgatgccgtgctcaagatcatgtatgcggcagtggttccttggagtgcagctgtggagcaactggtgaaacagcacctggaaatggaccatcccaaagtcaagttattacaggaaagttacaaactaatggagatgaaaaaacttttacgaggctatggaataagagaggtaaatctcttaaacaaggaaataatgagagtggttagatacattctcaaacaagatgtcccatcttctttagaagatgctttaaaggtagcccaagcgtttatgttatctgatgatgagatctacagtctaagaattattgacctgattgatagagaacagggtgaagactgtctccttctgttgaagtctttgcctcctgctgaagctgagaaaactgcagaaagagtcatcatatgggcacgactggcattacaagaagagccagatcattctaaagagggcaaggcctggagaatgtctgtagcgaagacatccgtggacattcttaagatactatgtgacattcagaaagacaatctgcagaagaaggacgaatgtgaagaaatgttgaaactatttaaagaggttgctagcttacaggagaactttgaggtctttctttcatttgaagattatagcaatagttccctggtagcagatctccgtgagcagcacattaaagctcacgaagttgcacaggcgaaacacaaacctgggagcaccccagagcccatagctgctgaggtgaggagcccaagcatggaatcaaagctgcacagacaggcactggccctgcagatgtccaaacaagagctggaggcagagctgaccttgagagccttaaaagatgggaacatcaaaacagcactgaaaaaatgcagcgacttgtttaagtatcactgcaatgctgacactgggaaattgctatttctgacatgtcagaagctttgtcagatgttggctgataatgtcccagtgacagtgcctgtgggactgaatcttccttccatgatacatgatctagcaagccaagctgccaccatttgcagtccagattttttactagatgctttagaactatgtaaacatactttaatggctgtagagctttccagacaatgccaaatggatgactgtggaatcctcatgaaagcttcttttgggacacataaagatccatatgaagagtggtcttacagtgacttcttcagtgaagatggaattgttcttgagtcacagatggtgcttccagtgatttatgaactgatttcatctcttgtgcctctagctgaaagcaagagatatcccttggagtctaccagtttgccatactgctcccttaatgaaggagatggccttgttttacctgttataaattccatctctgccctgcttcagaatcttcaggaatctagccagtgggagctagccctaagatttgtggttggttcatttggtacctgtcttcagcactctgtgtcaaacttcatgaatgccactttgagtgaaaagttatttggagagactacattagttaaatcaaggcatgttgttatggaattgaaagaaaaagctgttatatttatcagggaaaatgctacaacactactgcacaaagtatttaattgtcgcttggtagatcttgacctggcgttgggttactgcactctcttacctcaaaaagatgtgtttgaaaatctctggaagctcatagataaagcatggcagaattacgacaaaatcttggcaatatctctggtgggctctgagctggcaagtctctatcaggaaatagaaatggggcttaagttccgtgaactcagtactgatgcccagtggggcattcgtcttggtaaacttggtatttcttttcaaccagttttcaggcaacattttctcaccaagaaagacctcattaaagctcttgtggagaatatagatatggacacaagcctcattttggaatattgcagcacatttcagttggactgcgatgcagttcttcagctcttcattgaaacgctgctccacaacacaaatgccggccaaggccagggagatgcaagcatggactctgcaaagcggcggcatcccaaactcctggccaaagcccttgagatggttcctttactgacgagcacaaaagatttggtcatcagtcttagtggaatactacataagttggatccttatgactatgaaatgattgaagttgtcttgaaagttatagaacgagctgatgaaaagataaccaatattaatattaatcaggcattgagtattctgaaacatttgaagtcatacagaagaatttctcctcccgtggatctagaatatcagtatatgttggaacatgtcataactttgccatcagctgcccaaactagactgccttttcacctgatattctttggcacagcacagaacttctggaaaattctctctacagaactcagtgaagaatctttcccaacattgctcttaatttcgaaattaatgaagttctctctggacactctgtacgtgtctacagcaaaacacgttttcgaaaaaaaactgaagccaaagctcctgaagttaacacaagctaaatcctcaacactgattaacaaggaaataactaagatcacgcagaccatcgaatcctgcttactctctatagtcaacccagagtgggctgtagctattgccatcagccttgcccaggatatccctgaaggttccttcaagatatctgctttgaaattctgcctttatttagctgagagatggctacagaatatcccatcgcaggacgaaaaacgtgaaaaagccgaggctttgttgaagaagcttcatatccagtaccggcgatcgggcacagaagctgtgctcatagcccacaagctgaacactgaggaatatttaagagtgatcggaaagccagcacatcttattgtcagtctctacgaacatcctagcatcaatcaaagaattcagaattcatctggcacagattatcctgatattcatgcagcagctaaagaaatagccgaagtcaatgaaattaatttggaaaaagtctgggacatgttgttggaaaaatggctatgcccttcaacaaaacctggtgaaaaaccatcagaattatttgaacttcaagaagatgaagccctacgaagagtgcagtatctcctcctgtctcgtccaattgattatagttcaagaatgctgtttgtatttgcaacatcaactacaaccacattaggtatgcatcagttaacttttgcccatagaactcgagctcttcagtgtctcttctatttggctgacaaggaaactatagaatctctctttaaaaaacccattgaagaagtgaaatcttatttgagatgtataacttttctggcatcatttgagactttgaatatccccatcacatatgaattattttgcagcagtcctaaagaaggaatgattaagggtctgtggaaaaaccacagccacgagtccatggcagtaagattggtgactgagctgtgtttagaatacaaaatctatgacctgcagctttggaatggactcttgcaaaagcttctgggcttcaatatgattccttatctaaggaaagttttaaaagccatctccagtatccattctttatggcaggttccctacttcagcaaagcgtggcagcgtgtgatacagataccactgctttcagcctcttgtcctttaagtcctgatcagctgtcagattgttctgagagtctcatcgctgtcctcgaatgtccagtctcaggtgatcttgacctgatcggagtcgccaggcagtatatccagttagaacttccggcttttgcattagcttgtctgatgctcatgccccactcagagaaaagacaccagcaaattaagaattttctgggttcctgtgaccctcaggttattttaaagcaattggaagagcatatgaacacgggccagctagcaggattttcacatcaaattagaagtctgattttgaataatatcatcaataagaaggagtttgggattttggcaaagaccaaatactttcaaatgttgaagatgcatgcgatgaataccaacaatatcactgagctagtgaactatttggcaaatgacttaagtttagatgaagcttcagtcttgataactgaatattcaaagcactgcgggaaacctgtgcctccagacactgctccctgtgaaattctgaagatgtttcttagtggattatcgtaaatcactgaacctttttttcaagaaggacaagaattttggagtctgctattaatggaccatatttattacagtttttaaattgtacaatctctgtattatagctatttgtctaacattaccccacatgtaataaataaaacaatatgagca

SEQ ID NO: 2218 - DNA, 2395 bp, Homo sapiens
  source 1..2395: mol_type = genomic DNA
tatagtttagatgaataatgttaaagagaatactagaaaaggttttgatcctctttctgaaaacaagatggtctcaggaatggaaacttttgatggtatactattagatgattttatgacagtttaggattgggttactcttactggacaaaagttttttattttaatataggcattgagtattctgaaacatttgaagtcatacagaagaatttctcctcccgtggatctagaatatcagtatatgttggaacatgtcataactttgccatcagctgcccaaactagactgccttttcacctgatattctttggcacagcacagaacttctggaaaattctctctacagaactcagtgaagaatctttcccaacattgctcttaatttcgaaattaatgaagttctctctggacactctgtacgtgtctacagcaaaacacgttttcgaaaaaaaactgaagccaaagctcctgaagttaacacaagctaaatcctcaacactgattaacaaggaaataactaagatcacgcagaccatcgaatcctgcttactctctatagtcaacccagagtgggctgtagctattgccatcagccttgcccaggatatccctgaaggttccttcaagatatctgctttgaaattctgcctttatttagctgagagatggctacagaatatcccatcgcaggacgaaaaacgtgaaaaagccgaggctttgttgaagaagcttcatatccagtaccggcgatcgggcacagaagctgtgctcatagcccacaagctgaacactgaggaatatttaagagtgatcggaaagccagcacatcttattgtcagtctctacgaacatcctagcatcaatcaaagaattcagaattcatctggcacagattatcctgatattcatgcagcagctaaagaaatagccgaagtcaatgaaattaatttggaaaaagtctgggacatgttgttggaaaaatggctatgcccttcaacaaaacctggtgaaaaaccatcagaattatttgaacttcaagaagatgaagccctacgaagagtgcagtatctcctcctgtctcgtccaattgattatagttcaagaatgctgtttgtatttgcaacatcaactacaaccacattaggtatgcatcagttaacttttgcccatagaactcgagctcttcagtgtctcttctatttggctgacaaggaaactatagaatctctctttaaaaaacccattgaagaagtgaaatcttatttgagatgtataacttttctggcatcatttgagactttgaatatccccatcacatatgaattattttgcagcagtcctaaagaaggaatgattaagggtctgtggaaaaaccacagccacgagtccatggcagtaagattggtgactgagctgtgtttagaatacaaaatctatgacctgcagctttggaatggactcttgcaaaagcttctgggcttcaatatgattccttatctaaggaaagttttaaaagccatctccagtatccattctttatggcagagatggaggtcttgctatgttgcctaggctggtcttagaactcctgagctgaaacaatcctcctgccttggcctcccaaagtactgggattacaggttccctacttcagcaaagcgtggcagcgtgtgatacagataccactgctttcagcctcttgtcctttaagtcctgatcagctgtcagattgttctgagagtctcatcgctgtcctcgaatgtccagtctcaggtgatcttgacctgatcggagtcgccaggcagtatatccagttagaacttccggcttttgcattagcttgtctgatgctcatgccccactcagagaaaagacaccagcaaattaagaattttctgggttcctgtgaccctcaggttattttaaagcaattggaagagcatatgaacacgggccagctagcaggattttcacatcaaattagaagtctgattttgaataatatcatcaataagaaggagtttgggattttggcaaagaccaaatactttcaaatgttgaagatgcatgcgatgaataccaacaatatcactgagctagtgaactatttggcaaatgacttaagtttagatgaagcttcagtcttgataactgaatattcaaagcactgcgggaaacctgtgcctccagacactgctccctgtgaaattctgaagatgtttcttagtggattatcgtaaatcactgaacctttttttcaagaaggacaagaattttggagtctgctattaatggaccatatttattacagtttttaaattgtacaatctctgtattatagctatttgtctaacattaccccacatgtaataaataaaacaatatgagcat

SEQ ID NO: 2219 - DNA, 709 bp, Homo sapiens
  source 1..709: mol_type = genomic DNA
ctcttgagaccgggagcccagctgcccaccctctggacattcacccagccaggtggtctcgtcacctcagaggctccgccagactcctgcccaggccaggactgaggcaagcctcaaggcacttctaggacctgcctcttctcaccaagatgaactcactggtttcttggcagctactgcttttcctctgtgccacccactttggggagccattagaaaaggtggcctctgtggggaattctagacccacaggccagcagctagaatccctgggcctcctggcccccggggagcagagcctgccgtgcaccgagaggaagccagctgctactgccaggctgagccgtcgggggacctcgctgtccccgccccccgagagctccgggagcccccagcagccgggcctgtccgccccccacagccgccagatccccgcaccccagggcgcggtgctggtgcagcgggagaaggacctgccgaactacaactggaactccttcggcctgcgcttcggcaagcgggaggcggcaccagggaaccacggcagaagcgctgggcggggctgagggcgcaggtgcggggcagtgaacttcagaccccaaaggagtcagagcatgcggggcgggggcggggggcggggacgtagggctaagggagggggcgctggagcttccaacccgaggcaataaaagaaatgttgcgtaactca

SEQ ID NO: 2220 - DNA, 1624 bp, Homo sapiens
  source 1..1624: mol_type = genomic DNA
gccgagcccagcacagctgccctctggaccctgcggaccccagccgagccccttcctgagttccacaggcgcagcccccgggcggtcgggcggaggggtccccggggcggtgccagggcgcaatcctggagggcggccgggaggaggaggtgcgcgcggccatgcacaccgtggctacgtccggacccaacgcgtcctggggggcaccggccaacgcctccggctgcccgggctgtggcgccaacgcctcggacggcccagtcccttcgccgcgggccgtggacgcctggctcgtgccgctcttcttcgcggcgctgatgctgctgggcctggtggggaactcgctggtcatctacgtcatctgccgccacaagccgatgcggaccgtgaccaacttctacatcgccaacctggcggccacggacgtgaccttcctcctgtgctgcgtccccttcacggccctgctgtacccgctgcccggctgggtgctgggcgacttcatgtgcaagttcgtcaactacatccagcaggtctcggtgcaggccacgtgtgccactctgaccgccatgagtgtggaccgctggtacgtgacggtgttcccgttgcgcgccctgcaccgccgcacgccccgcctggcgctggctgtcagcctcagcatctgggtaggctctgcggcggtgtctgcgccggtgctcgccctgcaccgcctgtcacccgggccgcgcgcctactgcagtgaggccttccccagccgcgccctggagcgcgccttcgcactgtacaacctgctggcgctgtacctgctgccgctgctcgccacctgcgcctgctatgcggccatgctgcgccacctgggccgggtcgccgtgcgccccgcgcccgccgatagcgccctgcaggggcaggtgctggcagagcgcgcaggcgccgtgcgggccaaggtctcgcggctggtggcggccgtggtcctgctcttcgccgcctgctggggccccatccagctgttcctggtgctgcaggcgctgggccccgcgggctcctggcacccacgcagctacgccgcctacgcgcttaagacctgggctcactgcatgtcctacagcaactccgcgctgaacccgctgctctacgccttcctgggctcgcacttccgacaggccttccgccgcgtctgcccctgcgcgccgcgccgcccccgccgcccccgccggcccggaccctcggaccccgcagccccacacgcggagctgctccgcctggggtcccacccggcccccgccagggcgcagaagccagggagcagtgggctggccgcgcgcgggctgtgcgtcctgggggaggacaacgcccctctctgagcggacccggtgggaatccgagcggctccctcgggagcggggactgctggaacagcggctattcttctgttattagtatttttcttactgtccaagatcaactgtggaaatattttggtctcttgtgacgttcggtgcagtttcgttgtgaagtttgctattgatattgaaattatgacttctgtgtttcctgaaattaaacatgtgtcaacacaggactttctggatcattccagaaagtgtcagacgttttctcattgtcttgt

SEQ ID NO: 2221 - DNA, 6912 bp, Homo sapiens
  source 1..6912: mol_type = genomic DNA
ggtccgcggcggagcgagcgagcggccggcaggttgggaggagcggccgaaggttgaatgcctttgagaacttgatgcataaaatttgcatgactcctcactcctttctggatctctcattggactcaagccagcatggctcacaccacaaaggttaacggcagtgcctcaggaaaagcaggtgatattctcagtggagaccaggacaaggaacagaaagacccttactttgtggagaccccctatggttatcaactagacttagatttcctcaaatatgtggatgacatacagaagggaaataccatcaaaagactgaacatccagaagaggcggaagccgtccgtgccatgcccagaacccaggaccacatctggtcagcaaggtatatggacttccactgaatccctctcatcctccaacagtgatgacaacaagcagtgccccaacttcctcatagccagaagtcaagttacatcaactccaatctcaaagccacctccccctctggagacctcactcccttttcttaccatcccagaaaatcgacagctgccacctccctcaccacaactcccaaagcataaccttcatgtcaccaagacactgatggagacccggagaagactggaacaggagagagccaccatgcagatgacaccgggtgagttcagaaggcccaggctggccagttttggaggcatgggcaccacaagctccctcccttcttttgtgggttctggaaaccacaatcctgccaagcaccagcttcagaatggataccaaggtaatggggattatggtagctatgccccagctgctcccaccacttcctccatggggagctccatccgccacagccccctgagctcagggatctccaccccagtgaccaacgtgagccccatgcacctgcagcacatccgcgagcagatggccattgctctgaaacgcctgaaggagctggaggagcaggtgcgaaccatccctgtgctccaggtaaagatctctgtcttgcaagaagagaaaaggcagttggtctcacagctgaaaaaccaaagggctgcatcccagatcaatgtctgtggtgtgaggaagcggtcctatagtgcggggaacgcctcccagctggaacagctctcccgggcccgaagaagtggcggggaattatacattgactatgaggaggaagaaatggagaccgtagaacagagcacgcagaggataaaggagttccggcaacttacagcagacatgcaagccctggagcagaagatccaggacagcagctgtgaggcctcctcagagctcagggagaatggagagtgccggtctgtggctgtgggtgccgaggagaacatgaacgacatcgtcgtgtaccacagaggctccaggtcctgtaaggatgcagctgtagggacacttgttgagatgagaaattgtggggtcagcgtgacagaggccatgcttggagtgatgactgaagctgacaaagaaattgagctgcaacagcagaccatagaatccttgaaggaaaagatctatcgcctagaagtacagcttagagaaaccacccatgaccgggagatgactaaactgaaacaagagctgcaggctgctggatcgaggaaaaaggttgacaaagccacgatggcccagccgcttgttttcagtaaggtggtggaggcagtggtgcagaccagagaccaaatggtcggcagtcacatggacctggtggacacgtgtgttgggacctccgtggaaacaaacagtgtaggcatctcctgccagcctgaatgtaagaataaagtcgtagggcctgagctgcctatgaattggtggattgttaaggagagggtggaaatgcatgaccgatgtgctgggaggtctgtggaaatgtgtgacaagagtgtgagtgtggaagtcagcgtctgcgaaacaggcagcaacacagaggagtctgtgaacgacctcacactcctcaagacaaacttgaatctcaaagaagtgcggtctatcggttgtggagattgttctgttgacgtgaccgtctgctctccaaaggagtgcgcctcccggggcgtgaacactgaggctgttagccaggtggaagctgccgtcatggcagtgcctcgtactgcagaccaggacactagcacagatttggaacaggtgcaccagttcaccaacaccgagacggccaccctcatagagtcctgcaccaacacttgtctaagcactttggacaagcagaccagcacccagactgtggagacgcggacagtagctgtaggagaaggccgtgtcaaggacatcaactcctccaccaagacgcggtccattggtgttggaacgttgctttctggccattctgggtttgacaggccatcagctgtgaagaccaaagagtcaggtgtggggcagataaatattaacgacaactatctggttggtctcaaaatgaggactatagcttgtgggccaccacagttgactgtggggctgacagccagcagaaggagcgtgggggttggggatgaccctgtaggggaatctctggagaacccccagcctcaagctccacttggaatgatgactggcctggatcactacattgagcgtatccagaagctgctggcagaacagcagacactgctggctgagaactacagtgaactggcagaagctttcggggaacctcactcacagatgggctccctcaactctcagctcatcagcaccctgtcgtctatcaactctgtcatgaaatctgcaagcactgaagagctgaggaaccctgacttccagaaaaccagtctgggtaaaatcacaggcaattatttgggatatacctgtaagtgtgggggccttcagtcaggaagtcccttaagctcccagacatcccagcctgagcaagaagtggggacctcagaaggaaagccaatcagcagcctggatgccttccccactcaggaaggtacgctgtctccagtgaacctgacagacgaccagatcgccgctggcctctatggtaacttttctcactcacagtcattggcatcaggattctagggccagcattgccagcattccaatttaatgtcaatgtaccttttaaattgacctggaagaaagttaatatcgttatttggaaggtaggcccagaatatctttaaataaggttaccaaagaggccgggcatggtggctcacacctgtgatcccagcactttgggaggccaaggcaggcagatcatttgaggccaggagttcgagaccagcctggccaacatggtgaaaccccatctctactaaaaaatacaaaaattagccaggcatggtggtgcacacctgtagtcccagctactccggcggctgaggtgggagaatcacttgaacctgggaggtggaggttgcagtgagctgagatcacgccactgcactccagcctgggtgacagaaagaggccctgtctcaaaattacgaaagaaagctgtacaagaaagcttacctgatattacaaattatgaaatattttaaatagcattttattcacgttctggcaggcataagttttttcaggttatctcagctgaagaagaataataatccctgtttagtacgtaaatggtccttgaggctcgtgagacacgacatcactttataagcagtaaagccggatacaaatgtcagttttcactggctttgttatgtctggaaggactaattgatttttttcccatgtgaagaatgttattaatggaactttgaattattttctttgcatgcacacactttcccattgaattttgtggaaacttctcacatatatatgccaagatctacatttacatgcatgagaaaagaactgtacaggaaaaaagatcatttaacatgtatgggtgtgagttttcatttttattgccttgactttttcacagcatgtacaaacaatgaaagtacactgaagtccatcatgaagaagaaagatggtaacaaagattcaaatggcgcaaaaaagaatcttcagtttgttggcattaatggagggtaaggaaagatggtggttctagaggctaatgctgtcagtctcctttacctcctgcctaagtcacatttcaaggcgcctagtcggggaagcggccacagcgcagtgatgaaagattccctcctcagaaaggcagaaaggtgcatttgggctttgctttcctcctctggtgctgtctttaaggatttgtcactctcttaaggatacctgatgaagctgagcggtttacatctcctcacctctgatctgaaagaaatagtcttcagcgaacgcagcagggttcctgcactgtgttggacaacttgtacttacctatacgagaactcacaattgagcagaaaaagactgagagcatcactctctgggccaacgatcgtcatcttttccttcaaaatgggtccttttgcttagctctccatgtttacgacccaaattgtagggcctttcacaattgataaccacatcaccagtttgctttctaaatagaatggttattgtttgttccttctctttgcattggcccacgtacatagttaagcccctttgttgtcctacaattgaatcaaatcaatgaattgatacatggcccccacaagaaagaaataatacaaagtgtaccattagggtttaaccttatggtgcctgttttccaaatctagaagttttattcagtgataatggccaggagattttggagggcatacaccagaaaaactatcgattgcctatgtaatctattccccttgatactgggagaattaataggatgaaataggaagacatggggtgggggggggacaaaaagcacctaccgatctgttttccataaagtatgttttctcatgatttatgctaagccggagatgccattattttctttaacaagtgttacatgataccaattggttatatgataccgataaccagtttaagttagagtccattcaaaaccaccaggcatttaaatagaccttactttgaacttctaagtgcaggatctaaaaccactagtgaaatttctggagtcaattagcaaatcccttcatagaaatttctatcactgggtcttcgtgagcacaccttgcatctcctgaaatcccaattgccacctaggtatgaaacaacttcaagtgatgattccagctcagatgaaagctcttcttccgagtcagatgacgagtgtgatgtcattgagtatcctcttgaagaagaggaggaggaggaggatgaagacactcggggaatggcagaagggcaccatgcagttaatattgaaggtttgaagtctgccagggtggaagatgaaatgcaggttcaagaatgtgaacctgagaaggtggaaatcagagagaggtgtggtacattccccttccctcccttgcccctcccacatttaatgtactttggcaatagagttggccagttcagagcttttgtaattaaatgtttgcttttatctgttcctcagaggtatacacatcttgagatactaatatatacaagtgcagagtattacaactcttagatctcttatggtagaatggcctggtacctaatcacccttgttttctgaaaccttaactctgctatataatttaacatatggaaccacaatccactaaaacttgcattgtttgaacaccttaccttatatttaaagacattttaattttttggtggccagcctactttaagatttcagattttatgtttagccatttatcttgatacaggtgtatcattattacaggatcattgtgtggatgaggcctcagccaaagatcacatatactgtaaagatgatgcatatcacttacatgtttgtattttgttacacattgaatgatcaggaataccacaagaatggatttgggtatatcataaatagtagctgaaaaacactctggttggctgaaatatgtgcctcagaatgtaagttttcaagaccattagataaggatttgatgctcataaaatagagagtagaaaaggtggaaacttcagtatggtttttcagtatgtgaaatataaatagaacatttcagaaaacttacctctatttaatttggcaaatgaaagtttaactgcattaaaacaaggtaagtgtttttagtttatatttccaagtgtttcacatggctttttaacagctttgagatgtaatttatataccatatgtcatttttttacttttcatatgggttaaacacttgagtcaccaaatgtgggttcagatgtgtggtttactggtcagcacgatggatatatggtaatttgtggaaagtcaaggcaagaggatcgcttgagcacaggagtttgagactagcctggacaatatagtaagacctcatccctacaaaaatatcaattacctgggcatggtgtcacatgccagctgctctggaggataaggtgggaggatcacttgaaccctggaggttgaggctgcagtgagccagtgcactccagtctgggtgacagagcaagaccctgtctcagaaaaaaagtaatttgggtctccttcaacccccttaaaattaaaaatattttttaaaaacttagaacaggttgggcacagtggctcacacccataatgccaatactttgggaggctgaggcaggcaggcagatagcttgagcccaagagttcgagaccagcctgggcaacatggtgaaaccctgtctctacaaatacaaagccgggtgtggtggcacacacgtgtaatcccagttacttgggaagctgaggtaggaagattgcttgagcctgggacagcaaaactacagtgagccgtgattgcaccactgcactccagcctgggcaacagagtgagaccttgtctcaaaaaaaaaaaaaaaaaaaaa

SEQ ID NO: 2222 - DNA, 2268 bp, Homo sapiens
  source 1..2268: mol_type = genomic DNA
aggtatgaattaagtgaaaagatgttgtctgcatgcaacttactgaaaaatactataaatgaccccaaagctttgaccagcaaagatatgaggttctgtctgaacaccctccagcacgagtggttccgcgtgtccagtcagaagtcagccattccagccatggtgggggactacatagctgcttttgaggccatttccccagatgtcctccgctatgtcatcaacttggcagacggcaacggcaacacagccctccattacagcgtgtcccactccaacttcgagattgtgaagctgctgttagatgccgatgtgtgtaatgtggatcaccagaacaaggcaggctacacccccatcatgttggcggccctcgccgctgtggaagcagagaaggacatgcggattgtggaagaactcttcggctgtggggatgtgaatgccaaagctagtcaggcgggacagacggccctcatgctggcggtcagtcacggacggatagacatggtgaagggccttctggcctgtggggctgatgtcaacatccaggatgacgagggctccacggccctcatgtgtgccagcgagcacggacacgtggagattgtcaagctgctgctggcccagcccggctgcaacggtcacctagaggacaacgatggcagcactgcgctctcaatcgccctggaagcaggacacaaggacatcgctgttcttctgtatgcccatgtcaactttgcaaaagcccagtctccggtcagtgttgtgcatttggcatttgtaaataggctgaaatccaccagactggtggacccccttcctccaggaattgacgggagacagattttatgttgattcagaaaatggaagttttagtctggagcttaagagttcatcctttccgcctccaccccgcaaaaagcaggagaactaatgttttagcagaggctggaccttgcttgtccttgcaagacatatgctcacagcttcccatagaggttttgattctgtgcagaattatccagatagcagcccctgagcccatggggatatttcgccatggttctggcattgttcctgaagcagatggcaggcagcctgtagtccacagttcactctgagtgggaaggtgacttcccaggacagccggacatagcactgctgagcccagctggccttggagctgtggacacctgttccctgttctcagccagagctctcctggctcgggctcacagctgcttgttgcctgtggtgggccaagatcctatgtcacagggtacacatctgcctgaggtcacttattaacccccagtttttttcctttcctggtctctagggcacccctaggcttggaaggaagacgtctcctggccccacccaccgaggttcatttgattgattgtatgcaaatagccctttatttacatgccactattaagctgctaattgttcctgttggggtgacagatactgaatgtatacgtattgtgcctgagctcaccagcaaacagaagcatcaagcccaggggtaaaggctgaagctttcacagtgcagagactgctagcctgggcacacacacctcctttctggccgtcttctgtgtagggcacactttaacccagtctctgttgctgttgagtctctgctccgttttgtacagtcacagggaattctgatctgaaggggcaccttctgttcactcccacaaagtggtgtctggttctcactgagacgttttaagatttttccacaaatatttatatgtactaaatgtggaaccattagaaagttcttccaaaatctcattccagcatagttttggatttttcttttgtcttattttaaaataaggaagtcgagatgactttgatcattggtaacttgggcctgggccagacaaagtataaaacttacaaaagaatattctcatttggtcttaactaggtagatgtaatatatgactttttataaaaagggtatctatatgaacttgacacagtattttcagcttttgtattccatactaaagccatgaagaactacacgtaacatcatcatttgtattaattgcacaactccaatgctaaaggttggattgtgttagaggaatcggctctgtatttgcctctagagaaacacagtgttctctttgtatttatggattcctttttaccgtgtcacatttactttggtcctctatgtatttaaatgtttgaagtgccttagactcttgccatattttcaaaataaaattccattaagctctt

SEQ ID NO: 2223 - DNA, 1948 bp, Homo sapiens
  source 1..1948: mol_type = genomic DNA
ctcttcttccgagtcagatgacgagtgtgatgtcattgagtatcctcttgaagaagaggaggaggaggaggatgaagacactcggggaatggcagaagggcaccatgcagttaatattgaaggtttgaagtctgccagggtggaagatgaaatgcaggttcaagaatgtgaacctgagaaggtggaaatcagagagaggtatgaattaagtgaaaagatgttgtctgcatgcaacttactgaaaaatactataaatgaccccaaagctttgaccagcaaagatatgggccaggtgcagtggctgacacctatgatcccaacacttcgggaggccgatgcaggtggatcacatgagaggttctgtctgaacaccctccagcacgagtggttccgcgtgtccagtcagaagtcagccattccagccatggtgggggactacatagctgcttttgaggccatttccccagatgtcctccgctatgtcatcaacttggcagacggcaacggcaacacagccctccattacagcgtgtcccactccaacttcgagattgtgaagctgctgttagatgccgatgtgtgtaatgtggatcaccagaacaaggcaggctacacccccatcatgttggcggccctcgccgctgtggaagcagagaaggacatgcggattgtggaagaactcttcggctgtggggatgtgaatgccaaagctagtcaggcgggacagacggccctcatgctggcggtcagtcacggacggatagacatggtgaagggccttctggcctgtggggctgatgtcaacatccaggatgacgagggctccacggccctcatgtgtgccagcgagcacggacacgtggagattgtcaagctgctgctggcccagcccggctgcaacggtcacctagaggacaacgatggcagcactgcgctctcaatcgccctggaagcaggacacaaggacatcgctgttcttctgtatgcccatgtcaactttgcaaaagcccagtctccgggcacccctaggcttggaaggaagacgtctcctggccccacccaccgaggttcatttgattgattgtatgcaaatagccctttatttacatgccactattaagctgctaattgttcctgttggggtgacagatactgaatgtatacgtattgtgcctgagctcaccagcaaacagaagcatcaagcccaggggtaaaggctgaagctttcacagtgcagagactgctagcctgggcacacacacctcctttctggccgtcttctgtgtagggcacactttaacccagtctctgttgctgttgagtctctgctccgttttgtacagtcacagggaattctgatctgaaggggcaccttctgttcactcccacaaagtggtgtctggttctcactgagacgttttaagatttttccacaaatatttatatgtactaaatgtggaaccattagaaagttcttccaaaatctcattccagcatagttttggatttttcttttgtcttattttaaaataaggaagtcgagatgactttgatcattggtaacttgggcctgggccagacaaagtataaaacttacaaaagaatattctcatttggtcttaactaggtagatgtaatatatgactttttataaaaagggtatctatatgaacttgacacagtattttcagcttttgtattccatactaaagccatgaagaactacacgtaacatcatcatttgtattaattgcacaactccaatgctaaaggttggattgtgttagaggaatcggctctgtatttgcctctagagaaacacagtgttctctttgtatttatggattcctttttaccgtgtcacatttactttggtcctctatgtatttaaatgtttgaagtgccttagactcttgccatattttcaaaataaaattccattaagctc

SEQ ID NO: 2224 - DNA, 5249 bp, Homo sapiens
  source 1..5249: mol_type = genomic DNA
gaaaaacagagcctctctgtagagatgcttaaagtgctagctttatttaaaaatcagctggcaaagcgggagtgaagaacacacattttcagaagataccggtttcctgttttcattaagaaaacagggaatgcggaacagctgagtgcggcgggggtggtgtcactgcagccggagggagacctcgccggtgaaagctcagcctatggcatccgagcgtggccggccaagtttacacgaatgttgaaacttctcctcacggggtgaggatcgagggcgcccgaggccgggtccggctgagctggagcgagctgtgcggggcagcgcgggctggcggggagcgcggcgggcgccacgtggaaaagcaggtgatattctcagtggagaccaggacaaggaacagaaagacccttactttgtggagaccccctatggttatcaactagacttagatttcctcaaatatgtggatgacatacagaagggaaataccatcaaaagactgaacatccagaagaggcggaagccgtccgtgccatgcccagaacccaggaccacatctggtcagcaaggtatatggacttccactgaatccctctcatcctccaacagtgatgacaacaagcagtgccccaacttcctcatagccagaagtcaagttacatcaactccaatctcaaagccacctccccctctggagacctcactcccttttcttaccatcccagaaaatcgacagctgccacctccctcaccacaactcccaaagcataaccttcatgtcaccaagacactgatggagacccggagaagactggaacaggagagagccaccatgcagatgacaccgggtgagttcagaaggcccaggctggccagttttggaggcatgggcaccacaagctccctcccttcttttgtgggttctggaaaccacaatcctgccaagcaccagcttcagaatggataccaaggtaatggggattatggtagctatgccccagctgctcccaccacttcctccatggggagctccatccgccacagccccctgagctcagggatctccaccccagtgaccaacgtgagccccatgcacctgcagcacatccgcgagcagatggccattgctctgaaacgcctgaaggagctggaggagcaggtgcgaaccatccctgtgctccaggtaaagatctctgtcttgcaagaagagaaaaggcagttggtctcacagctgaaaaaccaaagggctgcatcccagatcaatgtctgtggtgtgaggaagcggtcctatagtgcggggaacgcctcccagctggaacagctctcccgggcccgaagaagtggcggggaattatacattgactatgaggaggaagaaatggagaccgtagaacagagcacgcagaggataaaggagttccggcaacttacagcagacatgcaagccctggagcagaagatccaggacagcagctgtgaggcctcctcagagctcagggagaatggagagtgccggtctgtggctgtgggtgccgaggagaacatgaacgacatcgtcgtgtaccacagaggctccaggtcctgtaaggatgcagctgtagggacacttgttgagatgagaaattgtggggtcagcgtgacagaggccatgcttggagtgatgactgaagctgacaaagaaattgagctgcaacagcagaccatagaatccttgaaggaaaagatctatcgcctagaagtacagcttagagaaaccacccatgaccgggagatgactaaactgaaacaagagctgcaggctgctggatcgaggaaaaaggttgacaaagccacgatggcccagccgcttgttttcagtaaggtggtggaggcagtggtgcagaccagagaccaaatggtcggcagtcacatggacctggtggacacgtgtgttgggacctccgtggaaacaaacagtgtaggcatctcctgccagcctgaatgtaagaataaagtcgtagggcctgagctgcctatgaattggtggattgttaaggagagggtggaaatgcatgaccgatgtgctgggaggtctgtggaaatgtgtgacaagagtgtgagtgtggaagtcagcgtctgcgaaacaggcagcaacacagaggagtctgtgaacgacctcacactcctcaagacaaacttgaatctcaaagaagtgcggtctatcggttgtggagattgttctgttgacgtgaccgtctgctctccaaaggagtgcgcctcccggggcgtgaacactgaggctgttagccaggtggaagctgccgtcatggcagtgcctcgtactgcagaccaggacactagcacagatttggaacaggtgcaccagttcaccaacaccgagacggccaccctcatagagtcctgcaccaacacttgtctaagcactttggacaagcagaccagcacccagactgtggagacgcggacagtagctgtaggagaaggccgtgtcaaggacatcaactcctccaccaagacgcggtccattggtgttggaacgttgctttctggccattctgggtttgacaggccatcagctgtgaagaccaaagagtcaggtgtggggcagataaatattaacgacaactatctggttggtctcaaaatgaggactatagcttgtgggccaccacagttgactgtggggctgacagccagcagaaggagcgtgggggttggggatgaccctgtaggggaatctctggagaacccccagcctcaagctccacttggaatgatgactggcctggatcactacattgagcgtatccagaagctgctggcagaacagcagacactgctggctgagaactacagtgaactggcagaagctttcggggaacctcactcacagatgggctccctcaactctcagctcatcagcaccctgtcgtctatcaactctgtcatgaaatctgcaagcactgaagagctgaggaaccctgacttccagaaaaccagtctgggtaaaatcacaggcaattatttgggatatacctgtaagtgtgggggccttcagtcaggaagtcccttaagctcccagacatcccagcctgagcaagaagtggggacctcagaaggaaagccaatcagcagcctggatgccttccccactcaggaaggtacgctgtctccagtgaacctgacagacgaccagatcgccgctggcctctatgcatgtacaaacaatgaaagtacactgaagtccatcatgaagaagaaagatggtaacaaagattcaaatggcgcaaaaaagaatcttcagtttgttggcattaatggagggtatgaaacaacttcaagtgatgattccagctcagatgaaagctcttcttccgagtcagatgacgagtgtgatgtcattgagtatcctcttgaagaagaggaggaggaggaggatgaagacactcggggaatggcagaagggcaccatgcagttaatattgaaggtttgaagtctgccagggtggaagatgaaatgcaggttcaagaatgtgaacctgagaaggtggaaatcagagagaggtatgaattaagtgaaaagatgttgtctgcatgcaacttactgaaaaatactataaatgaccccaaagctttgaccagcaaagatatgaggttctgtctgaacaccctccagcacgagtggttccgcgtgtccagtcagaagtcagccattccagccatggtgggggactacatagctgcttttgaggccatttccccagatgtcctccgctatgtcatcaacttggcagacggcaacggcaacacagccctccattacagcgtgtcccactccaacttcgagattgtgaagctgctgttagatgccgatgtgtgtaatgtggatcaccagaacaaggcaggctacacccccatcatgttggcggccctcgccgctgtggaagcagagaaggacatgcggattgtggaagaactcttcggctgtggggatgtgaatgccaaagctagtcaggcgggacagacggccctcatgctggcggtcagtcacggacggatagacatggtgaagggccttctggcctgtggggctgatgtcaacatccaggatgacgagggctccacggccctcatgtgtgccagcgagcacggacacgtggagattgtcaagctgctgctggcccagcccggctgcaacggtcacctagaggacaacgatggcagcactgcgctctcaatcgccctggaagcaggacacaaggacatcgctgttcttctgtatgcccatgtcaactttgcaaaagcccagtctccgggcacccctaggcttggaaggaagacgtctcctggccccacccaccgaggttcatttgattgattgtatgcaaatagccctttatttacatgccactattaagctgctaattgttcctgttggggtgacagatactgaatgtatacgtattgtgcctgagctcaccagcaaacagaagcatcaagcccaggggtaaaggctgaagctttcacagtgcagagactgctagcctgggcacacacacctcctttctggccgtcttctgtgtagggcacactttaacccagtctctgttgctgttgagtctctgctccgttttgtacagtcacagggaattctgatctgaaggggcaccttctgttcactcccacaaagtggtgtctggttctcactgagacgttttaagatttttccacaaatatttatatgtactaaatgtggaaccattagaaagttcttccaaaatctcattccagcatagttttggatttttcttttgtcttattttaaaataaggaagtcgagatgactttgatcattggtaacttgggcctgggccagacaaagtataaaacttacaaaagaatattctcatttggtcttaactaggtagatgtaatatatgactttttataaaaagggtatctatatgaacttgacacagtattttcagcttttgtattccatactaaagccatgaagaactacacgtaacatcatcatttgtattaattgcacaactccaatgctaaaggttggattgtgttagaggaatcggctctgtatttgcctctagagaaacacagtgttctctttgtatttatggattcctttttaccgtgtcacatttactttggtcctctatgtatttaaatgtttgaagtgccttagactcttgccatattttcaaaataaaattccattaagctct

SEQ ID NO: 2225 - DNA, 5051 bp, Homo sapiens
  source 1..5051: mol_type = genomic DNA
gcgagcgagcggccggcaggttgggaggagcggccgaaggttgaatgcctttgagaacttgatgcataaaatttgcatgactcctcactcctttctggatctctcattggactcaagccagcatggctcacaccacaaaggttaacggcagtgcctcaggaaaagcaggtgatattctcagtggagaccaggacaaggaacagaaagacccttactttgtggagaccccctatggttatcaactagacttagatttcctcaaatatgtggatgacatacagaagggaaataccatcaaaagactgaacatccagaagaggcggaagccgtccgtgccatgcccagaacccaggaccacatctggtcagcaaggtatatggacttccactgaatccctctcatcctccaacagtgatgacaacaagcagtgccccaacttcctcatagccagaagtcaagttacatcaactccaatctcaaagccacctccccctctggagacctcactcccttttcttaccatcccagaaaatcgacagctgccacctccctcaccacaactcccaaagcataaccttcatgtcaccaagacactgatggagacccggagaagactggaacaggagagagccaccatgcagatgacaccgggtgagttcagaaggcccaggctggccagttttggaggcatgggcaccacaagctccctcccttcttttgtgggttctggaaaccacaatcctgccaagcaccagcttcagaatggataccaaggtaatggggattatggtagctatgccccagctgctcccaccacttcctccatggggagctccatccgccacagccccctgagctcagggatctccaccccagtgaccaacgtgagccccatgcacctgcagcacatccgcgagcagatggccattgctctgaaacgcctgaaggagctggaggagcaggtgcgaaccatccctgtgctccaggtaaagatctctgtcttgcaagaagagaaaaggcagttggtctcacagctgaaaaaccaaagggctgcatcccagatcaatgtctgtggtgtgaggaagcggtcctatagtgcggggaacgcctcccagctggaacagctctcccgggcccgaagaagtggcggggaattatacattgactatgaggaggaagaaatggagaccgtagaacagagcacgcagaggataaaggagttccggcaacttacagcagacatgcaagccctggagcagaagatccaggacagcagctgtgaggcctcctcagagctcagggagaatggagagtgccggtctgtggctgtgggtgccgaggagaacatgaacgacatcgtcgtgtaccacagaggctccaggtcctgtaaggatgcagctgtagggacacttgttgagatgagaaattgtggggtcagcgtgacagaggccatgcttggagtgatgactgaagctgacaaagaaattgagctgcaacagcagaccatagaatccttgaaggaaaagatctatcgcctagaagtacagcttagagaaaccacccatgaccgggagatgactaaactgaaacaagagctgcaggctgctggatcgaggaaaaaggttgacaaagccacgatggcccagccgcttgttttcagtaaggtggtggaggcagtggtgcagaccagagaccaaatggtcggcagtcacatggacctggtggacacgtgtgttgggacctccgtggaaacaaacagtgtaggcatctcctgccagcctgaatgtaagaataaagtcgtagggcctgagctgcctatgaattggtggattgttaaggagagggtggaaatgcatgaccgatgtgctgggaggtctgtggaaatgtgtgacaagagtgtgagtgtggaagtcagcgtctgcgaaacaggcagcaacacagaggagtctgtgaacgacctcacactcctcaagacaaacttgaatctcaaagaagtgcggtctatcggttgtggagattgttctgttgacgtgaccgtctgctctccaaaggagtgcgcctcccggggcgtgaacactgaggctgttagccaggtggaagctgccgtcatggcagtgcctcgtactgcagaccaggacactagcacagatttggaacaggtgcaccagttcaccaacaccgagacggccaccctcatagagtcctgcaccaacacttgtctaagcactttggacaagcagaccagcacccagactgtggagacgcggacagtagctgtaggagaaggccgtgtcaaggacatcaactcctccaccaagacgcggtccattggtgttggaacgttgctttctggccattctgggtttgacaggccatcagctgtgaagaccaaagagtcaggtgtggggcagataaatattaacgacaactatctggttggtctcaaaatgaggactatagcttgtgggccaccacagttgactgtggggctgacagccagcagaaggagcgtgggggttggggatgaccctgtaggggaatctctggagaacccccagcctcaagctccacttggaatgatgactggcctggatcactacattgagcgtatccagaagctgctggcagaacagcagacactgctggctgagaactacagtgaactggcagaagctttcggggaacctcactcacagatgggctccctcaactctcagctcatcagcaccctgtcgtctatcaactctgtcatgaaatctgcaagcactgaagagctgaggaaccctgacttccagaaaaccagtctgggtaaaatcacaggcaattatttgggatatacctgtaagtgtgggggccttcagtcaggaagtcccttaagctcccagacatcccagcctgagcaagaagtggggacctcagaaggaaagccaatcagcagcctggatgccttccccactcaggaaggtacgctgtctccagtgaacctgacagacgaccagatcgccgctggcctctatgcatgtacaaacaatgaaagtacactgaagtccatcatgaagaagaaagatggtaacaaagattcaaatggcgcaaaaaagaatcttcagtttgttggcattaatggagggtatgaaacaacttcaagtgatgattccagctcagatgaaagctcttcttccgagtcagatgacgagtgtgatgtcattgagtatcctcttgaagaagaggaggaggaggaggatgaagacactcggggaatggcagaagggcaccatgcagttaatattgaaggtttgaagtctgccagggtggaagatgaaatgcaggttcaagaatgtgaacctgagaaggtggaaatcagagagaggtatgaattaagtgaaaagatgttgtctgcatgcaacttactgaaaaatactataaatgaccccaaagctttgaccagcaaagatatgaggttctgtctgaacaccctccagcacgagtggttccgcgtgtccagtcagaagtcagccattccagccatggtgggggactacatagctgcttttgaggccatttccccagatgtcctccgctatgtcatcaacttggcagacggcaacggcaacacagccctccattacagcgtgtcccactccaacttcgagattgtgaagctgctgttagatgccgatgtgtgtaatgtggatcaccagaacaaggcaggctacacccccatcatgttggcggccctcgccgctgtggaagcagagaaggacatgcggattgtggaagaactcttcggctgtggggatgtgaatgccaaagctagtcaggcgggacagacggccctcatgctggcggtcagtcacggacggatagacatggtgaagggccttctggcctgtggggctgatgtcaacatccaggatgacgagggctccacggccctcatgtgtgccagcgagcacggacacgtggagattgtcaagctgctgctggcccagcccggctgcaacggtcacctagaggacaacgatggcagcactgcgctctcaatcgccctggaagcaggacacaaggacatcgctgttcttctgtatgcccatgtcaactttgcaaaagcccagtctccgggcacccctaggcttggaaggaagacgtctcctggccccacccaccgaggttcatttgattgattgtatgcaaatagccctttatttacatgccactattaagctgctaattgttcctgttggggtgacagatactgaatgtatacgtattgtgcctgagctcaccagcaaacagaagcatcaagcccaggggtaaaggctgaagctttcacagtgcagagactgctagcctgggcacacacacctcctttctggccgtcttctgtgtagggcacactttaacccagtctctgttgctgttgagtctctgctccgttttgtacagtcacagggaattctgatctgaaggggcaccttctgttcactcccacaaagtggtgtctggttctcactgagacgttttaagatttttccacaaatatttatatgtactaaatgtggaaccattagaaagttcttccaaaatctcattccagcatagttttggatttttcttttgtcttattttaaaataaggaagtcgagatgactttgatcattggtaacttgggcctgggccagacaaagtataaaacttacaaaagaatattctcatttggtcttaactaggtagatgtaatatatgactttttataaaaagggtatctatatgaacttgacacagtattttcagcttttgtattccatactaaagccatgaagaactacacgtaacatcatcatttgtattaattgcacaactccaatgctaaaggttggattgtgttagaggaatcggctctgtatttgcctctagagaaacacagtgttctctttgtatttatggattcctttttaccgtgtcacatttactttggtcctctatgtatttaaatgtttgaagtgccttagactcttgccatattttcaaaataaaattccattaagctcttt

SEQ ID NO: 2226 - DNA, 5581 bp, Homo sapiens
  source 1..5581: mol_type = genomic DNA
gcccgagggtgtttcggggcgtccgaagcgggcgtgctccagcctgctcagcagcgagtggttggaaattagcaaagtgagagggtgaaaggaagcaggaggaggagggagttctagcgaagacttcggagggaagcaacccatcccctgccacaagaaagcaccgccactccagtgggaacggacacgcgtgcacacagccacgagtgaggagagaatacagcagttccaaggacaagggattcgtaccactgctcctcactcagtaaatagcagagacagaatttgaacggtctcactctgtcacctgagctagagtgcagtggtgcgatcacagcttactgcagcattgaactcctgggctcaagtgatcctcttgcctcagcctcccaagtaactgtgactgcagtgtccttgctggccttgcaaaatgagtttggaagggttgattccatcctcttcagttgttggaaagagtttaagaagggttggtgttaattcttctctttaaatatttgatgaaattcaccagtgaagccgtgacatcctgggatattctttgttgagaggttgaatgcctttgagaacttgatgcataaaatttgcatgactcctcactcctttctggatctctcattggactcaagccagcatggctcacaccacaaaggttaacggcagtgcctcaggaaaagcaggtgatattctcagtggagaccaggacaaggaacagaaagacccttactttgtggagaccccctatggttatcaactagacttagatttcctcaaatatgtggatgacatacagaagggaaataccatcaaaagactgaacatccagaagaggcggaagccgtccgtgccatgcccagaacccaggaccacatctggtcagcaaggtatatggacttccactgaatccctctcatcctccaacagtgatgacaacaagcagtgccccaacttcctcatagccagaagtcaagttacatcaactccaatctcaaagccacctccccctctggagacctcactcccttttcttaccatcccagaaaatcgacagctgccacctccctcaccacaactcccaaagcataaccttcatgtcaccaagacactgatggagacccggagaagactggaacaggagagagccaccatgcagatgacaccgggtgagttcagaaggcccaggctggccagttttggaggcatgggcaccacaagctccctcccttcttttgtgggttctggaaaccacaatcctgccaagcaccagcttcagaatggataccaaggtaatggggattatggtagctatgccccagctgctcccaccacttcctccatggggagctccatccgccacagccccctgagctcagggatctccaccccagtgaccaacgtgagccccatgcacctgcagcacatccgcgagcagatggccattgctctgaaacgcctgaaggagctggaggagcaggtgcgaaccatccctgtgctccaggtaaagatctctgtcttgcaagaagagaaaaggcagttggtctcacagctgaaaaaccaaagggctgcatcccagatcaatgtctgtggtgtgaggaagcggtcctatagtgcggggaacgcctcccagctggaacagctctcccgggcccgaagaagtggcggggaattatacattgactatgaggaggaagaaatggagaccgtagaacagagcacgcagaggataaaggagttccggcaacttacagcagacatgcaagccctggagcagaagatccaggacagcagctgtgaggcctcctcagagctcagggagaatggagagtgccggtctgtggctgtgggtgccgaggagaacatgaacgacatcgtcgtgtaccacagaggctccaggtcctgtaaggatgcagctgtagggacacttgttgagatgagaaattgtggggtcagcgtgacagaggccatgcttggagtgatgactgaagctgacaaagaaattgagctgcaacagcagaccatagaatccttgaaggaaaagatctatcgcctagaagtacagcttagagaaaccacccatgaccgggagatgactaaactgaaacaagagctgcaggctgctggatcgaggaaaaaggttgacaaagccacgatggcccagccgcttgttttcagtaaggtggtggaggcagtggtgcagaccagagaccaaatggtcggcagtcacatggacctggtggacacgtgtgttgggacctccgtggaaacaaacagtgtaggcatctcctgccagcctgaatgtaagaataaagtcgtagggcctgagctgcctatgaattggtggattgttaaggagagggtggaaatgcatgaccgatgtgctgggaggtctgtggaaatgtgtgacaagagtgtgagtgtggaagtcagcgtctgcgaaacaggcagcaacacagaggagtctgtgaacgacctcacactcctcaagacaaacttgaatctcaaagaagtgcggtctatcggttgtggagattgttctgttgacgtgaccgtctgctctccaaaggagtgcgcctcccggggcgtgaacactgaggctgttagccaggtggaagctgccgtcatggcagtgcctcgtactgcagaccaggacactagcacagatttggaacaggtgcaccagttcaccaacaccgagacggccaccctcatagagtcctgcaccaacacttgtctaagcactttggacaagcagaccagcacccagactgtggagacgcggacagtagctgtaggagaaggccgtgtcaaggacatcaactcctccaccaagacgcggtccattggtgttggaacgttgctttctggccattctgggtttgacaggccatcagctgtgaagaccaaagagtcaggtgtggggcagataaatattaacgacaactatctggttggtctcaaaatgaggactatagcttgtgggccaccacagttgactgtggggctgacagccagcagaaggagcgtgggggttggggatgaccctgtaggggaatctctggagaacccccagcctcaagctccacttggaatgatgactggcctggatcactacattgagcgtatccagaagctgctggcagaacagcagacactgctggctgagaactacagtgaactggcagaagctttcggggaacctcactcacagatgggctccctcaactctcagctcatcagcaccctgtcgtctatcaactctgtcatgaaatctgcaagcactgaagagctgaggaaccctgacttccagaaaaccagtctgggtaaaatcacaggcaattatttgggatatacctgtaagtgtgggggccttcagtcaggaagtcccttaagctcccagacatcccagcctgagcaagaagtggggacctcagaaggaaagccaatcagcagcctggatgccttccccactcaggaaggtacgctgtctccagtgaacctgacagacgaccagatcgccgctggcctctatgcatgtacaaacaatgaaagtacactgaagtccatcatgaagaagaaagatggtaacaaagattcaaatggcgcaaaaaagaatcttcagtttgttggcattaatggagggtatgaaacaacttcaagtgatgattccagctcagatgaaagctcttcttccgagtcagatgacgagtgtgatgtcattgagtatcctcttgaagaagaggaggaggaggaggatgaagacactcggggaatggcagaagggcaccatgcagttaatattgaaggtttgaagtctgccagggtggaagatgaaatgcaggttcaagaatgtgaacctgagaaggtggaaatcagagagaggtatgaattaagtgaaaagatgttgtctgcatgcaacttactgaaaaatactataaatgaccccaaagctttgaccagcaaagatatgaggttctgtctgaacaccctccagcacgagtggttccgcgtgtccagtcagaagtcagccattccagccatggtgggggactacatagctgcttttgaggccatttccccagatgtcctccgctatgtcatcaacttggcagacggcaacggcaacacagccctccattacagcgtgtcccactccaacttcgagattgtgaagctgctgttagatgccgatgtgtgtaatgtggatcaccagaacaaggcaggctacacccccatcatgttggcggccctcgccgctgtggaagcagagaaggacatgcggattgtggaagaactcttcggctgtggggatgtgaatgccaaagctagtcaggcgggacagacggccctcatgctggcggtcagtcacggacggatagacatggtgaagggccttctggcctgtggggctgatgtcaacatccaggatgacgagggctccacggccctcatgtgtgccagcgagcacggacacgtggagattgtcaagctgctgctggcccagcccggctgcaacggtcacctagaggacaacgatggcagcactgcgctctcaatcgccctggaagcaggacacaaggacatcgctgttcttctgtatgcccatgtcaactttgcaaaagcccagtctccgggcacccctaggcttggaaggaagacgtctcctggccccacccaccgaggttcatttgattgattgtatgcaaatagccctttatttacatgccactattaagctgctaattgttcctgttggggtgacagatactgaatgtatacgtattgtgcctgagctcaccagcaaacagaagcatcaagcccaggggtaaaggctgaagctttcacagtgcagagactgctagcctgggcacacacacctcctttctggccgtcttctgtgtagggcacactttaacccagtctctgttgctgttgagtctctgctccgttttgtacagtcacagggaattctgatctgaaggggcaccttctgttcactcccacaaagtggtgtctggttctcactgagacgttttaagatttttccacaaatatttatatgtactaaatgtggaaccattagaaagttcttccaaaatctcattccagcatagttttggatttttcttttgtcttattttaaaataaggaagtcgagatgactttgatcattggtaacttgggcctgggccagacaaagtataaaacttacaaaagaatattctcatttggtcttaactaggtagatgtaatatatgactttttataaaaagggtatctatatgaacttgacacagtattttcagcttttgtattccatactaaagccatgaagaactacacgtaacatcatcatttgtattaattgcacaactccaatgctaaaggttggattgtgttagaggaatcggctctgtatttgcctctagagaaacacagtgttctctttgtatttatggattcctttttaccgtgtcacatttactttggtcctctatgtatttaaatgtttgaagtgccttagactcttgccatattttcaaaataaaattccattaagctcttt

SEQ ID NO: 2227 - DNA, 5131 bp, Homo sapiens
  source 1..5131: mol_type = genomic DNA
ggtccgcggcggagcgagcgagcggccggcaggttgggaggagcggccgaaggttgaatgcctttgagaacttgatgcataaaatttgcatgactcctcactcctttctggatctctcattggactcaagccagcatggctcacaccacaaaggttaacggcagtgcctcaggaaaagcaggtgatattctcagtggagaccaggacaaggaacagaaagacccttactttgtggagaccccctatggttatcaactagacttagatttcctcaaatatgtggatgacatacagaagggaaataccatcaaaagactgaacatccagaagaggcggaagccgtccgtgccatgcccagaacccaggaccacatctggtcagcaaggtatatggacttccactgaatccctctcatcctccaacagtgatgacaacaagcagtgccccaacttcctcatagccagaagtcaagttacatcaactccaatctcaaagccacctccccctctggagacctcactcccttttcttaccatcccagaaaatcgacagctgccacctccctcaccacaactcccaaagcataaccttcatgtcaccaagacactgatggagacccggagaagactggaacaggagagagccaccatgcagatgacaccgggtgagttcagaaggcccaggctggccagttttggaggcatgggcaccacaagctccctcccttcttttgtgggttctggaaaccacaatcctgccaagcaccagcttcagaatggataccaaggtaatggggattatggtagctatgccccagctgctcccaccacttcctccatggggagctccatccgccacagccccctgagctcagggatctccaccccagtgaccaacgtgagccccatgcacctgcagcacatccgcgagcagatggccattgctctgaaacgcctgaaggagctggaggagcaggtgcgaaccatccctgtgctccaggtaaagatctctgtcttgcaagaagagaaaaggcagttggtctcacagctgaaaaaccaaagggctgcatcccagatcaatgtctgtggtgtgaggaagcggtcctatagtgcggggaacgcctcccagctggaacagctctcccgggcccgaagaagtggcggggaattatacattgactatgaggaggaagaaatggagaccgtagaacagagcacgcagaggataaaggagttccggcaacttacagcagacatgcaagccctggagcagaagatccaggacagcagctgtgaggcctcctcagagctcagggagaatggagagtgccggtctgtggctgtgggtgccgaggagaacatgaacgacatcgtcgtgtaccacagaggctccaggtcctgtaaggatgcagctgtagggacacttgttgagatgagaaattgtggggtcagcgtgacagaggccatgcttggagtgatgactgaagctgacaaagaaattgagctgcaacagcagaccatagaatccttgaaggaaaagatctatcgcctagaagtacagcttagagaaaccacccatgaccgggagatgactaaactgaaacaagagctgcaggctgctggatcgaggaaaaaggttgacaaagccacgatggcccagccgcttgttttcagtaaggtggtggaggcagtggtgcagaccagagaccaaatggtcggcagtcacatggacctggtggacacgtgtgttgggacctccgtggaaacaaacagtgtaggcatctcctgccagcctgaatgtaagaataaagtcgtagggcctgagctgcctatgaattggtggattgttaaggagagggtggaaatgcatgaccgatgtgctgggaggtctgtggaaatgtgtgacaagagtgtgagtgtggaagtcagcgtctgcgaaacaggcagcaacacagaggagtctgtgaacgacctcacactcctcaagacaaacttgaatctcaaagaagtgcggtctatcggttgtggagattgttctgttgacgtgaccgtctgctctccaaaggagtgcgcctcccggggcgtgaacactgaggctgttagccaggtggaagctgccgtcatggcagtgcctcgtactgcagaccaggacactagcacagatttggaacaggtgcaccagttcaccaacaccgagacggccaccctcatagagtcctgcaccaacacttgtctaagcactttggacaagcagaccagcacccagactgtggagacgcggacagtagctgtaggagaaggccgtgtcaaggacatcaactcctccaccaagacgcggtccattggtgttggaacgttgctttctggccattctgggtttgacaggccatcagctgtgaagaccaaagagtcaggtgtggggcagataaatattaacgacaactatctggttggtctcaaaatgaggactatagcttgtgggccaccacagttgactgtggggctgacagccagcagaaggagcgtgggggttggggatgaccctgtaggggaatctctggagaacccccagcctcaagctccacttggaatgatgactggcctggatcactacattgagcgtatccagaagctgctggcagaacagcagacactgctggctgagaactacagtgaactggcagaagctttcggggaacctcactcacagatgggctccctcaactctcagctcatcagcaccctgtcgtctatcaactctgtcatgaaatctgcaagcactgaagagctgaggaaccctgacttccagaaaaccagtctgggtaaaatcacaggcaattatttgggatatacctgtaagtgtgggggccttcagtcaggaagtcccttaagctcccagacatcccagcctgagcaagaagtggggacctcagaaggaaagccaatcagcagcctggatgccttccccactcaggaaggtacgctgtctccagtgaacctgacagacgaccagatcgccgctggcctctatgcatgtacaaacaatgaaagtacactgaagtccatcatgaagaagaaagatggtaacaaagattcaaatggcgcaaaaaagaatcttcagtttgttggcattaatggagggtatgaaacaacttcaagtgatgattccagctcagatgaaagctcttcttccgagtcagatgacgagtgtgatgtcattgagtatcctcttgaagaagaggaggaggaggaggatgaagacactcggggaatggcagaagggcaccatgcagttaatattgaaggtttgaagtctgccagggtggaagatgaaatgcaggttcaagaatgtgaacctgagaaggtggaaatcagagagaggtatgaattaagtgaaaagatgttgtctgcatgcaacttactgaaaaatactataaatgaccccaaagctttgaccagcaaagatatgggccaggtgcagtggctgacacctatgatcccaacacttcgggaggccgatgcaggtggatcacatgagaggttctgtctgaacaccctccagcacgagtggttccgcgtgtccagtcagaagtcagccattccagccatggtgggggactacatagctgcttttgaggccatttccccagatgtcctccgctatgtcatcaacttggcagacggcaacggcaacacagccctccattacagcgtgtcccactccaacttcgagattgtgaagctgctgttagatgccgatgtgtgtaatgtggatcaccagaacaaggcaggctacacccccatcatgttggcggccctcgccgctgtggaagcagagaaggacatgcggattgtggaagaactcttcggctgtggggatgtgaatgccaaagctagtcaggcgggacagacggccctcatgctggcggtcagtcacggacggatagacatggtgaagggccttctggcctgtggggctgatgtcaacatccaggatgacgagggctccacggccctcatgtgtgccagcgagcacggacacgtggagattgtcaagctgctgctggcccagcccggctgcaacggtcacctagaggacaacgatggcagcactgcgctctcaatcgccctggaagcaggacacaaggacatcgctgttcttctgtatgcccatgtcaactttgcaaaagcccagtctccgggcacccctaggcttggaaggaagacgtctcctggccccacccaccgaggttcatttgattgattgtatgcaaatagccctttatttacatgccactattaagctgctaattgttcctgttggggtgacagatactgaatgtatacgtattgtgcctgagctcaccagcaaacagaagcatcaagcccaggggtaaaggctgaagctttcacagtgcagagactgctagcctgggcacacacacctcctttctggccgtcttctgtgtagggcacactttaacccagtctctgttgctgttgagtctctgctccgttttgtacagtcacagggaattctgatctgaaggggcaccttctgttcactcccacaaagtggtgtctggttctcactgagacgttttaagatttttccacaaatatttatatgtactaaatgtggaaccattagaaagttcttccaaaatctcattccagcatagttttggatttttcttttgtcttattttaaaataaggaagtcgagatgactttgatcattggtaacttgggcctgggccagacaaagtataaaacttacaaaagaatattctcatttggtcttaactaggtagatgtaatatatgactttttataaaaagggtatctatatgaacttgacacagtattttcagcttttgtattccatactaaagccatgaagaactacacgtaacatcatcatttgtattaattgcacaactccaatgctaaaggttggattgtgttagaggaatcggctctgtatttgcctctagagaaacacagtgttctctttgtatttatggattcctttttaccgtgtcacatttactttggtcctctatgtatttaaatgtttgaagtgccttagactcttgccatattttcaaaataaaattccattaagctct

SEQ ID NO: 2228 - DNA, 4553 bp, Homo sapiens
  source 1..4553: mol_type = genomic DNA
gctccggctcagccgctggcacccccaccgccaccaccctagtctcctagtcgcctgccaccagcccctgagagactgcaggtccagtgaaaaggagcaggaacggcagcagcccggccgccgacccggaagctctttcaccgccaaccgcgaggctgcaaagggtgtgaacccggaagcgatttcatagccacggtaacggcggggtggaaagctaaggcctttgaagacctgggaccccgtagtttcgggagagggtgaggggtgaatggtgctgaggtgcgaggagagggaaggacagtaaagagcaggtgggcaggagggtctccgactccagagacctgagcttttggggcgcgggtgggagcgcgggggaaccctcaagacggctttcttttggcgactgagggtttttctgccacaggaagctgggccgggctgctgtgcctgggaggagggaaggaggaatgagaaagcggtgacggtccctgccccccctcgccaggtgactgtcccacccatttagttgaatgtagcggccagagaggcactcgcggcagcccgtacgggtgggacctctcggtgtccttcgggaaacaggaggagcaagttcgactccagcgagggaaaacggagcctcaccagaagtctttcatctcggtggtccaactcaggatctcagcctcattattttcttacccttctggagtgcatatgtgcctttacagtttctgtttgcaaacgctgtctagcatactaagaggatgttagcaaacctgttccatggacactaaatggcagttgtacatctcccctcatcagtcatagtgacaaccagaaatgccctccatattttccagtgatcccagtcttcaatgcgtctgtctcataatttgtaaacgtttattatcttgaagtcattgttaatctgtggtgaaaagtaattgctaaatagaaattctgagaagaaaaaggcctcatccttttcacatgatgtaggaaggtctgttgcatgagcaatgggaaatccagaaaacatagaagatgcatatgttgctgttattcgtccaaagaatactgccagtctcaattctcgggaatacagagctaagtcatatgaaattttgttgcatgaagttcccattgaaggacagaaaaaaaagagaaagaaagttttattggaaacgaaacttcaaggcaacagtgaaataacacaaggcatattggattacgtagtagaaaccaccaaaccaatttctcctgcaaaccagggtatcagaggaaaacgagttgtactaatgaaaaaatttcctctggatggagagaagatgggcagagaagcatcattatttattgttccatcagttgtcaaagataatactaaatacacatataccccaggatgcccaattttttactgcttacaagatattatgcgagtctgtagtgaatccagtactcattttgctacacttacagcaaggatgttaatagccttggataagtggttagatgaacgtcatgcacaatctcactttattccagctttattccgaccttctcctcttgagcggataaaaactaatgtcataaatcctgcatatgctactgaatcaggtcagacagaaaactcactacatatgggctatagtgcactagaaataaagagtaaaatgttagccctagagaaagcagatacctgtatttacaaccctttgtttggatcagatcttcagtatacaaatcgggtagataaagtggtaataaatccatactttggtctaggagctccagactactcaaaaatccaaatacctaaacaggaaaaatggcagagaagcatgagcagtgtcacagaagacaaggaacgacagtgggtagatgattttcctctccaccgaagcgcctgtgaaggagattcagaattactaagccgtcttctcagtgaaagattttcagtcaaccagttagatagtgaccactgggcacccattcattatgcatgctggtatggaaaagttgaggccactcgcatattgttagagaaaggaaagtgcaatccaaaccttttaaatggacaacttagttctcctcttcattttgctgctggaggaggacatgctgaaatagtacagattctcctaaaccacccagaaacggatagacatataacagaccaacaaggaagatctccattaaatatttgtgaagaaaacaaacaaaacaactgggaagaagctgcaaaattgttgaaggaagcaattaacaaaccatatgaaaaagttcgaatatacagaatggatgggtcatatcgttctgttgaattgaagcatggaaataataccacagtgcagcagataatggaaggaatgcgtctctctcaagaaactcagcaatatttcactatatggatttgttcagaaaacctcagccttcaactcaaaccatatcataaacccttgcaacatgttcgtgactggccagaaatacttgctgaattgactaatctggatcctcaaagggaaacacctcagctttttctaagaagagatgtgagacttcccttggaagttgaaaaacagattgaagacccactagctattcttattctctttgatgaagccagatataatttattgaagggcttttatacagctcctgatgctaagctgataacattggcaagtctgcttttgcaaatagtctatggaaattatgagagtaaaaaacacaagcaaggtttcctaaatgaagaaaatctaaaatccatcgtacctgttaccaaactgaaaagtaaggcacctcactggacaaatcgcatacttcatgaatacaagaatctcagtacaagtgaaggtgtcagtaaagaaatgcatcaccttcagcgcatgttcttacagaattgctgggaaattcctacttatggagcagcatttttcacaggacagatatttacaaaggcaagccccagcaatcataaagtcatccctgtgtatgtaggagtgaatataaaaggacttcatctcctcaacatggaaactaaggctttactcatcagtcttaagtatggttgttttatgtggcaattgggagatactgatacttgttttcagatccatagcatggaaaataaaatgagctttatagtacatacaaaacaggctggtctcgtggtaaaactgttaatgaagctaaatggacagttaatgcccactgaaagaaattcatgaaagagaagtaactgttactcaagccaccacattttgtaatgcagagttttttttccgtgaaagatttcttaaaatattacttttggccgagcatggtggctcacccctgtaattccagcactttgggaggctggggcaggcggatcacctgaagtcagagttcaagaccagcctggccaacatggtgaaaccctgtctctacaaaaatacaaaaattagctgggtgtggtggcgggcgcctataatcctagctactagggaggccaaggtgggagatcgcttaaacccaggaggtggaggttgtagtgagccaagattgcaccacggcacgctagcctgggtgacacagcaagactccatctcaaaaaaaaaaaaaaattactttcaacaaggcatatagtctcttgtaatatatatgtatactattacattgtacagaatctgtacttatgtttggtgtgtaatataccaattagttttatataatatcctcataagctattctaatttttgagagaaacacaaaaagttatagattgatagtctgtataatattagacaaaatagtaagctttataaaaagttatttttggtaaatggtaaggaatttggggtggaatgtgatgagattaaaatgtagctttggtataacttcatgtgtatttcaaaatatactgaacgtcaacatgatttgaataaagaaaatgtattttctacttgaaccacataacactgttatttaaaacagttttctgcagtctataaacatttctcaacatttttttaaaagtcttagttaaaatgtaaatctgatatacagtagtgtttctcaaagtatagttcatgaactccttgcatcataattacctagatgcctcttaaaaatgaagatttcagagacccattctaaacaagggcattcactctctggaagtagcatggccttgtgaacttaaatttggttttgttttttcttttttgctgttagaataatttcagacccaataaggaatttcgattattaaagttgagaaatttcacaaaactgcctggcacacaagcacacacatacatagacacattttaagtgataatctcttgatattagaagttgcatttgttaaatacatgctgtattttttatgagttgacttaatagtttatgtatattgactttgctttgtaggaagtaaatcaccagatatcttattgtttcatttaggaaagtagtgatatagatgaagagccaacttgatgaatgtgctattcataagctagaaactacagtttttccaaactaataaactgatgaattctaaataa

SEQ ID NO: 2229 - DNA, 2827 bp, Homo sapiens
  source 1..2827: mol_type = genomic DNA
atagccacggtaacggcggggtggaaagctaaggcctttgaagacctgggaccccgtagtttcgggagagggtgaggggtgaatggtgctgaggtgcgaggagagggaaggacagtaaagagcaggtttttggctttcatcgctttttctacatgtttttagcctcaccagaagtctttcatctcggtggtccaactcaggatctcagcctcattattttcttacccttctggagtgcatatgtgcctttacagtttctgtttgcaaacgctgtctagcatactaagaggatgttagcaaacctgttccatggacactaaatggcagttgtacatctcccctcatcagtcatagtgacaaccagaaatgccctccatattttccagtgatcccagcaatgggaaatccagaaaacatagaagatgcatatgttgctgttattcgtccaaagaatactgccagtctcaattctcgggaatacagagctaagtcatatgaaattttgttgcatgaagttcccattgaaggacagaaaaaaaagagaaagaaagttttattggaaacgaaacttcaaggcaacagtgaaataacacaaggcatattggattacgtagtagaaaccaccaaaccaatttctcctgcaaaccagggtatcagaggaaaacgagttgtactaatgaaaaaatttcctctggatggagagaagatgggcagagaagcatcattatttattgttccatcagttgtcaaagataatactaaatacacatataccccaggatgcccaattttttactgcttacaagatattatgcgagtctgtagtgaatccagtactcattttgctacacttacagcaaggatgttaatagccttggataagtggttagatgaacgtcatgcacaatctcactttattccagctttattccgaccttctcctcttgagcggataaaaactaatgtcataaatcctgcatatgctactgaatcaggtcagacagaaaactcactacatatgggctatagtgcactagaaataaagagtaaaatgttagccctagagaaagcagatacctgtatttacaaccctttgtttggatcagatcttcagtatacaaatcgggtagataaagtggtaataaatccatactttggtctaggagctccagactactcaaaaatccaaatacctaaacaggaaaaatggcagagaagcatgagcagtgtcacagaagacaagtatggaaaagttgaggccactcgcatattgttagagaaaggaaagtgcaatccaaaccttttaaatggacaacttagttctcctcttcattttgctgctggaggaggacatgctgaaatagtacagattctcctaaaccacccagaaacggatagacatataacagaccaacaaggaagatctccattaaatatttgtgaagaaaacaaacaaaacaactgggaagaagctgcaaaattgttgaaggaagcaattaacaaaccatatgaaaaagttcgaatatacagaatggatgggtcatatcgttctgttgaattgaagcatggaaataataccacagtgcagcagataatggaaggaatgcgtctctctcaagaaactcagcaatatttcactatatggatttgttcagaaaacctcagccttcaactcaaaccatatcataaacccttgcaacatgttcgtgactggccagaaatacttgctgaattgactaatctggatcctcaaagggaaacacctcagctttttctaagaagagatgtgagacttcccttggaagttgaaaaacagattgaagacccactagctattcttattctctttgatgaagccagatataatttattgaagggcttttatacagctcctgatgctaagctgataacattggcaagtctgcttttgcaaatagtctatggaaattatgagagtaaaaaacacaagcaaggtttcctaaatgaagaaaatctaaaatccatcgtacctgttaccaaactgaaaagtaaggcacctcactggacaaatcgcatacttcatgaatacaagaatctcagtacaagtgaaggtgtcagtaaagaaatgcatcaccttcagcgcatgttcttacagaattgctgggaaattcctacttatggagcagcatttttcacaggacagatatttacaaaggcaagccccagcaatcataaagtcatccctgtgtatgtaggagtgaatataaaaggacttcatctcctcaacatggaaactaaggctttactcatcagtcttaagtatggttgttttatgtggcaattgggagatactgatacttgttttcagatccatagcatggaaaataaaatgagctttatagtacatacaaaacaggctggtctcgtggtaaaactgttaatgaagctaaatggacagttaatgcccactgaaagaaattcatgaaagagaagtaactgttactcaagccaccacattttgtaatgcagagttttttttccgtgaaagatttcttaaaatattacttttggccgagcatggtggctcacccctgtaattccagcactttgggaggctggggcaggcggatcacctgaagtcagagttcaagaccagcctggccaacatggtgaaaccctgtctctacaaaaatacaaaaattagctgggtgtggtggcgggcgcctataatcctagctactagggaggccaaggtgggagatcgcttaaacccaggaggtggaggttgtagtgagccaagattgcaccacggcacgctagcctgggtgacacagcaagactccatctc

SEQ ID NO: 2230 - DNA, 3143 bp, Homo sapiens
  source 1..3143: mol_type = genomic DNA
agcgatttcatagccacggtaacggcggggtggaaagctaaggcctttgaagacctgggaccccgtagtttcgggagagggtgaggggtgaatggtgctgaggtgcgaggagagggaaggacagtaaagagcaggtttttggctttcatcgctttttctacatgtttttagcctcaccagaagtctttcatctcggtggtccaactcaggatctcagcctcattattttcttacccttctggagtgcatatgtgcctttacagtttctgtttgcaaacgctgtctagcatactaagaggatgttagcaaacctgttccatggacactaaatggcagttgtacatctcccctcatcagtcatagtgacaaccagaaatgccctccatattttccagtgatcccagtcttcaatgcgtctgtctcataatttgtaaacgtttattatcttgaagtcattgttaatctgtggtgaaaagtaattgctaaatagaaattctgagaagaaaaaggcctcatccttttcacatgatgtaggaaggtctgttgcatgagcaatgggaaatccagaaaacatagaagatgcatatgttgctgttattcgtccaaagaatactgccagtctcaattctcgggaatacagagctaagtcatatgaaattttgttgcatgaagttcccattgaaggacagaaaaaaaagagaaagaaagttttattggaaacgaaacttcaaggcaacagtgaaataacacaaggcatattggattacgtagtagaaaccaccaaaccaatttctcctgcaaaccagggtatcagaggaaaacgagttgtactaatgaaaaaatttcctctggatggagagaagatgggcagagaagcatcattatttattgttccatcagttgtcaaagataatactaaatacacatataccccaggatgcccaattttttactgcttacaagatattatgcgagtctgtagtgaatccagtactcattttgctacacttacagcaaggatgttaatagccttggataagtggttagatgaacgtcatgcacaatctcactttattccagctttattccgaccttctcctcttgagcggataaaaactaatgtcataaatcctgcatatgctactgaatcaggtcagacagaaaactcactacatatgggctatagtgcactagaaataaagagtaaaatgttagccctagagaaagcagatacctgtatttacaaccctttgtttggatcagatcttcagtatacaaatcgggtagataaagtggtaataaatccatactttggtctaggagctccagactactcaaaaatccaaatacctaaacaggaaaaatggcagagaagcatgagcagtgtcacagaagacaaggaacgacagtgggtagatgattttcctctccaccgaagcgcctgtgaaggagattcagaattactaagccgtcttctcagtgaaagattttcagtcaaccagttagatagtgaccactgggcacccattcattatgcatgctggtatggaaaagttgaggccactcgcatattgttagagaaaggaaagtgcaatccaaaccttttaaatggacaacttagttctcctcttcattttgctgctggaggaggacatgctgaaatagtacagattctcctaaaccacccagaaacggatagacatataacagaccaacaaggaagatctccattaaatatttgtgaagaaaacaaacaaaacaactgggaagaagctgcaaaattgttgaaggaagcaattaacaaaccatatgaaaaagttcgaatatacagaatggatgggtcatatcgttctgttgaattgaagcatggaaataataccacagtgcagcagataatggaaggaatgcgtctctctcaagaaactcagcaatatttcactatatggatttgttcagaaaacctcagccttcaactcaaaccatatcataaacccttgcaacatgttcgtgactggccagaaatacttgctgaattgactaatctggatcctcaaagggaaacacctcagctttttctaagaagagatgtgagacttcccttggaagttgaaaaacagattgaagacccactagctattcttattctctttgatgaagccagatataatttattgaagggcttttatacagctcctgatgctaagctgataacattggcaagtctgcttttgcaaatagtctatggaaattatgagagtaaaaaacacaagcaaggtttcctaaatgaagaaaatctaaaatccatcgtacctgttaccaaactgaaaagtaaggcacctcactggacaaatcgcatacttcatgaatacaagaatctcagtacaagtgaaggtgtcagtaaagaaatgcatcaccttcagcgcatgttcttacagaattgctgggaaattcctacttatggagcagcatttttcacaggacagatatttacaaaggcaagccccagcaatcataaagtcatccctgtgtatgtaggagtgaatataaaaggacttcatctcctcaacatggaaactaaggctttactcatcagtcttaagtatggttgttttatgtggcaattgggagatactgatacttgttttcagatccatagcatggaaaataaaatgagctttatagtacatacaaaacaggctggtctcgtggtaaaactgttaatgaagctaaatggacagttaatgcccactgaaagaaattcatgaaagagaagtaactgttactcaagccaccacattttgtaatgcagagttttttttccgtgaaagatttcttaaaatattacttttggccgagcatggtggctcacccctgtaattccagcactttgggaggctggggcaggcggatcacctgaagtcagagttcaagaccagcctggccaacatggtgaaaccctgtctctacaaaaatacaaaaattagctgggtgtggtggcgggcgcctataatcctagctactagggaggccaaggtgggagatcgcttaaacccaggaggtggaggttgtagtgagccaagattgcaccacggcacgctagcctgggtgacacagcaagactccatctcaaaaaaaaaaaaaaa

SEQ ID NO: 2231 - DNA, 4762 bp, Homo sapiens
  source 1..4762: mol_type = genomic DNA
gctccggctcagccgctggcacccccaccgccaccaccctagtctcctagtcgcctgccaccagcccctgagagactgcaggtccagtgaaaaggagcaggaacggcagcagcccggccgccgacccggaagctctttcaccgccaaccgcgaggctgcaaagggtgtgaacccggaagcgatttcatagccacggtgactgtcccacccatttagttgaatgtagcggccagagaggcactcgcggcagcccgtacgggtgggacctctcggtgtccttcgggaaacaggaggagcaagttcgactccagcgagggaaaacggaggtgggagactgaaccatctccacatctagttgccccaggtttttggctttcatcgctttttctacatgtttttagcctcaccagaagtctttcatctcggtggtccaactcaggatctcagcctcattattttcttacccttctggagtgcatatgtgcctttacagtttctgtttgcaaacgctgtctagcatactaagaggatgttagcaaacctgttccatggacactaaatggcagttgtacatctcccctcatcagtcatagtgacaaccagaaatgccctccatattttccagtgatcccagtcttcaatgcgtctgtctcataatttgtaaacgtttattatcttgaagtcattgttaatctgtggtgaaaagtaattgctaaatagaaattctgagaagaaaaaggcctcatccttttcacatgatgtaggaaggtctgttgcatgagcaatgggaaatccagaaaacatagaagatgcatatgttgctgttattcgtccaaagaatactgccagtctcaattctcgggaatacagagctaagtcatatgaaattttgttgcatgaagttcccattgaaggacagaaaaaaaagagaaagaaagttttattggaaacgaaacttcaaggcaacagtgaaataacacaaggcatattggattacgtagtagaaaccaccaaaccaatttctcctgcaaaccagggtatcagaggaaaacgagttgtactaatgaaaaaatttcctctggatggagagaagatgggcagagaagcatcattatttattgttccatcagttgtcaaagataatactaaatacacatataccccaggatgcccaattttttactgcttacaagatattatgcgagtctgtagtgaatccagtactcattttgctacacttacagcaaggatgttaatagccttggataagtggttagatgaacgtcatgcacaatctcactttattccagctttattccgaccttctcctcttgagcggataaaaactaatgtcataaatcctgcatatgctactgaatcaggtcagacagaaaactcactacatatgggctatagtgcactagaaataaagagtaaaatgttagccctagagaaagcagatacctgtatttacaaccctttgtttggatcagatcttcagtatacaaatcgggtagataaagtggtaataaatccatactttggtctaggagctccagactactcaaaaatccaaatacctaaacaggaaaaatggcagagaagcatgagcagtgtcacagaagacaaggaacgacagtgggtagatgattttcctctccaccgaagcgcctgtgaaggagattcagaattactaagccgtcttctcagtgaaagattttcagtcaaccagttagatagtgaccactgggcacccattcattatgcatgctggtatggaaaagttgaggccactcgcatattgttagagaaaggaaagtgcaatccaaaccttttaaatggacaacttagttctcctcttcattttgctgctggaggaggacatgctgaaatagtacagattctcctaaaccacccagaaacggatagacatataacagaccaacaaggaagatctccattaaatatttgtgaagaaaacaaacaaaacaactgggaagaagctgcaaaattgttgaaggaagcaattaacaaaccatatgaaaaagttcgaatatacagaatggatgggtcatatcgttctgttgaattgaagcatggaaataataccacagtgcagcagataatggaaggaatgcgtctctctcaagaaactcagcaatatttcactatatggatttgttcagaaaacctcagccttcaactcaaaccatatcataaacccttgcaacatgttcgtgactggccagaaatacttgctgaattgactaatctggatcctcaaagggaaacacctcagctttttctaagaagagatgtgagacttcccttggaagttgaaaaacagattgaagacccactagctattcttattctctttgatgaagccagatataatttattgaagggcttttatacagctcctgatgctaagctgataacattggcaagtctgcttttgcaaatagtctatggaaattatgagagtaaaaaacacaagcaaggtttcctaaatgaagaaaatctaaaatccatcgtacctgttaccaaactgaaaagtaaggcacctcactggacaaatcgcatacttcatgaatacaagaatctcagtacaagtgaaggtgtcagtaaagaaatgcatcaccttcagcgcatgttcttacagaattgctgggaaattcctacttatggagcagcatttttcacaggacagatatttacaaaggcaagccccagcaatcataaagtcatccctgtgtatgtaggagtgaatataaaaggacttcatctcctcaacatggaaactaaggctttactcatcagtcttaagtatggttgttttatgtggcaattgggagatactgatacttgttttcagatccatagcatggaaaataaaatgagctttatagtacatacaaaacaggctggtctcgtggtaaaactgttaatgaagctaaatggacagttaatgcccactgaaagaaattcatgaaagagaagtaactgttactcaagccaccacattttgtaatgcagagttttttttccgtgaaagatttcttaaaatattacttttggccgagcatggtggctcacccctgtaattccagcactttgggaggctggggcaggcggatcacctgaagtcagagttcaagaccagcctggccaacatggtgaaaccctgtctctacaaaaatacaaaaattagctgggtgtggtggcgggcgcctataatcctagctactagggaggccaaggtgggagatcgcttaaacccaggaggtggaggttgtagtgagccaagattgcaccacggcacgctagcctgggtgacacagcaagactccatctcaaaaaaaaaaaaaaattactttcaacaaggcatatagtctcttgtaatatatatgtatactattacattgtacagaatctgtacttatgtttggtgtgtaatataccaattagttttatataatatcctcataagctattctaatttttgagagaaacacaaaaagttatagattgatagtctgtataatattagacaaaatagtaagctttataaaaagttatttttggtaaatggtaaggaatttggggtggaatgtgatgagattaaaatgtagctttggtataacttcatgtgtatttcaaaatatactgaacgtcaacatgatttgaataaagaaaatgtattttctacttgaaccacataacactgttatttaaaacagttttctgcagtctataaacatttctcaacatttttttaaaagtcttagttaaaatgtaaatctgatatacagtagtgtttctcaaagtatagttcatgaactccttgcatcataattacctagatgcctcttaaaaatgaagatttcagagacccattctaaacaagggcattcactctctggaagtagcatggccttgtgaacttaaatttggttttgttttttcttttttgctgttagaataatttcagacccaataaggaatttcgattattaaagttgagaaatttcacaaaactgcctggcacacaagcacacacatacatagacacattttaagtgataatctcttgatattagaagttgcatttgttaaatacatgctgtattttttatgagttgacttaatagtttatgtatattgactttgctttgtaggaagtaaatcaccagatatcttattgtttcatttaggaaagtagtgatatagatgaagagccaacttgatgaatgtgctattcataagctagaaactacagtttttccaaactaataaactgatgaattctaaataagttcagagatatagtcatatttaaagttgtcctacagtttgcagataatttttatattactattcttcacattaacttctgcttatttttaatggtactatatgtaggccttattaaaattaagattgtatggttaagtaaagttaacaagaaagcctgatttatctttaattctgtgctaggtacttttgattctacatgaacaatacccttttcagttcccttcattctaatgtcctcaactgttaccaaataccctgttgactcccaaacctaagattttagcctcaacttcttttctgaacttcaaatcttaatttccaagttatacttgttctaggtccatctaaatggtctacagagaacttcagttgaatcatagctggaaacagaatttatttcctctatttgcttcattctgtccttccactatattccctattt

SEQ ID NO: 2232 - DNA, 3378 bp, Homo sapiens
  source 1..3378: mol_type = genomic DNA
gagcaggtgggcaggagggtctccgactccagagacctgagcttttggggcgcgggtgggagcgcgggggaaccctcaagacggctttcttttggcgactgagggtttttctgccacaggaagctgggccgggctgctgtgcctgggaggagggaaggaggaatgagaaagcggtgacggtccctgccccccctcgccaggtgactgtcccacccatttagttgaatgtagcggccagagaggcactcgcggcagcccgtacgggtgggacctctcggtgtccttcgggaaacaggaggagcaagttcgactccagcgagggaaaacggaggtgggagactgaaccatctccacatctagttgccccaggtttttggctttcatcgctttttctacatgtttttagcctcaccagaagtctttcatctcggtggtccaactcaggatctcagcctcattattttcttacccttctggagtgcatatgtgcctttacagtttctgtttgcaaacgctgtctagcatactaagaggatgttagcaaacctgttccatggacactaaatggcagttgtacatctcccctcatcagtcatagtgacaaccagaaatgccctccatattttccagtgatcccagtcttcaatgcgtctgtctcataatttgtaaacgtttattatcttgaagtcattgttaatctgtggtgaaaagtaattgctaaatagaaattctgagaagaaaaaggcctcatccttttcacatgatgtaggaaggtctgttgcatgagcaatgggaaatccagaaaacatagaagatgcatatgttgctgttattcgtccaaagaatactgccagtctcaattctcgggaatacagagctaagtcatatgaaattttgttgcatgaagttcccattgaaggacagaaaaaaaagagaaagaaagttttattggaaacgaaacttcaaggcaacagtgaaataacacaaggcatattggattacgtagtagaaaccaccaaaccaatttctcctgcaaaccagggtatcagaggaaaacgagttgtactaatgaaaaaatttcctctggatggagagaagatgggcagagaagcatcattatttattgttccatcagttgtcaaagataatactaaatacacatataccccaggatgcccaattttttactgcttacaagatattatgcgagtctgtagtgaatccagtactcattttgctacacttacagcaaggatgttaatagccttggataagtggttagatgaacgtcatgcacaatctcactttattccagctttattccgaccttctcctcttgagcggataaaaactaatgtcataaatcctgcatatgctactgaatcaggtcagacagaaaactcactacatatgggctatagtgcactagaaataaagagtaaaatgttagccctagagaaagcagatacctgtatttacaaccctttgtttggatcagatcttcagtatacaaatcgggtagataaagtggtaataaatccatactttggtctaggagctccagactactcaaaaatccaaatacctaaacaggaaaaatggcagagaagcatgagcagtgtcacagaagacaaggaacgacagtgggtagatgattttcctctccaccgaagcgcctgtgaaggagattcagaattactaagccgtcttctcagtgaaagattttcagtcaaccagttagatagtgaccactgggcacccattcattatgcatgctggtatggaaaagttgaggccactcgcatattgttagagaaaggaaagtgcaatccaaaccttttaaatggacaacttagttctcctcttcattttgctgctggaggaggacatgctgaaatagtacagattctcctaaaccacccagaaacggatagacatataacagaccaacaaggaagatctccattaaatatttgtgaagaaaacaaacaaaacaactgggaagaagctgcaaaattgttgaaggaagcaattaacaaaccatatgaaaaagttcgaatatacagaatggatgggtcatatcgttctgttgaattgaagcatggaaataataccacagtgcagcagataatggaaggaatgcgtctctctcaagaaactcagcaatatttcactatatggatttgttcagaaaacctcagccttcaactcaaaccatatcataaacccttgcaacatgttcgtgactggccagaaatacttgctgaattgactaatctggatcctcaaagggaaacacctcagctttttctaagaagagatgtgagacttcccttggaagttgaaaaacagattgaagacccactagctattcttattctctttgatgaagccagatataatttattgaagggcttttatacagctcctgatgctaagctgataacattggcaagtctgcttttgcaaatagtctatggaaattatgagagtaaaaaacacaagcaaggtttcctaaatgaagaaaatctaaaatccatcgtacctgttaccaaactgaaaagtaaggcacctcactggacaaatcgcatacttcatgaatacaagaatctcagtacaagtgaaggtgtcagtaaagaaatgcatcaccttcagcgcatgttcttacagaattgctgggaaattcctacttatggagcagcatttttcacaggacagatatttacaaaggcaagccccagcaatcataaagtcatccctgtgtatgtaggagtgaatataaaaggacttcatctcctcaacatggaaactaaggctttactcatcagtcttaagtatggttgttttatgtggcaattgggagatactgatacttgttttcagatccatagcatggaaaataaaatgagctttatagtacatacaaaacaggctggtctcgtggtaaaactgttaatgaagctaaatggacagttaatgcccactgaaagaaattcatgaaagagaagtaactgttactcaagccaccacattttgtaatgcagagttttttttccgtgaaagatttcttaaaatattacttttggccgagcatggtggctcacccctgtaattccagcactttgggaggctggggcaggcggatcacctgaagtcagagttcaagaccagcctggccaacatggtgaaaccctgtctctacaaaaatacaaaaattagctgggtgtggtggcgggcgcctataatcctagctactagggaggccaaggtgggagatcgcttaaacccaggaggtggaggttgtagtgagccaagattgcaccacggcacgctagcctgggtgacacagcaagactccatctcaaaaaaaaaaaaaaa

SEQ ID NO: 2233 - DNA, 551 bp, Homo sapiens
  source 1..551: mol_type = genomic DNA
atagccacggtaacggcggggtggaaagctaaggcctttgaagacctgggaccccgtagtttcgggagagggtttttggctttcatcgctttttctacatgtttttagcctcaccagaagtctttcatctcggtggtccaactcaggatctcagcctcattattttcttacccttctggagtgcatatgtgcctttacagtttctgtttgcaaacgctgtctagcatactaagaggatgttagcaaacctgttccatggacactaaatggcagttgtacatctcccctcatcagtcatagtgacaaccagaaatgccctccatattttccagtgatcccagcaatgggaaatccagaaaacatagaagatgcatatgttgctgttattcgtccaaagaatactgccagtctcaattctcgggaatacagagctaagtcatatgaaattttgttgcatgaagttcccattgaaggacagaaaaaaaagagaaagaaagttttattggaaacgaaacttcaaggcaacagtgaaataacacaaggcatattgg

SEQ ID NO: 2234 - DNA, 3056 bp, Homo sapiens
  source 1..3056: mol_type = genomic DNA
tcgggagagggtgaggggtgaatggtgctgaggtgcgaggagagggaaggacagtaaagagcaggtttttggctttcatcgctttttctacatgtttttagcctcaccagaagtctttcatctcggtggtccaactcaggatctcagcctcattattttcttacccttctggagtgcatatgtgcctttacagtttctgtttgcaaacgctgtctagcatactaagaggatgttagcaaacctgttccatggacactaaatggcagttgtacatctcccctcatcagtcatagtgacaaccagaaatgccctccatattttccagtgatcccagtcttcaatgcgtctgtctcataatttgtaaacgtttattatcttgaagtcattgttaatctgtggtgaaaagtaattgctaaatagaaattctgagaagaaaaaggcctcatccttttcacatgatgtaggaaggtctgttgcatgagcaatgggaaatccagaaaacatagaagatgcatatgttgctgttattcgtccaaagaatactgccagtctcaattctcgggaatacagagctaagtcatatgaaattttgttgcatgaagttcccattgaaggacagaaaaaaaagagaaagaaagttttattggaaacgaaacttcaaggcaacagtgaaataacacaaggcatattggattacgtagtagaaaccaccaaaccaatttctcctgcaaaccagggtatcagaggaaaacgagttgtactaatgaaaaaatttcctctggatggagagaagatgggcagagaagcatcattatttattgttccatcagttgtcaaagataatactaaatacacatataccccaggatgcccaattttttactgcttacaagatattatgcgagtctgtagtgaatccagtactcattttgctacacttacagcaaggatgttaatagccttggataagtggttagatgaacgtcatgcacaatctcactttattccagctttattccgaccttctcctcttgagcggataaaaactaatgtcataaatcctgcatatgctactgaatcaggtcagacagaaaactcactacatatgggctatagtgcactagaaataaagagtaaaatgttagccctagagaaagcagatacctgtatttacaaccctttgtttggatcagatcttcagtatacaaatcgggtagataaagtggtaataaatccatactttggtctaggagctccagactactcaaaaatccaaatacctaaacaggaaaaatggcagagaagcatgagcagtgtcacagaagacaaggaacgacagtgggtagatgattttcctctccaccgaagcgcctgtgaaggagattcagaattactaagccgtcttctcagtgaaagattttcagtcaaccagttagatagtgaccactgggcacccattcattatgcatgctggtatggaaaagttgaggccactcgcatattgttagagaaaggaaagtgcaatccaaaccttttaaatggacaacttagttctcctcttcattttgctgctggaggaggacatgctgaaatagtacagattctcctaaaccacccagaaacggatagacatataacagaccaacaaggaagatctccattaaatatttgtgaagaaaacaaacaaaacaactgggaagaagctgcaaaattgttgaaggaagcaattaacaaaccatatgaaaaagttcgaatatacagaatggatgggtcatatcgttctgttgaattgaagcatggaaataataccacagtgcagcagataatggaaggaatgcgtctctctcaagaaactcagcaatatttcactatatggatttgttcagaaaacctcagccttcaactcaaaccatatcataaacccttgcaacatgttcgtgactggccagaaatacttgctgaattgactaatctggatcctcaaagggaaacacctcagctttttctaagaagagatgtgagacttcccttggaagttgaaaaacagattgaagacccactagctattcttattctctttgatgaagccagatataatttattgaagggcttttatacagctcctgatgctaagctgataacattggcaagtctgcttttgcaaagtctatggaaattatgagagtaaaaaacacaagcaaggtttcctaaatgaagaaaatctaaaatccatcgtacctgttaccaaactgaaaagtaaggcacctcactggacaaatcgcatacttcatgaatacaagaatctcagtacaagtgaaggtgtcagtaaagaaatgcatcaccttcagcgcatgttcttacagaattgctgggaaattcctacttatggagcagcatttttcacaggacagatatttacaaaggcaagccccagcaatcataaagtcatccctgtgtatgtaggagtgaatataaaaggacttcatctcctcaacatggaaactaaggctttactcatcagtcttaagtatggttgttttatgtggcaattgggagatactgatacttgttttcagatccatagcatggaaaataaaatgagctttatagtacatacaaaacaggctggtctcgtggtaaaactgttaatgaagctaaatggacagttaatgcccactgaaagaaattcatgaaagagaagtaactgttactcaagccaccacattttgtaatgcagagttttttttccgtgaaagatttcttaaaatattacttttggccgagcatggtggctcacccctgtaattccagcactttgggaggctggggcaggcggatcacctgaagtcagagttcaagaccagcctggccaacatggtgaaaccctgtctctacaaaaatacaaaaattagctgggtgtggtggcgggcgcctataatcctagctactagggaggccaaggtgggagatcgcttaaacccaggaggtggaggttgtagtgagccaagattgcaccacggcacgctagcctgggtgacacagcaagactccatctc

SEQ ID NO: 2235 - DNA, 483 bp, Homo sapiens
  source 1..483: mol_type = genomic DNA
acccggaagcgatttcatagccacgcctcaccagaagtctttcatctcggtggtccaactcaggatctcagcctcattattttcttacccttctggagtgcatatgtgcctttacagtttctgtttgcaaacgctgtctagcatactaagaggatgttagcaaacctgttccatggacactaaatggcagttgtacatctcccctcatcagtcatagtgacaaccagaaatgccctccatattttccagtgatcccagtcttcaatgcgtctgtctcataatttgtaaacgtttattatcttgaagtcattgttaatctgtggtgaaaagtaattgctaaatagaaattctgagaagaaaaaggcctcatccttttcacatgatgtaggaaggtctgttgcatgagcaatgggaaatccagaaaacatagaagatgcatatgttgctgttattcgtccaaagaatactgccagtctcaattct

SEQ ID NO: 2236 - DNA, 546 bp, Homo sapiens
  source 1..546: mol_type = genomic DNA
agccacggtaacggcggggtggaaagctaaggcctttgaagacctgggaccccgtagtttcgggagagggtgaggggtgaatggtgctgaggtttttggctttcatcgctttttctacatgtttttagcctcaccagaagtctttcatctcggtggtccaactcaggatctcagcctcattattttcttacccttctggagtgcatatgtgcctttacagtttctgtttgcaaacgctgtctagcatactaagaggatgttagcaaacctgttccatggacactaaatggcagttgtacatctcccctcatcagtcatagtgacaaccagaaatgccctccatattttccagtgatcccagtcttcaatgcgtctgtctcataatttgtaaacgtttattatcttgaagtcattgttaatctgtggtgaaaagtaattgctaaatagaaattctgagaagaaaaaggcctcatccttttcacatgatgtaggaaggtctgttgcatgagcaatgggaaatccagaaaacatagaagatgcatatgt

SEQ ID NO: 2237 - DNA, 572 bp, Homo sapiens
  source 1..572: mol_type = genomic DNA
gcaaagggtgtgaacccggaagcgatttcatagccacggtttttggctttcatcgctttttctacatgtttttagcctcaccagaagtctttcatctcggtggtccaactcaggatctcagcctcattattttcttacccttctggagtgcatatgtgcctttacagtttctgtttgcaaacgctgtctagcatactaagaggatgttagcaaacctgttccatggacactaaatggcagttgtacatctcccctcatcagtcatagtgacaaccagaaatgccctccatattttccagtgatcccagtcttcaatgcgtctgtctcataatttgtaaacgtttattatcttgaagtcattgttaatctgtggtgaaaagtaattgctaaatagaaattctgagaagaaaaaggcctcatccttttcacatgatgtaggaaggtctgttgcatgagcaatgggaaatccagaaaacatagaagatgcatatgttgctgttattcgtccaaagaatactgccagtctcaattctcgggaatacagagctaagtcatatgaaattttgttgcat

SEQ ID NO: 2238 - DNA, 702 bp, Homo sapiens
  source 1..702: mol_type = genomic DNA
acctgggaccccgtagtttcgggagagggtgaggggtgaatggtgctgaggtgcgaggagagggaaggacagtaaagagcaggtgggcaggagggtctccgactccagagacctgagcttttggggcgcgggtgggagcgcgggggaaccctcaagacggctttcttttggcgactgagggtttttctgccacaggaagctgggccgggctgctgtgcctgggaggagggaaggaggaatgagaaagcggtgacggtccctgccccccctcgccaggtgactgtcccacccatttagttgaatgtagcggccagagaggcactcgcggcagcccgtacgggtgggacctctcggtgtccttcgggaaacaggaggagcaagttcgactccagcgagggaaaacggagcaatgggaaatccagaaaacatagaagatgcatatgttgctgttattcgtccaaagaatactgccagtctcaattctcgggaatacagagctaagtcatatgaaattttgttgcatgaagttcccattgaaggacagaaaaaaaagagaaagaaagttttattggaaacgaaacttcaaggcaacagtgaaataacacaaggcatattggattacgtagtagaaaccaccaaaccaatttctcctgcaaaccagggtatcagaggaaaacgagttgtactaatgaaaaaatttcc

SEQ ID NO: 2239 - DNA, 855 bp, Homo sapiens
  source 1..855: mol_type = genomic DNA
gatttcatagccacggtaacggcggggtggaaagctaaggcctttgaagacctgggaccccgtagtttcgggagagggtgaggggtgaatggtgctgaggtgcgaggagagggaaggacagtaaagagcaggtgactgtcccacccatttagttgaatgtagcggccagagaggcactcgcggcagcccgtacgggtgggacctctcggtgtccttcgggaaacaggaggagcaagttcgactccagcgagggaaaacggaggtgggagactgaaccatctccacatctagttgccccagcaatgggaaatccagaaaacatagaagatgcatatgttgctgttattcgtccaaagaatactgccagtctcaattctcgggaatacagagctaagtcatatgaaattttgttgcatgaagttcccattgaaggacagaaaaaaaagagaaagaaagttttattggaaacgaaacttcaaggcaacagtgaaataacacaaggcatattggattacgtagtagaaaccaccaaaccaatttctcctgcaaaccagggtatcagaggaaaacgagttgtactaatgaaaaaatttcctctggatggagagaagatgggcagagaagcatcattatttattgttccatcagttgtcaaagataatactaaatacacatataccccaggatgcccaattttttactgcttacaagatattatgcgagtctgtagtgaatccagtactcattttgctacacttacagcaaggatgttaatagccttggataagtggttagatgaacgtcatgcacaatctcactttattccagctttattccgaccttctcctcttgagc

SEQ ID NO: 2240 - DNA, 557 bp, Homo sapiens
  source 1..557: mol_type = genomic DNA
atagccacggtaacggcggggtggaaagctaaggcctttgaagacctgggaccccgtagtttcgggagaggttgaatgtagcggccagagaggcactcgcggcagcccgtacgggtgggacctctcggtgtccttcgggaaacaggaggagcaagttcgactccagcgagggaaaacggaggtgggagactgaaccatctccacatctagttgccccagcaatgggaaatccagaaaacatagaagatgcatatgttgctgttattcgtccaaagaatactgccagtctcaattctcgggaatacagagctaagtcatatgaaattttgttgcatgaagttcccattgaaggacagaaaaaaaagagaaagaaagttttattggaaacgaaacttcaaggcaacagtgaaataacacaaggcatattggattacgtagtagaaaccaccaaaccaatttctcctgcaaaccagggtatcagaggaaaacgagttgtactaatgaaaaaatttcctctggatggagagaagatgggcagagaagcatcattatttatt

SEQ ID NO: 2241 - DNA, 783 bp, Homo sapiens
  source 1..783: mol_type = genomic DNA
tcatgttccagccttgcgcgctcgcagccccggccgccctcttcccctcccccgcctccggctccggctccggctcagccgctggcacccccaccgccaccaccctagtctcctagtcgcctgccaccagcccctgagagactgcaggtccagtgaaaaggagcaggaacggcagcagcccggccgccgacccggaagctctttcaccgccaaccgcgaggctgcaaagggtgtgaacccggaagcgatttcatagccacggtttttggctttcatcgctttttctacatgtttttagcctcaccagaagtctttcatctcggtggtccaactcaggatctcagcctcattattttcttacccttctggagtgcatatgtgcctttacagtttctgtttgcaaacgctgtctagcatactaagaggatgttagcaaacctgttccatggacactaaatggcagttgtacatctcccctcatcagtcatagtgacaaccagaaatgccctccatattttccagtgatcccagtcttcaatgcgtctgtctcataatttgtaaacgtttattatcttgaagtcattgttaatctgtggtgaaaagtaattgctaaatagaaattctgagaagaaaaaggcctcatccttttcacatgatgtaggaaggtctgttgcatgagcaatgggaaatccagaaaacatagaagatgcatatgttgctgttattcgtccaaagaatactgccagtctcaattctcgggaatacagagctaagtcatatgaa

SEQ ID NO: 2242 - DNA, 665 bp, Homo sapiens
  source 1..665: mol_type = genomic DNA
catagccacggtaacggcggggtggaaagctaaggcctttgaagacctgggaccccgtagtttcgggagagggtgaggggtgaatggtgctgaggtgcgaggagagggaaggacagtaaagagcaggtgggcaggagggtctccgactccagagacctgagcttttggggcgcgggtgggagcgcgggggaaccctcaagacggctttcttttggcgactgagggtttttctgccacaggaagctgggccgggctgctgtgcctgggaggagggaaggaggaatgagaaagcggtgacggtccctgccccccctcgccaggtgactgtcccacccatttagttgaatgtagcggccagagaggcactcgcggcagcccgtacgggtgggacctctcggtgtccttcgggaaacaggaggagcaagttcgactccagcgagggaaaacggaggtgggagactgaaccatctccacatctagttgccccagcaatgggaaatccagaaaacatagaagatgcatatgttgctgttattcgtccaaagaatactgccagtctcaattctcgggaatacagagctaagtcatatgaaattttgttgcatgaagttcccattgaaggacagaaaaaaaagagaaagaaagttttattggaaacgaaactt

SEQ ID NO: 2243 - DNA, 978 bp, Homo sapiens
  source 1..978: mol_type = genomic DNA
atagccacggtaacggcggggtggaaagctaaggcctttgaagacctgggaccccgtagtttcgggagagggtttttggctttcatcgctttttctacatgtttttagcctcaccagaagtctttcatctcggtggtccaactcaggatctcagcctcattattttcttacccttctggagtgcatatgtgcctttacagtttctgtttgcaaacgctgtctagcatactaagaggatgttagcaaacctgttccatggacactaaatggcagttgtacatctcccctcatcagtcatagtgacaaccagaaatgccctccatattttccagtgatcccagtcttcaatgcgtctgtctcataatttgtaaacgtttattatcttgaagtcattgttaatctgtggtgaaaagtaattgctaaatagaaattctgagaagaaaaaggcctcatccttttcacatgatgtaggaaggtctgttgcatgagcaatgggaaatccagaaaacatagaagatgcatatgttgctgttattcgtccaaagaatactgccagtctcaattctcgggaatacagagctaagtcatatgaaattttgttgcatgaagttcccattgaaggacagaaaaaaaagagaaagaaagttttattggaaacgaaacttcaaggcaacagtgaaataacacaaggcatattggattacgtagtagaaaccaccaaaccaatttctcctgcaaaccagggtatcagaggaaaacgagttgtactaatgaaaaaatttcctctggatggagagaagatgggcagagaagcatcattatttattgttccatcagttgtcaaagataatactaaatacacatataccccaggatgcccaattttttactgcttacaagatattatgcgagtctgtagtgaatccagtactcattttgctacacttacagcaaggatgttaatagccttggataagt

SEQ ID NO: 2244 - DNA, 1472 bp, Homo sapiens
  source 1..1472: mol_type = genomic DNA
gtctcctagtcgcctgccaccagcccctgagagactgcaggtccagtgaaaaggagcaggaacggcagcagcccggccgccgacccggaagctctttcaccgccaaccgcgaggctgcaaagggtgtgaacccggaagcgatttcatagccacggtgactgtcccacccatttagttgaatgtagcggccagagaggcactcgcggcagcccgtacgggtgggacctctcggtgtccttcgggaaacaggaggagcaagttcgactccagcgagggaaaacggaggtgggagactgaaccatctccacatctagttgccccaggtttttggctttcatcgctttttctacatgtttttagcctcaccagaagtctttcatctcggtggtccaactcaggatctcagcctcattattttcttacccttctggagtgcatatgtgcctttacagtttctgtttgcaaacgctgtctagcatactaagaggatgttagcaaacctgttccatggacactaaatggcagttgtacatctcccctcatcagtcatagtgacaaccagaaatgccctccatattttccagtgatcccagtcttcaatgcgtctgtctcataatttgtaaacgtttattatcttgaagtcattgttaatctgtggtgaaaagtaattgctaaatagaaattctgagaagaaaaaggcctcatccttttcacatgatgtaggaaggtctgttgcatgagcaatgggaaatccagaaaacatagaagatgcatatgttgctgttattcgtccaaagaatactgccagtctcaattctcgggaatacagagctaagtcatatgaaattttgttgcatgaagttcccattgaaggacagaaaaaaaagagaaagaaagttttattggaaacgaaacttcaaggcaacagtgaaataacacaaggcatattggattacgtagtagaaaccaccaaaccaatttctcctgcaaaccagggtatcagaggaaaacgagttgtactaatgaaaaaatttcctctggatggagagaagatgggcagagaagcatcattatttattgttccatcagttgtcaaagataatactaaatacacatataccccaggatgcccaattttttactgcttacaagatattatgcgagtctgtagtgaatccagtactcattttgctacacttacagcaaggatgttaatagccttggataagtggttagatgaacgtcatgcacaatctcactttattccagctttattccgaccttctcctcttgagcggataaaaactaatgtcataaatcctgcatatgctactgaatcaggtcagacagaaaactcactacatatgggctatagtgcactagaaataaagagtaaaatgttagccctagagaaagcagatacctgtatttacaaccctttgtttggatcagatcttcagtatacaaatcgg

SEQ ID NO: 2245 - DNA, 507 bp, Homo sapiens
  source 1..507: mol_type = genomic DNA
gcaaagggtgtgaacccggaagcgatttcatagccacggtttttggctttcatcgctttttctacatgtttttagcctcaccagaagtctttcatctcggtggtccaactcaggatctcagcctcattattttcttacccttctggagtgcatatgtgcctttacagtttctgtttgcaaacgctgtctagcatactaagaggatgttagcaaacctgttccatggacactaaatggcagttgtacatctcccctcatcagtcatagtgacaaccagaaatgccctccatattttccagtgatcccagcaatgggaaatccagaaaacatagaagatgcatatgttgctgttattcgtccaaagaatactgccagtctcaattctcgggaatacagagctaagtcatatgaaattttgttgcatgaagttcccattgaaggacagaaaaaaaagagaaagaaagttttattggaaacgaaacttcaaggcaacagtgaaataacaca

SEQ ID NO: 2246 - DNA, 1615 bp, Homo sapiens
  source 1..1615: mol_type = genomic DNA
tcagagttcacgaggcagccgaggaagaggaggcttgaggcccagggtgggcaccagccagccatggccacagccgagaccgccttgccctccatcagcacactgaccgccctgggccccttcccggacacacaggatgacttcctcaagtggtggcgctccgaagaggcgcaggacatgggcccgggtcctcctgaccccacggagccgcccctccacgtgaagtctgaggaccagcccggggaggaagaggacgatgagaggggcgcggacgccacctgggacctggatctcctcctcaccaacttctcgggcccggagcccggtggcgcgccccagacctgcgctctggcgcccagcgaggcctccggggcgcaatatccgccgccgcccgagactctgggcgcatatgctggcggcccggggctggtggctgggcttttgggttcggaggatcactcgggttgggtgcgccctgccctgcgagcccgggctcccgacgccttcgtgggcccagccctggctccagccccggcccccgagcccaaggcgctggcgctgcaaccggtgtacccggggcccggcgccggctcctcgggtggctacttcccgcggaccgggctttcagtgcctgcggcgtcgggcgccccctacgggctactgtccgggtaccccgcgatgtacccggcgcctcagtaccaagggcacttccagctcttccgcgggctccagggacccgcgcccggtcccgccacgtccccctccttcctgagttgtttgggacccgggacggtgggcactggactcggggggactgcagaggatccaggtgtgatagccgagaccgcgccatccaagcgaggccgacgttcgtgggcgcgcaagaggcaggcagcgcacacgtgcgcgcacccgggttgcggcaagagctacaccaagagctcccacctgaaggcgcatctgcgcacgcacacaggggagaagccatacgcctgcacgtgggaaggctgcggctggagattcgcgcgctcggacgagctgacccgccactaccggaaacacacggggcagcgccccttccgctgccagctctgcccacgtgctttttcgcgctctgaccacctggccttgcacatgaagcgccacctttgagccctgccctggcacttggactctcctagtgactggggatgggacaagaagcctgtttggtggtctcttcacacggacgcgcgtgacacaatgctgggtggttttcccacgaatggaccctctcctggactcgcgttcccaaagatccacccaaatatcaaacacggacccatagacagccctgggggagcctcttacggaaaatccgacaagccttcagccacagggagccacacagagatgtccaaactgtcgtgcaaacccagtgagacagaccgccaaataaacggactcagtggacactcagaccagctcccagatggccctggacagcaggagagggtgtgggatgaggcttcccagagaccctgggtctagaaagcggctcctgaaggtcccttattgtggctgatattaactgtcaatggttatgggtcctataaaaatgcccctcccagataaa

SEQ ID NO: 2247 - DNA, 1922 bp, Homo sapiens
  source 1..1922: mol_type = genomic DNA
taaaagccgggcgttcggaggacccagcaattagtctgatttccgcccacctttccgagcgggaaggagagccacaaagcgcgcatgcgcgcggatcaccgcaggctcctgtgccttgggcttgagctttgtggcagttaatggcttttctgcacgtatctctggtgtttacttgagaagcctggctgtgtccttgctgtaggagccggagtagctcagagtgatcttgtctgaggaaaggccagccccacttggggttaataaaccgcgatgggtgaaccctcaggaggctatacttacacccaaacgtcgatattccttttccacgctaagattccttttggttccaagtccaatatggcaactctaaaggatcagctgatttataatcttctaaaggaagaacagaccccccagaataagattacagttgttggggttggtgctgttggcatggcctgtgccatcagtatcttaatgaaggacttggcagatgaacttgctcttgttgatgtcatcgaagacaaattgaagggagagatgatggatctccaacatggcagccttttccttagaacaccaaagattgtctctggcaaagactataatgtaactgcaaactccaagctggtcattatcacggctggggcacgtcagcaagagggagaaagccgtcttaatttggtccagcgtaacgtgaacatctttaaattcatcattcctaatgttgtaaaatacagcccgaactgcaagttgcttattgtttcaaatccagtggatatcttgacctacgtggcttggaagataagtggttttcccaaaaaccgtgttattggaagcggttgcaatctggattcagcccgattccgttacctaatgggggaaaggctgggagttcacccattaagctgtcatgggtgggtccttggggaacatggagattccagtgtgcctgtatggagtggaatgaatgttgctggtgtctctctgaagactctgcacccagatttagggactgataaagataaggaacagtggaaagaggttcacaagcaggtggttgagagtgcttatgaggtgatcaaactcaaaggctacacatcctgggctattggactctctgtagcagatttggcagagagtataatgaagaatcttaggcgggtgcacccagtttccaccatgattaagggtctttacggaataaaggatgatgtcttccttagtgttccttgcattttgggacagaatggaatctcagaccttgtgaaggtgactctgacttctgaggaagaggcccgtttgaagaagagtgcagatacactttgggggatccaaaaggagctgcaattttaaagtcttctgatgtcatatcatttcactgtctaggctacaacaggattctaggtggaggttgtgcatgttgtcctttttatctgatctgtgattaaagcagtaatattttaagatggactgggaaaaacatcaactcctgaagttagaaataagaatggtttgtaaaatccacagctatatcctgatgctggatggtattaatcttgtgtagtcttcaactggttagtgtgaaatagttctgccacctctgacgcaccactgccaatgctgtacgtactgcatttgccccttgagccaggtggatgtttaccgtgtgttatataacttcctggctccttcactgaacatgcctagtccaacattttttcccagtgagtcacatcctgggatccagtgtataaatccaatatcatgtcttgtgcataattcttccaaaggatcttattttgtgaactatatcagtagtgtacattaccatataatgtaaaaagatctacatacaaacaatgcaaccaactatccaagtgttataccaactaaaacccccaataaaccttgaacagtga

SEQ ID NO: 2248 - DNA, 1766 bp, Homo sapiens
  source 1..1766: mol_type = genomic DNA
agtgctgcagccgctgccgccgattccggatctcattgccacgcgcccccgacgaccgcccgacgtgcattcccgattccttttggttccaagtccaatatggcaactctaaaggatcagctgatttataatcttctaaaggaagaacagaccccccagaataagattacagttgttggggttggtgctgttggcatggcctgtgccatcagtatcttaatgaaggacttggcagatgaacttgctcttgttgatgtcatcgaagacaaattgaagggagagatgatggatctccaacatggcagccttttccttagaacaccaaagattgtctctggcaaagactataatgtaactgcaaactccaagctggtcattatcacggctggggcacgtcagcaagagggagaaagccgtcttaatttggtccagcgtaacgtgaacatctttaaattcatcattcctaatgttgtaaaatacagcccgaactgcaagttgcttattgtttcaaatccagtggatatcttgacctacgtggcttggaagataagtggttttcccaaaaaccgtgttattggaagcggttgcaatctggattcagcccgattccgttacctaatgggggaaaggctgggagttcacccattaagctgtcatgggtgggtccttggggaacatggagattccagtgtgcctgtatggagtggaatgaatgttgctggtgtctctctgaagactctgcacccagatttagggactgataaagataaggaacagtggaaagagtgcagatacactttgggggatccaaaaggagctgcaattttaaagtcttctgatgtcatatcatttcactgtctaggctacaacaggattctaggtggaggttgtgcatgttgtcctttttatctgatctgtgattaaagcagtaatattttaagatggactgggaaaaacatcaactcctgaagttagaaataagaatggtttgtaaaatccacagctatatcctgatgctggatggtattaatcttgtgtagtcttcaactggttagtgtgaaatagttctgccacctctgacgcaccactgccaatgctgtacgtactgcatttgccccttgagccaggtggatgtttaccgtgtgttatataacttcctggctccttcactgaacatgcctagtccaacattttttcccagtgagtcacatcctgggatccagtgtataaatccaatatcatgtcttgtgcataattcttccaaaggatcttattttgtgaactatatcagtagtgtacattaccatataatgtaaaaagatctacatacaaacaatgcaaccaactatccaagtgttataccaactaaaacccccaataaaccttgaacagtgactactttggttaattcattatattaagatataaagtcataaagctgctagttattatattaatttggaaatattaggctattcttgggcaaccctgcaacgattttttctaacagggatattattgactaatagcagaggatgtaatagtcaactgagttgtattggtaccacttccattgtaagtcccaaagtattatatatttgataataatgctaatcataattggaaagtaacattctatatgtaaatgtaaaatttatttgccaactgaatataggcaatgatagtgtgtcactatagggaacacagatttttgagatcttgtcctctggaagctggtaacaattaaaaacaatcttaaggcaggg

SEQ ID NO: 2249 - DNA, 2416 bp, Homo sapiens
  source 1..2416: mol_type = genomic DNA
agtctgccggtcggttgtctggctgcgcgcgccacccgggcctctccagtgccccgcctggctcggcatccacccccagcccgactcacacgtgggttcccgcacgtccgccggccccccccgctgacgtcagcatagctgttccacttaaggcccctcccgcgcccagctcagagtgctgcagccgctgccgccgattccggatctcattgccacgcgcccccgacgaccgcccgacgtgcattcccgattccttttggttccaagtccaatatggcaactctaaaggatcagctgatttataatcttctaaaggaagaacagaccccccagaataagattacagttgttggggttggtgctgttggcatggcctgtgccatcagtatcttaatgaaggacttggcagatgaacttgctcttgttgatgtcatcgaagacaaattgaagggagagatgatggatctccaacatggcagccttttccttagaacaccaaagattgtctctggcaaagactataatgtaactgcaaactccaagctggtcattatcacggctggggcacgtcagcaagagggagaaagccgtcttaatttggtccagcgtaacgtgaacatctttaaattcatcattcctaatgttgtaaaatacagcccgaactgcaagttgcttattgtttcaaatccagtggatatcttgacctacgtggcttggaagataagtggttttcccaaaaaccgtgttattggaagcggttgcaatctggattcagcccgattccgttacctaatgggggaaaggctgggagttcacccattaagctgtcatgggtgggtccttggggaacatggagattccagtgtgcctgtatggagtggaatgaatgttgctggtgtctctctgaagactctgcacccagatttagggactgataaagataaggaacagtggaaagaggttcacaagcaggtggttgagagtgcttatgaggtgatcaaactcaaaggctacacatcctgggctattggactctctgtagcagatttggcagagagtataatgaagaatcttaggcgggtgcacccagtttccaccatgattaagggtctttacggaataaaggatgatgtcttccttagtgttccttgcattttgggacagaatggaatctcagaccttgtgaaggtgactctgacttctgaggaagaggcccgtttgaagaagagtgcagatacactttgggggatccaaaaggagctgcaattttaaagtcttctgatgtcatatcatttcactgtctaggctacaacaggattctaggtggaggttgtgcatgttgtcctttttatctgatctgtgattaaagcagtaatattttaagatggactgggaaaaacatcaactcctgaagttagaaataagaatggtttgtaaaatccacagctatatcctgatgctggatggtattaatcttgtgtagtcttcaactggttagtgtgaaatagttctgccacctctgacgcaccactgccaatgctgtacgtactgcatttgccccttgagccaggtggatgtttaccgtgtgttatataacttcctggctccttcactgaacatgcctagtccaacattttttcccagtgagtcacatcctgggatccagtgtataaatccaatatcatgtcttgtgcataattcttccaaaggatcttattttgtgaactatatcagtagtgtacattaccatataatgtaaaaagatctacatacaaacaatgcaaccaactatccaagtgttataccaactaaaacccccaataaaccttgaacagtgactactttggttaattcattatattaagatataaagtcataaagctgctagttattatattaatttggaaatattaggctattcttgggcaaccctgcaacgattttttctaacagggatattattgactaatagcagaggatgtaatagtcaactgagttgtattggtaccacttccattgtaagtcccaaagtattatatatttgataataatgctaatcataattggaaagtaacattctatatgtaaatgtaaaatttatttgccaactgaatataggcaatgatagtgtgtcactatagggaacacagatttttgagatcttgtcctctggaagctggtaacaattaaaaacaatcttaaggcagggtgcagtggctcatgcctataatcccagcactttgggaagcccaggtgggctgatcactggaggccaggaattggggaccagcctggccaacacaacaaaaccccatctgttaaaaaaacaaaacaaaaccaaaaaaaacaagtaaccttggtggatgtctactcaagttttctgcacatttttctgaaaatacaactgtgaccctta

SEQ ID NO: 2250 - DNA, 1310 bp, Homo sapiens
  source 1..1310: mol_type = genomic DNA
agtgctgcagccgctgccgccgattccggatctcattgccacgcgcccccgacgaccgcccgacgtgcattcccgattccttttggttccaagtccaatatggcaactctaaaggatcagctgatttataatcttctaaaggaagaacagaccccccagaataagattacagttgttggggttggtgctgttggcatggcctgtgccatcagtatcttaatgaaggacttggcagatgaacttgctcttgttgatgtcatcgaagacaaattgaagggagagatgatggatctccaacatggcagccttttccttagaacaccaaagattgtctctggcaaagtggatatcttgacctacgtggcttggaagataagtggttttcccaaaaaccgtgttattggaagcggttgcaatctggattcagcccgattccgttacctaatgggggaaaggctgggagttcacccattaagctgtcatgggtgggtccttggggaacatggagattccagtgtgcctgtatggagtggaatgaatgttgctggtgtctctctgaagactctgcacccagatttagggactgataaagataaggaacagtggaaagaggttcacaagcaggtggttgagagtgcttatgaggtgatcaaactcaaaggctacacatcctgggctattggactctctgtagcagatttggcagagagtataatgaagaatcttaggcgggtgcacccagtttccaccatgattaagggtctttacggaataaaggatgatgtcttccttagtgttccttgcattttgggacagaatggaatctcagaccttgtgaaggtgactctgacttctgaggaagaggcccgtttgaagaagagtgcagatacactttgggggatccaaaaggagctgcaattttaaagtcttctgatgtcatatcatttcactgtctaggctacaacaggattctaggtggaggttgtgcatgttgtcctttttatctgatctgtgattaaagcagtaatattttaagatggactgggaaaaacatcaactcctgaagttagaaataagaatggtttgtaaaatccacagctatatcctgatgctggatggtattaatcttgtgtagtcttcaactggttagtgtgaaatagttctgccacctctgacgcaccactgccaatgctgtacgtactgcatttgccccttgagccaggtggatgtttaccgtgtgttatataacttcctggctccttcactgaacatgcctagtccaacattttttcccagtgagtcacatcctg

SEQ ID NO: 2251 - DNA, 1310 bp, Homo sapiens
  source 1..1310: mol_type = genomic DNA
gtgctgcagccgctgccgccgattccggatctcattgccacgcgcccccgacgaccgcccgacgtgcattcccgattccttttggttccaagtccaatatggcaactctaaaggatcagctgatttataatcttctaaaggaagaacagaccccccagaataagattacagttgttggggttggtgctgttggcatggcctgtgccatcagtatcttaatgaaggacttggcagatgaacttgctattgtctctggcaaagactataatgtaactgcaaactccaagctggtcattatcacggctggggcacgtcagcaagagggagaaagccgtcttaatttggtccagcgtaacgtgaacatctttaaattcatcattcctaatgttgtaaaatacagcccgaactgcaagttgcttattgtttcaaatccagtggatatcttgacctacgtggcttggaagataagtggttttcccaaaaaccgtgttattggaagcggttgcaatctggattcagcccgattccgttacctaatgggggaaaggctgggagttcacccattaagctgtcatgggtgggtccttggggaacatggagattccagtgtgcctgtatggagtggaatgaatgttgctggtgtctctctgaagactctgcacccagatttagggactgataaagataaggaacagtggaaagaggttcacaagcaggtggttgagagtgcttatgaggtgatcaaactcaaaggctacacatcctgggctattggactctctgtagcagatttggcagagagtataatgaagaatcttaggcgggtgcacccagtttccaccatgattaagggtctttacggaataaaggatgatgtcttccttagtgttccttgcattttgggacagaatggaatctcagaccttgtgaaggtgactctgacttctgaggaagaggcccgtttgaagaagagtgcagatacactttgggggatccaaaaggagctgcaattttaaagtcttctgatgtcatatcatttcactgtctaggctacaacaggattctaggtggaggttgtgcatgttgtcctttttatctgatctgtgattaaagcagtaatattttaagatggactgggaaaaacatcaactcctgaagttagaaataagaatggtttgtaaaatccacagctatatcctgatgctggatggtattaatcttgtgtagtcttcaactggttagtgtgaaatagttctgccacctctgacgcaccactgccaatgctgtacgtactgcatttgccccttgag

SEQ ID NO: 2252 - DNA, 732 bp, Homo sapiens
  source 1..732: mol_type = genomic DNA
gacgaccgcccgacgtgcattcccggtacggtagggccctgcgcgcacggcgccagagggatgggcgggtagagccaactgcctctggttctgctggcctccgctgctcgcgaagggattcctgctcccgggaggtgtaggagccgctttccagaagcacagcccagagacgtctgggcggcggcccacacaacgcatgtgttcggagctcgccgcgctctgcttttgctctaagcgggaaccatggcttctggccacgctggggaaccgaggagattccttttggttccaagtccaatatggcaactctaaaggatcagctgatttataatcttctaaaggaagaacagaccccccagaataagattacagttgttggggttggtgctgttggcatggcctgtgccatcagtatcttaatgaaggacttggcagatgaacttgctcttgttgatgtcatcgaagacaaattgaagggagagatgatggatctccaacatggcagccttttccttagaacaccaaagattgtctctggcaaagactataatgtaactgcaaactccaagctggtcattatcacggctggggcacgtcagcaagagggagaaagccgtcttaatttggtccagcgtaacgtgaacatctttaaattcatcattcctaatgttgtaaaatacagcccgaactgcaagttgcttattgtttcaaatccaggtgaggcttttgact

SEQ ID NO: 2253 - DNA, 682 bp, Homo sapiens
  source 1..682: mol_type = genomic DNA
gctggcctccgctgctcgcgaagggattcctgctcccgggaggtgtaggagccgctttccagaagcacagcccagagacgtctgggcggcggcccacacaacgcatgtgttcggagctcgccgcgctctgcttttgctctaagcgggaaccatggcttctggccacgctggggaaccgaggaggagccggagtagctcagagtgatcttgtctgaggaaaggccagccccacttggggttaataaaccgcgatgggtgaaccctcaggaggctatacttacacccaaacgtcgatattccttttccacgctaagattccttttggttccaagtccaatatggcaactctaaaggatcagctgatttataatcttctaaaggaagaacagaccccccagaataagattacagttgttggggttggtgctgttggcatggcctgtgccatcagtatcttaatgaaggacttggcagatgaacttgctcttgttgatgtcatcgaagacaaattgaagggagagatgatggatctccaacatggcagccttttccttagaacaccaaagattgtctctggcaaagactataatgtaactgcaaactccaagctggtcattatcacggctggggcacgtcagcaagagggagaaagccgtcttaatttggtccagcgtaacgtgaa

SEQ ID NO: 2254 - DNA, 465 bp, Homo sapiens
  source 1..465: mol_type = genomic DNA
gtgctgcagccgctgccgccgattccggatctcattgccacgcgcccccgacgaccgcccgacgtgcattcccggtgggctccgtgagggcagctgctgcctgcagattatagggagccctttgcgcatttattaagaagctactggtgtatctcgggctgcgctaggcacggcgcatgcaaagatgaagcaggcagcatcccagcccttccgcacctcagacgattccttttggttccaagtccaatatggcaactctaaaggatcagctgatttataatcttctaaaggaagaacagaccccccagaataagattacagttgttggggttggtgctgttggcatggcctgtgccatcagtatcttaatgaaggacttggcagatgaacttgctcttgttgatgtcatcgaagacaaattgaagggagagatgatggatctccaacatggcagccttttcctta

SEQ ID NO: 2255 - DNA, 2305 bp, Homo sapiens
  source 1..2305: mol_type = genomic DNA
ttgggcggggcgtaaaagccgggcgttcggaggacccagcaattagtctgatttccgcccacctttccgagcgggaaggagagccacaaagcgcgcatgcgcgcggatcaccgcaggctcctgtgccttgggcttgagctttgtggcagttaatggcttttctgcacgtatctctggtgtttacttgagaagcctggctgtgtccttgctgtaggagccggagtagctcagagtgatcttgtctgaggaaaggccagccccacttggggttaataaaccgcgatgggtgaaccctcaggaggctatacttacacccaaacgtcgatattccttttccacgctaagattccttttggttccaagtccaatatggcaactctaaaggatcagctgatttataatcttctaaaggaagaacagaccccccagaataagattacagttgttggggttggtgctgttggcatggcctgtgccatcagtatcttaatgaaggacttggcagatgaacttgctcttgttgatgtcatcgaagacaaattgaagggagagatgatggatctccaacatggcagccttttccttagaacaccaaagattgtctctggcaaagactataatgtaactgcaaactccaagctggtcattatcacggctggggcacgtcagcaagagggagaaagccgtcttaatttggtccagcgtaacgtgaacatctttaaattcatcattcctaatgttgtaaaatacagcccgaactgcaagttgcttattgtttcaaatccagtggatatcttgacctacgtggcttggaagataagtggttttcccaaaaaccgtgttattggaagcggttgcaatctggattcagcccgattccgttacctaatgggggaaaggctgggagttcacccattaagctgtcatgggtgggtccttggggaacatggagattccagtgtgcctgtatggagtggaatgaatgttgctggtgtctctctgaagactctgcacccagatttagggactgataaagataaggaacagtggaaagaggttcacaagcaggtggttgagagtgcttatgaggtgatcaaactcaaaggctacacatcctgggctattggactctctgtagcagatttggcagagagtataatgaagaatcttaggcgggtgcacccagtttccaccatgattaagggtctttacggaataaaggatgatgtcttccttagtgttccttgcattttgggacagaatggaatctcagaccttgtgaaggtgactctgacttctgaggaagaggcccgtttgaagaagagtgcagatacactttgggggatccaaaaggagctgcaattttaaagtcttctgatgtcatatcatttcactgtctaggctacaacaggattctaggtggaggttgtgcatgttgtcctttttatctgatctgtgattaaagcagtaatattttaagatggactgggaaaaacatcaactcctgaagttagaaataagaatggtttgtaaaatccacagctatatcctgatgctggatggtattaatcttgtgtagtcttcaactggttagtgtgaaatagttctgccacctctgacgcaccactgccaatgctgtacgtactgcatttgccccttgagccaggtggatgtttaccgtgtgttatataacttcctggctccttcactgaacatgcctagtccaacattttttcccagtgagtcacatcctgggatccagtgtataaatccaatatcatgtcttgtgcataattcttccaaaggatcttattttgtgaactatatcagtagtgtacattaccatataatgtaaaaagatctacatacaaacaatgcaaccaactatccaagtgttataccaactaaaacccccaataaaccttgaacagtgactactttggttaattcattatattaagatataaagtcataaagctgctagttattatattaatttggaaatattaggctattcttgggcaaccctgcaacgattttttctaacagggatattattgactaatagcagaggatgtaatagtcaactgagttgtattggtaccacttccattgtaagtcccaaagtattatatatttgataataatgctaatcataattggaaagtaacattctatatgtaaatgtaaaatttatttgccaactgaatataggcaatgatagtgtgtcactatagggaacacagatttttgagatcttgtcctctggaagctggtaacaattaaaaacaatcttaaggcaggg

SEQ ID NO: 2256 - DNA, 1288 bp, Homo sapiens
  source 1..1288: mol_type = genomic DNA
gaaccctcaggaggctatacttacacccaaacgtcgatattccttttccacgctaaggtatgggccttcactcttcacagaccctgtcattaggcctttcaactctcttttggcaaccattaggttttttcccctccctttttagtcatctctagtgatttatagtggcaaatacccccaaaggaagtaaaatagcttaaaaaaatctcttggttaataaacattaaagaagctgtagtgacactaaatgtttttcctcctatagattccttttggttccaagtccaatatggcaactctaaaggatcagctgatttataatcttctaaaggaagaacagaccccccagaataagattacagttgttggggttggtgctgttggcatggcctgtgccatcagtatcttaatgaaggacttggcagatgaacttgctcttgttgatgtcatcgaagacaaattgaagggagagatgatggatctccaacatggcagccttttccttagaacaccaaagattgtctctggcaaagactataatgtaactgcaaactccaagctggtcattatcacggctggggcacgtcagcaagagggagaaagccgtcttaatttggtccagcgtaacgtgaacatctttaaattcatcattcctaatgttgtaaaatacagcccgaactgcaagttgcttattgtttcaaatccagtggatatcttgacctacgtggcttggaagataagtggttttcccaaaaaccgtgttattggaagcggttgcaatctggattcagcccgattccgttacctaatgggggaaaggctgggagttcacccattaagctgtcatgggtgggtccttggggaacatggagattccagtgtgcctgtatggagtggaatgaatgttgctggtgtctctctgaagactctgcacccagatttagggactgataaagataaggaacagtggaaagaggttcacaagcaggtggttgagagtgcttatgaggtgatcaaactcaaaggctacacatcctgggctattggactctctgtagcagatttggcagagagtataatgaagaatcttaggcgggtgcacccagtttccaccatgattaagggtctttacggaataaaggatgatgtcttccttagtgttccttgcattttgggacagaatggaatctcagaccttgtgaaggtgactctgacttctgaggaagaggcccgtttgaagaagagtgcagatacactttgggggatccaaaaggagctgcaattttaa

SEQ ID NO: 2257 - DNA, 576 bp, Homo sapiens
  source 1..576: mol_type = genomic DNA
agagtgctgcagccgctgccgccgattccggatctcattgccacgcgcccccgacgaccgcccgacgtgcattcccggtacgattccttttggttccaagtccaatatggcaactctaaaggatcagctgatttataatcttctaaaggaagaacagaccccccagaataagattacagttgttggggttggtgctgttggcatggcctgtgccatcagtatcttaatgaaggacttggcagatgaacttgctcttgttgatgtcatcgaagacaaattgaagggagagatgatggatctccaacatggcagccttttccttagaacaccaaagattgtctctggcaaagactataatgtaactgcaaactccaagctggtcattatcacggctggggcacgtcagcaagagggagaaagccgtcttaatttggtccagcgtaacgtgaacatctttaaattcatcattcctaatgttgtaaaatacagcccgaactgcaagttgcttattgtttcaaatccagtggatatcttgacctacgtggcttggaagataagtggttttcccaaaaaccg

SEQ ID NO: 2258 - DNA, 1887 bp, Homo sapiens
  source 1..1887: mol_type = genomic DNA
tccggatctcattgccacgcgcccccgacgaccgcccgacgtgcattcccgattccttttggttccaagtccaatatggcaactctaaaggatcagctgatttataatcttctaaaggaagaacagaccccccagaataagattacagttgttggggttggtgctgttggcatggcctgtgccatcagtatcttaatgaaggacttggcagatgaacttgctcttgttgatgtcatcgaagacaaattgaagggagagatgatggatctccaacatggcagccttttccttagaacaccaaagattgtctctggcaaagactataatgtaactgcaaactccaagctggtcattatcacggctggggcacgtcagcaagagggagaaagccgtcttaatttggtccagcgtaacgtgaacatctttaaattcatcattcctaatgttgtaaaatacagcccgaactgcaagttgcttattgtttcaaatccagtggatatcttgacctacgtggcttggaagataagtggttttcccaaaaaccgtgttattggaagcggttgcaatctggattcagcccgattccgttacctaatgggggaaaggctgggagttcacccattaagctgtcatgggtgggtccttggggaacatggagattccagtgtgcctgtatggagtggaatgaatgttgctggtgtctctctgaagactctgcacccagatttagggactgataaagataaggaacagtggaaagaggttcacaagcaggtggttgagagggtctttacggaataaaggatgatgtcttccttagtgttccttgcattttgggacagaatggaatctcagaccttgtgaaggtgactctgacttctgaggaagaggcccgtttgaagaagagtgcagatacactttgggggatccaaaaggagctgcaattttaaagtcttctgatgtcatatcatttcactgtctaggctacaacaggattctaggtggaggttgtgcatgttgtcctttttatctgatctgtgattaaagcagtaatattttaagatggactgggaaaaacatcaactcctgaagttagaaataagaatggtttgtaaaatccacagctatatcctgatgctggatggtattaatcttgtgtagtcttcaactggttagtgtgaaatagttctgccacctctgacgcaccactgccaatgctgtacgtactgcatttgccccttgagccaggtggatgtttaccgtgtgttatataacttcctggctccttcactgaacatgcctagtccaacattttttcccagtgagtcacatcctgggatccagtgtataaatccaatatcatgtcttgtgcataattcttccaaaggatcttattttgtgaactatatcagtagtgtacattaccatataatgtaaaaagatctacatacaaacaatgcaaccaactatccaagtgttataccaactaaaacccccaataaaccttgaacagtgactactttggttaattcattatattaagatataaagtcataaagctgctagttattatattaatttggaaatattaggctattcttgggcaaccctgcaacgattttttctaacagggatattattgactaatagcagaggatgtaatagtcaactgagttgtattggtaccacttccattgtaagtcccaaagtattatatatttgataataatgctaatcataattggaaagtaacattctatatgtaaatgtaaaatttatttgccaactgaatataggcaatgatagtgtgtcactatagggaacacagatttttgagatcttgtcctctggaagctggtaacaattaaaaacaatcttaaggcaggg

SEQ ID NO: 2259 - DNA, 4256 bp, Homo sapiens
  source 1..4256: mol_type = genomic DNA
aacccctatatcaatggacttttcctctaatacatggtactgctgtattaaccactttatagctttcctttctttctttcttttacagagttaattatttatattgtaaagaattttaacagtcctggggacttccttgaaggatcattttcacttttgctcagaagaaagctctggatctatcaaataaagaagtccttcgtgtgggctacatatatagatgttttcatgaagaggagtgaaaagccagaaggatatagacaaatgaggcctaagacctttcctgccagtaactatactgtcagtagccggcaaatgttacaagaaattcgggaatcccttaggaatttatctaaaccatctgatgctgctaaggctgagcataacatgagtaaaatgtcaaccgaagatcctcgacaagtcagaaatccacccaaatttgggacgcatcataaagccttgcaggaaattcgaaactctctgcttccatttgcaaatgaaacaaattcttctcggagtacttcagaagttaatccacaaatgcttcaagacttgcaagctgctggatttgatgaggatatggttatacaagctcttcagaaaactaacaacagaagtatagaagcagcaattgaattcattagtaaaatgagttaccaagatcctcgacgagagcagatggctgcagcagctgccagacctattaatgccagcatgaaaccagggaatgtgcagcaatcagttaaccgcaaacagagctggaaaggttctaaagaatccttagttcctcagaggcatggcccgccactaggagaaagtgtggcctatcattctgagagtcccaactcacagacagatgtaggaagacctttgtctggatctggtatatcagcatttgttcaagctcaccctagcaacggacagagagtgaaccccccaccaccacctcaagtaaggagtgttactcctccaccacctccaagaggccagactccccctccaagaggtacaactccacctcccccttcatgggaaccaaactctcaaacaaagcgctattctggaaacatggaatacgtaatctcccgaatctctcctgtcccacctggggcatggcaagagggctatcctccaccacctctcaacacttcccccatgaatcctcctaatcaaggacagagaggcattagttctgttcctgttggcagacaaccaatcatcatgcagagttctagcaaatttaactttccatcagggagacctggaatgcagaatggtactggacaaactgatttcatgatacaccaaaatgttgtccctgctggcactgtgaatcggcagccaccacctccatatcctctgacagcagctaatggacaaagcccttctgctttacaaacagggggatctgctgctccttcgtcatatacaaatggaagtattcctcagtctatgatggtgccaaacagaaatagtcataacatggaactatataacattagtgtacctggactgcaaacaaattggcctcagtcatcttctgctccagcccagtcatccccgagcagtgggcatgaaatccctacatggcaacctaacataccagtgaggtcaaattcttttaataacccattaggaaatagagcaagtcactctgctaattctcagccttctgctacaacagtcactgcaattacaccagctcctattcaacagcctgtgaaaagtatgcgtgtattaaaaccagagctacagactgctttagcacctacacacccttcttggataccacagccaattcaaactgttcaacccagtccttttcctgagggaaccgcttcaaatgtgactgtgatgccacctgttgctgaagctccaaactatcaaggaccaccaccaccctacccaaaacatctgctgcaccaaaacccatctgttcctccatacgagtcaatcagtaagcctagcaaagaggatcagccaagcttgcccaaggaagatgagagtgaaaagagttatgaaaatgttgatagtggggataaagaaaagaaacagattacaacttcacctattactgttaggaaaaacaagaaagatgaagagcgaagggaatctcgtattcaaagttattctcctcaagcatttaaattctttatggagcaacatgtagaaaatgtactcaaatctcatcagcagcgtctacatcgtaaaaaacaattagagaatgaaatgatgcgggttggattatctcaagatgcccaggatcaaatgagaaagatgctttgccaaaaagaatctaattacatccgtcttaaaagggctaaaatggacaagtctatgtttgtgaagataaagacactaggaataggagcatttggtgaagtctgtctagcaagaaaagtagatactaaggctttgtatgcaacaaaaactcttcgaaagaaagatgttcttcttcgaaatcaagtcgctcatgttaaggctgagagagatatcctggctgaagctgacaatgaatgggtagttcgtctatattattcattccaagataaggacaatttatactttgtaatggactacattcctgggggtgatatgatgagcctattaattagaatgggcatctttccagaaagtctggcacgattctacatagcagaacttacctgtgcagttgaaagtgttcataaaatgggttttattcatagagatattaaacctgataatattttgattgatcgtgatggtcatattaaattgactgactttggcctctgcactggcttcagatggacacacgattctaagtactatcagagtggtgaccatccacggcaagatagcatggatttcagtaatgaatggggggatccctcaagctgtcgatgtggagacagactgaagccattagagcggagagctgcacgccagcaccagcgatgtctagcacattctttggttgggactcccaattatattgcacctgaagtgttgctacgaacaggatacacacagttgtgtgattggtggagtgttggtgttattctttttgaaatgttggtgggacaacctcctttcttggcacaaacaccattagaaacacaaatgaaggttatcaactggcaaacatctcttcacattccaccacaagctaaactcagtcctgaagcttctgatcttattattaaactttgccgaggacccgaagatcgcttaggcaagaatggtgctgatgaaataaaagctcatccattttttaaaacaattgacttctccagtgacctgagacagcagtctgcttcatacattcctaaaatcacacacccaacagatacatcaaattttgatcctgttgatcctgataaattatggagtgatgataacgaggaagaaaatgtaaatgacactctcaatggatggtataaaaatggaaagcatcctgaacatgcattctatgaatttaccttccgaaggttttttgatgacaatggctacccatataattatccgaagcctattgaatatgaatacattaattcacaaggctcagagcagcagtcggatgaagatgatcaaaacacaggctcagagattaaaaatcgcgatctagtatatgtttaacacactagtaaataaatgtaatgaggatttgtaaaagggcctgaaatgcgaggtgttttgaggttctgagagtaaaattatgcaaatatgacagagctatatatgtgtgctctgtgtacaatattttattttcctaaattatgggaaatccttttaaaatgttaatttattccagccgtttaaatcagtatttagaaaaaaattgttataaggaaagtaaattatgaactgaatattatagtcagttcttggtacttaaagtacttaaaataagtagtgctttgtttaaaaggagaaacctggtatctatttgtatatatgctaaataattttaaaatacaagagtttttgaaatttttttgaaagacagttttagttttatcttgctttaaccaaatatgaaacataccccctattttacagagctcttttttcccctcataaccttgtttttggtagaaaataagctagagaaattaagccatcgtgttggtgagtgttcctaggctaatgataatctgtataattcacatcctgaaactaaggaatacagggttgaaaaaatattaatatgtttgtcagaaggaaaaataatgcatttatcttcccccccaccccccgccccatggaatatt

SEQ ID NO: 2260 - DNA, 2567 bp, Homo sapiens
  source 1..2567: mol_type = genomic DNA
ctgcagcggagtgcggcggcggcgacactgagtggaaggcaaaatggcggcggcggcggcggtggcctggtgttaaggggagagccaggtcctcacgacccctgggacgggccgcgctggcccgcggcagcccccccgttcgtctccccgctctgccccaccagggatacttggggttgctgggacggactctggccgcctcagcgtccgccctcaggcccgtggccgctgtccaggagctctgctctcccctccagagttaattatttatattgtaaagaattttaacagtcctggggacttccttgaaggatcattttcacttttgctcagaagaaagctctggatctatcaaataaagaagtccttcgtgtgggctacatatatagatgttttcatgaagaggagtgaaaagccagaaggatatagacaaatgaggcctaagacctttcctgccagtaactatactgtcagtagccggcaaatgttacaagaaattcgggaatcccttaggaatttatctaaaccatctgatgctgctaaggctgagcataacatgagtaaaatgtcaaccgaagatcctcgacaagtcagaaatccacccaaatttgggacgcatcataaagccttgcaggaaattcgaaactctctgcttccatttgcaaatgaaacaaattcttctcggagtacttcagaagttaatccacaaatgcttcaagacttgcaagctgctggatttgatgaggatatggttatacaagctcttcagaaaactaacaacagaagtatagaagcagcaattgaattcattagtaaaatgagttaccaagatcctcgacgagagcagatggctgcagcagctgccagacctattaatgccagcatgaaaccagggaatgtgcagcaatcagttaaccgcaaacagagctggaaaggttctaaagaatccttagttcctcagaggcatggcccgccactaggagaaagtgtggcctatcattctgagagtcccaactcacagacagatgtaggaagacctttgtctggatctggtatatcagcatttgttcaagctcaccctagcaacggacagagagtgaaccccccaccaccacctcaagtaaggagtgttactcctccaccacctccaagaggccagactccccctccaagaggtacaactccacctcccccttcatgggaaccaaactctcaaacaaagcgctattctggaaacatggaatacgtaatctcccgaatctctcctgtcccacctggggcatggcaagagggctatcctccaccacctctcaacacttcccccatgaatcctcctaatcaaggacagagaggcattagttctgttcctgttggcagacaaccaatcatcatgcagagttctagcaaatttaactttccatcagggagacctggaatgcagaatggtactggacaaactgatttcatgatacaccaaaatgttgtccctgctggcactgtgaatcggcagccaccacctccatatcctctgacagcagctaatggacaaagcccttctgctttacaaacagggggatctgctgctccttcgtcatatacaaatggaagtattcctcagtctatgatggtgccaaacagaaatagtcataacatggaactatataacattagtgtacctggactgcaaacaaattggcctcagtcatcttctgctccagcccagtcatccccgagcagtgggcatgaaatccctacatggcaacctaacataccagtgaggtcaaattcttttaataacccattaggaaatagagcaagtcactctgctaattctcagccttctgctacaacagtcactgcaattacaccagctcctattcaacagcctgtgaaaagtatgcgtgtattaaaaccagagctacagactgctttagcacctacacacccttcttggataccacagccaattcaaactgttcaacccagtccttttcctgagggaaccgcttcaaatgtgactgtgatgccacctgttgctgaagctccaaactatcaaggaccaccaccaccctacccaaaacatctgctgcaccaaaacccatctgttcctccatacgagtcaatcagtaagcctagcaaagaggatcagccaagcttgcccaaggaagatgagagtgaaaagagttatgaaaatgttgatagtggggataaagaaaagaaacagattacaacttcacctattactgttaggaaaaacaagaaagatgaagagcgaagggaatctcgtattcaaagttattctcctcaagcatttaaattctttatggagcaacatgtagaaaatgtactcaaatctcatcagcagcgtctacatcgtaaaaaacaattagagaatgaaatgatgcgggtaaaaccttttaaaatgtccatttttatacttaatcatctgtttgcttggtgtttattttaaaatattgtgtccagtatttttctttctttttatagctaaataaaatatattatcagttatggaatttaaaagtgaataaatattaaagtacttttga

SEQ ID NO: 2261 - DNA, 7517 bp, Homo sapiens
  source 1..7517: mol_type = genomic DNA
gcgacgctcacgaacgatcagagctgcgggcgacgcaacgaagcccggaggccgcaggctgcgcgctccctcgcagcagccgggcgggcaaaagcccccagtcctcggcccccgcgcaagcgacgccgggaaatgcccacatccgggaaacctgcagcggagtgcggcggcggcgacactgagtggaaggcaaaatggcggcggcggcggcggtggcctggtgttaaggggagagccaggtcctcacgacccctgggacgggccgcgctggcccgcggcagcccccccgttcgtctccccgctctgccccaccagggatacttggggttgctgggacggactctggccgcctcagcgtccgccctcaggcccgtggccgctgtccaggagctctgctctcccctccagagttaattatttatattgtaaagaattttaacagtcctggggacttccttgaaggatcattttcacttttgctcagaagaaagctctggatctatcaaataaagaagtccttcgtgtgggctacatatatagatgttttcatgaagaggagtgaaaagccagaaggatatagacaaatgaggcctaagacctttcctgccagtaactatactgtcagtagccggcaaatgttacaagaaattcgggaatcccttaggaatttatctaaaccatctgatgctgctaaggctgagcataacatgagtaaaatgtcaaccgaagatcctcgacaagtcagaaatccacccaaatttgggacgcatcataaagccttgcaggaaattcgaaactctctgcttccatttgcaaatgaaacaaattcttctcggagtacttcagaagttaatccacaaatgcttcaagacttgcaagctgctggatttgatgaggatatggttatacaagctcttcagaaaactaacaacagaagtatagaagcagcaattgaattcattagtaaaatgagttaccaagatcctcgacgagagcagatggctgcagcagctgccagacctattaatgccagcatgaaaccagggaatgtgcagcaatcagttaaccgcaaacagagctggaaaggttctaaagaatccttagttcctcagaggcatggcccgccactaggagaaagtgtggcctatcattctgagagtcccaactcacagacagatgtaggaagacctttgtctggatctggtatatcagcatttgttcaagctcaccctagcaacggacagagagtgaaccccccaccaccacctcaagtaaggagtgttactcctccaccacctccaagaggccagactccccctccaagaggtacaactccacctcccccttcatgggaaccaaactctcaaacaaagcgctattctggaaacatggaatacgtaatctcccgaatctctcctgtcccacctggggcatggcaagagggctatcctccaccacctctcaacacttcccccatgaatcctcctaatcaaggacagagaggcattagttctgttcctgttggcagacaaccaatcatcatgcagagttctagcaaatttaactttccatcagggagacctggaatgcagaatggtactggacaaactgatttcatgatacaccaaaatgttgtccctgctggcactgtgaatcggcagccaccacctccatatcctctgacagcagctaatggacaaagcccttctgctttacaaacagggggatctgctgctccttcgtcatatacaaatggaagtattcctcagtctatgatggtgccaaacagaaatagtcataacatggaactatataacattagtgtacctggactgcaaacaaattggcctcagtcatcttctgctccagcccagtcatccccgagcagtgggcatgaaatccctacatggcaacctaacataccagtgaggtcaaattcttttaataacccattaggaaatagagcaagtcactctgctaattctcagccttctgctacaacagtcactgcaattacaccagctcctattcaacagcctgtgaaaagtatgcgtgtattaaaaccagagctacagactgctttagcacctacacacccttcttggataccacagccaattcaaactgttcaacccagtccttttcctgagggaaccgcttcaaatgtgactgtgatgccacctgttgctgaagctccaaactatcaaggaccaccaccaccctacccaaaacatctgctgcaccaaaacccatctgttcctccatacgagtcaatcagtaagcctagcaaagaggatcagccaagcttgcccaaggaagatgagagtgaaaagagttatgaaaatgttgatagtggggataaagaaaagaaacagattacaacttcacctattactgttaggaaaaacaagaaagatgaagagcgaagggaatctcgtattcaaagttattctcctcaagcatttaaattctttatggagcaacatgtagaaaatgtactcaaatctcatcagcagcgtctacatcgtaaaaaacaattagagaatgaaatgatgcgggttggattatctcaagatgcccaggatcaaatgagaaagatgctttgccaaaaagaatctaattacatccgtcttaaaagggctaaaatggacaagtctatgtttgtgaagataaagacactaggaataggagcatttggtgaagtctgtctagcaagaaaagtagatactaaggctttgtatgcaacaaaaactcttcgaaagaaagatgttcttcttcgaaatcaagtcgctcatgttaaggctgagagagatatcctggctgaagctgacaatgaatgggtagttcgtctatattattcattccaagataaggacaatttatactttgtaatggactacattcctgggggtgatatgatgagcctattaattagaatgggcatctttccagaaagtctggcacgattctacatagcagaacttacctgtgcagttgaaagtgttcataaaatgggttttattcatagagatattaaacctgataatattttgattgatcgtgatggtcatattaaattgactgactttggcctctgcactggcttcagatggacacacgattctaagtactatcagagtggtgaccatccacggcaagatagcatggatttcagtaatgaatggggggatccctcaagctgtcgatgtggagacagactgaagccattagagcggagagctgcacgccagcaccagcgatgtctagcacattctttggttgggactcccaattatattgcacctgaagtgttgctacgaacaggatacacacagttgtgtgattggtggagtgttggtgttattctttttgaaatgttggtgggacaacctcctttcttggcacaaacaccattagaaacacaaatgaaggttatcaactggcaaacatctcttcacattccaccacaagctaaactcagtcctgaagcttctgatcttattattaaactttgccgaggacccgaagatcgcttaggcaagaatggtgctgatgaaataaaagctcatccattttttaaaacaattgacttctccagtgacctgagacagcagtctgcttcatacattcctaaaatcacacacccaacagatacatcaaattttgatcctgttgatcctgataaattatggagtgatgataacgaggaagaaaatgtaaatgacactctcaatggatggtataaaaatggaaagcatcctgaacatgcattctatgaatttaccttccgaaggttttttgatgacaatggctacccatataattatccgaagcctattgaatatgaatacattaattcacaaggctcagagcagcagtcggatgaagatgatcaaaacacaggctcagagattaaaaatcgcgatctagtatatgtttaacacactagtaaataaatgtaatgaggatttgtaaaagggcctgaaatgcgaggtgttttgaggttctgagagtaaaattatgcaaatatgacagagctatatatgtgtgctctgtgtacaatattttattttcctaaattatgggaaatccttttaaaatgttaatttattccagccgtttaaatcagtatttagaaaaaaattgttataaggaaagtaaattatgaactgaatattatagtcagttcttggtacttaaagtacttaaaataagtagtgctttgtttaaaaggagaaacctggtatctatttgtatatatgctaaataattttaaaatacaagagtttttgaaatttttttgaaagacagttttagttttatcttgctttaaccaaatatgaaacataccccctattttacagagctcttttttcccctcataaccttgtttttggtagaaaataagctagagaaattaagccatcgtgttggtgagtgttcctaggctaatgataatctgtataattcacatcctgaaactaaggaatacagggttgaaaaaatattaatatgtttgtcagaaggaaaaataatgcatttatcttcccccccaccccccgccccatggaatatttaatctatttaatcttcttgcatttatttctcaagaattactggctttaaaagaagccaaagcactactagctttttttccatattggtatttttgatgctgcttccaattttaaaagggaacaaagctgccataaatcgaaatgttcaatactaaaagctaaaatatttctcaccatcctaagcagataattattttaattttcatatacttttcctgtatagtaactattttgattatatcatcaatgttacctgtttcctctttcagaacagtgctgcatatacagattgttattggcaaaggaaaatctggctatctggcaatattttacctaagcgcagattaattggtgaaaaaattaactcttaagatggccattaataattaggaaagtttacagagtggtcttagtagaaaattcaagtcctcctaatttatttaaggttcaataatgcgttcaacatgcctgttatgtataacgcttaggttctaaggaagattaaggtttcataccaaaatacatgtagcttatcttttaggaaggggaaaaaggctccattttgaccatagtaaaatttgtgttgtgttttatttccttttcttaagctccactgataagggattgtttttatcaaaagttactatttgtagattggaggcataattttagtgattttcatacttttagctttcttcgcataaaagctaattgaaaccgtatatgtagtaaaattaaaggcagagctgttgcagttgaattggagagttagggcaaagaacacttattagcccacacttcccacctttctacaggtggtcctttcagagctcagcctgaaaacccactactgtgttatcgtgcgtcttttggggttagtggttcttttgagaatctgaaggaagctgtggactcttcctagaaaaaaaaaccacacatacacatacaatgttgcatgcagtttcaagggattttggacatattgaaacctatcacaggctgtaggttatggacctctgtgccatgagaaaattgatacattaaactaagaactttgtttttaacttaccaatcactactcagcacatcttatataagctgataatttgtgatggaaaaggtctgtagcatgtgatataaggtgaccttatgaatgcctctcttgctggtacattaagttgttttaatatatcatttggaggggactgaaatgttaggctcattacaagcttgatacagaaatatttctgaaggatttctaatcagaattgtaaaacaatgtgctatcatgaaatcgcagtcttcacctcatggttcatggaacatttggttagtcccataaaatcctatgcaaaacaaagtagttcaagaatttttaggtgggtagtcacatttataaggtattcctcttactctttgggctttttcagtctgatttatttaaattttcatttagttgttttacttttggactaaggtgcaatacagtagaagataactttgttacatttatgttgtaggaaaactaaggtgctgtctcctcccccttcccttcccacaaaatctgtattccccctattgctgaaatgtaacagacactacaaattttgtattctttttttgttttttgttttgagacagggtctcactctgtcacccaggctggagggcagtggcgcttcacagctcactgcatcctcaaccttgggggctcacgcagtcctcccgcctcagcctcccaagtagctgggcatgcgccaccaagcccagctaatttttgtatctttagtagagatggggtttcgccatgttgcccaggttggtgtggaattcctgggctccagttatatgcccacctcagcctcccaaagtgctgggattacagacgtgacccaccgcgcctggcgcaaatatgtattcttttaaaatttcctctgatactataagctttttgcatttatctgaagcagtatacatgcctttggtatcagcaattttaacagtttggatatacttatcagctatcttattccaaaactacatctacttcttccagtatagaatctggtgcttcctgaccaaaaagatgagaaaaacaatgttaaaaatatagatgctttccattgaaatggagtgaaaacattggttctatatgttttcttttaaaataattttcttattaaaaacttgctgtctttattatacttaccctttttatgcatatcaatagtatttataagatgtgttctataattatgtaattgtagatactgttatgcattgtccagtgacatcataaggcaggccctactgctgtatcttttctaccttcttatttgtaatagaaactatagaatgtatgactaaaaagtcactttgagattgacttttttaaaaagttattaccttctgctgttgcaaagtgcaaaactgtgagtggaattgttttattctgacttaatgtgttagaaattagagaatacagtgggaggatttttagacattgctgctgctgttacccaaggtattttagataaaaaatttttaataaacatccctttggtatttaaagtggaacatttagcctgttcattttaatctaaagcaaaaagtaatttgggtcaaaatattggtatatttgtaaagcgccttaatatatccctttgtggaaggcactacacagtttacttttatattgtattgtgtatataagtattttgtattaaaattgaatcagtggcaacattaaagttttataaaatcatgctttgttagaaaaagaattacagctttgcaatataactaattgtttcgcataattctgaatgtaatagatatgaataatcagcctgtgtttttaatgaacttatttgtattttcccaatcattttctctagtgtaatgtttgctgggataataaaaaaaattcaaatctttcaa

SEQ ID NO: 2262 - DNA, 5511 bp, Homo sapiens
  source 1..5511: mol_type = genomic DNA
ttgggtctgcgctttggaaccgcggcgtgagcgccccgggaagatggagcagtcgccgtccacgccaccgccgccgcccggggctcccccgtccctgcggggccagcagcagctccagccaccagtgcccggtctcccggcgcgagaggcccgggagccgccggccaggacgcccccgagggtgtagaccgcgcccctggagagagtgataatcttcaaaatgaagactttggaaaattttaggttctctataggaactacaaaaatggaaggaaagaacattttcaaaaggaaattattttgaaagtatgtttacaacaaactgatactattgacagtttttttttttaaataataaaacactttaagaagattgtatttatggtaaaaggaaactggactaacaatgaggccaaagacttttcctgccacgacttattctggaaatagccggcagcgactgcaagagattcgtgaggggttaaaacagccatccaagtcttcggttcaggggctacccgcaggaccaaacagtgacacttccctggatgccaaagtcctggggagcaaagatgccaccaggcagcagcagcagatgagagccaccccaaagttcggaccttatcagaaagccttgagggaaatcagatattccttgttgccttttgctaatgaatcgggcacctctgcagctgcagaagtgaaccggcaaatgctgcaggaactggtgaacgcaggatgcgaccaggagatggctggccgagctctcaagcagactggcagcaggagcatcgaggccgccctggagtacatcagcaagatgggctacctggacccgaggaatgagcagattgtgcgggtcattaagcagacctccccaggaaaggggctcatgccaaccccagtgacgcggaggcccagcttcgaaggaaccggcgattcgtttgcgtcctaccaccagctgagcggtaccccctacgagggcccaagcttcggcgctgacggccccacggcgctggaggagatgccgcggccgtacgtggactaccttttccccggagtcggcccccacgggcccggccaccagcaccagcacccacccaagggctacggtgccagcgtagaggcagcaggggcacacttcccgctgcagggcgcgcactacgggcggccgcacctgctggtgcctggggaacccctgggctacggagtgcagcgcagcccctccttccagagcaagacgccgccggagaccgggggttacgccagcctgcccacgaagggccagggaggaccgccaggcgccggcctcgctttcccaccccctgccgccgggctctacgtgccgcacccacaccacaagcaggccggtcccgcggcccaccagctgcatgtgctgggctcccgcagccaggtgttcgccagcgacagccccccgcagagcctgctcactccctcgcggaacagcctcaacgtggacctgtatgaattgggcagcacctccgtccagcagtggccggctgccaccctggcccgccgggactccctgcagaagccgggcctggaggcgccgccgcgcgcgcacgtggccttccggcctgactgcccagtgcccagcaggaccaactccttcaacagccaccagccgcggcccggtccgcctggcaaggccgagccctccctgcccgcccccaacaccgtgacggctgtcacggccgcgcacatcttgcacccggtgaagagcgtgcgtgtgctgaggccggagccgcagacggctgtggggccctcgcaccccgcctgggtgcccgcgcctgccccggcccccgcccccgcccccgccccggctgcggagggcttggacgccaaggaggagcatgccctggcgctgggcggcgcaggcgccttcccgctggacgtggagtacggaggcccagaccggaggtgcccgcctccgccctacccgaagcacctgctgctgcgcagcaagtcggagcagtacgacctggacagcctgtgcgcaggcatggagcagagcctccgtgcgggccccaacgagcccgagggcggcgacaagagccgcaaaagcgccaagggggacaaaggcggaaaggataaaaagcagattcagacctctcccgttcccgtccgcaaaaacagcagagacgaagagaagagagagtcacgcatcaagagctactcgccatacgcctttaagttcttcatggagcagcacgtggagaatgtcatcaaaacctaccagcagaaggttaaccggaggctgcagctggagcaagaaatggccaaagctggactctgtgaagctgagcaggagcagatgcggaagatcctctaccagaaagagtctaattacaacaggttaaagagggccaagatggacaagtctatgtttgtcaagatcaaaaccctggggatcggtgcctttggagaagtgtgccttgcttgtaaggtggacactcacgccctgtacgccatgaagaccctaaggaaaaaggatgtcctgaaccggaatcaggtggcccacgtcaaggccgagagggacatcctggccgaggcagacaatgagtgggtggtcaaactctactactccttccaagacaaagacagcctgtactttgtgatggactacatccctggtggggacatgatgagcctgctgatccggatggaggtcttccctgagcacctggcccggttctacatcgcagagctgactttggccattgagagtgtccacaagatgggcttcatccaccgagacatcaagcctgataacattttgatagatctggatggtcacattaaactcacagatttcggcctctgcactgggttcaggtggactcacaattccaaatattaccagaaagggagccatgtcagacaggacagcatggagcccagcgacctctgggatgatgtgtctaactgtcggtgtggggacaggctgaagaccctagagcagagggcgcggaagcagcaccagaggtgcctggcacattcactggtggggactccaaactacatcgcacccgaggtgctcctccgcaaagggtacactcaactctgtgactggtggagtgttggagtgattctcttcgagatgctggtggggcagccgccctttttggcacctactcccacagaaacccagctgaaggtgatcaactgggagaacacgctccacattccagcccaggtgaagctgagccctgaggccagggacctcatcaccaagctgtgctgctccgcagaccaccgcctggggcggaatggggccgatgacctgaaggcccaccccttcttcagcgccattgacttctccagtgacatccggaagcagccagccccctacgttcccaccatcagccaccccatggacacctcgaatttcgaccccgtagatgaagaaagcccttggaacgatgccagcgaaggtagcaccaaggcctgggacacactcacctcgcccaataacaagcatcctgagcacgcattttacgaattcaccttccgaaggttctttgatgacaatggctacccctttcgatgcccaaagccttcaggagcagaagcttcacaggctgagagctcagatttagaaagctctgatctggtggatcagactgaaggctgccagcctgtgtacgtgtagatgggggccaggcacccccaccactcgctgcctcccaggtcagggtcccggagccggtgccctcacaggccaatagggaagccgagggctgttttgttttaaattagtccgtcgattacttcacttgaaattctgctcttcaccaagaaaacccaaacaggacacttttgaaaacaggactcagcatcgctttcaataggcttttcaggaccttcactgcattaaaacaatatttttgaaaatttagtacagtttagaaagagcacttattttgtttatatccattttttcttactaaattatagggattaactttgacaaatcatgctgctgttattttctacatttgtattttatccatagcacttattcacatttaggaaaagacataaaaactgaagaacattgatgagaaatctctgtgcaataatgtaaaaaaaaaaaaagataacactctgctcaatgtcacggagaccattttatccacacaatggtttttgttttttattttttcccatgtttcaaaattgtgatataatgatataatgttaaaagctgctttttttggctttttgcatatctagtataataggaagtgtgagcaaggtgatgatgtggctgtgatttccgacgtctggtgtgtggagagtactgcatgagcagagttcttctattataaaattaccatatcttgccattcacagcaggtcctgtgaatacgtttttactgagtgtctttaaatgaggtgttctagacagtgtgctgataatgtattgtgcgggtgacctcttcgctatgattgtatctcttactgttttgttaaagaaatgcagatgtgtaactgagaagtgatttgtgtgtgtgtcttggttgtgattggattctttggggggggggaactgaaacatttgtcatatactgaacttatatacatcaaaagggattaatacagcgatgccaaaaagtttaatcacggacacatgtccgtttctgtagtccgtatgctctttcattcttggtagagctggtatgtggaatgccatacctctgaccctactacttacctttttactgacagactgcccacactgaaagcttcagtgaatgttcttagtcctgttttcttctgttactgtcaggaaactgagtgatctaatggttctctcactttttttttgttcttttagtgtactttgaagtatcaaatcttaacttggtttaaacaatacatattcctaacctttgtaaaaaagcaaagattcttcaaaatgacattgaaataaaaagtaagccatacgtattttcttagaagtatagatgtatgtgcgtgtatacacacacacacacacacacagagataaacacaatattccttatttcaaattagtatgattcctatttaaagtgatttatatttgagtaaaaagttcaattcttttttgctttttaaaaaatctgatgcttcataattttcattatattattccacatatttttccttgaagttcttagcataatgtatccattacttagtatatatctaggcaacaacacttagaagtttatcagtgtttaaactaaaaaaataaagattcctgtgtactggtttacatttgtgtgagtggcatactcaagtctgctgtgcctgtcgtcgtgactgtcagtattctcgctattttatagtcgtgccatgttgttactcacagcgctctgacatactttcatgtggtaggttctttctcaggaactcagtttaactattatttattgatatatcattacctttgaaaagcttctactggcacaatttattattaaaattttgaatccaaatccc

SEQ ID NO: 2263 - DNA, 3632 bp, Homo sapiens
  source 1..3632: mol_type = genomic DNA
acatcttgccatcacatccttcagcccaactccagaacttctggggagctttccctcggggatggagtgcggcctggagcaaacccgtttgtgaaatgcaagtctccagtgtcccgagggttgggaacggggggcgaggcgaggaatggaccctgaagaagagagtgataatcttcaaaatgaagactttggaaaattttaggttctctataggaactacaaaaatggaaggaaagaacattttcaaaaggaaattattttgaaagtatgtttacaacaaactgatactattgacagtttttttttttaaataataaaacactttaagaagattgtatttatggtaaaaggaaactggactaacaatgaggccaaagacttttcctgccacgacttattctggaaatagccggcagcgactgcaagagattcgtgaggggttaaaacagccatccaagtcttcggttcaggggctacccgcaggaccaaacagtgacacttccctggatgccaaagtcctggggagcaaagatgccaccaggcagcagcagcagatgagagccaccccaaagttcggaccttatcagaaagccttgagggaaatcagatattccttgttgccttttgctaatgaatcgggcacctctgcagctgcagaagtgaaccggcaaatgctgcaggaactggtgaacgcaggatgcgaccaggagatggctggccgagctctcaagcagactggcagcaggagcatcgaggccgccctggagtacatcagcaagatgggctacctggacccgaggaatgagcagattgtgcgggtcattaagcagacctccccaggaaaggggctcatgccaaccccagtgacgcggaggcccagcttcgaaggaaccggcgattcgtttgcgtcctaccaccagctgagcggtaccccctacgagggcccaagcttcggcgctgacggccccacggcgctggaggagatgccgcggccgtacgtggactaccttttccccggagtcggcccccacgggcccggccaccagcaccagcacccacccaagggctacggtgccagcgtagaggcagcaggggcacacttcccgctgcagggcgcgcactacgggcggccgcacctgctggtgcctggggaacccctgggctacggagtgcagcgcagcccctccttccagagcaagacgccgccggagaccgggggttacgccagcctgcccacgaagggccagggaggaccgccaggcgccggcctcgctttcccaccccctgccgccgggctctacgtgccgcacccacaccacaagcaggccggtcccgcggcccaccagctgcatgtgctgggctcccgcagccaggtgttcgccagcgacagccccccgcagagcctgctcactccctcgcggaacagcctcaacgtggacctgtatgaattgggcagcacctccgtccagcagtggccggctgccaccctggcccgccgggactccctgcagaagccgggcctggaggcgccgccgcgcgcgcacgtggccttccggcctgactgcccagtgcccagcaggaccaactccttcaacagccaccagccgcggcccggtccgcctggcaaggccgagccctccctgcccgcccccaacaccgtgacggctgtcacggccgcgcacatcttgcacccggtgaagagcgtgcgtgtgctgaggccggagccgcagacggctgtggggccctcgcaccccgcctgggtgcccgcgcctgccccggcccccgcccccgcccccgccccggctgcggagggcttggacgccaaggaggagcatgccctggcgctgggcggcgcaggcgccttcccgctggacgtggagtacggaggcccagaccggaggtgcccgcctccgccctacccgaagcacctgctgctgcgcagcaagtcggagcagtacgacctggacagcctgtgcgcaggcatggagcagagcctccgtgcgggccccaacgagcccgagggcggcgacaagagccgcaaaagcgccaagggggacaaaggcggaaaggataaaaagcagattcagacctctcccgttcccgtccgcaaaaacagcagagacgaagagaagagagagtcacgcatcaagagctactcgccatacgcctttaagttcttcatggagcagcacgtggagaatgtcatcaaaacctaccagcagaaggttaaccggaggctgcagctggagcaagaaatggccaaagctggactctgtgaagctgagcaggagcagatgcggaagatcctctaccagaaagagtctaattacaacaggttaaagagggccaagatggacaagtctatgtttgtcaagatcaaaaccctggggatcggtgcctttggagaagtgtgccttgcttgtaaggtggacactcacgccctgtacgccatgaagaccctaaggaaaaaggatgtcctgaaccggaatcaggtggcccacgtcaaggccgagagggacatcctggccgaggcagacaatgagtgggtggtcaaactctactactccttccaagacaaagacagcctgtactttgtgatggactacatccctggtggggacatgatgagcctgctgatccggatggaggtcttccctgagcacctggcccggttctacatcgcagagctgactttggccattgagagtgtccacaagatgggcttcatccaccgagacatcaagcctgataacattttgatagatctggatggtcacattaaactcacagatttcggcctctgcactgggttcaggtggactcacaattccaaatattaccagaaagggagccatgtcagacaggacagcatggagcccagcgacctctgggatgatgtgtctaactgtcggtgtggggacaggctgaagaccctagagcagagggcgcggaagcagcaccagaggtgcctggcacattcactggtggggactccaaactacatcgcacccgaggtgctcctccgcaaagggtacactcaactctgtgactggtggagtgttggagtgattctcttcgagatgctggtggggcagccgccctttttggcacctactcccacagaaacccagctgaaggtgatcaactgggagaacacgctccacattccagcccaggtgaagctgagccctgaggccagggacctcatcaccaagctgtgctgctccgcagaccaccgcctggggcggaatggggccgatgacctgaaggcccaccccttcttcagcgccattgacttctccagtgacatccggaagcagccagccccctacgttcccaccatcagccaccccatggacacctcgaatttcgaccccgtagatgaagaaagcccttggaacgatgccagcgaaggtagcaccaaggcctgggacacactcacctcgcccaataacaagcatcctgagcacgcattttacgaattcaccttccgaaggttctttgatgacaatggctacccctttcgatgcccaaagccttcaggagcagaagcttcacaggctgagagctcagatttagaaagctctgatctggtggatcagactgaaggctgccagcctgtgtacgtgtag

SEQ ID NO: 2264 - DNA, 1278 bp, Homo sapiens
  source 1..1278: mol_type = genomic DNA
tggtcaccagggaagctggcaagggaagggagactagggtgcgctctaggagaagccgacagcctgagagtcccagaagaggagccctgtggaccctcccctgccagccactcccttaccctgggtataagagccaccaccgcctgccatccgccaccatctcccactcctgcagctcttctcacaggaccagccactagcgcagcctcgagcgatggcctatgtccccgcaccgggctaccagcccacctacaacccgacgctgccttactaccagcccatcccgggcgggctcaacgtgggaatgtctgtttacatccaaggagtggccagcgagcacatgaagcggttcttcgtgaactttgtggttgggcaggatccgggctcagacgtcgccttccacttcaatccgcggtttgacggctgggacaaggtggtcttcaacacgttgcagggcgggaagtggggcagcgaggagaggaagaggagcatgcccttcaaaaagggtgccgcctttgagctggtcttcatagtcctggctgagcactacaaggtggtggtaaatggaaatcccttctatgagtacgggcaccggcttcccctacagatggtcacccacctgcaagtggatggggatctgcaacttcaatcaatcaacttcatcggaggccagcccctccggccccagggacccccgatgatgccaccttaccctggtcccggacattgccatcaacagctgaacagcctgcccaccatggaaggacccccaaccttcaacccgcctgtgccatatttcgggaggctgcaaggagggctcacagctcgaagaaccatcatcatcaagggctatgtgcctcccacaggcaagagctttgctatcaacttcaaggtgggctcctcaggggacatagctctgcacattaatccccgcatgggcaacggtaccgtggtccggaacagccttctgaatggctcgtggggatccgaggagaagaagatcacccacaacccatttggtcccggacagttctttgatctgtccattcgctgtggcttggatcgcttcaaggtttacgccaatggccagcacctctttgactttgcccatcgcctctcggccttccagagggtggacacattggaaatccagggtgatgtcaccttgtcctatgtccagatctaatctattcctggggccataactcatgggaaaacagaattatcccctaggactcctttctaagcccctaataaaatgtctgagggtgtctcatg

SEQ ID NO: 2265 - DNA, 1949 bp, Homo sapiens
  source 1..1949: mol_type = genomic DNA
gtggtttctaacgctgaacttaaaaagtgttgagatgaataatgaagaggaccttctgcaggaggactcaacaagagatgaaggcaatgagactgaagccaacagcatgaacacattaagaaggacaaggaagaaagtcactaaaccatatgtttgttcaactgaagtgggagaaacggatatgtccaattcaaatgattgcatgagggacagcagtcaaattttgaccccacctcaactctcttctagaatgaaacacattagacaagccatggccaaaaatcgcctccagtttgtacgatttgaagcaacagacctccacggcgtgtccaggtctaagactatccctgcacacttttttcaagagaaagtgagccatggtgtttgcatgccccgaggttatcttgaagtgataccaaatccaaaggacaatgaaatgaataacataagagccacatgttttaatagcgacatagtcctaatgccagagttatcaacctttagagttttgccatgggctgacagaactgcaagagtgatatgtgataccttcactgtgactggtgagcctcttttgacttccccaaggtacattgcaaagaggcagctgagccatctgcaggcctctggcttttccctgctttctgctttcatctatgatttttgcatttttggtgtgcccgaaattttaaattcaaagattatatcttttcctgctttaacatttttaaataaccatgatcagcccttcatgcaggaacttgttgatggcttgtatcacactggagccaatgtcgagagtttttcctcctctaccaggcctggtcagatggaaatctctttcctgcctgaatttggcattagctcagctgataatgcatttaccctcagaacaggtgtcaaagaagtggcaaggaaatataattacattgccagcttcttcattgagactggattttgtgattcagggattttgtctcatagtctctgggatgtcgataggaagaaaaacatgttctgcagcacttctggaactgagcagctcacgatcactgggaaaaaatggttggcaggactcttgaagcactctgctgcgctcagctgcctgatggcgccttctgttagctgccgaaagcgttattccaaggacaggaaagacctgaagaagagtgtgcctacaacatggggatacaatgacaacagctgtatatttaatatcaaatgtcatggagagaaaggcacccggatagaaaataaactaggctcagcaacagcaaacccttacttggtgctggctgcaactgttgctgccggcttagatggacttcatagcagtaatgaggtcttggctggtccagatgagagcacagacttttaccaagtggaaccttctgagatccctttaaaactagaagatgcccttgtggcactggaagaagatcaatgcctgagacaggctctaggagaaacctttattcgatattttgttgccatgaagaaatatgagttggagaatgaagaaatagctgcagagagaaataaattcttagagtattttatttagaatagagctcacaactactcctttagacatgtaattgttacttaaagctaatctaccaaaacaaaaagactgaacttttgtaattaacaacagcaacaataacaagattacgaatgcttttgacttttttttttgtccatggaatatttgacagatgaagtaggactgctgagaagattctgataacagaaacaaacaacaaagttgtggtgaagctataatatgcaaacttaccagatcttgtcagtcatttcctatgtgtatgttgacctggataagaatatccaattttgggtggcaataaatatattcgcacattaagaaaaaaaagacttaagcattagaaagcaaaatttaaatgactaaaaaagaaaaaaaagaaaag

SEQ ID NO: 2266 - DNA, 5213 bp, Homo sapiens
  source 1..5213: mol_type = genomic DNA
gtggtttctaacgctgaacttaaaaagtgttgagatgaataatgaagaggaccttctgcaggaggactcaacaagagatgaaggcaatgagactgaagccaacagcatgaacacattaagaaggacaaggaagaaagtcactaaaccatatgtttgttcaactgaagtgggagaaacggatatgtccaattcaaatgattgcatgagggacagcagtcaaattttgaccccacctcaactctcttctagaatgaaacacattagacaagccatggccaaaaatcgcctccagtttgtacgatttgaagcaacagacctccacggcgtgtccaggtctaagactatccctgcacacttttttcaagagaaagtgagccatggtgtttgcatgccccgaggttatcttgaagtgataccaaatccaaaggacaatgaaatgaataacataagagccacatgttttaatagcgacatagtcctaatgccagagttatcaacctttagagttttgccatgggctgacagaactgcaagagtgatatgtgataccttcactgtgactgtctctgggatgtcgataggaagaaaaacatgttctgcagcacttctggaactgagcagctcacgatcactgggaaaaaatggttggcaggactcttgaagcactctgctgcgctcagctgcctgatggcgccttctgttagctgccgaaagcgttattccaaggacaggaaagacctgaagaagagtgtgcctacaacatggggatacaatgacaacagctgtatatttaatatcaaatgtcatggagagaaaggcacccggatagaaaataaactaggctcagcaacagcaaacccttacttggtgctggctgcaactgttgctgccggcttagatggacttcatagcagtaatgaggtcttggctggtccagatgagagcacagacttttaccaagtggaaccttctgagatccctttaaaactagaagatgcccttgtggcactggaagaagatcaatgcctgagacaggctctaggagaaacctttattcgatattttgttgccatgaagaaatatgagttggagaatgaagaaatagctgcagagagaaataaattcttagagtattttatttagaatagagctcacaactactcctttagacatgtaattgttacttaaagctaatctaccaaaacaaaaagactgaacttttgtaattaacaacagcaacaataacaagattacgaatgcttttgacttttttttttgtccatggaatatttgacagatgaagtaggactgctgagaagattctgataacagaaacaaacaacaaagttgtggtgaagctataatatgcaaacttaccagatcttgtcagtcatttcctatgtgtatgttgacctggataagaatatccaattttgggtggcaataaatatattcgcacattaagaaaaaaaagacttaagcattagaaagcaaaatttaaatgactaaaaaagaaaaaaaagaaaaggagaaaaaattttaatggtacacataggttatgatttccagggagacaaatatactaatatagtctcgctaatcaaataatattgtgaatccaggttgtatgcaccattatggtctttctaaacaagttaaataaacttttgccaaaatataatgacaggtaggcagttttcccctaagtctcttctcttttcacccttctccactagctcctgaaaagcttatgaacttcaaggttataatgtcctcaagaaacaaatccctaaggaatagaattggagctgagaacaacgaggtcagattttaaaagtagttaaagcctttcttttaacaatgcctcatatagaagttcaatacacaaagtatagatagaaagatgtttgtgtgtgagggtaggtgggctctgtctactctgcttcattctttgaaactagatgttcctctgaaacctctagtgctctgtggagtgtgagaacaactgcctggctagccagggctatgtttggagtttaagtttgttattcaaattactgaatctgctgctcacagaggttggtacctccccagagaatattacctgttccaggcctttgtttgaatgagataatattgtaactatcacaaaagtttagctgcttttgggaagaagtccaaaatccacttactagcaaatgaaacattattctactgcttaggatcaaacagcagattttatgttcaattaaaactgactgtagtctcaatttagatagcaattgcacaagcagaggattagaatttggctcagatcctcttattaaaattcatattactcagtagcttaaatagtgaaagtcagtctatccttcactaattactcccttcttttttcctttgagcaggagaagtgtgtttggatacataagaagaaagttcccagcactttgggaggccaaggcaggaggattgcttgaggccaggagtttgagtccagcctggaccacatagtgagacccctgtttctacaaaaaaaaaaaaaaaaatgcctcgcatggtggcacatgcctgtagtcccagctacgtgggaggctgagaagggaggatcgcttgagcctgggagtttcaggctgcagtgagccataatcacaccactgcactccagcttgggtgacagagtgagacactgtcttaaaaaaaagagaagaataaaattcatggatgcatatggggtagagagaaagatagtgtagggtagctgggggaaggaagggaacctgtcctgaaacctccagaatgaaatcccacacattacatcatgggagggataaggaagactctcatgccaattttctagctgtctgctagaaaattcccctctgttcattttcccctctgttctcagtaataaaacctcaatatgttctttgaaagcaatgaaaaatgaaatgatatttctgagccttcattaaggttggatgtggtcatgttattaggttcagtgcaaagaggtgaaagtagaagtgttgcatataagttctttaggacattttcttttcttttcttgtattttttttttttttccgagatggagtctcgctttgtcacccaggctgaagtgcaatgtgggggggtcttggctcactgcaacctctgccccctgggttcaagtaattctcctgcctcagcctcccaagtagctgggatcccaggtgcctgctaccatgcctggccttttagtagagatggggtttcaccatattggccagtctggtcttgaactcctgaactcaggtgatcagcctgccttggcctcccaaagtgctaggattacaggcatgagccaccatgccctaccacactttagaacatttttttaaatgacggatgctgtgtgctctgccctttctttctcttgctgccttcacccttcctgctgagtggcctacagataatgtggctaggattatgtccttgggaagggaggtttgctccacagggtacagtaataaggtggaatctctgctttgtagagcagtttgacttgcctacatccagatgtttacctgagagagaaccaaacttctatcttctttaagccacaatgattttgattctttgttagttgcaatgaaatttattttctcttttccatgtgtgtgttgtatgtgtgtttgtgtgtgagtgtgtgcatatgagtggggaatttgagggatttggggatgaaagaacaaaggtataagaaccagtgaaagacgacttcctcaatattcccacttctagagaggataatctgagttaatcaaagggatccacacatccaaaaaatgggattggctctaacccatccctataaagtggcatatccctttatagtccacgggccttaatgaaacatgtctaatgcattgacttcattttaccataatgagtaaagatgctgtaaaaagtctgataatcacagtgtttgaagccgttttttcccctttcgcattattagcataacttaaaaacacagtactcaggatgccatgtgaaggaattatataactaggaatattatcttcagtattaagtgtacagtcgtgagtcaaagaaaatattcagccatagattacaaatcagttgataacgtaagttggtgtggcagtttccaccaagatttcagttaggtgtgtgctgatgtatattcttgttctttaaggcaacccaaaaagaggcattggccagcagagttcagggccaaagacaaattggggtaggtacatgtaaaaatcagttatctatttttctatttctttcatctgttcataggctttctattgttgaaaggactttctgctgatgcttctaccttcttggtctgggttaagagggtcagacattcattcagcagcacttattgagcaccatttgtgtgctaagccttcagctgggagccatcatactaggggagaccaaaacaaagatgagcagacaatgaaagagttttggatctgtgtatcttaagcagaacataaataattttttttgtagacctaatgctgaaaaaagctatttggaaagcttctttatggctcgaaaagggtgccttataaatagctttacaaaaattgctttcttattttcatttactataattgttctaatcaaagcttaggggaaaaatgtgattactgaatttaaagttggtaattaaatgagtatacataagaaatgtaaattaaaagcgataatattttaagactagaaattaaaacattagtattgtagtaacaagtttctattttcaaggacattctataatctaaaatttcattttacagtgtgtgaataacaacaacgcttgaaatgattatttgaaggcaatgaaagatcaaaaaactttaatctgaataaaaattgaaagcatacagtgaagtctgagcttatcagtaaaacagaacagtctattgacatatctccagtcacctgtttgacaaaatacactcaccaatatgtttatgatataggtatgactggacaatacctttaaccttgggttttctatgacaggggtaagaatttgtgtctttaaacattacctatgtgcacagtgccttccctgttaaagctcttctcatgctgcctataattaggggtttacatgatacttcctaattgctaattaggatgtgaattctcagaataaaaggtacagatcttactta

SEQ ID NO: 2267 - DNA, 3420 bp, Homo sapiens
  source 1..3420: mol_type = genomic DNA
atcgcagcgccagcggttgcaaggcccaagaagcccatcctgggaaggaaaatgcattggggaaccctgtgcggattcttgtggctttggccctatcttttctatgtccaagctgtgcccatccaaaaagtccaagatgacaccaaaaccctcatcaagacaattgtcaccaggatcaatgacatttcacacacgcagtcagtctcctccaaacagaaagtcaccggtttggacttcattcctgggctccaccccatcctgaccttatccaagatggaccagacactggcagtctaccaacagatcctcaccagtatgccttccagaaacgtgatccaaatatccaacgacctggagaacctccgggatcttcttcacgtgctggccttctctaagagctgccacttgccctgggccagtggcctggagaccttggacagcctggggggtgtcctggaagcttcaggctactccacagaggtggtggccctgagcaggctgcaggggtctctgcaggacatgctgtggcagctggacctcagccctgggtgctgaggccttgaaggtcactcttcctgcaaggactacgttaagggaaggaactctggcttccaggtatctccaggattgaagagcattgcatggacaccccttatccaggactctgtcaatttccctgactcctctaagccactcttccaaaggcataagaccctaagcctccttttgcttgaaaccaaagatatatacacaggatcctattctcaccaggaagggggtccacccagcaaagagtgggctgcatctgggattcccaccaaggtcttcagccatcaacaagagttgtcttgtcccctcttgacccatctccccctcactgaatgcctcaatgtgaccaggggtgatttcagagagggcagaggggtaggcagagcctttggatgaccagaacaaggttccctctgagaattccaaggagttccatgaagaccacatccacacacgcaggaactcccagcaacacaagctggaagcacatgtttatttattctgcattttattctggatggatttgaagcaaagcaccagcttctccaggctctttggggtcagccagggccaggggtctccctggagtgcagtttccaatcccatagatgggtctggctgagctgaacccattttgagtgactcgagggttgggttcatctgagcaagagctggcaaaggtggctctccagttagttctctcgtaactggtttcatttctactgtgactgatgttacatcacagtgtttgcaatggtgttgccctgagtggatctccaaggaccaggttattttaaaaagatttgttttgtcaagtgtcatatgtaggtgtctgcacccaggggtggggaatgtttgggcagaagggagaaggatctagaatgtgttttctgaataacatttgtgtggtgggttctttggaaggagtgagatcattttcttatcttctgcaattgcttaggatgtttttcatgaaaatagctctttcaggggggttgtgaggcctggccaggcaccccctggagagaagtttctggccctggctgaccccaaagagcctggagaagctgatgctttgcttcaaatccatccagaataaaacgcaaagggctgaaagccatttgttggggcagtggtaagctctggctttctccgactgctagggagtggtctttcctatcatggagtgacggtcccacactggtgactgcgatcttcagagcaggggtccttggtgtgaccctctgaatggtccagggttgatcacactctgggtttattacatggcagtgttcctatttggggcttgcatgccaaattgtagttcttgtctgattggctcacccaagcaaggccaaaattaccaaaaatcttggggggtttttactccagtggtgaagaaaactcctttagcaggtggtcctgagacctgacaagcactgctaggcgagtgccaggactccccaggccaggccaccaggatggcccttcccactggaggtcacattcaggaagatgaaagaggaggtttggggtctgccaccatcctgctgctgtgtttttgctatcacacagtgggtggtggatctgtccaaggaaacttgaatcaaagcagttaactttaagactgagcacctgcttcatgctcagccctgactggtgctataggctggagaagctcacccaataaacattaagattgaggcctgccctcagggatcttgcattcccagtggtcaaaccgcactcacccatgtgccaaggtggggtatttaccacagcagctgaacagccaaatgcatggtgcagttgacagcaggtgggaaatggtatgagctgaggggggccgtgcccaggggcccacagggaaccctgcttgcactttgtaacatgtttacttttcagggcatcttagcttctattatagccacatccctttgaaacaagataactgagaatttaaaaataagaaaatacataagaccataacagccaacaggtggcaggaccaggactatagcccaggtcctctgatacccagagcattacgtgagccaggtaatgagggactggaaccagggagaccgagcgctttctggaaaagaggagtttcgaggtagagtttgaaggaggtgagggatgtgaattgcctgcagagagaagcctgttttgttggaaggtttggtgtgtggagatgcagaggtaaaagtgtgagcagtgagttacagcgagaggcagagaaagaagagacaggagggcaagggccatgctgaagggaccttgaagggtaaagaagtttgatattaaaggagttaagagtagcaagttctagagaagaggctggtgctgtggccagggtgagagctgctctggaaaatgtgacccagatcctcacaaccacctaatcaggctgaggtgtcttaagccttttgctcacaaaacctggcacaatggctaattcccagagtgtgaaacttcctaagtataaatggttgtctgtttttgtaacttaaaaaaaaaaaaaaaagtttggccgggtgcggtggctcacgcctgtaatcccagcactttgggaggccaaggtggggggatcacaaggtcactagatggcgagcatcctggccaacatggtgaaaccccgtctctactaaaaacacaaaagttagctgagcgtggtggcgggcgcctgtagtcccagccactcgggaggctgagacaggagaatcgcttaaacctgggaggcggagagtacagtgagccaagatcgcgccactgcactccggcctgatgacagagcgagattccgtcttaaaaaaaaaaaaaaaaaagtttgtttttaaaaaaatctaaataaaataactttgccccctg

SEQ ID NO: 2268 - DNA, 5459 bp, Homo sapiens
  source 1..5459: mol_type = genomic DNA
tgagggctttgctatgacctcagtcccctcacggagccacgactgccccttgctgccacagcctttccaagaccctgcccggccctgccccatcctcagccccgagtcaccatgggcagcgtcagtagcctcatctccggccacagcttccacagcaagcactgccgggcttcgcagtacaagctgcgcaagtcctcccacctcaagaagctcaaccggtattccgacgggctgctgaggtttggcttctcccaggactccggtcacggcaagtccagctccaaaatgggcaagagcgaagacttcttctacatcaaggtcagccagaaagcccggggctcccatcacccagattacacggcactgtccagcggggatttagggggccaggctggggtggactttgacccgtccacaccccccaagctcatgcccttctccaatcagctagaaatgggctccgagaagggtgcagtgaggcccacagccttcaagcctgtgctgccacggtcaggagccatcctgcactcctccccggagagtgccagccaccagctgcaccccgcccctccagacaagcccaaggagcaggagctgaagcctggcctgtgctctggggcgctgtcagactccggccggaactccatgtccagcctgcccacacacagcaccagcagcagctaccagctggacccgctggtcacacccgtgggacccacaagccgttttgggggctccgcccacaacatcacccagggcatcgtcctccaggacagcaacatgatgagcctgaaggctctgtccttctccgacggaggtagcaagctgggccactcgaacaaggcagacaagggcccctcgtgtgtccgctcccccatctccacggacgagtgcagcatccaggagctggagcagaagctgttggagagggagggcgccctccagaagctgcagcgcagctttgaggagaaggagcttgcctccagcctggcctacgaggagcggccgcggcgctgcagggacgagctggagggcccggagcccaaaggcggcaacaagctcaagcaggcctcgcagaagagccagcgcgcgcagcaggtcctgcacctgcaggtactgcagcttcagcaggagaagcggcagctccggcaggagctcgagagcctcatgaaggagcaggacctgctggagaccaagctcaggtcctacgagagggagaagaccagcttcggccccgcgctggaggagacccagtgggaggtgtgccagaagtcaggcgagatctccctcctgaagcagcagctgaaggagtcccagacggaggtgaacgccaaggctagcgagatcctgggtctcaaggcacagctgaaggacacgcggggcaagctggagggcctggagctgaggacccaggacctggagggcgccctgcgcaccaagggcctggagctggaggtctgtgagaatgagctgcagcgcaagaagaacgaggcggagctgctgcgggagaaggtgaacctgctggagcaggagctgcaggagctgcgggcccaggccgccctggcccgcgacatggggccgcccaccttccccgaggacgtccctgccctgcagcgggagctggagcggctgcgggccgagctgcgggaggagcggcaaggccatgaccagatgtcctcgggcttccagcatgagcggctcgtgtggaaggaggagaaggagaaggtgattcagtaccagaaacagctgcagcagagctacgtggccatgtaccagcggaaccagcgcctggagaaggccctgcagcagctggcacgtggggacagcgccggggagcccttggaggttgacctggaaggggctgacatcccctacgaggacatcatagccactgagatctgaggggctgcctgggaaggcgagtctggggacctggcactgggaggcagggctctcccgtgcatcccccctgctcagcaattcagacccctttgagagacgccactccctgggacacagacccaggacccccgaggggagggcaggatggcctttccttccctctctgatgtcccagtgctcaccagccctgcagcccaccagacgtcaggccctgactcctctggctttcccaggagatgggtccaggggtctgtctgctttggttaagggctccctaaactttggcctttgttcgaaatagatatcctctccccctcctccagggaaggtggccacagcaagtacagcggctcccctctgcttctcatcccaacctctttttcctcctggacacattggaatgccttggaaatagaaagaagccatatatgaccagaagccttggaaccagccccatcagaacctgagctattttcctctggccgcagaggtgtaggggtggaatgagccgcggggaagctggctttgaaacctcagggctgtcccagccccggcaagccacaggaaggaggggagagacaggcagcccagcagtgtggagaccctgccacagccagaggagggcagagggagaatccaagggttgagagccagtggcgggtgatggccagcccctggggcccagcccctgtttactggttcttgcaaatgggagctgagcagcctctggacagccagtgacctttgacctcggtgaccactcttctttaagccatagaccctgaggccctgggctgggtgctgggaagggagggttgaaaccaccgtgaaccagagggtgtggctttccaggcaccctcagggagcctccccatctgtccagctggggccagaggctgggagtccctacctgcttcacgttggccggcggctactctggaatgtttttccctccccagaatcaagcttttgcttgatccagaagagcccatatcactaagatggcatatatgtgatctgggcattttcctcctctgcctacagccaggtttagcggcaaacctttcccccttagcaccttcagggctgagttctgggtttctagaggtcaggacggctcctcagagcgccaggaagccagagccccaagcaggacgaaaaagaggcatacacacagcagtgtgaatagcctggccaccagccatcctccctccacctcaagacccccatttgtcccagactaaaggatccagagagcagctccctttctcaggagcttgggcagtgccccagggagtccagggtttctctgcagatgtgcggagcgggaggcggtggtagagagagataaaaggtggagtttctctgttgtttggttcagggattttatttttaattttatgagacagggtcttgctctgtcccccaggctggagtgcagtggcatgatcatagctcactgcagcctcatactcctgggctcaagcaatcctcctgcctcagccttccaactagctgggactacaggtgcgcgccaccgtgcctggctaacttttcattttttttgtagggacggggtctcgttttgttgccaaagctggtctcaaacttgtggcctcaagcaatccacctgccttggcctcccaaagtgctgagattgcagatgtgagccaccgtgcctggccagatttttcttttattcttctttctttttcttttttgctttcttgtcttttcagaagcaagccagacctagcaggctgttccatgttctatttttgactgtagccacagctgctgttctcaggacagcatcccttcccacatgcctgcgcctgctgcctgctgagatgaggaggggagcgtctgggaacttgcgagtccaaggccagtccccatttctgcctcgctcaccgctggcccttagagaccccgaggtaggggtggggagatgcttctctccttgccccccgccctcatgggtcctagcccttccctgagtgcgggctgaggccagagtcaccttttctgtggctggctctaccttcctgtccctgaggttaaacggtgcccatcctgccatcctcaaacgacagaggagcttttctggaatttcaaaccattgctcttagtcccaagctaggcttaaacctggaatctacaagccaaaagtccctccctgcctgagggcagtaccctccattgggcacagtccagacccaagtcaaagatgccccattccttgcgcctcagccctcagttccttcatttccaccaggccgtgccttgtttgagtttttcctcccagtgagactgccccacggagacagaggaaagggctggctccccctccccaggctggagacccccccccaactccaggaaagagcagtcagagtccagtgctctgcctcagacgttgcctgagaagaagtggctgccacacccaggggaaggccctgaggcggaggctgtgctccgccatggtgtcccggtaccttccatacacagaggagtgcagccttctccatatctccatggccctgtcccaggccggcccagatgtgtcccccccaggccttgtcctacgtccaaggtggcagatgtcttccctgggctgccaccagcccccgccccagagtggcccaccgtggcactagaatgcaagtatcctgcgaccttgcaacctcaccttcctgtgggtgttctttcctgccctgtccaaaagcgccctcactattcttggaccatgccagattctgcctctctggaaagaggctctggacagcagaagcctccaagcacagagcctggccccaggccccagacagggtgggcttcctgcccttccctctgggcacgcctgctggccgacccactgacccactcggatggaccaacctgctctgtccccaaaggacgcctgcaggagagagcagcactccgcatcacctcaccaaggatcggactctgcccctggacctgggaacgactggactgtcacggggttccctcctagctctcccagtgaactcctgccaggcacacacagcccctatagcactgagctcacatgggactgggatatgggggcatctcttccccagagaggcactcagtgagcctcctgtgcctggccccagcctgggccatctcttaggtgagacagttgcccgaaactaagccaggcctggctggaggagcagcagcttggggagagggatttccctgcagacctcaagccatcatgcggtgggtgctgccatgacagaggctgcacccctgggccagcggggctgctcacccacctcttgtgcaaggtggcctttgtgctgcgcctgcaggcagagctggagcccccagcagaggcaggctgggacggaccagcatctggaagatgtacatagttatttttctctttgtggtttcttgtttggtttggtttgcttttgacagcttcattttatttttgacgtcactttttggccatgtaaactatttgtggcaattttatgtttttatttatgaataaagaatgccatttctcacgccctcta

SEQ ID NO: 2269 - DNA, 231 bp, Homo sapiens
  source 1..231: mol_type = genomic DNA
atgggcagcgtcagtagcctcatctccggccacagcttccacagcaagcactgccgggcttcgcagtacaagctgcgcaagtcctcccacctcaagaagctcaaccggtattccgacgggctgctgaggtttggcttctcccaggactccggtcacggcaaggccatgaccagatgtcctcgggcttccagcatgagcggctcgtgtggaaggaggagaaggagaaggtga

SEQ ID NO: 2270 - DNA, 1833 bp, Homo sapiens
  source 1..1833: mol_type = genomic DNA
tgagggctttgctatgacctcagtcccctcacggagccacgactgccccttgctgccacagcctttccaagaccctgcccggccctgccccatcctcagccccgagtcaccatgggcagcgtcagtagcctcatctccggccacagcttccacagcaagcactgccgggcttcgcagtacaagctgcgcaagtcctcccacctcaagaagctcaaccggtattccgacgggctgctgaggtttggcttctcccaggactccggtcacggcaagtccagctccaaaatgggcaagagcgaagacttcttctacatcaaggtcagccagaaagcccggggctcccatcacccagattacacggcactgtccagcggggatttagggggccaggctggggtggactttgacccgtccacaccccccaagctcatgcccttctccaatcagctagaaatgggctccgagaagggtgcagtgaggcccacagccttcaagcctgtgctgccacggtcaggagccatcctgcactcctccccggagagtgccagccaccagctgcaccccgcccctccagacaagcccaaggagcaggagctgaagcctggcctgtgctctggggcgctgtcagactccggccggaactccatgtccagcctgcccacacacagcaccagcagcagctaccagctggacccgctggtcacacccgtgggacccacaagccgttttgggggctccgcccacaacatcacccagggcatcgtcctccaggacagcaacatgatgagcctgaaggctctgtccttctccgacggaggtagcaagctgggccactcgaacaaggcagacaagggcccctcgtgtgtccgctcccccatctccacggacgagtgcagcatccaggagctggagcagaagctgttggagagggagggcgccctccagaagctgcagcgcagctttgaggagaaggagcttgcctccagcctggcctacgaggagcggccgcggcgctgcagggacgagctggagggcccggagcccaaaggcggcaacaagctcaagcaggcctcgcagaagagccagcgcgcgcagcaggtcctgcacctgcaggtactgcagcttcagcaggagaagcggcagctccggcaggagctcgagagcctcatgaaggagcaggacctgctggagaccaagctcaggtcctacgagagggagaagaccagcttcggccccgcgctggaggagacccagtgggaggtgtgccagaagtcaggcgagatctccctcctgaagcagcagctgaaggagtcccagacggaggtgaacgccaaggctagcgagatcctgggtctcaaggcacagctgaaggacacgcggggcaagctggagggcctggagctgaggacccaggacctggagggcgccctgcgcaccaagggcctggagctggaggtctgtgagaatgagctgcagcgcaagaagaacgaggcggagctgctgcgggagaaggtgaacctgctggagcaggagctgcaggagctgcgggcccaggccgccctggcccgcgacatggggccgcccaccttccccgaggacgtccctgccctgcagcgggagctggagcggctcgtgtggaaggaggagaaggagaaggtgattcagtaccagaaacagctgcagcagagctacgtggccatgtaccagcggaaccagcgcctggagaaggccctgcagcagctggcacgtggggacagcgccggggagcccttggaggttgacctggaaggggctgacatcccctacgaggacatcatagccactgagatctga

SEQ ID NO: 2271 - DNA, 5706 bp, Homo sapiens
  source 1..5706: mol_type = genomic DNA
gcagaggccggcgcgcctggagctggcgggttggcagcggccgggcggggaggccgaaagtttctctgcccgcctcggccagtgagtgggagccgggagctgcatcccgcgcagtgggaccggcccggcccgctcagcagctctggaaaaagagagacgggaacacaccgggaaacactgggaaaaaaaaaaagtctcaagtgcgcccgaggcgcagggggcaggtctacggctctcgcaggctctgtgagggctttgctatgacctcagtcccctcacggagccacgactgccccttgctgccacagcctttccaagaccctgcccggccctgccccatcctcagccccgagtcaccatgggcagcgtcagtagcctcatctccggccacagcttccacagcaagcactgccgggcttcgcagtacaagctgcgcaagtcctcccacctcaagaagctcaaccggtattccgacgggctgctgaggtttggcttctcccaggactccggtcacggcaagtccagctccaaaatgggcaagagcgaagacttcttctacatcaaggtcagccagaaagcccggggctcccatcacccagattacacggcactgtccagcggggatttagggggccaggctggggtggactttgacccgtccacaccccccaagctcatgcccttctccaatcagctagaaatgggctccgagaagggtgcagtgaggcccacagccttcaagcctgtgctgccacggtcaggagccatcctgcactcctccccggagagtgccagccaccagctgcaccccgcccctccagacaagcccaaggagcaggagctgaagcctggcctgtgctctggggcgctgtcagactccggccggaactccatgtccagcctgcccacacacagcaccagcagcagctaccagctggacccgctggtcacacccgtgggacccacaagccgttttgggggctccgcccacaacatcacccagggcatcgtcctccaggacagcaacatgatgagcctgaaggctctgtccttctccgacggaggtagcaagctgggccactcgaacaaggcagacaagggcccctcgtgtgtccgctcccccatctccacggacgagtgcagcatccaggagctggagcagaagctgttggagagggagggcgccctccagaagctgcagcgcagctttgaggagaaggagcttgcctccagcctggcctacgaggagcggccgcggcgctgcagggacgagctggagggcccggagcccaaaggcggcaacaagctcaagcaggcctcgcagaagagccagcgcgcgcagcaggtcctgcacctgcaggtactgcagcttcagcaggagaagcggcagctccggcaggagctcgagagcctcatgaaggagcaggacctgctggagaccaagctcaggtcctacgagagggagaagaccagcttcggccccgcgctggaggagacccagtgggaggtgtgccagaagtcaggcgagatctccctcctgaagcagcagctgaaggagtcccagacggaggtgaacgccaaggctagcgagatcctgggtctcaaggcacagctgaaggacacgcggggcaagctggagggcctggagctgaggacccaggacctggagggcgccctgcgcaccaagggcctggagctggaggtctgtgagaatgagctgcagcgcaagaagaacgaggcggagctgctgcgggagaaggtgaacctgctggagcaggagctgcaggagctgcgggcccaggccgccctggcccgcgacatggggccgcccaccttccccgaggacgtccctgccctgcagcgggagctggagcggctgcgggccgagctgcgggaggagcggcaaggccatgaccagatgtcctcgggcttccagcatgagcggctcgtgtggaaggaggagaaggagaaggtgattcagtaccagaaacagctgcagcagagctacgtggccatgtaccagcggaaccagcgcctggagaaggccctgcagcagctggcacgtggggacagcgccggggagcccttggaggttgacctggaaggggctgacatcccctacgaggacatcatagccactgagatctgaggggctgcctgggaaggcgagtctggggacctggcactgggaggcagggctctcccgtgcatcccccctgctcagcaattcagacccctttgagagacgccactccctgggacacagacccaggacccccgaggggagggcaggatggcctttccttccctctctgatgtcccagtgctcaccagccctgcagcccaccagacgtcaggccctgactcctctggctttcccaggagatgggtccaggggtctgtctgctttggttaagggctccctaaactttggcctttgttcgaaatagatatcctctccccctcctccagggaaggtggccacagcaagtacagcggctcccctctgcttctcatcccaacctctttttcctcctggacacattggaatgccttggaaatagaaagaagccatatatgaccagaagccttggaaccagccccatcagaacctgagctattttcctctggccgcagaggtgtaggggtggaatgagccgcggggaagctggctttgaaacctcagggctgtcccagccccggcaagccacaggaaggaggggagagacaggcagcccagcagtgtggagaccctgccacagccagaggagggcagagggagaatccaagggttgagagccagtggcgggtgatggccagcccctggggcccagcccctgtttactggttcttgcaaatgggagctgagcagcctctggacagccagtgacctttgacctcggtgaccactcttctttaagccatagaccctgaggccctgggctgggtgctgggaagggagggttgaaaccaccgtgaaccagagggtgtggctttccaggcaccctcagggagcctccccatctgtccagctggggccagaggctgggagtccctacctgcttcacgttggccggcggctactctggaatgtttttccctccccagaatcaagcttttgcttgatccagaagagcccatatcactaagatggcatatatgtgatctgggcattttcctcctctgcctacagccaggtttagcggcaaacctttcccccttagcaccttcagggctgagttctgggtttctagaggtcaggacggctcctcagagcgccaggaagccagagccccaagcaggacgaaaaagaggcatacacacagcagtgtgaatagcctggccaccagccatcctccctccacctcaagacccccatttgtcccagactaaaggatccagagagcagctccctttctcaggagcttgggcagtgccccagggagtccagggtttctctgcagatgtgcggagcgggaggcggtggtagagagagataaaaggtggagtttctctgttgtttggttcagggattttatttttaattttatgagacagggtcttgctctgtcccccaggctggagtgcagtggcatgatcatagctcactgcagcctcatactcctgggctcaagcaatcctcctgcctcagccttccaactagctgggactacaggtgcgcgccaccgtgcctggctaacttttcattttttttgtagggacggggtctcgttttgttgccaaagctggtctcaaacttgtggcctcaagcaatccacctgccttggcctcccaaagtgctgagattgcagatgtgagccaccgtgcctggccagatttttcttttattcttctttctttttcttttttgctttcttgtcttttcagaagcaagccagacctagcaggctgttccatgttctatttttgactgtagccacagctgctgttctcaggacagcatcccttcccacatgcctgcgcctgctgcctgctgagatgaggaggggagcgtctgggaacttgcgagtccaaggccagtccccatttctgcctcgctcaccgctggcccttagagaccccgaggtaggggtggggagatgcttctctccttgccccccgccctcatgggtcctagcccttccctgagtgcgggctgaggccagagtcaccttttctgtggctggctctaccttcctgtccctgaggttaaacggtgcccatcctgccatcctcaaacgacagaggagcttttctggaatttcaaaccattgctcttagtcccaagctaggcttaaacctggaatctacaagccaaaagtccctccctgcctgagggcagtaccctccattgggcacagtccagacccaagtcaaagatgccccattccttgcgcctcagccctcagttccttcatttccaccaggccgtgccttgtttgagtttttcctcccagtgagactgccccacggagacagaggaaagggctggctccccctccccaggctggagacccccccccaactccaggaaagagcagtcagagtccagtgctctgcctcagacgttgcctgagaagaagtggctgccacacccaggggaaggccctgaggcggaggctgtgctccgccatggtgtcccggtaccttccatacacagaggagtgcagccttctccatatctccatggccctgtcccaggccggcccagatgtgtcccccccaggccttgtcctacgtccaaggtggcagatgtcttccctgggctgccaccagcccccgccccagagtggcccaccgtggcactagaatgcaagtatcctgcgaccttgcaacctcaccttcctgtgggtgttctttcctgccctgtccaaaagcgccctcactattcttggaccatgccagattctgcctctctggaaagaggctctggacagcagaagcctccaagcacagagcctggccccaggccccagacagggtgggcttcctgcccttccctctgggcacgcctgctggccgacccactgacccactcggatggaccaacctgctctgtccccaaaggacgcctgcaggagagagcagcactccgcatcacctcaccaaggatcggactctgcccctggacctgggaacgactggactgtcacggggttccctcctagctctcccagtgaactcctgccaggcacacacagcccctatagcactgagctcacatgggactgggatatgggggcatctcttccccagagaggcactcagtgagcctcctgtgcctggccccagcctgggccatctcttaggtgagacagttgcccgaaactaagccaggcctggctggaggagcagcagcttggggagagggatttccctgcagacctcaagccatcatgcggtgggtgctgccatgacagaggctgcacccctgggccagcggggctgctcacccacctcttgtgcaaggtggcctttgtgctgcgcctgcaggcagagctggagcccccagcagaggcaggctgggacggaccagcatctggaagatgtacatagttatttttctctttgtggtttcttgtttggtttggtttgcttttgacagcttcattttatttttgacgtcactttttggccatgtaaactatttgtggcaattttatgtttttatttatgaataaagaatgccatttctcacgccctcta

SEQ ID NO: 2272 - DNA, 1614 bp, Homo sapiens
  source 1..1614: mol_type = genomic DNA
atgggcagcgtcagtagcctcatctccggccacagcttccacagcaagcactgccgggcttcgcagtacaagctgcgcaagtcctcccacctcaagaagctcaaccggtattccgacgggctgctgaggtttggcttctcccaggactccggtcacggcaagtccagctccaaaatgggcaagagcgaagacttcttctacatcaaggtcagccagaaagcccggggctcccatcacccagattacacggcactgtccagcggggatttagggggccaggctggggtggactttgacccgtccacaccccccaagctcatgcccttctccaatcagctagaaatgggctccgagaagggtgcagtgaggcccacagccttcaagcctgtgctgccacggtcaggagccatcctgcactcctccccggagagtgccagccaccagctgcaccccgcccctccagacaagcccaaggagcaggagctgaagcctggcctgtgctctggggcgctgtcagactccggccggaactccatgtccagcctgcccacacacagcaccagcagcagctaccagctggacccgctggtcacacccgtgggacccacaagccgttttgggggctccgcccacaacatcacccagggcatcgtcctccaggacagcaacatgatgagcctgaaggctctgtccttctccgacggaggtagcaagctgggccactcgaacaaggcagacaagggcccctcgtgtgtccgctcccccatctccacggacgagtgcagcatccaggagctggagcagaagctgttggagagggagggcgccctccagaagctgcagcgcagctttgaggagaaggagcttgcctccagcctggcctacgaggagcggccgcggcgctgcagggacgagctggagggcccggagcccaaaggcggcaacaagctcaagcaggcctcgcagaagagccagcgcgcgcagcaggtcctgcacctgcaggtactgcagcttcagcaggagaagcggcagctccggcaggagctcgagagcctcatgaaggagcaggacctgctggagaccaagctcaggtcctacgagagggagaagaccagcttcggccccgcgctggaggagacccagtgggaggtgtgccagaagtcaggcgagatctccctcctgaagcagcagctgaaggagtcccagacggaggtgaacgccaaggctagcgagatcctgggtctcaaggcacagctgaaggacacgcggggcaagctggagggcctggagctgaggacccaggacctggagggcgccctgcgcaccaagggcctggagctggaggtctgtgagaatgagctgcagcgcaagaagaacgaggcggagctgctgcgggagaagcatgagcggctcgtgtggaaggaggagaaggagaaggtgattcagtaccagaaacagctgcagcagagctacgtggccatgtaccagcggaaccagcgcctggagaaggccctgcagcagctggcacgtggggacagcgccggggagcccttggaggttgacctggaaggggctgacatcccctacgaggacatcatagccactgagatctga

SEQ ID NO: 2273 - DNA, 1410 bp, Homo sapiens
  source 1..1410: mol_type = genomic DNA
gccctgcacgtcggggcagcgggacagatcccagggtgcccagggagtctccaagtgcctcactcctcccgccgcaaacatgacagagaactccgacaaagttcccattgccctggtgggacctgatgacgtggaattctgcagccccccggcgtacgctacgctgacggtgaagccctccagccccgcgcggctgctcaaggtgggagccgtggtcctcatttcgggagctgtgctgctgctctttggggccatcggggccttctacttctggaaggggagcgacagtcacatttacaatgtccattacaccatgagtatcaatgggaaattacaagatgggtcaatggaaatagacgctgggaacaacttggagacctttaaaatgggaagtggagctgaagaagcaattgcagttaatgatttccagaatggcatcacaggaattcgttttgctggaggagagaagtgctacattaaagcgcaagtgaaggctcgtattcctgaggtgggcgccgtgaccaaacagagcatctcctccaaactggaaggcaagatcatgccagtcaaatatgaagaaaattctcttatctgggtggctgtagatcagcctgtgaaggacaacagcttcttgagttctaaggtgttagaactctgcggtgaccttcctattttctggcttaaaccaacctatccaaaagaaatccagagggaaagaagagaagtggtaagaaaaattgttccaactaccacaaaaagaccacacagtggaccacggagcaacccaggcgctggaagactgaataatgaaaccagacccagtgttcaagaggactcacaagccttcaatcctgataatccttatcatcagcaggaaggggaaagcatgacattcgaccctagactggatcacgaaggaatctgttgtatagaatgtaggcggagctacacccactgccagaagatctgtgaacccctggggggctattacccatggccttataattatcaaggctgccgttcggcctgcagagtcatcatgccatgtagctggtgggtggcccgtatcttgggcatggtgtgaaatcacttcatatatcatgtgctgtaaaataagaactagctgaagagacaaccaaagaagcattaaggcaggttgatgctgataggaccacaaaatatttttacactcaacctgagcggttattcttgacactcttaacagaattttttcaattgttttccagaactttagtatatgcaaatgtactgaaagggtagttcaagtctaaaatgccataacccctttattatttgttattttttatttgcattgctttgccataagtcttcccttgcttgtatcttccaaagctattttgaaataaacatgaaaatttacagtttgcc

SEQ ID NO: 2274 - DNA, 731 bp, Homo sapiens
  source 1..731: mol_type = genomic DNA
ccgactgcaaaggaccctcgggagggagcgcggcgaaaggggcacccgtaggagcccgggcgagctgtttcccgcccgactccccactccctgggggctaccgcgtggggcccgggtgcgctgggggccgcaggtgctggcggcacaaacgcgacggtccctctcccgccccggcccgcaggcgtacgctacgctgacggtgaagccctccagccccgcgcggctgctcaaggtgggagccgtggtcctcatttcgggagctgtgctgctgctctttggggccatcggggccttctacttctggaaggggagcgacagtcacatttacaatgtccattacaccatgagtatcaatgggaaattacaagatgggtcaatggaaatagacgctgggaacaacttggagacctttaaaatgggaagtggagctgaagaagcaattgcagttaatgatttccagaatggcatcacaggaattcgttttgctggaggagagaagtgctacattaaagcgcaagtgaaggctcgtattcctgaggtgggcgccgtgaccaaacagagcatctcctccaaactggaaggcaagatcatgccagtcaaatatgaagaaaattctcttatctgggtggctgtagatcagcctgtgaaggacaacagcttcttgagttctaaggtgttagaactctgcggtgaccttcctattttctggcttaaaccaacctatccaaaag

SEQ ID NO: 2275 - DNA, 1444 bp, Homo sapiens
  source 1..1444: mol_type = genomic DNA
ccgtgcaccgtgtgtgcgcgcggcgttgaaatgccctgcacgtcggggcagcgggacagatcccagggtgcccagggagtctccaagtgcctcactcctcccgccgcaaacatgacagagaactccgacaaagttcccattgccctggtgggacctgatgacgtggaattctgcagccccccggcgtacgctacgctgacggtgaagccctccagccccgcgcggctgctcaaggtgggagccgtggtcctcatttcgggagctgtgctgctgctctttggggccatcggggccttctacttctggaaggggagcgacagtcacatttacaatgtccattacaccatgagtatcaatgggaaattacaagatgggtcaatggaaatagacgctgggaacaacttggagacctttaaaatgggaagtggagctgaagaagcaattgcagttaatgatttccagaatggcatcacaggaattcgttttgctggaggagagaagtgctacattaaagcgcaagtgaaggctcgtattcctgaggtgggcgccgtgaccaaacagagcatctcctccaaactggaaggcaagatcatgccagtcaaatatgaagaaaattctcttatctgggtggctgtagatcagcctgtgaaggacaacagcttcttgagttctaaggtgttagaactctgcggtgaccttcctattttctggcttaaaccaacctatccaaaagaaatccagagggaaagaagagaagtggtaagaaaaattgttccaactaccacaaaaagaccacacagtggaccacggagcaacccaggcgctggaagactgaataatgaaaccagacccagtgttcaagaggactcacaagccttcaatcctgataatccttatcatcaggaaggggaaagcatgacattcgaccctagactggatcacgaaggaatctgttgtatagaatgtaggcggagctacacccactgccagaagatctgtgaacccctggggggctattacccatggccttataattatcaaggctgccgttcggcctgcagagtcatcatgccatgtagctggtgggtggcccgtatcttgggcatggtgtgaaatcacttcatatatcatgtgctgtaaaataagaactagctgaagagacaaccaaagaagcattaaggcaggttgatgctgataggaccacaaaatatttttacactcaacctgagcggttattcttgacactcttaacagaattttttcaattgttttccagaactttagtatatgcaaatgtactgaaagggtagttcaagtctaaaatgccataacccctttattatttgttattttttatttgcattgctttgccataagtcttcccttgcttgtatcttccaaagctattttgaaataaacatgaaaatttacagtttgccaaaaa

SEQ ID NO: 2276 - DNA, 1464 bp, Homo sapiens
  source 1..1464: mol_type = genomic DNA
attttgaaaccagtgcagtaatcaggtgtctgagccctttaggtcagctaattagtggcaaactttaaaaaagaaatgttttaagtattgaaatttgtctttctaacaaaatgttactcagaaatgcaacacataagacagaaaaagcagagccactctggttagactatggatggacaggagagaacagagtgccacagtgccatcctcacctctaggccatgcccgggagatcccaacagttctaaggacatagatgaaagccacctatgaggtccaacttcattatacactcgtggcaactcacaagatccagagatgagtggtgtggccacctgttttcctgattactggaccgatgctcttctgcagtgccaggtcccttcccctcttccacactccccacacatctcataacaaaatgccctacagcaccatgggcctgccccatagaatcgttcagggagtactaccattttgagctgaaacaaacatgcacattggccttcctctccacacatgctgctctatatcaagcataccctggtcctgtctgcagtcctttccatatacctaataccatataccatatacctgagacactgcatgcctaatcttgaccaaaggatgaaaacaacttgtgaaactgaggtgccactgcagacgtgttcagctgggagcccaattaaccttctgcctcctcaatttccatttatccatcaatagtgctcaacccagatgcataatagaattgagctttagaaaaagaaagacctatgcccaagcgcccttcccacagcttctgatttgatttgtccagggtgaaacccaggcatggtacccagagagtctacccagatgcttctaaagtacagccagcattgcaaattatggagctattggaataggtgtcagaggcaaccaaagtctttactcttaaggtatttttaaggaaatcattgcattaactgattgttgtatgaatgaagtcatcatatataatgtattattattaaggactatctcatgtatctctgaaacatatggacactacctcatacactgcccttctaagataagccctgaattgctcaaaaaagaaagcatcactaactcttatgctcactttcagatttacaatgtccattacaccatgagtatcaatgggaaattacaagatgggtcaatggaaatagacgctgggaacaacttggagacctttaaaatgggaagtggagctgaagaagcaattgcagttaatgatttccagaatgtaagtatatttcatgcatttagagaatttaaccaggcaagcctgcgggacttttctaattcaaggaggagcagcgtttctcacacacatccaaatggtaactgttctttatagcagttgtagtgccactaatccactacatgtagcatattctctctgagaaaggaccagactttgtccttcatatttgc

SEQ ID NO: 2277 - DNA, 3083 bp, Homo sapiens
  source 1..3083: mol_type = genomic DNA
cagaggcgcgcctggcggatctgagtgtgttgcccgggcagcggcgcgcgggaccaacgcaaggagcagctgacagacgaagaaaagtgctggacaggaagggagaattctgacgccaacatgcagcgaagtatcatgtcatttttccaccccaagaaagagggtaaagcaaagaagcctgagaaggaggcatccaatagcagcagagagacggagccccctccaaaggcggcactgaaggagtggaatggagtggtgtccgagagtgactctccggtgaagaggccagggaggaaggcggcccgggtcctgggcagcgaaggggaagaggaggatgaagcccttagccctgctaaaggccagaagcctgccctggactgctcacaggtctccccgccccgtcctgccacatctcctgagaacaatgcttccctctctgacacctctcccatggacagttccccatcagggattccgaagcgtcgcacagctcggaagcagctcccgaaacggaccattcaggaagtcctggaagagcagagtgaggacgaggacagagaagccaagaggaagaaggaggaggaagaagaggagaccccgaaagaaagcctcacagaggctgaagtggccacagagaaggaaggagaagacggggaccagcccaccacgcctcccaagcccctaaagacctccaaagcagagaccccgacggaaagcgtttcagagcctgaggtggccacgaagcaggaactgcaggaggaggaagagcagaccaagcctccccgcagagctcccaagacgctcagcagcttcttcaccccccggaagccagcagtcaaaaaagaagtgaaggaagaggagccaggggctccaggaaaggagggagctgctgagggacccctggatccatctggttacaatcctgccaagaacaactatcatcccgtggaagatgcctgctggaaaccgggccagaaggttccttacctggctgtggcccggacgtttgagaagatcgaggaggtgtctgctcggctccggatggtggagacgctgagcaacttgctgcgctccgtggtggccctgtcgcctccagacctcctccctgtcctctacctcagcctcaaccaccttgggccaccccagcagggcctggagcttggcgtgggtgatggtgtccttctcaaggcagtggcccaggccacaggtcggcagctggagtccgtccgggctgaggcagccgagaaaggcgacgtggggctggtggccgagaacagccgcagcacccagaggctcatgctgccaccacctccgctcactgcctccggggtcttcagcaagttccgcgacatcgccaggctcactggcagtgcttccacagccaagaagatagacatcatcaaaggcctctttgtggcctgccgccactcagaagcccggttcatcgctaggtccctgagcggacggctgcgccttgggctggcagagcagtcggtgctggctgccctctcccaggcagtgagcctcacgcccccgggccaagaattcccaccagccatggtggatgctgggaagggcaagacagcagaggccagaaagacgtggctggaggagcaaggcatgatcctgaagcagacgttctgcgaggttcccgacctggaccgaattatccccgtgctgctggagcacggcctggaacgtctcccggagcactgcaagctgagcccagggattcccctgaaaccaatgttggcccatcccacccggggcatcagcgaggtcctgaaacgctttgaggaggcagctttcacctgcgaatacaaatatgacgggcagagggcacagatccacgccctggaaggcggggaggtgaagatcttcagcaggaatcaggaagacaacactgggaagtacccggacatcatcagccgcatccccaagattaaactcccatcggtcacatccttcatcctggacaccgaagccgtggcttgggaccgggaaaagaagcagatccagccattccaagtgctcaccacccgcaaacgcaaggaggtggatgcgtctgagatccaggtgcaggtgtgtttgtacgccttcgacctcatctacctcaatggagagtccctggtacgtgagcccctttcccggcgccggcagctgctccgggagaactttgtggagacagagggcgagtttgtcttcgccacctccctggacaccaaggacatcgagcagatcgccgagttcctggagcagtcagtgaaagactcctgcgaggggctgatggtgaagaccctggatgttgatgccacctacgagatcgccaagagatcgcacaactggctcaagctgaagaaggactaccttgatggcgtgggtgacaccctggacctggtggtgatcggcgcctacctgggccgggggaagcgggccggccggtacgggggcttcctgctggcctcctacgacgaggacagtgaggagctgcaggccatatgcaagcttggaactggcttcagtgatgaggagctggaggagcatcaccagagcctcaaggcgctggtgctgcccagcccacgcccttacgtgcggatagatggcgctgtgattcccgaccactggctggaccccagcgctgtgtgggaggtgaagtgcgctgacctctccctctctcccatctaccctgctgcgcggggcctggtggatagtgacaagggcatctcccttcgcttccctcggtttattcgagtccgtgaagacaagcagccggagcaggccaccaccagtgctcaggtggcctgtttgtaccggaagcaaagtcagattcagaaccaacaaggcgaggactcaggctctgaccctgaagatacctactaagccctcgccctcctagggcctgggtacagggcatgagttggacggaccccagggttattattgcctttgctttttagcaaatctgctgtggcaggctgtggattttgagagtcaggggaggggtgtgtgtgtgagggggtggcttactccggagtctgggattcatcccgtcatttctttcaataaataattattggatagct

SEQ ID NO: 2278 - DNA, 3027 bp, Homo sapiens
  source 1..3027: mol_type = genomic DNA
agacgtctgcgcgcgaatgccgtggcgcgaacttgggactgcagaggcgcgcctggcggatctgagtgtgttgcccgggcagcggcgcgcgggaccaacgcaaggagcagctgacagacgaagaaaagtgctggacaggaagggagaattctgacgccaacatgcagcgaagtatcatggcggcactgaaggagtggaatggagtggtgtccgagagtgactctccggtgaagaggccagggaggaaggcggcccgggtcctgggcagcgaaggggaagaggaggatgaagcccttagccctgctaaaggccagaagcctgccctggactgctcacaggtctccccgccccgtcctgccacatctcctgagaacaatgcttccctctctgacacctctcccatggacagttccccatcagggattccgaagcgtcgcacagctcggaagcagctcccgaaacggaccattcaggaagtcctggaagagcagagtgaggacgaggacagagaagccaagaggaagaaggaggaggaagaggagaccccgaaagaaagcctcacagaggctgaagtggccacagagaaggaaggagaagacggggaccagcccaccacgcctcccaagcccctaaagacctccaaagcagagaccccgacggaaagcgtttcagagcctgaggtggccacgaagcaggaactgcaggaggaggaagagcagaccaagcctccccgcagagctcccaagacgctcagcagcttcttcaccccccggaagccagcagtcaaaaaagaagtgaaggaagaggagccaggggctccaggaaaggagggagctgctgagggacccctggatccatctggttacaatcctgccaagaacaactatcatcccgtggaagatgcctgctggaaaccgggccagaaggttccttacctggctgtggcccggacgtttgagaagatcgaggaggtgtctgctcggctccggatggtggagacgctgagcaacttgctgcgctccgtggtggccctgtcgcctccagacctcctccctgtcctctacctcagcctcaaccaccttgggccaccccagcagggcctggagcttggcgtgggtgatggtgtccttctcaaggcagtggcccaggccacaggtcggcagctggagtccgtccgggctgaggcagccgagaaaggcgacgtggggctggtggccgagaacagccgcagcacccagaggctcatgctgccaccacctccgctcactgcctccggggtcttcagcaagttccgcgacatcgccaggctcactggcagtgcttccacagccaagaagatagacatcatcaaaggcctctttgtggcctgccgccactcagaagcccggttcatcgctaggtccctgagcggacggctgcgccttgggctggcagagcagtcggtgctggctgccctctcccaggcagtgagcctcacgcccccgggccaagaattcccaccagccatggtggatgctgggaagggcaagacagcagaggccagaaagacgtggctggaggagcaaggcatgatcctgaagcagacgttctgcgaggttcccgacctggaccgaattatccccgtgctgctggagcacggcctggaacgtctcccggagcactgcaagctgagcccagggattcccctgaaaccaatgttggcccatcccacccggggcatcagcgaggtcctgaaacgctttgaggaggcagctttcacctgcgaatacaaatatgacgggcagagggcacagatccacgccctggaaggcggggaggtgaagatcttcagcaggaatcaggaagacaacactgggaagtacccggacatcatcagccgcatccccaagattaaactcccatcggtcacatccttcatcctggacaccgaagccgtggcttgggaccgggaaaagaagcagatccagccattccaagtgctcaccacccgcaaacgcaaggaggtggatgcgtctgagatccaggtgcaggtgtgtttgtacgccttcgacctcatctacctcaatggagagtccctggtacgtgagcccctttcccggcgccggcagctgctccgggagaactttgtggagacagagggcgagtttgtcttcgccacctccctggacaccaaggacatcgagcagatcgccgagttcctggagcagtcagtgaaagactcctgcgaggggctgatggtgaagaccctggatgttgatgccacctacgagatcgccaagagatcgcacaactggctcaagctgaagaaggactaccttgatggcgtgggtgacaccctggacctggtggtgatcggcgcctacctgggccgggggaagcgggccggccggtacgggggcttcctgctggcctcctacgacgaggacagtgaggagctgcaggccatatgcaagcttggaactggcttcagtgatgaggagctggaggagcatcaccagagcctcaaggcgctggtgctgcccagcccacgcccttacgtgcggatagatggcgctgtgattcccgaccactggctggaccccagcgctgtgtgggaggtgaagtgcgctgacctctccctctctcccatctaccctgctgcgcggggcctggtggatagtgacaagggcatctcccttcgcttccctcggtttattcgagtccgtgaagacaagcagccggagcaggccaccaccagtgctcaggtggcctgtttgtaccggaagcaaagtcagattcagaaccaacaaggcgaggactcaggctctgaccctgaagatacctactaagccctcgccctcctagggcctgggtacagggcatgagttggacggaccccagggttattattgcctttgctttttagcaaatctgctgtggcaggctgtggattttgagagtcaggggaggggtgtgtgtgtgagggggtggcttactccggagtctgggattcatcccgtcatttctttcaataaataattattggat

SEQ ID NO: 2279 - DNA, 2886 bp, Homo sapiens
  source 1..2886: mol_type = genomic DNA
acttgggactgcagaggcgcgcctggcggatctgagtgtgttgcccgggcagcggcgcgcgggaccaacgcaaggagcagctgacagacgaagaaaagtgctggacaggaagggagaattctgacgccaacatgcagcgaagtatcatgtcatttttccaccccaagaaagagggtaaagcaaagaagcctgagaaggaggcatccaatagcagcagagagacggagccccctccaaaggcggcactgaaggagtggaatggagtggtgtccgagagtgactctccggtgaagaggccagggaggaaggcggcccgggtcctgggcagcgaaggggaagaggaggatgaagcccttagccctgctaaaggccagaagcctgccctggactgctcacaggtctccccgccccgtcctgccacatctcctgagaacaatgcttccctctctgacacctctcccatggacagttccccatcagggattccgaagcgtcgcacagaagcagagaccccgacggaaagcgtttcagagcctgaggtggccacgaagcaggaactgcaggaggaggaagagcagaccaagcctccccgcagagctcccaagacgctcagcagcttcttcaccccccggaagccagcagtcaaaaaagaagtgaaggaagaggagccaggggctccaggaaaggagggagctgctgagggacccctggatccatctggttacaatcctgccaagaacaactatcatcccgtggaagatgcctgctggaaaccgggccagaaggttccttacctggctgtggcccggacgtttgagaagatcgaggaggtgtctgctcggctccggatggtggagacgctgagcaacttgctgcgctccgtggtggccctgtcgcctccagacctcctccctgtcctctacctcagcctcaaccaccttgggccaccccagcagggcctggagcttggcgtgggtgatggtgtccttctcaaggcagtggcccaggccacaggtcggcagctggagtccgtccgggctgaggcagccgagaaaggcgacgtggggctggtggccgagaacagccgcagcacccagaggctcatgctgccaccacctccgctcactgcctccggggtcttcagcaagttccgcgacatcgccaggctcactggcagtgcttccacagccaagaagatagacatcatcaaaggcctctttgtggcctgccgccactcagaagcccggttcatcgctaggtccctgagcggacggctgcgccttgggctggcagagcagtcggtgctggctgccctctcccaggcagtgagcctcacgcccccgggccaagaattcccaccagccatggtggatgctgggaagggcaagacagcagaggccagaaagacgtggctggaggagcaaggcatgatcctgaagcagacgttctgcgaggttcccgacctggaccgaattatccccgtgctgctggagcacggcctggaacgtctcccggagcactgcaagctgagcccagggattcccctgaaaccaatgttggcccatcccacccggggcatcagcgaggtcctgaaacgctttgaggaggcagctttcacctgcgaatacaaatatgacgggcagagggcacagatccacgccctggaaggcggggaggtgaagatcttcagcaggaatcaggaagacaacactgggaagtacccggacatcatcagccgcatccccaagattaaactcccatcggtcacatccttcatcctggacaccgaagccgtggcttgggaccgggaaaagaagcagatccagccattccaagtgctcaccacccgcaaacgcaaggaggtggatgcgtctgagatccaggtgcaggtgtgtttgtacgccttcgacctcatctacctcaatggagagtccctggtacgtgagcccctttcccggcgccggcagctgctccgggagaactttgtggagacagagggcgagtttgtcttcgccacctccctggacaccaaggacatcgagcagatcgccgagttcctggagcagtcagtgaaagactcctgcgaggggctgatggtgaagaccctggatgttgatgccacctacgagatcgccaagagatcgcacaactggctcaagctgaagaaggactaccttgatggcgtgggtgacaccctggacctggtggtgatcggcgcctacctgggccgggggaagcgggccggccggtacgggggcttcctgctggcctcctacgacgaggacagtgaggagctgcaggccatatgcaagcttggaactggcttcagtgatgaggagctggaggagcatcaccagagcctcaaggcgctggtgctgcccagcccacgcccttacgtgcggatagatggcgctgtgattcccgaccactggctggaccccagcgctgtgtgggaggtgaagtgcgctgacctctccctctctcccatctaccctgctgcgcggggcctggtggatagtgacaagggcatctcccttcgcttccctcggtttattcgagtccgtgaagacaagcagccggagcaggccaccaccagtgctcaggtggcctgtttgtaccggaagcaaagtcagattcagaaccaacaaggcgaggactcaggctctgaccctgaagatacctactaagccctcgccctcctagggcctgggtacagggcatgagttggacggaccccagggttattattgcctttgctttttagcaaatctgctgtggcaggctgtggattttgagagtcaggggaggggtgtgtgtgtgagggggtggcttactccggagtctgggattcatcccgtcatttctttcaataaataattattggat

SEQ ID NO: 2280 - DNA, 1527 bp, Homo sapiens
  source 1..1527: mol_type = genomic DNA
tggcgcgaacttgggactgcagaggcgcgcctggcggatctgagtgtgttgcccgggcagcggcgcgcgggaccaacgcaaggagcagctgacagacgaagaaaagtgctggacaggaagggagaattctgacgccaacatgcagcgaagtatcatgtcatttttccaccccaagaaagagggtaaagcaaagaagcctgagaaggaggcatccaatagcagcagagagacggagccccctccaaaggcggcactgaaggagtggaatggagtggtgtccgagagtgactctccggtgaagaggccagggaggaaggcggcccgggtcctgggcagcgaaggggaagaggaggatgaagcccttagccctgctaaaggccagaagcctgccctggactgctcacaggtctccccgccccgtcctgccacatctcctgagaacaatgcttccctctctgacacctctcccatggacagttccccatcagggattccgaagcgtcgcacagaagaggagaccccgaaagaaagcctcacagaggctgaagtggccacagagaaggaaggagaagacggggaccagcccaccacgcctcccaagcccctaaagacctccaaagcagagaccccgacggaaagcgtttcagagcctgaggtggccacgaagcaggaactgcaggaggaggaagagcagaccaagcctccccgcagagctcccaagacgctcagcagcttcttcaccccccggaagccagcagtcaaaaaagaagtgaaggaagaggagccaggggctccaggaaaggagggagctgctgagggacccctggatccatctggttacaatcctgccaagaacaactatcatcccgtggaagatgcctgctggaaaccgggccagaaggttccttacctggctgtggcccggacgtttgagaagatcgaggaggtgtctgctcggctccggatggtggagacgctgagcaacttgctgcgctccgtggtggccctgtcgcctccagacctcctccctgtcctctacctcagcctcaaccaccttgggccaccccagcagggcctggagcttggcgtgggtgatggtgtccttctcaaggcagtggcccaggccacaggccgcgagagaagggagacacgcagccacaactgtcaccctcgacacccccacccgcgctctcccctgaaggtcggcagctggagtccgtccgggctgaggcagccgagaaaggcgacgtggggctggtggccgagaacagccgcagcacccagaggctcatgctgccaccacctccgctcactgcctccggggtcttcagcaagttccgcgacatcgccaggctcactggcagtgcttccacagccaagaagatagacatcatcaaaggcctctttgtggcctgccgccactcagaagcccggttcatcgctaggtccctgagcggacggctgcgccttgggctggcagagcagtcggtgctggctgccctctcccaggcagtgagcctcacgccc

SEQ ID NO: 2281 - DNA, 4055 bp, Homo sapiens
  source 1..4055: mol_type = genomic DNA
gtgtgttgcccgggcagcggcgcgcgggaccaacgcaaggcaagactgacagacgaagaaaagtgctggacaggaagggagaattctgacgccaacatgcagcgaagtatcatgtcatttttccaccccaagaaagagggtaaagcaaagaagcctgagaaggaggcatccaatagcagcagagagacggagccccctccaaaggcggcactgaaggagtggaatggagtggtgtccgagagtgactctccggtgaagaggccagggaggaaggcggcccgggtcctgggcagcgaaggggaagaggaggatgaagcccttagccctgctaaaggccagaagcctgccctggactgctcacaggtctccccgccccgtcctgccacatctcctgagaacaatgcttccctctctgacacctctcccatggacagttccccatcagggattccgaagcgtcgcacagctcggaagcagctcccgaaacggaccattcaggaagtcctggaagagcagagtgaggacgaggacagagaagccaagaggaagaaggaggaggaagaggagaccccgaaagaaagcctcacagaggctgaagtggccacagagaaggaaggagaagacggggaccagcccaccacgcctcccaagcccctaaagacctccaaagcagagaccccgacggaaagcgtttcagagcctgaggtggccacgaagcaggaactgcaggaggaggaagagcagaccaagcctccccgcagagctcccaagacgctcagcagcttcttcaccccccggaagccagcagtcaaaaaagaagtgaaggaagaggagccaggggctccaggaaaggagggagctgctgagggacccctggatccatctggttacaatcctgccaagaacaactatcatcccgtggaagatgcctgctggaaaccgggccagaaggttccttacctggctgtggcccggacgtttgagaagatcgaggaggtgtctgctcggctccggatggtggagacgctgagcaacttgctgcgctccgtggtggccctgtcgcctccagacctcctccctgtcctctacctcagcctcaaccaccttgggccaccccagcagggcctggagcttggcgtgggtgatggtgtccttctcaaggcagtggcccaggccacaggtcggcagctggagtccgtccgggctgaggcagccgagaaaggcgacgtggggctggtggccgagaacagccgcagcacccagaggctcatgctgccaccacctccgctcactgcctccggggtcttcagcaagttccgcgacatcgccaggctcactggcagtgcttccacagccaagaagatagacatcatcaaaggcctctttgtggcctgccgccactcagaagcccggttcatcgctaggtccctgagcggacggctgcgccttgggctggcagagcagtcggtgctggctgccctctcccaggcagtgagcctcacgcccccgggccaagaattcccaccagccatggtggatgctgggaagggcaagacagcagaggccagaaagacgtggctggaggagcaaggcatgatcctgaagcagacgttctgcgaggttcccgacctggaccgaattatccccgtgctgctggagcacggcctggaacgtctcccggagcactgcaagctgagcccagggattcccctgaaaccaatgttggcccatcccacccggggcatcagcgaggtcctgaaacgctttgaggaggcagctttcacctgcgaatacaaatatgacgggcagagggcacagatccacgccctggaaggcggggaggtgaagatcttcagcaggaatcaggaagacaacactgggaagtacccggacatcatcagccgcatccccaagattaaactcccatcggtcacatccttcatcctggacaccgaagccgtggcttgggaccgggaaaagaagcagatccagccattccaagtgctcaccacccgcaaacgcaaggaggtggatgcgtctgagatccaggtgcaggtgtgtttgtacgccttcgacctcatctacctcaatggagagtccctggtacgtgagcccctttcccggcgccggcagctgctccgggagaactttgtggagacagagggcgagtttgtcttcgccacctccctggacaccaaggacatcgagcagatcgccgagttcctggagcagtcagtgaaagactcctgcgaggggctgatggtgaagaccctggatgttgatgccacctacgagatcgccaagagatcgcacaactggctcaagctgaagaaggactaccttgatggcgtgggtgacaccctggacctggtggtgatcggcgcctacctgggccgggggaagcgggccggccggtacgggggcttcctgctggcctcctacgacgaggacagtgaggagctgcaggccatatgcaaggtcctggggaactggggctgatggcagaagcaggagggaaggagattagactcccgggggtatttcctattgcacaacccagaccgaggggtgctcacatccccctgtgaaggatccgttctccccagtttttatttactttttctggttctatgagcaactcttgcttcatatagaaaaacaggctgggatagaaagatgtcaggaatgtgtgtcagtgagagattgagattagctacaaatagtggtggctcacataagaaaagaatttttttgttatgaaatgagaagtgtggagggggcagtctgatgccattagggattcaggttcctcctctccccacatttttttttgtccccacattttttttttctgccatgtgcctctggcctcatcatcacaatgtggctgcaggagttccagccctcatggccatgcctgctccacgcaccagggaagagcaaagggggttggaccctgagtcagcctcagccagtgaacaccttctgctcaagttctgttgctcatcactttgctccatggctcacccctagctgcaaggaattctgggaaatgtaaagtgatttactttttttcaagttaaagtttttcttaaagctgtgcacattttggactagattttcttacgtatttcctatattcccctctccaacaaatttgggtcttttgccacagaaacagaacaaaatatcacctagaatcgtaccacccagagacacgcagtagtgacatttgagggaatgttttatttacatttttgcaaagttgtgatccttctctatgagtaattttcttttctgcctttttaccctggaagtactttgttttcagtgttgtatatgcccttaagcaatatggcaacaggacctgaatgcccgcacaagagttttcaagtgctgtgccccatagcacatagtgctgtgtcctgaaccagctccccgtggctgtgtggggaagttgttgccggctttgttctgatggcttggaactggcttcagtgatgaggagctggaggagcatcaccagagcctcaaggcgctggtgctgcccagcccacgcccttacgtgcggatagatggcgctgtgattcccgaccactggctggaccccagcgctgtgtgggaggtgaagtgcgctgacctctccctctctcccatctaccctgctgcgcggggcctggtggatagtgacaagggcatctcccttcgcttccctcggtttattcgagtccgtgaagacaagcagccggagcaggccaccaccagtgctcaggtggcctgtttgtaccggaagcaaagtcagattcagaaccaacaaggcgaggactcaggctctgaccctgaagatacctactaagccctcgccctcctagggcctgggtacagggcatgagttggacggaccccagggttattattgcctttgctttttagcaaatctgctgtggcaggctgtggattttgagagtcaggggaggggtgtgtgtgtgagggggtggcttactccggagtctgggattcatcccgtcatttctttcaataaataattattggat

SEQ ID NO: 2282 - DNA, 3020 bp, Homo sapiens
  source 1..3020: mol_type = genomic DNA
caaccgtcgtgggctgcccgcggcctgtaatgagcaagttccgaggcctacggtgagcgccggagccggagaggcagctatatgtctttggctttcaagatcttctttccacaaaccctccgtgcactcagccgaaaagaactgtgcctattccgaaaacatcactggcgtgatgtaagacaattcagccagtggtcagaaacagatctgcttcatggacatcccctcttcctgagaagaaagcctgttctatcattccagggaagccatctaagatcacgtgccacctaccttgttttcttgccagggttgcatgtgggactctgcagtggcccctgtgagatggctgagcaacggttctgtgtggactatgccaagcgtggcacagctggctgcaaaaaatgcaaggaaaagattgtgaagggcgtatgccgaattggcaaagtggtgcccaatcccttctcagagtctgggggtgatatgaaagagtggtaccacattaaatgcatgtttgagaaactagagcgggcccgggccaccacaaaaaaaatcgaggacctcacagagctggaaggctgggaagagctggaagataatgagaaggaacagataacccagcacattgcagatctgtcttctaaggcagcaggtacaccaaagaagaaagctgttgtccaggctaagttgacaaccactggccaggtgacttctccagtgaaaggcgcctcatttgtcaccagtaccaatccccggaaattttctggcttttcagccaagcccaacaactctggggaagccccctcgagccccacccctaagagaagtctgtcttcaagcaaatgtgaccccaggcataaggactgtctgctacgggagtttcgaaagttatgcgccatggtggccgataatcctagctacaacacgaagacccagatcatccaggacttccttcggaaaggctcagcaggagatggtttccacggtgatgtgtacctaacagtgaagctgctgctgccaggagtcattaagactgtttacaacttgaacgataagcagattgtgaagcttttcagtcgcatttttaactgcaacccagatgatatggcacgggacctagagcagggtgacgtgtcagagacaatcagagtcttctttgagcagagcaagtctttccccccagctgccaagagcctccttaccatccaggaagtggatgagttccttctgcggctgtccaagctcaccaaggaggatgagcagcaacaggccctacaggacattgcctccaggtgtacagccaatgaccttaaatgcatcatcaggttgatcaaacatgatctgaagatgaactcaggtgcaaaacatgtgttagacgcccttgaccccaatgcctatgaagccttcaaagcctcgcgcaacctgcaggatgtggtggagcgggtccttcacaacgcgcaggaggtggagaaggagccgggccagagacgagctctgagcgtccaggcctcgctgatgacacctgtgcagcccatgttggcggaggcctgcaagtccgttgagtatgcaatgaagaaatgtcccaatggcatgttctctgagatcaagtacgatggagagcgagtccaggtgcataagaatggagaccacttcagctacttcagccgcagtctcaagcccgtccttcctcacaaggtggcccactttaaggactacattccccaggcttttcctgggggccacagcatgatcttggattctgaagtgcttctgattgacaacaagacaggcaaaccactgccctttgggactctgggagtacacaagaaagcagccttccaggatgctaatgtctgcctgtttgtttttgattgtatctactttaatgatgtcagcttgatggacagacctctgtgtgagcggcggaagtttcttcatgacaacatggttgaaattccaaaccggatcatgttctcagaaatgaagcgagtcacaaaagctttggacttggctgacatgataacccgggtgatccaggagggattggaggggctggtgctgaaggatgtgaagggtacatatgagcctgggaagcggcactggctgaaagtgaagaaagactatttgaacgagggggccatggccgacacagctgacctggtggtccttggagccttctatgggcaagggagcaaaggcggcatgatgtcaatcttcctcatgggctgctacgaccctggcagccagaagtggtgcacagtcaccaagtgtgcaggaggccatgatgatgccacgcttgcccgcctgcagaatgaactagacatggtgaagatcagcaaggaccccagcaaaatacccagctggttgaaggtcaacaagatctactatcctgacttcatcgtcccagacccaaagaaagctgccgtgtgggagatcacaggggctgaattctccaaatcggaggctcatacagctgacgggatctccatccgattccctcgctgcacccgaatccgagatgataaggactggaaatctgccactaaccttccccaactcaaggaactgtaccagttgtccaaggagaaggcagacttcactgtagtggctggagatgaggggagctccactacagggggtagcagtgaagagaataagggtccctcagggtctgctgtgtcccgcaaggcccccagcaagccctcagccagtaccaagaaagcagaagggaagctgagtaactccaacagcaaagatggcaacatgcagactgcaaagccttccgctatgaaggtgggggagaagctggccacaaagtcttctccagtgaaagtaggggagaagcggaaagctgctgatgagacgctgtgccaaacaaagaggcggccagccagtgagcagagaggaagaactgtgccagcaggcaggagatagaacagcccggcctagccaggagagactgcagggactcactcagctgctggccccaagtcaaaatttacattaaagggaaaagaccagtc

SEQ ID NO: 2283 - DNA, 3692 bp, Homo sapiens
  source 1..3692: mol_type = genomic DNA
cggatttaaagagacaggcgctccaaccgtcgtgggctgcccgcggcctgtaatgagcaagttccgaggcctacggtgagcgccggagccggagaggcagctatatgtctttggctttcaagatcttctttccacaaaccctccgtgcactcagccgaaaagaactgtgcctattccgaaaacatcactggcgtgatgtaagacaattcagccagtggtcagaaacagatctgcttcatggacatcccctcttcctgagaagaaagcctgttctatcattccagggaagccatctaagatcacgtgccacctaccttgttttcttgccagggttgcatgtgggactctgcagtggcccctgtgagatggctgagcaacggttctgtgtggactatgccaagcgtggcacagctggctgcaaaaaatgcaaggaaaagattgtgaagggcgtatgccgaattggcaaagtggtgcccaatcccttctcagagtctgggggtgatatgaaagagtggtaccacattaaatgcatgtttgagaaactagagcgggcccgggccaccacaaaaaaaatcgaggacctcacagagctggaaggctgggaagagctggaagataatgagaaggaacagataacccagcacattgcagatctgtcttctaaggcagcaggtacaccaaagaagaaagctgttgtccaggctaagttgacaaccactggccaggtgacttctccagtgaaaggcgcctcatttgtcaccagtaccaatccccggaaattttctggcttttcagccaagcccaacaactctggggaagccccctcgagccccacccctaagagaagtctgtcttcaagcaaatgtgaccccaggcataaggactgtctgctacgggagtttcgaaagttatgcgccatggtggccgataatcctagctacaacacgaagacccagatcatccaggacttccttcggaaaggctcagcaggagatggtttccacggtgatgtgtacctaacagtgaagctgctgctgccaggagtcattaagactgtttacaacttgaacgataagcagattgtgaagcttttcagtcgcatttttaactgcaacccagatgatatggcacgggacctagagcagggtgacgtgtcagagacaatcagagtcttctttgagcagagcaagtctttccccccagctgccaagagcctccttaccatccaggaagtggatgagttccttctgcggctgtccaagctcaccaaggaggatgagcagcaacaggccctacaggacattgcctccaggtgtacagccaatgaccttaaatgcatcatcaggttgatcaaacatgatctgaagatgaactcaggtgcaaaacatgtgttagacgcccttgaccccaatgcctatgaagccttcaaagcctcgcgcaacctgcaggatgtggtggagcgggtccttcacaacgcgcaggaggtggagaaggagccgggccagagacgagctctgagcgtccaggcctcgctgatgacacctgtgcagcccatgttggcggaggcctgcaagtccgttgagtatgcaatgaagaaatgtcccaatggcatgttctctgagatcaagtacgatggagagcgagtccaggtgcataagaatggagaccacttcagctacttcagccgcagtctcaagcccgtccttcctcacaaggtggcccactttaaggactacattccccaggcttttcctgggggccacagcatgatcttggattctgaagtgcttctgattgacaacaagacaggcaaaccactgccctttgggactctgggagtacacaagaaagcagccttccaggatgctaatgtctgcctgtttgtttttgattgtatctactttaatgatgtcagcttgatggacagacctctgtgtgagcggcggaagtttcttcatgacaacatggttgaaattccaaaccggatcatgttctcagaaatgaagcgagtcacaaaagctttggacttggctgacatgataacccgggtgatccaggagggattggaggggctggtgctgaaggatgtgaagggtacatatgagcctgggaagcggcactggctgaaagtgaagaaagactatttgaacgagggggccatggccgacacagctgacctggtggtccttggagccttctatgggcaagggagcaaaggcggcatgatgtcaatcttcctcatgggctgctacgaccctggcagccagaagtggtgcacagtcaccaagtgtgcaggaggccatgatgatgccacgcttgcccgcctgcagaatgaactagacatggtgaagatcagcaaggaccccagcaaaatacccagctggttgaaggtcaacaagatctactatcctgacttcatcgtcccagacccaaagaaagctgccgtgtgggagatcacaggggctgaattctccaaatcggaggctcatacagctgacgggatctccatccgattccctcgctgcacccgaatccgagatgataaggactggaaatctgccactaaccttccccaactcaaggaactgtaccagttgtccaaggagaaggcagacttcactgtagtggctggagatgaggggagctccactacagggggtagcagtgaagagaataagggtccctcagggtctgctgtgtcccgcaaggcccccagcaagccctcagccagtaccaagaaagcagaagggaagctgagtaactccaacagcaaagatggcaacatgcagactgcaaagccttccgctatgaaggtgggggagaagctggccacaaagtcttctccagtgaaagtaggggagaagcggaaagctgctgatgagacgctgtgccaaacaaaggtattgctggacatcttcactggggtgcggctttacttgccaccctccacaccagacttcagccgtctcagacgctactttgtggcattcgacggggacctggtacaggaatttgatatgacttcagccacgcacgtgctgggtagcagggacaagaaccctgcggcccagcaggtctccccagagtggatttgggcatgtatccggaaacggagactggtagctccctgctaggtttgctgtcttccctctccctcaggccatactctcctttaccatactactggactggactcaggctggaggcagatagacacagtatagggggaatgggcttgcttctcccaaacccaccagttctccactgtctcttctggaccaggaattagttgctgtgggtgccacagctgaagtcagtttgtcttgctggtttaaatagatctttcagagctgggtgctgggtttgccatctttttgttttctttgaaaagcagcttagttaccctttttataaataaaatatcttgcagttatctttgtcctttccccacctacacccccaataatttccctagagattaaggagtaaaggctgggctatggcagctctgtccacaaagccttctctcccatccttgcctgttcctttgtacttccaggctcattttaaagttgtatttaaaggactgccctcggaaatgcttctgtttagcggaacttgtattcagcctgacacgctttgccaggaacaaacctcatgtgaaagaaaacaaaatgaatttttttactttc

SEQ ID NO: 2284 - DNA, 3325 bp, Homo sapiens
  source 1..3325: mol_type = genomic DNA
ccacagcgctgtagactgcgccgcattagaagcctggcctcctgatgctgtgctcttcatctagacccaagccccaggtcgtgggacgatttctcccgtttttgactccctggaactgtattgcctgctttacctgcgtacatgttgattctttctcatggcaaccccgcaggaaaccatcaagatctcattttacagctgggattctctggttcacagaggtaacggagcttgcccgaggccagttaaacgagaagattcatcaccgctttgatggctgcctcacaaacttcacaaactgttgcatctcacgttccttttgcagatttgtgttcaactttagaacgaatacagaaaagtaaaggacgtgcagaaaaaatcagacacttcagggaatttttagattcttggagaaaatttcatgatgctcttcataagaaccacaaagatgtcacagactctttttatccagcaatgagactaattcttcctcagctagaaagagagagaatggcctatggaattaaagaaactatgcttgctaagctttatattgagttgcttaatttacctagagatggaaaagatgccctcaaacttttaaactacagaacacccactggaactcatggagatgctggagactttgcaatgattgcatattttgtgttgaagccaagatgtttacagaaaggaagtttaaccatacagcaagtaaacgaccttttagactcaattgccagcaataattctgctaaaagaaaagacctaataaaaaagagccttcttcaacttataactcagagttcagcacttgagcaaaagtggcttatacggatgatcataaaggatttaaagcttggtgttagtcagcaaactatcttttctgtttttcataatgatgctgctgagttgcataatgtcactacagatctggaaaaagtctgtaggcaactgcatgatccttctgtaggactcagtgatatttctatcactttattttctgcatttaaaccaatgctagctgctattgcagatattgagcacattgagaaggatatgaaacatcagagtttctacatagaaaccaagctagatggtgaacgtatgcaaatgcacaaagatggagatgtatataaatacttctctcgaaatggatataactacactgatcagtttggtgcttctcctactgaaggttctcttaccccattcattcataatgcattcaaagcagatatacaaatctgtattcttgatggtgagatgatggcctataatcctaatacacaaactttcatgcaaaagggaactaagtttgatattaaaagaatggtagaggattctgatctgcaaacttgttattgtgtttttgatgtattgatggttaataataaaaagctagggcatgagactctgagaaagaggtatgagattcttagtagtatttttacaccaattccaggtagaatagaaatagtgcagaaaacacaagctcatactaagaatgaagtaattgatgcattgaatgaagcaatagataaaagagaagagggaattatggtaaaacaacctctatccatctacaagccagacaaaagaggtgaagggtggttaaaaattaaaccagagtatgtcagtggactaatggatgaattggacattttaattgttggaggatattggggtaaaggatcacggggtggaatgatgtctcattttctgtgtgcagtagcagagaagccccctcctggtgagaagccatctgtgtttcatactctctctcgtgttgggtctggctgcaccatgaaagaactgtatgatctgggtttgaaattggccaagtattggaagccttttcatagaaaagctccaccaagcagcattttatgtggaacagagaagccagaagtatacattgaaccttgtaattctgtcattgttcagattaaagcagcagagatcgtacccagtgatatgtataaaactggctgcaccttgcgttttccacgaattgaaaagataagagatgacaaggagtggcatgagtgcatgaccctggacgacctagaacaacttagggggaaggcatctggtaagctcgcatctaaacacctttatataggtggtgatgatgaaccacaagaaaaaaagcggaaagctgccccaaagatgaagaaagttattggaattattgagcacttaaaagcacctaaccttactaacgttaacaaaatttctaatatatttgaagatgtagagttttgtgttatgagtggaacagatagccagccaaagcctgacctggagaacagaattgcagaatttggtggttatatagtacaaaatccaggcccagacacgtactgtgtaattgcagggtctgagaacatcagagtgaaaaacataattttgtcaaataaacatgatgttgtcaagcctgcatggcttttagaatgttttaagaccaaaagctttgtaccatggcagcctcgctttatgattcatatgtgcccatcaaccaaagaacattttgcccgtgaatatgattgctatggtgatagttatttcattgatacagacttgaaccaactgaaggaagtattctcaggaattaaaaattctaacgagcagactcctgaagaaatggcttctctgattgctgatttagaatatcggtattcctgggattgctctcctctcagtatgtttcgacgccacaccgtttatttggactcgtatgctgttattaatgacctgagtaccaaaaatgaggggacaaggttagctattaaagccttggagcttcggtttcatggagcaaaagtagtttcttgtttagctgagggagtgtctcatgtaataattggggaagatcatagtcgtgttgcagattttaaagcttttagaagaacttttaagagaaagtttaaaatcctaaaagaaagttgggtaactgattcaatagacaagtgtgaattacaagaagaaaaccagtatttgatttaaagctaggtttcctagtgaggaaagcctctgatctggcagactcattgcagcaggtggtaatgataaaatactaaactacattttatttttgtatcttaaaaatctatgcctaaaaagtatcattacatataggaaaacaataattttaacttttaaggttgaaaagacaatagcccaaagccaagaaagaaaaattatcttgaatgtagtattcaatgattttttatgatcaaggtgaaataaacagtctaaagaagaggtgtttttataatatccatatagaaatctagaatttttacttagatactaataaaat

SEQ ID NO: 2285 - DNA, 4058 bp, Homo sapiens
  source 1..4058: mol_type = genomic DNA
gccagtgagcccccgcgacggtggcccggacggaaaagatacctcggcggcgtgggcccggctccctgctccaggacctagggatcttggccttccaccctcctccgagcaccaggactccctccagttccgtacccgaggcctccgtggtgaagaggtgccggacccgatgagctcgggagtccaccatcgctctgcaagccgcagttaaacgagaagattcatcaccgctttgatggctgcctcacaaacttcacaaactgttgcatctcacgttccttttgcagatttgtgttcaactttagaacgaatacagaaaagtaaaggacgtgcagaaaaaatcagacacttcagggaatttttagattcttggagaaaatttcatgatgctcttcataagaaccacaaagatgtcacagactctttttatccagcaatgagactaattcttcctcagctagaaagagagagaatggcctatggaattaaagaaactatgcttgctaagctttatattgagttgcttaatttacctagagatggaaaagatgccctcaaacttttaaactacagaacacccactggaactcatggagatgctggagactttgcaatgattgcatattttgtgttgaagccaagatgtttacagaaaggaagtttaaccatacagcaagtaaacgaccttttagactcaattgccagcaataattctgctaaaagaaaagacctaataaaaaagagccttcttcaacttataactcagagttcagcacttgagcaaaagtggcttatacggatgatcataaaggatttaaagcttggtgttagtcagcaaactatcttttctgtttttcataatgatgctgctgagttgcataatgtcactacagatctggaaaaagtctgtaggcaactgcatgatccttctgtaggactcagtgatatttctatcactttattttctgcatttaaaccaatgctagctgctattgcagatattgagcacattgagaaggatatgaaacatcagagtttctacatagaaaccaagctagatggtgaacgtatgcaaatgcacaaagatggagatgtatataaatacttctctcgaaatggatataactacactgatcagtttggtgcttctcctactgaaggttctcttaccccattcattcataatgcattcaaagcagatatacaaatctgtattcttgatggtgagatgatggcctataatcctaatacacaaactttcatgcaaaagggaactaagtttgatattaaaagaatggtagaggattctgatctgcaaacttgttattgtgtttttgatgtattgatggttaataataaaaagctagggcatgagactctgagaaagaggtatgagattcttagtagtatttttacaccaattccaggtagaatagaaatagtgcagaaaacacaagctcatactaagaatgaagtaattgatgcattgaatgaagcaatagataaaagagaagagggaattatggtaaaacaacctctatccatctacaagccagacaaaagaggtgaagggtggttaaaaattaaaccagagtatgtcagtggactaatggatgaattggacattttaattgttggaggatattggggtaaaggatcacggggtggaatgatgtctcattttctgtgtgcagtagcagagaagccccctcctggtgagaagccatctgtgtttcatactctctctcgtgttgggtctggctgcaccatgaaagaactgtatgatctgggtttgaaattggccaagtattggaagccttttcatagaaaagctccaccaagcagcattttatgtggaacagagaagccagaagtatacattgaaccttgtaattctgtcattgttcagattaaagcagcagagatcgtacccagtgatatgtataaaactggctgcaccttgcgttttccacgaattgaaaagataagagatgacaaggagtggcatgagtgcatgaccctggacgacctagaacaacttagggggaaggcatctggtaagctcgcatctaaacacctttatataggtggtgatgatgaaccacaagaaaaaaagcggaaagctgccccaaagatgaagaaagttattggaattattgagcacttaaaagcacctaaccttactaacgttaacaaaatttctaatatatttgaagatgtagagttttgtgttatgagtggaacagatagccagccaaagcctgacctggagaacagaattgcagaatttggtggttatatagtacaaaatccaggcccagacacgtactgtgtaattgcagggtctgagaacatcagagtgaaaaacataattttgtcaaataaacatgatgttgtcaagcctgcatggcttttagaatgttttaagaccaaaagctttgtaccatggcagcctcgctttatgattcatatgtgcccatcaaccaaagaacattttgcccgtgaatatgattgctatggtgatagttatttcattgatacagacttgaaccaactgaaggaagtattctcaggaattaaaaattctaacgagcagactcctgaagaaatggcttctctgattgctgatttagaatatcggtattcctgggattgctctcctctcagtatgtttcgacgccacaccgtttatttggactcgtatgctgttattaatgacctgagtaccaaaaatgaggggacaaggttagctattaaagccttggagcttcggtttcatggagcaaaagtagtttcttgtttagctgagggagtgtctcatgtaataattggggaagatcatagtcgtgttgcagattttaaagcttttagaagaacttttaagagaaagtttaaaatcctaaaagaaagttgggtaactgattcaatagacaagtgtgaattacaagaagaaaaccagtatttgatttaaagctaggtttcctagtgaggaaagcctctgatctggcagactcattgcagcaggtggtaatgataaaatactaaactacattttatttttgtatcttaaaaatctatgcctaaaaagtatcattacatataggaaaacaataattttaacttttaaggttgaaaagacaatagcccaaagccaagaaagaaaaattatcttgaatgtagtattcaatgattttttatgatcaaggtgaaataaacagtctaaagaagaggtgtttttataatatccatatagaaatctagaatttttacttagatactaataaaatacatttagaaacttttaaagtcatgaaaaagcattaaccttctaaacagtatattctaaaaagtcaaaacgttaacaatagtttttatctaataaaagcactgcaagaaaatagggtagaattgttacagctggacttgtaaaaatatgtctttttactcagggtttaaaatgtcccatttaaatatgaaatgtaaacaaatttgttttttaaggttaaggccaaatgtaacaataaaaccctgtcgatggttttagctaaattagaggaagttgtatgagacttaatgatctaaaaacttaaaattgaattggtttgattaaaaataaagcttgcaattttaaaagtagctcacatttaatttcttgtgtgaaatagaacatgctttaaaggaagtatttttatgtgaatttgcattccagtataaatagtattcacaaaaaagattttcctagattttatctattgaataggtgtcaatatggcatgcatattgtaactttcattagaaataagttgctttgacttttaaaaatgacatagttagattatttaaagtcaatgtatatagtatatattatgtatggatttatataccaaattttggaatacagcctatctcatgaccatattgaaatgtacggaatttgatccatgcgatactatgtgtgcattatttgaaagttattggaaattttattcaaaccgtggaacaaatgtatgtgattttgttatacttcttaatttaaataaaatatttaatgcactatt

SEQ ID NO: 2286 - DNA, 3953 bp, Homo sapiens
  source 1..3953: mol_type = genomic DNA
cggcatcttctggcgccagcttccggcttagcggctgagcttcaggcttgacgtcaggtgggaagggtgtggggtggcaggtgggggcggttgggaggctagttaaacgagaagattcatcaccgctttgatggctgcctcacaaacttcacaaactgttgcatctcacgttccttttgcagatttgtgttcaactttagaacgaatacagaaaagtaaaggacgtgcagaaaaaatcagacacttcagggaatttttagattcttggagaaaatttcatgatgctcttcataagaaccacaaagatgtcacagactctttttatccagcaatgagactaattcttcctcagctagaaagagagagaatggcctatggaattaaagaaactatgcttgctaagctttatattgagttgcttaatttacctagagatggaaaagatgccctcaaacttttaaactacagaacacccactggaactcatggagatgctggagactttgcaatgattgcatattttgtgttgaagccaagatgtttacagaaaggaagtttaaccatacagcaagtaaacgaccttttagactcaattgccagcaataattctgctaaaagaaaagacctaataaaaaagagccttcttcaacttataactcagagttcagcacttgagcaaaagtggcttatacggatgatcataaaggatttaaagcttggtgttagtcagcaaactatcttttctgtttttcataatgatgctgctgagttgcataatgtcactacagatctggaaaaagtctgtaggcaactgcatgatccttctgtaggactcagtgatatttctatcactttattttctgcatttaaaccaatgctagctgctattgcagatattgagcacattgagaaggatatgaaacatcagagtttctacatagaaaccaagctagatggtgaacgtatgcaaatgcacaaagatggagatgtatataaatacttctctcgaaatggatataactacactgatcagtttggtgcttctcctactgaaggttctcttaccccattcattcataatgcattcaaagcagatatacaaatctgtattcttgatggtgagatgatggcctataatcctaatacacaaactttcatgcaaaagggaactaagtttgatattaaaagaatggtagaggattctgatctgcaaacttgttattgtgtttttgatgtattgatggttaataataaaaagctagggcatgagactctgagaaagaggtatgagattcttagtagtatttttacaccaattccaggtagaatagaaatagtgcagaaaacacaagctcatactaagaatgaagtaattgatgcattgaatgaagcaatagataaaagagaagagggaattatggtaaaacaacctctatccatctacaagccagacaaaagaggtgaagggtggttaaaaattaaaccagagtatgtcagtggactaatggatgaattggacattttaattgttggaggatattggggtaaaggatcacggggtggaatgatgtctcattttctgtgtgcagtagcagagaagccccctcctggtgagaagccatctgtgtttcatactctctctcgtgttgggtctggctgcaccatgaaagaactgtatgatctgggtttgaaattggccaagtattggaagccttttcatagaaaagctccaccaagcagcattttatgtggaacagagaagccagaagtatacattgaaccttgtaattctgtcattgttcagattaaagcagcagagatcgtacccagtgatatgtataaaactggctgcaccttgcgttttccacgaattgaaaagataagagatgacaaggagtggcatgagtgcatgaccctggacgacctagaacaacttagggggaaggcatctggtaagctcgcatctaaacacctttatataggtggtgatgatgaaccacaagaaaaaaagcggaaagctgccccaaagatgaagaaagttattggaattattgagcacttaaaagcacctaaccttactaacgttaacaaaatttctaatatatttgaagatgtagagttttgtgttatgagtggaacagatagccagccaaagcctgacctggagaacagaattgcagaatttggtggttatatagtacaaaatccaggcccagacacgtactgtgtaattgcagggtctgagaacatcagagtgaaaaacataattttgtcaaataaacatgatgttgtcaagcctgcatggcttttagaatgttttaagaccaaaagctttgtaccatggcagcctcgctttatgattcatatgtgcccatcaaccaaagaacattttgcccgtgaatatgattgctatggtgatagttatttcattgatacagacttgaaccaactgaaggaagtattctcaggaattaaaaattctaacgagcagactcctgaagaaatggcttctctgattgctgatttagaatatcggtattcctgggattgctctcctctcagtatgtttcgacgccacaccgtttatttggactcgtatgctgttattaatgacctgagtaccaaaaatgaggggacaaggttagctattaaagccttggagcttcggtttcatggagcaaaagtagtttcttgtttagctgagggagtgtctcatgtaataattggggaagatcatagtcgtgttgcagattttaaagcttttagaagaacttttaagagaaagtttaaaatcctaaaagaaagttgggtaactgattcaatagacaagtgtgaattacaagaagaaaaccagtatttgatttaaagctaggtttcctagtgaggaaagcctctgatctggcagactcattgcagcaggtggtaatgataaaatactaaactacattttatttttgtatcttaaaaatctatgcctaaaaagtatcattacatataggaaaacaataattttaacttttaaggttgaaaagacaatagcccaaagccaagaaagaaaaattatcttgaatgtagtattcaatgattttttatgatcaaggtgaaataaacagtctaaagaagaggtgtttttataatatccatatagaaatctagaatttttacttagatactaataaaatacatttagaaacttttaaagtcatgaaaaagcattaaccttctaaacagtatattctaaaaagtcaaaacgttaacaatagtttttatctaataaaagcactgcaagaaaatagggtagaattgttacagctggacttgtaaaaatatgtctttttactcagggtttaaaatgtcccatttaaatatgaaatgtaaacaaatttgttttttaaggttaaggccaaatgtaacaataaaaccctgtcgatggttttagctaaattagaggaagttgtatgagacttaatgatctaaaaacttaaaattgaattggtttgattaaaaataaagcttgcaattttaaaagtagctcacatttaatttcttgtgtgaaatagaacatgctttaaaggaagtatttttatgtgaatttgcattccagtataaatagtattcacaaaaaagattttcctagattttatctattgaataggtgtcaatatggcatgcatattgtaactttcattagaaataagttgctttgacttttaaaaatgacatagttagattatttaaagtcaatgtatatagtatatattatgtatggatttatataccaaattttggaatacagcctatctcatgaccatattgaaatgtacggaatttgatccatgcgatactatgtgtgcattatttgaaagttattggaaattttattcaaaccgtggaacaaatgtatgtgattttgttatacttcttaatttaaataaaatatttaatgcactatt

SEQ ID NO: 2287 - DNA, 3219 bp, Homo sapiens
  source 1..3219: mol_type = genomic DNA
cccggccgcccccagccccagccccgccgggccccgccccccgtcgagtgcatgaggttgacgctactttgttgcacctggagggaagaacgtatgggagaggaaggaagcgagttgcccgtgtgtgcaagctgcggccagaggatctatgatggccagtacctccaggccctgaacgcggactggcacgcagactgcttcaggtgttgtgactgcagtgcctccctgtcgcaccagtactatgagaaggatgggcagctcttctgcaagaaggactactgggcccgctatggcgagtcctgccatgggtgctctgagcaaatcaccaagggactggttatggtggctggggagctgaagtaccaccccgagtgtttcatctgcctcacgtgtgggacctttatcggtgacggggacacctacacgctggtggagcactccaagctgtactgcgggcactgctactaccagactgtggtgacccccgtcatcgagcagatcctgcctgactcccctggctcccacctgccccacaccgtcaccctggtgtccatcccagcctcatctcatggcaagcgtggactttcagtctccattgaccccccgcacggcccaccgggctgtggcaccgagcactcacacaccgtccgcgtccagggagtggatccgggctgcatgagcccagatgtgaagaattccatccacgtcggagaccggatcttggaaatcaatggcacgcccatccgaaatgtgcccctggacgagattgacctgctgattcaggaaaccagccgcctgctccagctgaccctcgagcatgaccctcacgatacactgggccacgggctggggcctgagaccagccccctgagctctccggcttatactcccagcggggaggcgggcagctctgcccggcagaaacctgtcttgaggagctgcagcatcgacaggtctccgggcgctggctcactgggctccccggcctcccagcgcaaggacctgggtcgctctgagtccctccgcgtagtctgccggccacaccgcatcttccggccgtcggacctcatccacggggaggtgctgggcaagggctgcttcggccaggctatcaaggtgacacaccgtgagacaggtgaggtgatggtgatgaaggagctgatccggttcgacgaggagacccagaggacgttcctcaaggaggtgaaggtcatgcgatgcctggaacaccccaacgtgctcaagttcatcggggtgctctacaaggacaagaggctcaacttcatcactgagtacatcaagggcggcacgctccggggcatcatcaagagcatggacagccagtacccatggagccagagagtgagctttgccaaggacatcgcatcagggatggcctacctccactccatgaacatcatccaccgagacctcaactcccacaactgcctggtccgcgagaacaagaatgtggtggtggctgacttcgggctggcgcgtctcatggtggacgagaagactcagcctgagggcctgcggagcctcaagaagccagaccgcaagaagcgctacaccgtggtgggcaacccctactggatggcacctgagatgatcaacggccgcagctatgatgagaaggtggatgtgttctcctttgggatcgtcctgtgcgagatcatcgggcgggtgaacgcagaccctgactacctgccccgcaccatggactttggcctcaacgtgcgaggattcctggaccgctactgccccccaaactgccccccgagcttcttccccatcaccgtgcgctgttgcgatctggaccccgagaagaggccatcctttgtgaagctggaacactggctggagaccctccgcatgcacctggccggccacctgccactgggcccacagctggagcagctggacagaggtttctgggagacctaccggcgcggcgagagcggactgcctgcccaccctgaggtccccgactgagccagggccactcagctgcccctgtccccacctctggagaatccacccccaccagattcctccgcgggaggtggccctcagctgggacagtggggacccaggcttctcctcagagccaggccctgacttgccttctcccaccccgtggaccgcttcccctgccttctctctgccgtggcccagagccggcccagctgcacacacacaccatgctctcgccctgctgtaacctctgtcttggcagggctgtcccctcttgcttctccttgcatgagctggagggcctgtgtgagttacgcccctttccacacgccgctgccccagcaaccctgttcacgctccacctgtctggtccatagctccctggaggctgggccaggaggcagcctccgaaccatgccccatataacgcttgggtgcgtgggagggcgcacatcagggcagaggccaagttccaggtgtctgtgttcccaggaaccaaatggggagtctggggcccgttttccccccagggggtgtctaggtagcaacaggtatcgaggactctccaaacccccaaagcagagagagggctgatcccatggggcggaggtccccagtggctgagcaaacagccccttctctcgctttgggtcttttttttgtttctttcttaaagccactttagtgagaagcaggtaccaagcctcagggtgaagggggtcccttgagggagcgtggagctgcggtgccctggccggcgatggggaggagccggctccggcagtgagaggataggcacagtggaccgggcaggtgtccaccagcagctcagcccctgcagtcatctcagagccccttcccgggcctctcccccaaggctccctgcccctcctcatgcccctctgtcctctgcgttttttctgtgtaatctattttttaagaagagtttgtattattttttcatacggctgcagcagcagctgccaggggcttgggattttatttttgtggcgggcgggggtgggagggccattttgtcactttgcctcagttgagcatctaggaagtattaaaactgtgaagctttctcagtgcactttgaacctggaaaacaatcccaacaggcccgtgggaccatgacttagggaggtgggacccacccacccccatccaggaaccgtgacgtccaaggaaccaaacccagacgcagaacaataaaataaattccgtactccccaccca

SEQ ID NO: 2288 - DNA, 2587 bp, Homo sapiens
  source 1..2587: mol_type = genomic DNA
acaggccccgcctcggtccgcccctccgctcgctccccaagccgccgcggcgccgagccggtttccccgccggtgtccgagaggcgcccccggccgcccccagccccagccccgccgggccccgccccccgtcgagtgcatgaggttgacgctactttgttgcacctggagggaagaacgtatgggagaggaaggaagcgagttgcccgtgtgtgcaagctgcggccagaggatctatgatggccagtacctccaggccctgaacgcggactggcacgcagactgcttcaggtgttgtgactgcagtgcctccctgtcgcaccagtactatgagaaggatgggcagctcttctgcaagaaggactactgggcccgctatggcgagtcctgccatgggtgctctgagcaaatcaccaagggactggttatggtggctggggagctgaagtaccaccccgagtgtttcatctgcctcacgtgtgggacctttatcggtgacggggacacctacacgctggtggagcactccaagctgtactgcgggcactgctactaccagactgtggtgacccccgtcatcgagcagatcctgcctgactcccctggctcccacctgccccacaccgtcaccctggtgtccatcccagcctcatctcatggcaagcgtggactttcagtctccattgaccccccgcacggcccaccgggctgtggcaccgagcactcacacaccgtccgcgtccagggagtggatccgggctgcatgagcccagatgtgaagaattccatccacgtcggagaccggatcttggaaatcaatggcacgcccatccgaaatgtgcccctggacgagattgacctgctgattcaggaaaccagccgcctgctccagctgaccctcgagcatgaccctcacgatacactgggccacgggctggggcctgagaccagccccctgagctctccggcttatactcccagcggggaggcgggcagctctgcccggcagaaacctgtcttgaggagctgcagcatcgacaggtctccgggcgctggctcactgggctccccggcctcccagcgcaaggacctgggtcgctctgagtccctccgcgtagtctgccggccacaccgcatcttccggccgtcggacctcatccacggggaggtgctgggcaagggctgcttcggccaggctatcaaggtgacacaccgtgagacaggtgaggtgatggtgatgaaggagctgatccggttcgacgaggagacccagaggacgttcctcaaggaggtgaaggtcatgcgatgcctggaacaccccaacgtgctcaagttcatcggggtgctctacaaggacaagaggctcaacttcatcactgagtacatcaagggcggcacgctccggggcatcatcaagagcatggacagccagtacccatggagccagagagtgagctttgccaaggacatcgcatcagggatggcctacctccactccatgaacatcatccaccgagacctcaactcccacaactgcctggtccgcgagaacaagaatgtggtggtggctgacttcgggctggcgcgtctcatggtggacgagaagactcagcctgagggcctgcggagcctcaagaagccagaccgcaagaagcgctacaccgtggtgggcaacccctactggatggcacctgagatgatcaacggccgcagctatgatgagaaggtggatgtgttctcctttgggatcgtcctgtgcgagatcatcgggcgggtgaacgcagaccctgactacctgccccgcaccatggactttggcctcaacgtgcgaggattcctggaccgctactgccccccaaactgccccccgagcttcttccccatcaccgtgcgctgttgcgatctggaccccgagaagaggccatcctttgtgaagctggaacactggctggagaccctccgcatgcacctggccggccacctgccactgggcccacagctggagcagctggacagaggtttctgggagacctaccggcgcggcgagagcggactgcctgcccaccctgaggtccccgactgagccagggccactcagctgcccctgtccccacctctggagaatccacccccaccagattcctccgcgggaggtggccctcagctgggacagtggggacccaggcttctcctcagagccaggccctgacttgccttctcccaccccgtggaccgcttcccctgccttctctctgccgtggcccagagccggcccagctgcacacacacaccatgctctcgccctgctgtaacctctgtcttggcagggctgtcccctcttgcttctccttgcatgagctggagggcctgtgtgagttacgcccctttccacacgccgctgccccagcaaccctgttcacgctccacctgtctggtccatagctccctggaggctgggccaggaggcagcctccgaaccatgccccatataacgcttgggtgcgtgggagggcgcacatcagggcagaggccaagttccaggtgtctgtgttcccaggaaccaaatggggagtctggggcccgtttt

SEQ ID NO: 2289 - DNA, 2032 bp, Homo sapiens
  source 1..2032: mol_type = genomic DNA
agacctccagagcccccagtgtagccacagaggatgctgttggcttcagccccaagaagacgccgcttcctccagagggctaagtgttgtgactgcagtgcctccctgtcgcaccagtactatgagaaggatgggcagctcttctgcaagaaggactactgggcccgctatggcgagtcctgccatgggtgctctgagcaaatcaccaagggactggttatggtggctggggagctgaagtaccaccccgagtgtttcatctgcctcacgtgtgggacctttatcggtgacggggacacctacacgctggtggagcactccaagctgtactgcgggcactgctactaccagactgtggtgacccccgtcatcgagcagatcctgcctgactcccctggctcccacctgccccacaccgtcaccctggtgtccatcccagcctcatctcatggcaagcgtggactttcagtctccattgaccccccgcacggcccaccgggctgtggcaccgagcactcacacaccgtccgcgtccagggagtggatccgggctgcatgagcccagatgtgaagaattccatccacgtcggagaccggatcttggaaatcaatggcacgcccatccgaaatgtgcccctggacgagattgacctgctgattcaggaaaccagccgcctgctccagctgaccctcgagcatgaccctcacgatacactgggccacgggctggggcctgagaccagccccctgagctctccggcttatactcccagcggggaggcgggcagctctgcccggcagaaacctgtcttgaggagctgcagcatcgacaggtctccgggcgctggctcactgggctccccggcctcccagcgcaaggacctgggtcgctctgagtccctccgcgtagtctgccggccacaccgcatcttccggccgtcggacctcatccacggggaggtgctgggcaagggctgcttcggccaggctatcaaggtgacacaccgtgagacaggtgaggtgatggtgatgaaggagctgatccggttcgacgaggagacccagaggacgttcctcaaggaggtgaaggtcatgcgatgcctggaacaccccaacgtgctcaagttcatcggggtgctctacaaggacaagaggctcaacttcatcactgagtacatcaagggcggcacgctccggggcatcatcaagagcatggacagccagtacccatggagccagagagtgagctttgccaaggacatcgcatcagggatggcctacctccactccatgaacatcatccaccgagacctcaactcccacaactgcctggtccgcgagaacaagaatgtggtggtggctgacttcgggctggcgcgtctcatggtggacgagaagactcagcctgagggcctgcggagcctcaagaagccagaccgcaagaagcgctacaccgtggtgggcaacccctactggatggcacctgagatgatcaacggccgcagctatgatgagaaggtggatgtgttctcctttgggatcgtcctgtgcgagatcatcgggcgggtgaacgcagaccctgactacctgccccgcaccatggactttggcctcaacgtgcgaggattcctggaccgctactgccccccaaactgccccccgagcttcttccccatcaccgtgcgctgttgcgatctggaccccgagaagaggccatcctttgtgaagctggaacactggctggagaccctccgcatgcacctggccggccacctgccactgggcccacagctggagcagctggacagaggtttctgggagacctaccggcgcggcgagagcggactgcctgcccaccctgaggtccccgactgagccagggccactcagctgcccctgtccccacctctggagaatccacccccaccagattcctccgcgggaggtggccctcagctgggacagtggggacccaggcttctcctcagagccaggccctgacttgccttctcccaccccgtggaccgcttcc

SEQ ID NO: 2290 - DNA, 1279 bp, Homo sapiens
  source 1..1279: mol_type = genomic DNA
agcgggagacggccacgagattcccccatctctttgaatataattttagattgagattcagattaaatccgaggggaaaacactttatgaggctgaaagctgtgtcgttgccagagacagggttatgagctatcaaatgcaattacattaagacagattatactgggcaaattgagccatttagaaggtgagaatcaaagaaacggctctgatcctcttttcccccttctctctccctctccctctctctctaaattgcagttcgtagttccttccaattctgaggcacaaaagtaggtgagactgcttttgtatctgcgaagtgcttcactcctgaatgtaattctagctgagtgcaatctaggttaagagccggacaagcgggtaattagagcccgctagctgcccgaagaccggccgcccctccaaagcgcgccccgagtcggcgcccttctcccggccgagcctagctgcggctggacacggagcgcccgagatgatggtgctggacaaggaggacggcgtgccgatgctctccgtccagcccaaagggaagcagaagggctgtgcgggctgtaaccgcaagatcaaggaccgctatctgctgaaggcattggacaagtactggcacgaagactgcctcaagtgtgcctgctgtgactgccgcctgggcgaggtgggctccaccctctacaccaaggccaacctcatcctgtgccgacgcgactacctgaggctctttggcaccacagggaactgtgctgcttgcagcaagctgatcccagccttcgagatggtgatgcgggcccgggacaacgtgtatcacctcgactgcttcgcctgccagctctgcaaccagagattttgtgtgggagacaaattcttcctgaagaacaacatgatcttgtgtcagatggactatgaggaagggcagctcaatggcacctttgaatcccaagttcagtaacgcccggcgcctggcctccaggcccgtctgtccatctgcccgcctgcccacctgcctggccggccagccagccactctaccagtgcaggctggccagccgctctcctgccacattagaacttctccgtcctcgatgggagggatggcccttcctcctccaccaccgcccgtctgtgtgtgacccctcctggggccaggccgggcctgtacagtctgtcttctgtatataaatgggaacatttattttatgagaaatgtaatgcgattttattactggcgtggattaaacttatgaatgtttccgggaggtta

SEQ ID NO: 2291 - DNA, 1038 bp, Homo sapiens
  source 1..1038: mol_type = genomic DNA
gcccgggcagctgctgctcgcgaggctcccgcgatcccggcctggccgtctcgcccccgcgccttccccccagtccctcctcctgcgctccctgcccgcggggctgcgctccggactccggtccgtctgcccccgtcggcggtcgcggctctccggactcggcgcccgcgcggggccggcgggagcagcgcaggcggccggcggcgggagtcggagccacgcgcccctccgtatcctcggcgctagtccggctggagccgtcgggaccatggtgttggaccaggaggacggcgtgccgatgctctccgtccagcccaaagggaagcagaagggctgtgcgggctgtaaccgcaagatcaaggaccgctatctgctgaaggcattggacaagtactggcacgaagactgcctcaagtgtgcctgctgtgactgccgcctgggcgaggtgggctccaccctctacaccaaggccaacctcatcctgtgccgacgcgactacctgaggctctttggcaccacagggaactgtgctgcttgcagcaagctgatcccagccttcgagatggtgatgcgggcccgggacaacgtgtatcacctcgactgcttcgcctgccagctctgcaaccagagattttgtgtgggagacaaattcttcctgaagaacaacatgatcttgtgtcagatggactatgaggaagggcagctcaatggcacctttgaatcccaagttcagtaacgcccggcgcctggcctccaggcccgtctgtccatctgcccgcctgcccacctgcctggccggccagccagccactctaccagtgcaggctggccagccgctctcctgccacattagaacttctccgtcctcgatgggagggatggcccttcctcctccaccaccgcccgtctgtgtgtgacccctcctggggccaggccgggcctgtacagtctgtcttctgtatataaatgggaacatttattttatgagaaatgtaatgcgattttattactggcgtggattaaacttatgaatgtttc

SEQ ID NO: 2292 - DNA, 2294 bp, Homo sapiens
  source 1..2294: mol_type = genomic DNA
gaattcgtccaaactgaggatcacaagtctccacattctgagtaggaggatgagggtctgagttaggatttgggtcctgcagggcttgctaaggaatcccctgatggcctaggattccacgcagagcacatctggtgtgagagagctcgctgcaagggtgaaggctccgccctatcagatagacaaccaggccaccaagaggcccagccctccaaaccctggatttgcaacatcctcaaagaacagcaacgggccttgagcagaattgagaaggaaatacccccacctgccctcagccgttaagtgggctttgctattcacaagggcctctgggtgtcctggcagagaggggagatggcacaggcaccaggtgctagggtgccagggcctcccgagaaggaacaggtgcaaagcaggcaattagcccagaaggtatccgtggggcaggcagcctagatctgatgggggaagccaccaggattacatcatctgctgtaacaactgctctgaaaagaagatatttttcaacctgaacttgcagtagctagtggagaggcaggaaaaaggaaatgaaaccagagacagagggaagctgagcgaaaatagaccttcccgagagaggaggaagcccggagagagacgcacggtcccctccccgcccctaggccgccgccccctctctgccctcggcggcgagcagcgcgccgcgacccgggccgaaggtgcgaggggctccgggcggccgggcgggcgcacaccatccccgcgggcggcgcggagccggcgacagcgcgcgagagggaccgggcggtggcggcggcgggaccgggatggaagggagcgcggtgactgtccttgagcgcggaggggcgagctcgccggcggagcgccggagcaagcggaggcgcaggagcggcggcgacggcggcggcggcggcggcgcccgagcacccgagggggtccgagccccggcagccggccagccccgcgccacaaagggagcgcccccgccgcccggcaccccgcctccctccccaatgtcctcggccatcgaaaggaagagcctggacccttcagaggaaccagtggatgaggtgctgcagatccccccatccctgctgacatgcggcggctgccagcagaacattggggaccgctacttcctgaaggccatcgaccagtactggcacgaggactgcctgagctgcgacctctgtggctgccggctgggtgaggtggggcggcgcctctactacaaactgggccggaagctctgccggagagactatctcaggctttttgggcaagacggtctctgcgcatcctgtgacaagcggattcgtgcctatgagatgacaatgcgggtgaaagacaaagtgtatcacctggaatgtttcaaatgcgccgcctgtcagaagcatttctgtgtaggtgacagatacctcctcatcaactctgacatagtgtgcgaacaggacatctacgagtggactaagatcaatgggatgatataggcccgagtccccgggcatctttggggaggtgttcactgaagacgccgtctccatggcatcttcgtcttcactcttaggcactttgggggtttgagggtggggtaagggatttcttaggggatggtagacctttattgggtatcaagacatagcatccaagtggcataattcaggggctgacacttcaaggtgacagaaggaccagcccttgagggagaacttatggccacagcccatccatagtaactgacatgattagcagaagaaaggaacatttaggggcaagcaggcgctgtgctatcatgatggaatttcatatctacagatagagagttgttgtgtacagacttgttgtgactttgacgcttgcgaactagagatgtgcaattgatttcttttcttcctggctttttaactcccctgtttcaatcactgtcctccacacaagggaaggacagaaaggagagtggccattctttttttcttggcccccttcccaaggccttaagctttggacccaaggaaaactgcatggagacgcatttcggttgagaatggaaaccacaacttttaaccaaacaattatttaaagcaatgctgatgaatcactgtttttagacaccttcattttgaggggaggagttccacagattgtttctatacaaatataaatcttaaaaagttgttcaactattttattatcctagattatatcaaagtatttgtcgtgtgtagaaaaaaaaacagctctgcaggcttaataaaaatgacagactgaaa

SEQ ID NO: 2293 - DNA, 1687 bp, Homo sapiens
  source 1..1687: mol_type = genomic DNA
ggctccgggcggccgggcgggcgcacaccatccccgcgggcggcgcggagccggcgacagcgcgcgagagggaccgggcggtggcggcggcgggaccgggatggaaggttaagtcctgagcagcagcagcagctgcagccgcctggagccaggctgcgcgccccggcccccgcctcggccgcggcgcgcccgcagcccggtgattcgctctctctctttggcgtttgaagggagcgcggtgactgtccttgagcgcggaggggcgagctcgccggcggagcgccggagcaagcggaggcgcaggagcggcggcgacggcggcggcggcggcggcgcccgagcacccgagggggtccgagccccggcagccggccagccccgcgccacaaagggagcgcccccgccgcccggcaccccgcctccctccccaatgtcctcggccatcgaaaggaagagcctggacccttcagaggaaccagtggatgaggtgctgcagatccccccatccctgctgacatgcggcggctgccagcagaacattggggaccgctacttcctgaaggccatcgaccagtactggcacgaggactgcctgagctgcgacctctgtggctgccggctgggtgaggtggggcggcgcctctactacaaactgggccggaagctctgccggagagactatctcaggctttttgggcaagacggtctctgcgcatcctgtgacaagcggattcgtgcctatgagatgacaatgcgggtgaaagacaaagtgtatcacctggaatgtttcaaatgcgccgcctgtcagaagcatttctgtgtaggtgacagatacctcctcatcaactctgacatagtgtgcgaacaggacatctacgagtggactaagatcaatgggatgatataggcccgagtccccgggcatctttggggaggtgttcactgaagacgccgtctccatggcatcttcgtcttcactcttaggcactttgggggtttgagggtggggtaagggatttcttaggggatggtagacctttattgggtatcaagacatagcatccaagtggcataattcaggggctgacacttcaaggtgacagaaggaccagcccttgagggagaacttatggccacagcccatccatagtaactgacatgattagcagaagaaaggaacatttaggggcaagcaggcgctgtgctatcatgatggaatttcatatctacagatagagagttgttgtgtacagacttgttgtgactttgacgcttgcgaactagagatgtgcaattgatttcttttcttcctggctttttaactcccctgtttcaatcactgtcctccacacaagggaaggacagaaaggagagtggccattctttttttcttggcccccttcccaaggccttaagctttggacccaaggaaaactgcatggagacgcatttcggttgagaatggaaaccacaacttttaaccaaacaattatttaaagcaatgctgatgaatcactgtttttagacaccttcattttgaggggaggagttccacagattgtttctatacaaatataaatcttaaaaagttgttcaactattttattatcctagattatatcaaagtatttgtcgtgtgtagaaaaaaaaacagctctgcaggcttaataaaaatgacagactgaaa

SEQ ID NO: 2294 - DNA, 3567 bp, Homo sapiens
  source 1..3567: mol_type = genomic DNA
gctgggaccgagtcccggacgtcgcgacgcgcagggggctgctgcggccggcggtctcgggaaaagtgaggggacggaggcgcccaagcaacgtgggtttcgggaactgtgagtatttcactttgcgtagagccccctcgggcaatgcgacccagaaccgagggcttctttccccccgccggggcctccctcccgttctccactcggaacaaacagcctgcagttcccgcagctgcagcgcgggccgcggaacatgcgccgggagcggggcccgggcgggactccggagctggtactgctccccccgcgctccggcgccgggcctcgccgtgcggcctccttcctcccttcctcccgcccggctcggccggaggcggcggcggaggggcgaggcgcggccccccttcggcggcacctcctccccgggcaggcgcgggcggagccgggcccgcctcagccagccgcggcgggagcagcgcagcgcggcgccgcgggcagcgagctccgcattcgaacctccctcgcaaagacagtctccgccccacaatgcaccgcggcgggcagcctttgaaaaagcggcgcggctcgttcaagatggcggagctcgaccagttgcctgacgagagctcttcagcaaaagcccttgtcagtttaaaagaaggaagcttatctaacacgtggaatgaaaagtacagttctttacagaaaacacctgtttggaaaggcaggaatacaagctctgctgtggaaatgcctttcagaaattcaaaacgaagtcgacttttttctgatgaagatgataggcaaataaatacaaggtcacctaaaagaaaccagagggttgcaatggttccacagaaatttacagcaacaatgtcaacaccagataagaaagcttcacagaagattggttttcgattacgtaatctgctcaagcttcctaaagcacataaatggtgtatatacgagtggttctattcaaatatagataaaccactttttgaaggtgataatgacttctgtgtatgtctaaaggaatcttttcctaatttgaaaacaagaaagttaacaagagtagaatggggaaaaattcggcggcttatgggaaaaccacggagatgttcttctgcattttttgaggaagagagatcagcattaaaacagaaacggcagaaaataaggctcttacaacaaaggaaagttgcagatgtttcacaattcaaagatctcccagatgaaattcctttgcctctggttattggaacgaaagttacagcacgattacgtggtgttcatgatggtttgttcactggacaaatagatgctgtggatactcttaatgctacttatagagtaacttttgataggacagggcttggaacccataccatccctgactatgaagttctcagtaatgaacctcatgagacaatgccaattgctgcctttggacaaaaacagcggccttctcgattttttatgaccccaccacggttacattatactcctcctctccagtcaccaattatagataatgatcctttattaggacagtcgccgtggagaagtaaaatttctggctctgacactgaaacattaggtggttttccagtagaatttcttatccaagtgaccagattatcaaaaattctcatgattaaaaaggaacatatcaagaaattaagggaaatgaacacagaagcagaaaaattgaaatcatattccatgcccatcagcattgaatttcagcggagatatgcaacaattgttctggagcttgaacagctgaacaaggacctaaacaaagttttgcataaagttcaacagtattgctatgagcttgctccagaccaggggctccagcctgcagatcagccaacagatatgagacgcaggtgtgaggaagaagcacaggaaattgttcggcatgcaaattcctcaacaggacagccctgcgttgaaaatgaaaatctgacagacttaatttccaggcttacagctattttgttacaaattaagtgtctagcagaaggaggagacctgaattcctttgaattcaaatcacttacagactcattaaatgatatcaagagtacaatagacgcttctaatatcagttgctttcagaataatgtagaaatccatgttgcacatattcagagtggcctgagccagatgggaaacttacatgcctttgcagcaaataacaccaacagagactgagtaaagatttcattattccaactgcacgggacattgtttttgagaagttcttttcctttatataggcttccaacaccaaataacctaactgctggaaaacaagggaaatttaaatctccaaataaggcattttaatagactgtactgcttcttaaaccagcattgctgaccagcattatatttatttttcttttattattcagatgcagtagcattgcttatgttacatatgtttatattcacaaatatttttaaactgaaatatctgaacataatataatttcgtggaagaatacattgaccattttttttaatgtgcatgaattcaccgcaacacatgcagacaactgctgcaatggagagtatgaagaaacctggtctttttattcatgtcggtggcagtgtggaaattccatccagaaaattacaactccacttgatttagttgatcaccatctcagtcttcaaaagataacatcatgaggtgtgggaagtcctagttttaaggaaaccactgaaatatagatgggaaatgtggactttacaagtatatgttatatatacttgcaatgtgacatggttctgtagatcattttataataataaatattttaatttatcataacatataaaagaaacctttgttgtttgttgaaagaaaatgaaggaacagggggaaaaaaggtgcaaaatgctaaatttctaaaaatggatttggcatgtcttcccatcagttcaggtcaaaagtgcattgttgtgagatttattaaaaaaaaaatgataacacactattttcatatttttttgtttatttgcacaacttttaaaccagattactggttaaaatccaacagtacacaatttataaagtaaaaagattttataaggaaaacaaatataataaccagtgctgtgaaatgcagaagaaaggcttgttttggttgtttttcttttttaggaaaacgctgcctaaaatgttaatcttgtaaaaagtatgtatttggaattttcttcgttttaatagaatattataaactcaaaatataaatttttttcaaatttggagtttaagatatagctgtagaggtggttttaattcctttagatgtctcataaaatgagactttttatatgttaatgtataataaaactgaaacaagattattttccatttgaaatttttgtatagtttaaaaaggcttccgtattctttgttggtattgtgccactgcagaactttagtgcagagtttatatttagctaaactgttatgttaattaagaaatgcataaatcttctattcttaatatttgtaattctaaataaattgatctatgaaaatta

SEQ ID NO: 2295 - DNA, 3219 bp, Homo sapiens
  source 1..3219: mol_type = genomic DNA
agcgcgggccgcggaacatgcgccgggagcggggcccgggcgggactccggagctggtactgctccccccgcgctccggcgccgggcctcgccgtgcggcctccttcctcccttcctcccgcccggctcggccggaggcggcggcggaggggcgaggcgcggccccccttcggcggcacctcctccccgggcaggcgcgggcggagccgggcccgcctcagccagccgcggcgggagcagcgcagcgcggcgccgcgggcagcgagctccgcattcgaacctccctcgcaaagacagtctccgccccacaatgcaccgcggcgggcagcctttgaaaaagcggcgcggctcgttcaagatggcggagctcgaccagttgcctgacgagagctcttcagcaaaagcccttgtcagtttaaaagaaggaagcttatctaacacgtggaatgaaaagtacagttctttacagaaaacacctgtttggaaaggcaggaatacaagctctgctgtggaaatgaaatttacagcaacaatgtcaacaccagataagaaagcttcacagaagattggttttcgattacgtaatctgctcaagcttcctaaagcacataaatggtgtatatacgagtggttctattcaaatatagataaaccactttttgaaggtgataatgacttctgtgtatgtctaaaggaatcttttcctaatttgaaaacaagaaagttaacaagagtagaatggggaaaaattcggcggcttatgggaaaaccacggagatgttcttctgcattttttgaggaagagagatcagcattaaaacagaaacggcagaaaataaggctcttacaacaaaggaaagttgcagatgtttcacaattcaaagatctcccagatgaaattcctttgcctctggttattggaacgaaagttacagcacgattacgtggtgttcatgatggtttgttcactggacaaatagatgctgtggatactcttaatgctacttatagagtaacttttgataggacagggcttggaacccataccatccctgactatgaagttctcagtaatgaacctcatgagacaatgccaattgctgcctttggacaaaaacagcggccttctcgattttttatgaccccaccacggttacattatactcctcctctccagtcaccaattatagataatgatcctttattaggacagtcgccgtggagaagtaaaatttctggctctgacactgaaacattaggtggttttccagtagaatttcttatccaagtgaccagattatcaaaaattctcatgattaaaaaggaacatatcaagaaattaagggaaatgaacacagaagcagaaaaattgaaatcatattccatgcccatcagcattgaatttcagcggagatatgcaacaattgttctggagcttgaacagctgaacaaggacctaaacaaagttttgcataaagttcaacagtattgctatgagcttgctccagaccaggggctccagcctgcagatcagccaacagatatgagacgcaggtgtgaggaagaagcacaggaaattgttcggcatgcaaattcctcaacaggacagccctgcgttgaaaatgaaaatctgacagacttaatttccaggcttacagctattttgttacaaattaagtgtctagcagaaggaggagacctgaattcctttgaattcaaatcacttacagactcattaaatgatatcaagagtacaatagacgcttctaatatcagttgctttcagaataatgtagaaatccatgttgcacatattcagagtggcctgagccagatgggaaacttacatgcctttgcagcaaataacaccaacagagactgagtaaagatttcattattccaactgcacgggacattgtttttgagaagttcttttcctttatataggcttccaacaccaaataacctaactgctggaaaacaagggaaatttaaatctccaaataaggcattttaatagactgtactgcttcttaaaccagcattgctgaccagcattatatttatttttcttttattattcagatgcagtagcattgcttatgttacatatgtttatattcacaaatatttttaaactgaaatatctgaacataatataatttcgtggaagaatacattgaccattttttttaatgtgcatgaattcaccgcaacacatgcagacaactgctgcaatggagagtatgaagaaacctggtctttttattcatgtcggtggcagtgtggaaattccatccagaaaattacaactccacttgatttagttgatcaccatctcagtcttcaaaagataacatcatgaggtgtgggaagtcctagttttaaggaaaccactgaaatatagatgggaaatgtggactttacaagtatatgttatatatacttgcaatgtgacatggttctgtagatcattttataataataaatattttaatttatcataacatataaaagaaacctttgttgtttgttgaaagaaaatgaaggaacagggggaaaaaaggtgcaaaatgctaaatttctaaaaatggatttggcatgtcttcccatcagttcaggtcaaaagtgcattgttgtgagatttattaaaaaaaaaatgataacacactattttcatatttttttgtttatttgcacaacttttaaaccagattactggttaaaatccaacagtacacaatttataaagtaaaaagattttataaggaaaacaaatataataaccagtgctgtgaaatgcagaagaaaggcttgttttggttgtttttcttttttaggaaaacgctgcctaaaatgttaatcttgtaaaaagtatgtatttggaattttcttcgttttaatagaatattataaactcaaaatataaatttttttcaaatttggagtttaagatatagctgtagaggtggttttaattcctttagatgtctcataaaatgagactttttatatgttaatgtataataaaactgaaacaagattattttccatttgaaatttttgtatagtttaaaaaggcttccgtattctttgttggtattgtgccactgcagaactttagtgcagagtttatatttagctaaactgttatgttaattaagaaatgcataaatcttctattcttaatatttgtaattctaaataaattgatctatg

SEQ ID NO: 2296 - DNA, 1569 bp, Homo sapiens
  source 1..1569: mol_type = genomic DNA
atgcgacccagaaccgagggcttctttccccccgccggggcctccctcccgttctccactcggaacaaacagcctgcagttcccgcagctgcagcgcgggccgcggaacatgcgccgggagcggggcccgggcgggactccggagctggtactgctccccccgcgctccggcgccgggcctcgccgtgcggcctccttcctcccttcctcccgcccggctcggccggaggcggcggcggaggggcgaggcgcggccccccttcggcggcacctcctccccgggcaggcgcgggcggagccgggcccgcctcagccagccgcggcgggagcagcgcagcgcggcgccgcgggcagcgagctccgcattcgaacctccctcgcaaagacagtctccgccccacaatgcaccgcggcgggcagcctttgaaaaagcggcgcggctcgttcaagatggcggagctcgaccagttgcctgacgagagctcttcagcaaaagcccttgtcagtttaaaagaaggaagcttatctaacacgtggaatgaaaagtacagttctttacagaaaacacctgtttggaaaggcaggaatacaagctctgctgtggaaatgcctttcagaaattcaaaacgaagtcgacttttttctgatgaagatgataggcaaataaatacaaggtcacctaaaagaaaccagagggttgcaatggttccacagaaatttacagcaacaatgtcaacaccagataagaaagcttcacagaagattggttttcgattacgtaatctgctcaagcttcctaaagcacataaatggtgtatatacgagtggttctattcaaatatagataaaccactttttgaaggtgataatgacttctgtgtatgtctaaaggaatcttttcctaatttgaaaacaagaaagttaacaagagtagaatggggaaaaattcggcggcttatgggaaaaccacggagatgttcttctgcattttttgaggaagagagatcagcattaaaacagaaacggcagaaaataaggctcttacaacaaaggaaagttgcagatgtttcacaattcaaagatctcccagatgaaattcctttgcctctggttattggaacgaaagttacagcacgattacgtggtgttcatgatggtttgttcactggacaaatagatgctgtggatactcttaatgctacttatagagtaacttttgataggacagggcttggaacccataccatccctgactatgaagttctcagtaatgaacctcatgagacaatgccaattgctgcctttggacaaaaacagcggccttctcgattttttatgaccccaccacggttacattatactcctcctctccagtcaccaattatagataatgatcctttattaggacagtcgccgtggagaagtaaaatttctggctctgacactgaaacattaggtggttttccagtagaatttcttatccaagtgaccagattatcaaaaattctcatgattaaaggaacatatcaagaaattaagggaaatgaacacagaagcagaaaaattggt

SEQ ID NO: 2297 - DNA, 3186 bp, Homo sapiens
  source 1..3186: mol_type = genomic DNA
gaaacagctgagcagaacagttctttagctgtcggcctaaatgaccaacttcatgacctctcaaggtctcgctccccggctgcacgcagctcagcttccaacattcgggaaaggcgtgcccggatcgcgaggggccgctgggaccgagtcccggacgtcgcgacgcgcagggggctgctgcggccggcggtctcgggaaaagtgaggggacggaggcgcccaagcaacgtgggtttcgggaactgctcttcagcaaaagcccttgtcagtttaaaagaaggaagcttatctaacacgtggaatgaaaagtacagttctttacagaaaacacctgtttggaaaggcaggaatacaagctctgctgtggaaatgcctttcagaaattcaaaacgaagtcgacttttttctgatgaagatgataggcaaataaatacaaggtcacctaaaagaaaccagagggttgcaatggttccacagaaatttacagcaacaatgtcaacaccagataagaaagcttcacagaagattggttttcgattacgtaatctgctcaagcttcctaaagcacataaatggtgtatatacgagtggttctattcaaatatagataaaccactttttgaaggtgataatgacttctgtgtatgtctaaaggaatcttttcctaatttgaaaacaagaaagttaacaagagtagaatggggaaaaattcggcggcttatgggaaaaccacggagatgttcttctgcattttttgaggaagagagatcagcattaaaacagaaacggcagaaaataaggctcttacaacaaaggaaagttgcagatgtttcacaattcaaagatctcccagatgaaattcctttgcctctggttattggaacgaaagttacagcacgattacgtggtgttcatgatggtttgttcactggacaaatagatgctgtggatactcttaatgctacttatagagtaacttttgataggacagggcttggaacccataccatccctgactatgaagttctcagtaatgaacctcatgagacaatgccaattgctgcctttggacaaaaacagcggccttctcgattttttatgaccccaccacggttacattatactcctcctctccagtcaccaattatagataatgatcctttattaggacagtcgccgtggagaagtaaaatttctggctctgacactgaaacattaggtggttttccagtagaatttcttatccaagtgaccagattatcaaaaattctcatgattaaaaaggaacatatcaagaaattaagggaaatgaacacagaagcagaaaaattgaaatcatattccatgcccatcagcattgaatttcagcggagatatgcaacaattgttctggagcttgaacagctgaacaaggacctaaacaaagttttgcataaagttcaacagtattgctatgagcttgctccagaccaggggctccagcctgcagatcagccaacagatatgagacgcaggtgtgaggaagaagcacaggaaattgttcggcatgcaaattcctcaacaggacagccctgcgttgaaaatgaaaatctgacagacttaatttccaggcttacagctattttgttacaaattaagtgtctagcagaaggaggagacctgaattcctttgaattcaaatcacttacagactcattaaatgatatcaagagtacaatagacgcttctaatatcagttgctttcagaataatgtagaaatccatgttgcacatattcagagtggcctgagccagatgggaaacttacatgcctttgcagcaaataacaccaacagagactgagtaaagatttcattattccaactgcacgggacattgtttttgagaagttcttttcctttatataggcttccaacaccaaataacctaactgctggaaaacaagggaaatttaaatctccaaataaggcattttaatagactgtactgcttcttaaaccagcattgctgaccagcattatatttatttttcttttattattcagatgcagtagcattgcttatgttacatatgtttatattcacaaatatttttaaactgaaatatctgaacataatataatttcgtggaagaatacattgaccattttttttaatgtgcatgaattcaccgcaacacatgcagacaactgctgcaatggagagtatgaagaaacctggtctttttattcatgtcggtggcagtgtggaaattccatccagaaaattacaactccacttgatttagttgatcaccatctcagtcttcaaaagataacatcatgaggtgtgggaagtcctagttttaaggaaaccactgaaatatagatgggaaatgtggactttacaagtatatgttatatatacttgcaatgtgacatggttctgtagatcattttataataataaatattttaatttatcataacatataaaagaaacctttgttgtttgttgaaagaaaatgaaggaacagggggaaaaaaggtgcaaaatgctaaatttctaaaaatggatttggcatgtcttcccatcagttcaggtcaaaagtgcattgttgtgagatttattaaaaaaaaaatgataacacactattttcatatttttttgtttatttgcacaacttttaaaccagattactggttaaaatccaacagtacacaatttataaagtaaaaagattttataaggaaaacaaatataataaccagtgctgtgaaatgcagaagaaaggcttgttttggttgtttttcttttttaggaaaacgctgcctaaaatgttaatcttgtaaaaagtatgtatttggaattttcttcgttttaatagaatattataaactcaaaatataaatttttttcaaatttggagtttaagatatagctgtagaggtggttttaattcctttagatgtctcataaaatgagactttttatatgttaatgtataataaaactgaaacaagattattttccatttgaaatttttgtatagtttaaaaaggcttccgtattctttgttggtattgtgccactgcagaactttagtgcagagtttatatttagctaaactgttatgttaattaagaaatgcataaatcttctattcttaatatttgtaattctaaataaattgatctatgaaaatta

SEQ ID NO: 2298 - DNA, 16535 bp, Homo sapiens
  source 1..16535: mol_type = genomic DNA
aaagacagaaccccagagaaaaacgctgccaattcgttgctttattgttccctgcctggggacctcaatagccttttccattaaccttcccttcttacgcaacggttaatgactttgggggttgttttgctttctgtttctgctgagtcactaaattttgcctctttgtccccaggtgctgctcagcataaaagttaaaagtgcaattcaggaagtactgggattctgtgtagagccgaggaaaccatttccctaagagaagctctgttccttggcttgtccttccttcccgggaaggaagcttccgaggaacgaagggagaagctttgttttgcctgcagaagcagccctgtgctcggctgagggttctcagctggctgtgaactgcggagcattgtaggcgcctggctggctcaggccaatgcagaagtctctcccttctccaaagacccaaatccccacagaaccagcttcgagttactttcccttcaaggggattaaaataattgtgatttgtggcgctctccgttcgcggtggtattttcctgttgtgttaaatgcctcttattaagtaatagatgtgatttatgtgaacgacgaaggggtgtgtggtggattcggtgattaatcagtgaattcccatccgctggcatctctcactgcccctcttgcgtgatgtaagatcagacgtaccctgcattgaaaagtcaagacacacgggcgtctcgctcgcgctcacacacgctctgcctcctctctcccgcacgcgcgcatccctccaccttccacatcctgctccaggcaggagaaggctgactggctggactcattgagctgaagaatttccagtgacatttgtaaatgacgccgctcgattccaggctccaagcggcccctgccgccgccgccgccgccgggccgaaggtgccgccgagcagtctccagcgcaggcttccttaccgggcgaccacaatgtccgagtttctcctcgccttactcactctctcgggattattgccgattgccagggtgctgaccgtgggagccgaccgagatcagcagttgtgtgatcctggtgaatttctttgccacgatcacgtgacttgtgtctcccagagctggctgtgtgatggggaccctgactgccctgatgattcagacgagtctttagatacctgtcccgaggaggtagaaatcaagtgccccttgaatcacattgcttgccttggtaccaacaaatgtgttcatttatcccagctgtgcaatggtgtcttggactgcccagatgggtatgacgaaggagtacattgtcaggaactgttatccaattgccaacagctgaattgtcagtataaatgtacaatggtcagaaatagtacaagatgttactgtgaggatggattcgaaataacagaagatgggagaagctgtaaagatcaagatgaatgtgctgtttatggtacatgcagccagacctgcagaaacacacatggatcctacacttgcagttgtgtggaaggctacctaatgcagccagacaacagatcttgcaaggctaaaattgaacctacagatagaccacctatactattaattgcaaattttgaaacaattgaggttttctatcttaatggaagtaaaatggcaactctaagctcagtcaatggaaatgaaattcatactctggattttatttataatgaagatatgatttgttggattgaatcaagagaatcttcaaatcaactcaaatgtatccagataacaaaagcaggaggattaacagatgaatggacaatcaatattcttcaatccttccacaatgtgcaacaaatggcgattgactggctcactcgaaatctctattttgtggaccatgtcggtgaccggatctttgtttgtaattccaacggttctgtatgtgtcaccctgattgatctggagcttcacaatcctaaagcaatagcagtagatccaatagcaggaaaacttttctttactgactacgggaatgtcgccaaagtggagagatgtgacatggatgggatgaaccgaacaaggataattgattcaaagacagagcagccagctgcactggcactagacctagtcaacaaattggtttactgggtagatctttacttggactatgtgggagtagtggactatcaaggaaaaaatagacacactgtcattcaaggcagacaagttagacatctttatggtataactgtgtttgaagattatttgtatgcaaccaattctgataactacaatatcgtaaggataaaccgatttaatgggactgatattcactcattaattaaaattgagaatgcttggggaatccgaatttatcaaaaaagaactcaaccaacagtcagaagccatgcatgtgaagtcgatccatatggaatgccagggggctgttcacacatctgtctactcagcagcagttacaaaactcggacttgtcgctgcaggactggcttcaacttgggaagtgatggcaggtcatgcaaaagaccaaagaatgagttgttcctcttttatgggaaaggacgcccaggaattgttagaggaatggacttgaataccaagatagctgatgaatacatgatccccatagaaaatctggtaaaccctcgtgctttagactttcacgcagaaaccaattacatctactttgctgacaccaccagtttcctaattggccggcagaagatagatggcacagagagagaaaccatcctgaaagatgatctggataatgtagagggcattgctgtggactggattggaaataatctttactggaccaatgatggccataggaaaaccattaatgtggccaggctggaaaaagcttctcagagtcggaagactcttttagagggtgaaatgtctcatcccagaggaattgtggtggatccagttaatggttggatgtattggacagactgggaggaagatgaaatagatgacagcgtgggaaggattgagaaggcctggatggatggattcaatcggcagatttttgtgacttcaaagatgctgtggccaaacggtttaactctggactttcacaccaacacattatactggtgtgatgcctattacgatcatattgaaaaagtatttttgaatgggactcacaggaagattgtttacagtgggagagagttgaaccaccctttcggactgtcgcatcatggaaattatgtgttctggactgattatatgaatggttccatttttcaactagatttgataacaagtgaggtgacattgctgaggcatgaaagaccacccctatttgggcttcagatttatgatccacgaaagcaacaaggtgacaatatgtgccgagtaaataatgggggctgtagtacactttgcttggctatcccaggaggccgggtgtgtgcttgtgccgataatcaacttttggatgaaaatgggacaacttgcacatttaatcctggagaagcactacctcacatatgtaaagctggagagtttcgctgcaaaaacagacactgtatccaagctcggtggaaatgtgatggcgacgatgactgcctagacggaagcgatgaggattcagtaaactgcttcaatcatagctgtcctgatgatcagtttaaatgccagaataatcgctgcatccccaagagatggctttgtgatggagctaatgactgtgggagcaatgaagatgaatccaatcaaacttgcacagccagaacatgccaggtagaccagttttcttgcggaaatgggcgttgcattcccagagcatggctgtgtgacagggaagacgactgtggtgaccagacagatgaaatggcatcttgtgaattcccaacttgtgagccactaacccaattcgtatgcaaaagtggaagatgcattagcagcaaatggcactgcgactctgatgacgactgtggggacgggagtgatgaggtgggctgtgttcactcttgctttgataatcagttcagatgttccagtggcagatgcatcccaggccactgggcctgtgatggtgacaatgactgtggggacttcagtgatgaagcccagatcaattgtactaaagaagagattcattctcctgctggttgtaacggaaatgaatttcagtgccaccctgatggtaattgcgttcctgatttgtggcgctgtgatggagaaaaagactgtgaagatggtagtgatgaaaaaggttgcaatggtaccatacgattgtgtgaccacaaaaccaagttttcctgttggagtacagggagatgcatcaacaaagcatgggtgtgtgatggagatattgattgcgaagatcagtcagatgaagatgactgtgacagtttcttgtgtggaccacccaagcatccttgtgctaatgacacctcagtctgcctgcagccagagaaactctgcaatgggaaaaaggattgtcctgatggctctgatgaaggctatctctgtgatgagtgttcgctgaacaatggaggctgtagcaaccactgttctgttgttcctggaagaggaattgtctgttcctgccctgaaggacttcaactcaacaaagacaataaaacatgtgaaattgtggattattgtagcaatcatctaaagtgcagccaagtatgtgagcagcacaagcacacagtcaagtgctcatgttatgaaggttggaagctggatgtagacggtgaaagttgtacaagtgttgatccttttgaagcattcatcatcttttctattcgtcatgagatcagaaggattgatcttcacaaaagagactatagtctacttgttcctggattgagaaacacaatagcacttgattttcacttcaatcaaagtttactttattggacagatgttgtagaagacagaatataccggggaaagctttctgaaagtggaggtgtcagtgccattgaagtggttgtggagcatggcctggctactccagaaggcctgacagtcgactggatagcaggaaacatatactggatagacagcaatctggaccaaatcgaagtggccaaactagatggctccctaagaactacactaatagcaggagccatggaacaccccagggccattgctttggacccaagatatggaattcttttctggacagactgggatgcaaattttcctcgcattgaatctgcctctatgagtggtgctgggagaaaaaccatctataaagacatgaaaactggggcttggcctaatggactaactgtggaccactttgagaaaaggatagtgtggacagacgccaggtcagatgctatttattcagccctctatgatggaacaaacatgatagaaatcatccgaggtcatgaatacctttcccatccctttgctgtgtctctatatgggagtgaagtctactggacagactggaggaccaacacattgtccaaagccaataagtggacagggcagaatgtcagtgtgattcagaaaaccagtgcacagccatttgaccttcagatataccatcccagtcgccagccacaggctcccaatccttgtgcagctaatgatggcaaaggcccctgctctcacatgtgtctaatcaatcacaataggagtgctgcctgtgcgtgcccccacttgatgaagctttcttcagacaagaagacctgctatgaaatgaaaaaatttcttctttatgcaagacgttctgaaatcagaggagtggatattgacaatccatactttaacttcatcacggcatttacagtccctgatattgatgacgttactgtgatagacttcgatgcatctgaggaacgtttatactggacagatattaaaacacaaaccattaaacgagcttttattaacggaactgggttagaaactgttatttcaagagatattcagagtatcagagggctagcagtggattgggtgtcacgtaatttatactggattagctcagaatttgatgaaacgcaaattaatgtggcaaggctagatggctctttgaaaacctcaattatccatggaatcgataagccacagtgtcttgcagctcacccagtcaggggaaaactctactggaccgatggaaacacaattaacatggcaaatatggatggcagtaatagcaagattctgtttcagaatcagaaggagccagttggtctatcgatagactatgtggaaaacaagctttattggatcagttcagggaatggaaccataaatagatgcaacctggatggtggtaatttagaagtaatcgagtcaatgaaagaagaattaacaaaagctacagccctaaccatcatggataagaaactgtggtgggcagaccaaaacttagcccagctaggaacctgcagcaaaagagacggaagaaaccccaccatcctacggaataagacttctggggtagttcatatgaaagtctatgataaagaagcacagcaaggcagcaattcctgccaactaaacaatggtggatgctctcaactttgtttaccaacatctgaaactacaaggacttgtatgtgtacagtgggatattatctccaaaagaaccgtatgtcatgtcaaggtatagaatcatttcttatgtactctgttcatgaaggaatcaggggaatacctcttgaaccaagtgacaaaatggatgctttgatgcctatatcaggaacttcatttgccgtgggaatagatttccatgcagaaaatgataccatctactggacagacatgggcttcaataaaattagcagagctaaaagagatcagacttggaaagaagatatcattaccaatggcttgggaagagtggaagggatagctgttgactggattgctggtaacatatattggacagatcatggtttcaacttaattgaagttgcaagactcaatggttctttccgttatgtaattatttcccaaggcctggatcaaccaagatctatagctgtgcacccagagaaaggcctcttgttctggactgaatggggacaaatgccctgtattggaaaggctcgcttggatggctcagagaaggttgtccttgtaagcatgggaatagcatggccgaatggcatctccatcgactatgaggaaaataaattgtactggtgtgatgctcgcacagacaagatagagagaatcgaccttgagactggagggaatcgcgagatggtgctgtcaggaagcaatgtggatatgttttcagttgcagtctttggggcttacatctactggtctgacagagcacatgcaaacgggtctgtcagaaggggccacaagaatgatgccacagaaacgataaccatgagaaccggccttggagtcaacctgaaggaggttaaaatatttaaccgagtaagagagaaagggaccaatgtttgtgccagggacaatggtggctgtaagcaactctgtctttatcgaggaaattcccggagaacttgtgcttgtgcccatggatatttggcagaagatggagttacttgcctgaggcatgaaggctatttactgtattcaggaagaacaatattaaaaagtatacatctttctgatgaaaccaatttaaattccccaataaggccatatgagaatccacgttatttcaagaatgtcatagccttggcttttgactataatcaaagaagaaaaggtaccaaccgaatcttttacagtgatgcacactttggaaatatacagcttattaaagacaactgggaagacagacaagtaattgttgaaaatgtgggttctgtggaaggacttgcctatcacagagcctgggatacactgtactggacaagctctaccacctcatccatcaccagacacactgtggaccagactcggcctggagcatttgacagggaagctgtcatcaccatgtcagaagatgaccatccacatgtgctagccttggatgaatgtcaaaatttaatgttttggaccaactggaatgaacaacatccaagtatcatgagatctactctgactgggaaaaatgctcaagtggtggtcagtacagacatactcactccaaatggacttactatcgactaccgtgcagagaagctgtatttctcagatggcagtctaggaaaaattgaaaggtgtgaatacgatggatcccagagacatgtgatagttaaatctgggccagggactttcctcagtttggctgtttatgacaattatatattctggtcggactggggaagaagagctatactgcggtccaacaagtacacaggaggagatacaaaaattcttcgttccgatattccacatcagccaatgggaatcatagctgttgccaatgacaccaatagctgtgaactttctccatgtgcattattgaatggaggctgccatgacttgtgccttttaactcccaatgggagagtgaattgttcctgcagaggggaccgaatattgctagaggacaacagatgtgtgactaaaaattcctcctgcaacgcttattcggagtttgaatgtggaaatggtgagtgcattgactaccagctcacctgtgatggcattcctcactgtaaagataaatcagatgaaaaactgctctactgtgaaaacagaagctgtcgaagaggcttcaagccatgctataatcgccgctgcattcctcatggcaagttatgtgatggagaaaatgactgcggagacaactctgatgaattagattgtaaagtttcaacctgtgccacggttgagttccgctgtgcagatgggacttgtattccaagatcagcacgatgcaaccagaacatagattgtgcagatgcttcagatgaaaagaactgcaataacacagactgcacacatttctataagcttggagtgaaaaccacagggttcataagatgtaattctacctcactgtgtgttctgccaacctggatatgcgacgggtctaatgactgtggagactattcagatgaattaaagtgcccagttcaaaacaaacacaaatgtgaagaaaattattttagttgtcctagtggaagatgcattttgaatacctggatatgcgatggtcagaaagattgtgaggatggacgtgatgaattccactgtgattcttcttgctcttggaaccaatttgcttgttccgcacaaaaatgtatttctaagcattggatttgtgatggagaagatgactgtggggatgggttagatgaaagtgacagcatttgtggtgccataacctgtgctgctgacatgttcagctgccagggctctcgtgcctgcgtgccccgacattggctttgtgatggtgaaagggactgtccagatggaagcgatgagctttccacagcaggctgcgctcccaataatacatgtgatgaaaatgctttcatgtgccataataaagtatgcattcccaagcaatttgtttgtgaccatgatgacgactgtggagatggctctgatgagtcaccgcagtgtggatatcgacagtgtggtacagaagaatttagttgtgctgatgggcggtgtcttctaaatactcaatggcagtgtgatggagactttgactgtcctgaccattctgatgaagcacctttaaacccaaagtgtaaaagtgcagaacagtcatgcaacagttcattttttatgtgcaaaaatggcaggtgcattcccagtggaggtctttgcgacaataaggatgactgtggcgatggttcagatgagagaaactgccatataaatgaatgtttgagtaagaaagtcagtggatgttctcaagactgtcaagaccttccggtcagttataagtgcaaatgctggcctggattccaactgaaggatgacggcaaaacatgtgtagacattgatgaatgctcttcaggctttccctgtagccagcaatgcatcaatacatacgggacttacaagtgcctctgtacagatgggtatgaaatacaacctgataacccaaatggctgcaaatcgctctcagatgaagaaccttttttaattcttgctgatcatcatgagataaggaaaattagcactgatggctccaactacacacttttaaaacagggattaaacaatgttattgctatagactttgattacagagaagaattcatctattggatcgattctagccgacccaatggcagtcgcataaatagaatgtgtttaaatggaagtgacattaaggtagttcataacacagcggtccccaatgcacttgctgtcgattggattggaaaaaacctctattggtctgacacagaaaaaagaatcattgaagtatccaaactcaatggcttgtaccctactatactcgttagcaaaaggctgaagtttcccagagacttgtctttagatcctcaagctggatatttgtattggattgactgctgcgagtatcctcatattggccgtgttggaatggatggaaccaatcagagtgttgtcatagaaaccaagatttctagacctatggcactaacaatagattatgttaatcgtagactctactgggccgatgaaaatcacattgaatttagcaacatggatggatctcatagacacaaagtccctaatcaagatattccaggggtgattgcactaacattgtttgaagactacatctactggactgatgggaaaaccaagtcactcagccgtgcccataaaacatcgggagcagacagactctcactgatttactcatggcatgccatcacagatatccaggtgtatcattcttatagacaacctgatgtctccaaacatctctgcatgataaataatggtggttgcagtcatttgtgccttttagcccctggaaaaacccacacttgtgcatgtcccactaacttctatctggcagctgataataggacttgcttatccaactgcacagccagccagtttcgttgcaaaactgacaaatgtattccattctggtggaaatgtgacaccgtggatgactgtggtgatggatctgatgaacctgatgactgtcctgaatttagatgtcagccaggccgatttcagtgtgggactggactctgtgctctaccagctttcatctgtgatggagagaatgattgtggagacaattctgatgaactcaactgtgacacacatgtctgcctgtcaggtcaattcaaatgtaccaagaaccagaaatgtatcccagtaaacttaagatgtaatgggcaagatgactgtggtgatgaggaagatgaaagagactgtcctgaaaacagctgttctccagactatttccagtgtaagactacgaagcattgcatttccaagctgtgggtttgtgacgaggatccagactgtgcagatgcatcagacgaggccaactgcgataaaaagacttgtggacctcatgaattccagtgtaaaaacaacaactgtattcccgatcactggcggtgtgatagccaaaatgactgcagtgataattcagatgaagaaaactgtaagccacagacatgtacattgaaagatttcctctgtgccaatggggactgtgtttcttcaaggttttggtgtgatggagattttgactgtgcagatggctctgatgagagaaattgtgagacaagttgttccaaagatcagttccggtgttccaatggtcagtgtataccagcaaaatggaaatgtgatggccatgaagactgcaaatatggggaagatgagaaaagctgtgagccagcttctcctacttgctcatcacgtgaatatatatgtgccagtgatggatgtatttcagcatctttgaaatgtaatggagaatatgattgtgctgatggttcagatgagatggactgtgtgactgaatgtaaggaagatcagtttcggtgcaaaaataaagcccactgtattccaattagatggctgtgtgatggaattcatgactgtgtggatggcagtgatgaagagaactgtgaaagaggaggaaatatatgtagagctgatgagttcctttgcaataattctctctgcaaactacatttctgggtgtgtgatggagaggacgactgtggagacaactctgatgaagcccctgatatgtgtgtcaaatttctttgtccatccacgagacctcacagatgcagaaataacagaatatgcctacagtcggagcaaatgtgcaatgggattgatgaatgcggtgacaattcagatgaagatcactgtggtggtaagctgacatataaagcaaggccttgtaaaaaggatgagtttgcttgtagtaataaaaaatgcatccctatggatctccagtgtgatcgacttgatgactgcggagatggttcagatgagcaaggatgcagaatagctcctactgaatatacctgtgaagataatgtgaatccatgtggagatgatgcatattgtaatcaaataaaaacatctgttttctgtcgctgtaagcctggatttcagagaaacatgaaaaacagacaatgtgaagaccttaatgaatgtttggtgtttggcacatgttcccatcaatgtataaatgtggaaggatcatataaatgtgtgtgtgaccagaattttcaagaaagaaataacacctgcatagcagaaggctctgaagatcaagttctctacattgctaatgacactgatatcctgggttttatatatccattcaactacagtggcgatcatcaacaaatttctcatattgaacataattcaagaataacagggatggatgtatattatcaaagagatatgattatttggagtactcagtttaatccaggcggaattttctacaaaaggatccatggcagagaaaaaaggcaagcaaacagtggcttgatttgtcctgaatttaaaaggcccagggacattgcagttgactgggtggctggaaacatttactggactgatcattctagaatgcattggttcagttactacactactcactggaccagtctgaggtactctatcaacgtagggcagctgaatggccccaactgcaccagactcttaacaaatatggctggagaaccctatgctattgcagtaaatcctaaaagagggatgatgtactggactgttgttggggatcattcccatatagaagaagcagccatggatggtacactgagaaggattttagtacaaaagaacttacagagacccacaggtttggctgtggattattttagtgaacgcatatattgggctgactttgagctctccatcattggcagtgttctgtatgatggctctaattcagtagtctctgtcagcagcaaacaaggtttattacatccacataggatcgatatctttgaagattatatatatggagcaggacctaaaaatggtgtatttcgagttcaaaaatttggccatggttcagtagagtacttagctttaaatattgataaaacaaaaggtgttttgatatctcatcgttataaacaactagatttacccaatccatgcttggatttagcatgcgaatttctttgcttgctaaatccttctggggccacttgtgtgtgtccagaaggaaaatatttgattaatggcacctgcaatgatgacagcctgttagatgattcatgtaagttaacttgtgaaaatggaggaagatgcattttaaatgagaaaggtgatttgaggtgtcactgttggcccagttattcaggagaaagatgtgaagtcaaccactgtagcaactactgccagaatggaggaacttgcgtaccatcagttctagggagacccacctgcagctgtgcactgggtttcactgggccaaactgtggtaagacagtctgtgaggatttttgtcaaaatggaggaacctgcattgtgactgctggaaaccagccttactgccactgccagccggaatacaccggagacagatgtcagtactacgtgtgccaccactattgtgtgaattctgaatcatgtaccattggggatgatggaagtgttgaatgtgtctgtccaacgcgctatgaaggaccaaaatgtgaggttgacaagtgtgtaaggtgccatggggggcactgcattataaataaagacagtgaagatatattttgcaactgcactaatggaaagattgcctctagctgtcagttatgtgatggctactgttacaatggtggcacatgccagctggaccccgagacaaatgtacctgtgtgtctatgctccaccaactggtcaggcacacagtgtgaaaggccagccccaaagagcagcaagtctgatcatatcagcacaagaagcattgccatcattgtgcctctcgtcctcttggtgactttgataaccaccttagtaattggtttagtgctttgtaaaagaaaaagaaggacaaaaacaattagaagacaacctattatcaatggaggaataaatgtagaaattggcaatccatcttataacatgtatgaggtagatcatgatcacaacgatggaggtcttttagatcctggctttatgatagacccaacaaaggccaggtacatagggggaggacccagtgctttcaagcttccacacacagcgccgcccatctacctaaactctgatttgaaaggaccactaactgctgggccaacaaattactccaatccggtatatgcaaaattatatatggatgggcaaaactgtcgaaactccttaggaagtgttgatgaaaggaaagaactgcttccaaagaaaatagaaattggtataagagagacagtggcataatcagtgatatcttttatatgctgtataaatgtataaaatataaggattacttttgtatgttccaacagtattatacttgttttggcatcagcattacctctttctttatctttttcctggttaattgttttctgagttttttgggttttattttttgctgatgactattgattgaccatttgtatggtatttttatgaaaaagaactgcactacagtacaatttacaacaatgctgctgatatgacacacctttgaatttgttaaaattaaaaacaacgtattcctttgtagtgtgaatatgagcaatctattttatatgaacttttttggttgtacttaatcaacgaggagaatctctgcacttttccattatacggtttgaaggctgtaatacagtgtcatattatttttctgtttaaattgatggaaaaatgattgaatggtcaactctcttctttgtgcccataaagatcgattcagactctgctgaaaatatatagctctcacaagttcagcatcacctgctttgaaattagccttagattgccaaccaatagatgagaattttgaggaaaaaaattaaaaatatgtaaaattaataatttgcatgaacacagatgactacattttccaaaacttagtggactctatgtgatgtactaaatgtatacaccttgtaagcaatagttatatttaggtggtagaacatagcaaaaatataaccgaaagttggccgactgcacttgctatggaataagaccttttattctccctcagtctcgagataaatagccagcctagagcacaacagggcattgggtacttgcatcttaggtatttcttcccagtcacatccattttgtggaagattaacccaaccccttacactacactgaacactaaagaataatatataagcacacaaattggtgacagaatttcaattacgtgaacgcatcctctttgctaggtcaaaaaacaaagggcaaagcagacattttagtatacagagtgattggcaaatattttcaagatttaatatgagcaacccattatttgccctatccaaaatatattcaagggccttccaagttgtagaagaacaatgatcttcccataatcaaaagtggagagtcgaaatgctgtgccagttgctctggtattcaggtttctctgggttttacagaacgcatggaccccattcacgtttggtttgtttatcttcaaatttgagttgaaacgagtgcgatttatttaagttgtatataaaaataaaaggatagcatttttatacaaatatctttaaaggcacaaaagatttattcacaagttttggagggctttttgttcctctgatagacatgactgacttttagctgtcataatgtattaacctaacagatgaaatatgttaaatatgtggttgctctttatccctttgtacaagcattaaaaaaactgctgttttataagaagactttttgttgtactatgtgcatgcatactacctatttctaaactttgccatattgaggcctttataaactattgatttatgtaatactagtgcaattttgcttgaacaatgttatgcatatcataaactttttcaggttcttgtttaagtacattttttaaattgaacagtatttttcattttggttataatatagtcattttgcctatgtttctacaatgaagtgttaaatactttataaaaaattgttgactgacttatttaaatgaaattctacatatttaa

SEQ ID NO: 2299 - DNA, 2621 bp, Homo sapiens
  source 1..2621: mol_type = genomic DNA
gcattgaaaagtcaagacacacgggcgtctcgctcgcgctcacacacgctctgcctcctctctcccgcacgcgcgcatccctccaccttccacatcctgctccaggcaggagaaggctgactggctggactcattgagctgaagaatttccagtgacatttgtaaatgacgccgctcgattccaggctccaagcggcccctgccgccgccgccgccgccgggccgaaggtgccgccgagcagtctccagcgcaggcttccttaccgggcgaccacaatgtccgagtttctcctcgccttactcactctctcgggattattgccgattgccagggtgctgaccgtgggagccgaccgagatcagcagttgtgtgatcctggtgaatttctttgccacgatcacgtgacttgtgtctcccagagctggctgtgtgatggggaccctgactgccctgatgattcagacgagtctttagatacctccagaacatgccaggtagaccagttttcttgcggaaatgggcgttgcattcccagagcatggctgtgtgacagggaagacgactgtggtgaccagacagatgaaatggcatcttgtgaattcccaacttgtgagccactaacccaattcgtatgcaaaagtggaagatgcattagcagcaaatggcactgcgactctgatgacgactgtggggacgggagtgatgaggtgggctgtgttcactcttgctttgataatcagttcagatgttccagtggcagatgcatcccaggccactgggcctgtgatggtgacaatgactgtggggacttcagtgatgaagcccagatcaattgtactaaagaagagattcattctcctgctggttgtaacggaaatgaatttcagtgccaccctgatggtaattgcgttcctgatttgtggcgctgtgatggagaaaaagactgtgaagatggtagtgatgaaaaaggttgcaatggtaccatacgattgtgtgaccacaaaaccaagttttcctgttggagtacagggagatgcatcaacaaagcatgggtgtgtgatggagatattgattgcgaagatcagtcagatgaagatgactgtgacagtttcttgtgtggaccacccaagcatccttgtgctaatgacacctcagtctgcctgcagccagagaaactctgcaatgggaaaaaggattgtcctgatggctctgatgaaggctatctctgtgatgagtgttcgctgaacaatggaggctgtagcaaccactgttctgttgttcctggaagaggaattgtctgttcctgccctgaaggacttcaactcaacaaagacaataaaacatgtgaaattgtggattattgtagcaatcatctaaagtgcagccaagtatgtgagcagcacaagcacacagtcaagtgctcatgttatgaaggttggaagctggatgtagacggtgaaagttgtacaagtgttgatccttttgaagcattcatcatcttttctattcgtcatgagatcagaaggattgatcttcacaaaagagactatagtctacttgttcctggattgagaaacacaatagcacttgattttcacttcaatcaaagtttactttattggacagatgttgtagaagacagaatataccggggaaagctttctgaaagtggaggtgtcagtgccattgaagtggttgtggagcatggcctggctactccagaaggcctgacagtcgactggatagcaggaaacatatactggatagacagcaatctggaccaaatcgaagtggccaaactagatggctccctaagaactacactaatagcaggagccatggaacaccccagggccattgctttggacccaagatatggaattcttttctggacagactgggatgcaaattttcctcgcattgaatctgcctctatgagtggtgctgggagaaaaaccatctataaagacatgaaaactggggcttggcctaatggactaactgtggaccactttgagaaaaggatagtgtggacagacgccaggtcagatgctatttattcagccctctatgatggaacaaacatgatagaaatcatccgaggtcatgaatacctttcccatccctttgctgtgtctctatatgggagtgaagtctactggacagactggaggaccaacacattgtccaaagccaataagtggacagggcagaatgtcagtgtgattcagaaaaccagtgcacagccatttgaccttcagatataccatcccagtcgccagccacaggctcccaatccttgtgcagctaatgatggcaaaggcccctgctctcacatgtgtctaatcaatcacaataggagtgctgcctgtgcgtgcccccacttgatgaagctttcttcagacaagaagacctgctatgaaatgaaaaaatttcttctttatgcaagacgttctgaaatcagaggagtggatattgacaatccatactttaacttcatcacggcatttacagtccctgatattgatgacgttactgtgatagacttcgatgcatctgaggaacgtttatactggacagatattaaaacacaaaccattaaacgagcttttattaacgg

SEQ ID NO: 2300 - DNA, 15371 bp, Homo sapiens
  source 1..15371: mol_type = genomic DNA
tttttacattcaggtcccgaggaggtagaaatcaagtgccccttgaatcacattgcttgccttggtaccaacaaatgtgttcatttatcccagctgtgcaatggtgtcttggactgcccagatgggtatgacgaaggagtacattgtcagggtgagtccatttgtcaacaactgaattgtacaatgtacaagtacaaatgtacaatggtcagaaatagtacaagatgttactgtgaggatggattcgaaataacagaagatgggagaagctgtaaagatcaagatgaatgtgctgtttatggtacatgcagccagacctgcagaaacacacatggatcctacacttgcagttgtgtggaaggctacctaatgcagccagacaacagatcttgcaaggctaaaattgaacctacagatagaccacctatactattaattgcaaattttgaaacaattgaggttttctatcttaatggaagtaaaatggcaactctaagctcagtcaatggaaatgaaattcatactctggattttatttataatgaagatatgatttgttggattgaatcaagagaatcttcaaatcaactcaaatgtatccagataacaaaagcaggaggattaacagatgaatggacaatcaatattcttcaatccttccacaatgtgcaacaaatggcgattgactggctcactcgaaatctctattttgtggaccatgtcggtgaccggatctttgtttgtaattccaacggttctgtatgtgtcaccctgattgatctggagcttcacaatcctaaagcaatagcagtagatccaatagcaggaaaacttttctttactgactacgggaatgtcgccaaagtggagagatgtgacatggatgggatgaaccgaacaaggataattgattcaaagacagagcagccagctgcactggcactagacctagtcaacaaattggtttactgggtagatctttacttggactatgtgggagtagtggactatcaaggaaaaaatagacacactgtcattcaaggcagacaagttagacatctttatggtataactgtgtttgaagattatttgtatgcaaccaattctgataactacaatatcgtaaggataaaccgatttaatgggactgatattcactcattaattaaaattgagaatgcttggggaatccgaatttatcaaaaaagaactcaaccaacagtcagaagccatgcatgtgaagtcgatccatatggaatgccagggggctgttcacacatctgtctactcagcagcagttacaaaactcggacttgtcgctgcaggactggcttcaacttgggaagtgatggcaggtcatgcaaaagaccaaagaatgagttgttcctcttttatgggaaaggacgcccaggaattgttagaggaatggacttgaataccaagatagctgatgaatacatgatccccatagaaaatctggtaaaccctcgtgctttagactttcacgcagaaaccaattacatctactttgctgacaccaccagtttcctaattggccggcagaagatagatggcacagagagagaaaccatcctgaaagatgatctggataatgtagagggcattgctgtggactggattggaaataatctttactggaccaatgatggccataggaaaaccattaatgtggccaggctggaaaaagcttctcagagtcggaagactcttttagagggtgaaatgtctcatcccagaggaattgtggtggatccagttaatggttggatgtattggacagactgggaggaagatgaaatagatgacagcgtgggaaggattgagaaggcctggatggatggattcaatcggcagatttttgtgacttcaaagatgctgtggccaaacggtttaactctggactttcacaccaacacattatactggtgtgatgcctattacgatcatattgaaaaagtatttttgaatgggactcacaggaagattgtttacagtgggagagagttgaaccaccctttcggactgtcgcatcatggaaattatgtgttctggactgattatatgaatggttccatttttcaactagatttgataacaagtgaggtgacattgctgaggcatgaaagaccacccctatttgggcttcagatttatgatccacgaaagcaacaaggtgacaatatgtgccgagtaaataatgggggctgtagtacactttgcttggctatcccaggaggccgggtgtgtgcttgtgccgataatcaacttttggatgaaaatgggacaacttgcacatttaatcctggagaagcactacctcacatatgtaaagctggagagtttcgctgcaaaaacagacactgtatccaagctcggtggaaatgtgatggcgacgatgactgcctagacggaagcgatgaggattcagtaaactgcttcaatcatagctgtcctgatgatcagtttaaatgccagaataatcgctgcatccccaagagatggctttgtgatggagctaatgactgtgggagcaatgaagatgaatccaatcaaacttgcacagccagaacatgccaggtagaccagttttcttgcggaaatgggcgttgcattcccagagcatggctgtgtgacagggaagacgactgtggtgaccagacagatgaaatggcatcttgtgaattcccaacttgtgagccactaacccaattcgtatgcaaaagtggaagatgcattagcagcaaatggcactgcgactctgatgacgactgtggggacgggagtgatgaggtgggctgtgttcactcttgctttgataatcagttcagatgttccagtggcagatgcatcccaggccactgggcctgtgatggtgacaatgactgtggggacttcagtgatgaagcccagatcaattgtactaaagaagagattcattctcctgctggttgtaacggaaatgaatttcagtgccaccctgatggtaattgcgttcctgatttgtggcgctgtgatggagaaaaagactgtgaagatggtagtgatgaaaaaggttgcaatggtaccatacgattgtgtgaccacaaaaccaagttttcctgttggagtacagggagatgcatcaacaaagcatgggtgtgtgatggagatattgattgcgaagatcagtcagatgaagatgactgtgacagtttcttgtgtggaccacccaagcatccttgtgctaatgacacctcagtctgcctgcagccagagaaactctgcaatgggaaaaaggattgtcctgatggctctgatgaaggctatctctgtgatgagtgttcgctgaacaatggaggctgtagcaaccactgttctgttgttcctggaagaggaattgtctgttcctgccctgaaggacttcaactcaacaaagacaataaaacatgtgaaattgtggattattgtagcaatcatctaaagtgcagccaagtatgtgagcagcacaagcacacagtcaagtgctcatgttatgaaggttggaagctggatgtagacggtgaaagttgtacaagtgttgatccttttgaagcattcatcatcttttctattcgtcatgagatcagaaggattgatcttcacaaaagagactatagtctacttgttcctggattgagaaacacaatagcacttgattttcacttcaatcaaagtttactttattggacagatgttgtagaagacagaatataccggggaaagctttctgaaagtggaggtgtcagtgccattgaagtggttgtggagcatggcctggctactccagaaggcctgacagtcgactggatagcaggaaacatatactggatagacagcaatctggaccaaatcgaagtggccaaactagatggctccctaagaactacactaatagcaggagccatggaacaccccagggccattgctttggacccaagatatggaattcttttctggacagactgggatgcaaattttcctcgcattgaatctgcctctatgagtggtgctgggagaaaaaccatctataaagacatgaaaactggggcttggcctaatggactaactgtggaccactttgagaaaaggatagtgtggacagacgccaggtcagatgctatttattcagccctctatgatggaacaaacatgatagaaatcatccgaggtcatgaatacctttcccatccctttgctgtgtctctatatgggagtgaagtctactggacagactggaggaccaacacattgtccaaagccaataagtggacagggcagaatgtcagtgtgattcagaaaaccagtgcacagccatttgaccttcagatataccatcccagtcgccagccacaggctcccaatccttgtgcagctaatgatggcaaaggcccctgctctcacatgtgtctaatcaatcacaataggagtgctgcctgtgcgtgcccccacttgatgaagctttcttcagacaagaagacctgctatgaaatgaaaaaatttcttctttatgcaagacgttctgaaatcagaggagtggatattgacaatccatactttaacttcatcacggcatttacagtccctgatattgatgacgttactgtgatagacttcgatgcatctgaggaacgtttatactggacagatattaaaacacaaaccattaaacgagcttttattaacggaactgggttagaaactgttatttcaagagatattcagagtatcagagggctagcagtggattgggtgtcacgtaatttatactggattagctcagaatttgatgaaacgcaaattaatgtggcaaggctagatggctctttgaaaacctcaattatccatggaatcgataagccacagtgtcttgcagctcacccagtcaggggaaaactctactggaccgatggaaacacaattaacatggcaaatatggatggcagtaatagcaagattctgtttcagaatcagaaggagccagttggtctatcgatagactatgtggaaaacaagctttattggatcagttcagggaatggaaccataaatagatgcaacctggatggtggtaatttagaagtaatcgagtcaatgaaagaagaattaacaaaagctacagccctaaccatcatggataagaaactgtggtgggcagaccaaaacttagcccagctaggaacctgcagcaaaagagacggaagaaaccccaccatcctacggaataagacttctggggtagttcatatgaaagtctatgataaagaagcacagcaaggcagcaattcctgccaactaaacaatggtggatgctctcaactttgtttaccaacatctgaaactacaaggacttgtatgtgtacagtgggatattatctccaaaagaaccgtatgtcatgtcaaggtatagaatcatttcttatgtactctgttcatgaaggaatcaggggaatacctcttgaaccaagtgacaaaatggatgctttgatgcctatatcaggaacttcatttgccgtgggaatagatttccatgcagaaaatgataccatctactggacagacatgggcttcaataaaattagcagagctaaaagagatcagacttggaaagaagatatcattaccaatggcttgggaagagtggaagggatagctgttgactggattgctggtaacatatattggacagatcatggtttcaacttaattgaagttgcaagactcaatggttctttccgttatgtaattatttcccaaggcctggatcaaccaagatctatagctgtgcacccagagaaaggcctcttgttctggactgaatggggacaaatgccctgtattggaaaggctcgcttggatggctcagagaaggttgtccttgtaagcatgggaatagcatggccgaatggcatctccatcgactatgaggaaaataaattgtactggtgtgatgctcgcacagacaagatagagagaatcgaccttgagactggagggaatcgcgagatggtgctgtcaggaagcaatgtggatatgttttcagttgcagtctttggggcttacatctactggtctgacagagcacatgcaaacgggtctgtcagaaggggccacaagaatgatgccacagaaacgataaccatgagaaccggccttggagtcaacctgaaggaggttaaaatatttaaccgagtaagagagaaagggaccaatgtttgtgccagggacaatggtggctgtaagcaactctgtctttatcgaggaaattcccggagaacttgtgcttgtgcccatggatatttggcagaagatggagttacttgcctgaggcatgaaggctatttactgtattcaggaagaacaatattaaaaagtatacatctttctgatgaaaccaatttaaattccccaataaggccatatgagaatccacgttatttcaagaatgtcatagccttggcttttgactataatcaaagaagaaaaggtaccaaccgaatcttttacagtgatgcacactttggaaatatacagcttattaaagacaactgggaagacagacaagtaattgttgaaaatgtgggttctgtggaaggacttgcctatcacagagcctgggatacactgtactggacaagctctaccacctcatccatcaccagacacactgtggaccagactcggcctggagcatttgacagggaagctgtcatcaccatgtcagaagatgaccatccacatgtgctagccttggatgaatgtcaaaatttaatgttttggaccaactggaatgaacaacatccaagtatcatgagatctactctgactgggaaaaatgctcaagtggtggtcagtacagacatactcactccaaatggacttactatcgactaccgtgcagagaagctgtatttctcagatggcagtctaggaaaaattgaaaggtgtgaatacgatggatcccagagacatgtgatagttaaatctgggccagggactttcctcagtttggctgtttatgacaattatatattctggtcggactggggaagaagagctatactgcggtccaacaagtacacaggaggagatacaaaaattcttcgttccgatattccacatcagccaatgggaatcatagctgttgccaatgacaccaatagctgtgaactttctccatgtgcattattgaatggaggctgccatgacttgtgccttttaactcccaatgggagagtgaattgttcctgcagaggggaccgaatattgctagaggacaacagatgtgtgactaaaaattcctcctgcaacgcttattcggagtttgaatgtggaaatggtgagtgcattgactaccagctcacctgtgatggcattcctcactgtaaagataaatcagatgaaaaactgctctactgtgaaaacagaagctgtcgaagaggcttcaagccatgctataatcgccgctgcattcctcatggcaagttatgtgatggagaaaatgactgcggagacaactctgatgaattagattgtaaagtttcaacctgtgccacggttgagttccgctgtgcagatgggacttgtattccaagatcagcacgatgcaaccagaacatagattgtgcagatgcttcagatgaaaagaactgcaataacacagactgcacacatttctataagcttggagtgaaaaccacagggttcataagatgtaattctacctcactgtgtgttctgccaacctggatatgcgacgggtctaatgactgtggagactattcagatgaattaaagtgcccagttcaaaacaaacacaaatgtgaagaaaattattttagttgtcctagtggaagatgcattttgaatacctggatatgcgatggtcagaaagattgtgaggatggacgtgatgaattccactgtgattcttcttgctcttggaaccaatttgcttgttccgcacaaaaatgtatttctaagcattggatttgtgatggagaagatgactgtggggatgggttagatgaaagtgacagcatttgtggtgccataacctgtgctgctgacatgttcagctgccagggctctcgtgcctgcgtgccccgacattggctttgtgatggtgaaagggactgtccagatggaagcgatgagctttccacagcaggctgcgctcccaataatacatgtgatgaaaatgctttcatgtgccataataaagtatgcattcccaagcaatttgtttgtgaccatgatgacgactgtggagatggctctgatgagtcaccgcagtgtggatatcgacagtgtggtacagaagaatttagttgtgctgatgggcggtgtcttctaaatactcaatggcagtgtgatggagactttgactgtcctgaccattctgatgaagcacctttaaacccaaagtgtaaaagtgcagaacagtcatgcaacagttcattttttatgtgcaaaaatggcaggtgcattcccagtggaggtctttgcgacaataaggatgactgtggcgatggttcagatgagagaaactgccatataaatgaatgtttgagtaagaaagtcagtggatgttctcaagactgtcaagaccttccggtcagttataagtgcaaatgctggcctggattccaactgaaggatgacggcaaaacatgtgtagacattgatgaatgctcttcaggctttccctgtagccagcaatgcatcaatacatacgggacttacaagtgcctctgtacagatgggtatgaaatacaacctgataacccaaatggctgcaaatcgctctcagatgaagaaccttttttaattcttgctgatcatcatgagataaggaaaattagcactgatggctccaactacacacttttaaaacagggattaaacaatgttattgctatagactttgattacagagaagaattcatctattggatcgattctagccgacccaatggcagtcgcataaatagaatgtgtttaaatggaagtgacattaaggtagttcataacacagcggtccccaatgcacttgctgtcgattggattggaaaaaacctctattggtctgacacagaaaaaagaatcattgaagtatccaaactcaatggcttgtaccctactatactcgttagcaaaaggctgaagtttcccagagacttgtctttagatcctcaagctggatatttgtattggattgactgctgcgagtatcctcatattggccgtgttggaatggatggaaccaatcagagtgttgtcatagaaaccaagatttctagacctatggcactaacaatagattatgttaatcgtagactctactgggccgatgaaaatcacattgaatttagcaacatggatggatctcatagacacaaagtccctaatcaagatattccaggggtgattgcactaacattgtttgaagactacatctactggactgatgggaaaaccaagtcactcagccgtgcccataaaacatcgggagcagacagactctcactgatttactcatggcatgccatcacagatatccaggtgtatcattcttatagacaacctgatgtctccaaacatctctgcatgataaataatggtggttgcagtcatttgtgccttttagcccctggaaaaacccacacttgtgcatgtcccactaacttctatctggcagctgataataggacttgcttatccaactgcacagccagccagtttcgttgcaaaactgacaaatgtattccattctggtggaaatgtgacaccgtggatgactgtggtgatggatctgatgaacctgatgactgtcctgaatttagatgtcagccaggccgatttcagtgtgggactggactctgtgctctaccagctttcatctgtgatggagagaatgattgtggagacaattctgatgaactcaactgtgacacacatgtctgcctgtcaggtcaattcaaatgtaccaagaaccagaaatgtatcccagtaaacttaagatgtaatgggcaagatgactgtggtgatgaggaagatgaaagagactgtcctgaaaacagctgttctccagactatttccagtgtaagactacgaagcattgcatttccaagctgtgggtttgtgacgaggatccagactgtgcagatgcatcagacgaggccaactgcgataaaaagacttgtggacctcatgaattccagtgtaaaaacaacaactgtattcccgatcactggcggtgtgatagccaaaatgactgcagtgataattcagatgaagaaaactgtaagccacagacatgtacattgaaagatttcctctgtgccaatggggactgtgtttcttcaaggttttggtgtgatggagattttgactgtgcagatggctctgatgagagaaattgtgagacaagttgttccaaagatcagttccggtgttccaatggtcagtgtataccagcaaaatggaaatgtgatggccatgaagactgcaaatatggggaagatgagaaaagctgtgagccagcttctcctacttgctcatcacgtgaatatatatgtgccagtgatggatgtatttcagcatctttgaaatgtaatggagaatatgattgtgctgatggttcagatgagatggactgtgtgactgaatgtaaggaagatcagtttcggtgcaaaaataaagcccactgtattccaattagatggctgtgtgatggaattcatgactgtgtggatggcagtgatgaagagaactgtgaaagaggaggaaatatatgtagagctgatgagttcctttgcaataattctctctgcaaactacatttctgggtgtgtgatggagaggacgactgtggagacaactctgatgaagcccctgatatgtgtgtcaaatttctttgtccatccacgagacctcacagatgcagaaataacagaatatgcctacagtcggagcaaatgtgcaatgggattgatgaatgcggtgacaattcagatgaagatcactgtggtggtaagctgacatataaagcaaggccttgtaaaaaggatgagtttgcttgtagtaataaaaaatgcatccctatggatctccagtgtgatcgacttgatgactgcggagatggttcagatgagcaaggatgcagaatagctcctactgaatatacctgtgaagataatgtgaatccatgtggagatgatgcatattgtaatcaaataaaaacatctgttttctgtcgctgtaagcctggatttcagagaaacatgaaaaacagacaatgtgaagaccttaatgaatgtttggtgtttggcacatgttcccatcaatgtataaatgtggaaggatcatataaatgtgtgtgtgaccagaattttcaagaaagaaataacacctgcatagcagaaggctctgaagatcaagttctctacattgctaatgacactgatatcctgggttttatatatccattcaactacagtggcgatcatcaacaaatttctcatattgaacataattcaagaataacagggatggatgtatattatcaaagagatatgattatttggagtactcagtttaatccaggcggaattttctacaaaaggatccatggcagagaaaaaaggcaagcaaacagtggcttgatttgtcctgaatttaaaaggcccagggacattgcagttgactgggtggctggaaacatttactggactgatcattctagaatgcattggttcagttactacactactcactggaccagtctgaggtactctatcaacgtagggcagctgaatggccccaactgcaccagactcttaacaaatatggctggagaaccctatgctattgcagtaaatcctaaaagagggatgatgtactggactgttgttggggatcattcccatatagaagaagcagccatggatggtacactgagaaggattttagtacaaaagaacttacagagacccacaggtttggctgtggattattttagtgaacgcatatattgggctgactttgagctctccatcattggcagtgttctgtatgatggctctaattcagtagtctctgtcagcagcaaacaaggtttattacatccacataggatcgatatctttgaagattatatatatggagcaggacctaaaaatggtgtatttcgagttcaaaaatttggccatggttcagtagagtacttagctttaaatattgataaaacaaaaggtgttttgatatctcatcgttataaacaactagatttacccaatccatgcttggatttagcatgcgaatttctttgcttgctaaatccttctggggccacttgtgtgtgtccagaaggaaaatatttgattaatggcacctgcaatgatgacagcctgttagatgattcatgtaagttaacttgtgaaaatggaggaagatgcattttaaatgagaaaggtgatttgaggtgtcactgttggcccagttattcaggagaaagatgtgaagtcaaccactgtagcaactactgccagaatggaggaacttgcgtaccatcagttctagggagacccacctgcagctgtgcactgggtttcactgggccaaactgtggtaagacagtctgtgaggatttttgtcaaaatggaggaacctgcattgtgactgctggaaaccagccttactgccactgccagccggaatacaccggagacagatgtcagtactacgtgtgccaccactattgtgtgaattctgaatcatgtaccattggggatgatggaagtgttgaatgtgtctgtccaacgcgctatgaaggaccaaaatgtgaggttgacaagtgtgtaaggtgccatggggggcactgcattataaataaagacagtgaagatatattttgcaactgcactaatggaaagattgcctctagctgtcagttatgtgatggctactgttacaatggtggcacatgccagctggaccccgagacaaatgtacctgtgtgtctatgctccaccaactggtcaggcacacagtgtgaaaggccagccccaaagagcagcaagtctgatcatatcagcacaagaagcattgccatcattgtgcctctcgtcctcttggtgactttgataaccaccttagtaattggtttagtgctttgtaaaagaaaaagaaggacaaaaacaattagaagacaacctattatcaatggaggaataaatgtagaaattggcaatccatcttataacatgtatgaggtagatcatgatcacaacgatggaggtcttttagatcctggctttatgatagacccaacaaaggccaggtacatagggggaggacccagtgctttcaagcttccacacacagcgccgcccatctacctaaactctgatttgaaaggaccactaactgctgggccaacaaattactccaatccggtatatgcaaaattatatatggatgggcaaaactgtcgaaactccttaggaagtgttgatgaaaggaaagaactgcttccaaagaaaatagaaattggtataagagagacagtggcataatcagtgatatcttttatatgctgtataaatgtataaaatataaggattacttttgtatgttccaacagtattatacttgttttggcatcagcattacctctttctttatctttttcctggttaattgttttctgagttttttgggttttattttttgctgatgactattgattgaccatttgtatggtatttttatgaaaaagaactgcactacagtacaatttacaacaatgctgctgatatgacacacctttgaatttgttaaaattaaaaacaacgtattcctttgtagtgtgaatatgagcaatctattttatatgaacttttttggttgtacttaatcaacgaggagaatctctgcacttttccattatacggtttgaaggctgtaatacagtgtcatattatttttctgtttaaattgatggaaaaatgattgaatggtcaactctcttctttgtgcccataaagatcgattcagactctgctgaaaatatatagctctcacaagttcagcatcacctgctttgaaattagccttagattgccaaccaatagatgagaattttgaggaaaaaaattaaaaatatgtaaaattaataatttgcatgaacacagatgactacattttccaaaacttagtggactctatgtgatgtactaaatgtatacaccttgtaagcaatagttatatttaggtggtagaacatagcaaaaatataaccgaaagttggccgactgcacttgctatggaataagaccttttattctccctcagtctcgagataaatagccagcctagagcacaacagggcattgggtacttgcatcttaggtatttcttcccagtcacatccattttgtggaagattaacccaaccccttacactacactgaacactaaagaataatatataagcacacaaattggtgacagaatttcaattacgtgaacgcatcctctttgctaggtcaaaaaacaaagggcaaagcagacattttagtatacagagtgattggcaaatattttcaagatttaatatgagcaacccattatttgccctatccaaaatatattcaagggccttccaagttgtagaagaacaatgatcttcccataatcaaaagtggagagtcgaaatgctgtgccagttgctctggtattcaggtttctctgggttttacagaacgcatggaccccattcacgtttggtttgtttatcttcaaatttgagttgaaacgagtgcgatttatttaagttgtatataaaaataaaaggatagcatttttatacaaatatctttaaaggcacaaaagatttattcacaagttttggagggctttttgttcctctgatagacatgactgacttttagctgtcataatgtattaacctaacagatgaaatatgttaaatatgtggttgctctttatccctttgtacaagcattaaaaaaactgctgttttataagaagactttttgttgtactatgtgcatgcatactacctatttctaaactttgccatattgaggcctttataaactattgatttatgtaatactagtgcaattttgcttgaacaatgttatgcatatcataaactttttcaggttcttgtttaagtacattttttaaattgaacagtatttttcattttggttataatatagtcattttgcctatgtttctacaatgaagtgttaaatactttataaaaaattgttgactgacttatttaaatgaaattctacat

SEQ ID NO: 2301 - DNA, 1489 bp, Homo sapiens
  source 1..1489: mol_type = genomic DNA
cagcctggcccttatctgcactgggccagcatcctccggccgctgcgccgccaggggtgagagggaggaaaccgggccgccgggggcggggagaaggcgggccggcccgggagccgctcactttccctgggggggacctacgcggagacctcggctatcctggccttccgaggcccacgaggaggcgcggcccaacgccggggcctggagcattgaggccggaccctcgcgagacagcagagcctggcctgacgctggaaaccacaccctggcccagactgccagccctgacgggacagagccagggcactcaccaggctgcaagaacagtgctggggtgagtacccccacgtcggggtccatgtgcccgcctcaggcacaggcagaggtgggccccaccatgactgagaaggcagagatggtgtgtgcccccagcccagcgcctgccccaccccctaagcctgcctcgcctgggcccccgcaggtggaggaggtgggccaccgaggaggctcctcgccccccaggctgccacctggtgtaccagtgatcagcctgggccacagcaggcccccaggggtagccatgcccaccacagagctgggcactctgcggcccccgctgctgcaactctccaccctgggaactgccccgcccactttggccctgcactaccaccctcaccccttcctcaacagtgtctacattgggccagcaggaccttttagcatcttccctagcagccggttgaagcggagaccaagccactgtgagctggacctggctgaggggcaccagccccagaaggtggcccggcgcgtgttcaccaacagccgggagcgctggcggcagcagaacgttaacggcgccttcgccgagctgaggaagctgctgccgacgcacccgcccgaccggaagctgagcaagaacgaggtgctccgcctagccatgaagtacatcggcttcctggtgcggctgctgcgcgaccaagccgcagctctggccgcaggccccacccctcccgggcctcgcaaacggccggtgcaccgggtcccagacgacggcgcccgccggggatccggacgcagggccgaggcggcagcgcgctcgcagcccgcgcccccggccgaccccgacggcagccccggtggagcggcccggcccatcaagatggagcaaaccgctttgagcccagaggtgcggtgaccgcacgcggcagcacctctgagccggagggcaccagggactcggcccagggccgtcaaggaaagggcagtggacgtgctgcgcatgttcgggagcgaactcccccgaagaaggaccagtgaagacgtcaggggcaaggtctcgggggtccggaagggtgatcatcgacccccaagggacccgcagacccttaaaaaaatcacccacaaccctctggaagtggccttgcccggtccccttcccaggggcgaggtcggcaaagcaacatggcagagcagtcatagg

SEQ ID NO: 2302 - DNA, 2166 bp, Homo sapiens
  source 1..2166: mol_type = genomic DNA
gagggctcagagggagcaccggtttggagctgggaccccctattttagcttttctgtggctggtgaatggggatcccaggatctcacaatctcagggaccatgggctgtggctgcagctcacacccggaagatgactggatggaaaacatcgatgtgtgtgagaactgccattatcccatagtcccactggatggcaagggcacgctgctcatccgaaatggctctgaggtgcgggacccactggttacctacgaaggctccaatccgccggcttccccactgcaagacaacctggttatcgctctgcacagctatgagccctctcacgacggagatctgggctttgagaagggggaacagctccgcatcctggagcagagcggcgagtggtggaaggcgcagtccctgaccacgggccaggaaggcttcatccccttcaattttgtggccaaagcgaacagcctggagcccgaaccctggttcttcaagaacctgagccgcaaggacgcggagcggcagctcctggcgcccgggaacactcacggctccttcctcatccgggagagcgagagcaccgcgggatcgttttcactgtcggtccgggacttcgaccagaaccagggagaggtggtgaaacattacaagatccgtaatctggacaacggtggcttctacatctcccctcgaatcacttttcccggcctgcatgaactggtccgccattacaccaatgcttcagatgggctgtgcacacggttgagccgcccctgccagacccagaagccccagaagccgtggtgggaggacgagtgggaggttcccagggagacgctgaagctggtggagcggctgggggctggacagttcggggaggtgtggatggggtactacaacgggcacacgaaggtggcggtgaagagcctgaagcagggcagcatgtccccggacgccttcctggccgaggccaacctcatgaagcagctgcaacaccagcggctggttcggctctacgctgtggtcacccaggagcccatctacatcatcactgaatacatggagaatgacacacttctagactcccagttggaggagaaaggtctgggggcctccccctggggcaacttgggccagcaactcttgcttctgcccacagggagtctagtggattttctcaagaccccttcaggcatcaagttgaccatcaacaaactcctggacatggcagcccaaattgcagaaggcatggcattcattgaagagcggaattatattcatcgtgaccttcgggctgccaacattctggtgtctgacaccctgagctgcaagattgcagactttggcctagcacgcctcattgaggacaacgagtacacagccagggagggggccaagtttcccattaagtggacagcgccagaagccattaactacgggacattcaccatcaagtcagatgtgtggtcttttgggatcctgctgacggaaattgtcacccacggccgcatcccttacccagggatgaccaacccggaggtgattcagaacctggagcgaggctaccgcatggtgcgccctgacaactgtccagaggagctgtaccaactcatgaggctgtgctggaaggagcgcccagaggaccggcccacctttgactacctgcgcagtgtgctggaggacttcttcacggccacagagggccagtaccagcctcagccttgagaggccttgagaggccctggggttctccccctttctctccagcctgacttggggagatggagttcttgtgccatagtcacatggcctatgcacatatggactctgcacatgaatcccacccacatgtgacacatatgcaccttgtgtctgtacacgtgtcctgtagttgcgtggactctgcacatgtcttgtacatgtgtagcctgtgcatgtatgtcttggacactgtacaaggtacccctttctggctctcccatttcctgagaccacagagagaggggagaagcctgggattgacagaagcttctgcccacctacttttctttcctcagatcatccagaagttcctcaagggccaggactttatctaatacctctgtgtgctcctccttggtgcctggcctggcacacatcaggagttcaataaatgtctgttgatgactgtt

SEQ ID NO: 2303 - DNA, 2117 bp, Homo sapiens
  source 1..2117: mol_type = genomic DNA
aagtcagggtgggacgtgggcgcggggagacaggtggtggctacgacggcgaagggagctgagactgtccaggcagccaggttaggccaggaggaccatgtgaatggggccagagggctcccgggctgggcagggaccatgggctgtggctgcagctcacacccggaagatgactggatggaaaacatcgatgtgtgtgagaactgccattatcccatagtcccactggatggcaagggcacgctgctcatccgaaatggctctgaggtgcgggacccactggttacctacgaaggctccaatccgccggcttccccactgcaagacaacctggttatcgctctgcacagctatgagccctctcacgacggagatctgggctttgagaagggggaacagctccgcatcctggagcagagcggcgagtggtggaaggcgcagtccctgaccacgggccaggaaggcttcatccccttcaattttgtggccaaagcgaacagcctggagcccgaaccctggttcttcaagaacctgagccgcaaggacgcggagcggcagctcctggcgcccgggaacactcacggctccttcctcatccgggagagcgagagcaccgcgggatcgttttcactgtcggtccgggacttcgaccagaaccagggagaggtggtgaaacattacaagatccgtaatctggacaacggtggcttctacatctcccctcgaatcacttttcccggcctgcatgaactggtccgccattacaccaatgcttcagatgggctgtgcacacggttgagccgcccctgccagacccagaagccccagaagccgtggtgggaggacgagtgggaggttcccagggagacgctgaagctggtggagcggctgggggctggacagttcggggaggtgtggatggggtactacaacgggcacacgaaggtggcggtgaagagcctgaagcagggcagcatgtccccggacgccttcctggccgaggccaacctcatgaagcagctgcaacaccagcggctggttcggctctacgctgtggtcacccaggagcccatctacatcatcactgaatacatggagaatgggagtctagtggattttctcaagaccccttcaggcatcaagttgaccatcaacaaactcctggacatggcagcccaaattgcagaaggcatggcattcattgaagagcggaattatattcatcgtgaccttcgggctgccaacattctggtgtctgacaccctgagctgcaagattgcagactttggcctagcacgcctcattgaggacaacgagtacacagccagggagggggccaagtttcccattaagtggacagcgccagaagccattaactacgggacattcaccatcaagtcagatgtgtggtcttttgggatcctgctgacggaaattgtcacccacggccgcatcccttacccagggatgaccaacccggaggtgattcagaacctggagcgaggctaccgcatggtgcgccctgacaactgtccagaggagctgtaccaactcatgaggctgtgctggaaggagcgcccagaggaccggcccacctttgactacctgcgcagtgtgctggaggacttcttcacggccacagagggccagtaccagcctcagccttgagaggccttgagaggccctggggttctccccctttctctccagcctgacttggggagatggagttcttgtgccatagtcacatggcctatgcacatatggactctgcacatgaatcccacccacatgtgacacatatgcaccttgtgtctgtacacgtgtcctgtagttgcgtggactctgcacatgtcttgtacatgtgtagcctgtgcatgtatgtcttggacactgtacaaggtacccctttctggctctcccatttcctgagaccacagagagaggggagaagcctgggattgacagaagcttctgcccacctacttttctttcctcagatcatccagaagttcctcaagggccaggactttatctaatacctctgtgtgctcctccttggtgcctggcctggcacacatcaggagttcaataaatgtctgttgatgactgttgta

SEQ ID NO: 2304 - DNA, 1551 bp, Homo sapiens
  source 1..1551: mol_type = genomic DNA
atgggctgtggctgcagctcacacccggaagatgactggatggaaaacatcgatgtgtgtgagaactgccattatcccatagtcccactggatggcaagggcacgctgctcatccgaaatggctctgaggtgcgggacccactggttacctacgaaggctccaatccgccggcttccccactgcaaggtgaccccaggcagcagggcctgaaagacaaggcctgcggatccctggctgttggcttccacctctcccccacctactttctccccggtcttgccttccttgtcccccaccctgtaactccaggcttcctgccgatcccagctcggttctccctgatgccccttgtctttacagacaacctggttatcgctctgcacagctatgagccctctcacgacggagatctgggctttgagaagggggaacagctccgcatcctggagcagagcggcgagtggtggaaggcgcagtccctgaccacgggccaggaaggcttcatccccttcaattttgtggccaaagcgaacagcctggagcccgaaccctggttcttcaagaacctgagccgcaaggacgcggagcggcagctcctggcgcccgggaacactcacggctccttcctcatccgggagagcgagagcaccgcgggatcgttttcactgtcggtccgggacttcgaccagaaccagggagaggtggtgaaacattacaagatccgtaatctggacaacggtggcttctacatctcccctcgaatcacttttcccggcctgcatgaactggtccgccattacaccaggtactacaacgggcacacgaaggtggcggtgaagagcctgaagcagggcagcatgtccccggacgccttcctggccgaggccaacctcatgaagcagctgcaacaccagcggctggttcggctctacgctgtggtcacccaggagcccatctacatcatcactgaatacatggagaatgggagtctagtggattttctcaagaccccttcaggcatcaagttgaccatcaacaaactcctggacatggcagcccaaattgcagaaggcatggcattcattgaagagcggaattatattcatcgtgaccttcgggctgccaacattctggtgtctgacaccctgagctgcaagattgcagactttggcctagcacgcctcattgaggacaacgagtacacagccagggagggggccaagtttcccattaagtggacagcgccagaagccattaactacgggacattcaccatcaagtcagatgtgtggtcttttgggatcctgctgacggaaattgtcacccacggccgcatcccttacccagggatgaccaacccggaggtgattcagaacctggagcgaggctaccgcatggtgcgccctgacaactgtccagaggagctgtaccaactcatgaggctgtgctggaaggagcgcccagaggaccggcccacctttgactacctgcgcagtgtgctggaggacttcttcacggccacagagggccagtaccagcctcagccttga

SEQ ID NO: 2305 - DNA, 1914 bp, Homo sapiens
  source 1..1914: mol_type = genomic DNA
gagacaggtggtggctacgacggcgaagggagctgagactgtccaggcagccaggttaggccaggaggaccatgtgaatggggccagagcacagctgctcatccgaaatggctctgaggtgcgggacccactggttacctacgaaggctccaatccgccggcttccccactgcaagacaacctggttatcgctctgcacagctatgagccctctcacgacggagatctgggctttgagaagggggaacagctccgcatcctggagcagagcggcgagtggtggaaggcgcagtccctgaccacgggccaggaaggcttcatccccttcaattttgtggccaaagcgaacagcctggagcccgaaccctggttcttcaagaacctgagccgcaaggacgcggagcgagagcaccgcgggatcgttttcactgtcggtccgggacttcgaccagaaccagggagaggtggtgaaacattacaagatccgtaatctggacaacggtggcttctacatctcccctcgaatcacttttcccggcctgcatgaactggtccgccattacaccaatgcttcagatgggctgtgcacacggttgagccgcccctgccagacccagaagccccagaagccgtggtgggaggacgagtgggaggttcccagggagacgctgaagctggtggagcggctgggggctggacagttcggggaggtgtggatggggtactacaacgggcacacgaaggtggcggtgaagagcctgaagcagggcagcatgtccccggacgccttcctggccgaggccaacctcatgaagcagctgcaacaccagcggctggttcggctctacgctgtggtcacccaggagcccatctacatcatcactgaatacatggagaatgggagtctagtggattttctcaagaccccttcaggcatcaagttgaccatcaacaaactcctggacatggcagcccaaattgcagaaggcatggcattcattgaagagcggaattatattcatcgtgaccttcgggctgccaacattctggtgtctgacaccctgagctgcaagattgcagactttggcctagcacgcctcattgaggacaacgagtacacagccagggagggggccaagtttcccattaagtggacagcgccagaagccattaactacgggacattcaccatcaagtcagatgtgtggtcttttgggatcctgctgacggaaattgtcacccacggccgcatcccttacccagggatgaccaacccggaggtgattcagaacctggagcgaggctaccgcatggtgcgccctgacaactgtccagaggagctgtaccaactcatgaggctgtgctggaaggagcgcccagaggaccggcccacctttgactacctgcgcagtgtgctggaggacttcttcacggccacagagggccagtaccagcctcagccttgagaggccttgagaggccctggggttctccccctttctctccagcctgacttggggagatggagttcttgtgccatagtcacatggcctatgcacatatggactctgcacatgaatcccacccacatgtgacacatatgcaccttgtgtctgtacacgtgtcctgtagttgcgtggactctgcacatgtcttgtacatgtgtagcctgtgcatgtatgtcttggacactgtacaaggtacccctttctggctctcccatttcctgagaccacagagagaggggagaagcctgggattgacagaagcttctgcccacctacttttctttcctcagatcatccagaagttcctcaagggccaggactttatctaatacctctgtgtgctcctccttggtgcctggcctggcacacatcaggagttcaataaatgtctgttgatgactgttgt

SEQ ID NO: 2306 - DNA, 2059 bp, Homo sapiens
  source 1..2059: mol_type = genomic DNA
atggggatcccaggatctcacaatctcaggtacttttggaactttccagggcaaggccccattatatctgatgttgggggagcagatcttgggggagccccttcagccccctcttccattccctcagggaccatgggctgtggctgcagctcacacccggaagatgactggatggaaaacatcgatgtgtgtgagaactgccattatcccatagtcccactggatggcaagggcacgctgctcatccgaaatggctctgaggtgcgggacccactggttacctacgaaggctccaatccgccggcttccccactgcaagacaacctggttatcgctctgcacagctatgagccctctcacgacggagatctgggctttgagaagggggaacagctccgcatcctggagcagagcggcgagtggtggaaggcgcagtccctgaccacgggccaggaaggcttcatccccttcaattttgtggccaaagcgaacagcctggagcccgaaccctggttcttcaagaacctgagccgcaaggacgcggagcggcagctcctggcgcccgggaacactcacggctccttcctcatccgggagagcgagagcaccgcgggatcgttttcactgtcggtccgggacttcgaccagaaccagggagaggtggtgaaacattacaagatccgtaatctggacaacggtggcttctacatctcccctcgaatcacttttcccggcctgcatgaactggtccgccattacaccaatgcttcagatgggctgtgcacacggttgagccgcccctgccagacccagaagccccagaagccgtggtgggaggacgagtgggaggttcccagggagacgctgaagctggtggagcggctgggggctggacagttcggggaggtgtggatggggtactacaacgggcacacgaaggtggcggtgaagagcctgaagcagggcagcatgtccccggacgccttcctggccgaggccaacctcatgaagcagctgcaacaccagcggctggttcggctctacgctgtggtcacccaggagcccatctacatcatcactgaatacatggagaatgggagtctagtggattttctcaagaccccttcaggcatcaagttgaccatcaacaaactcctggacatggcagcccaaattgcagaaggcatggcattcattgaagagcggaattatattcatcgtgaccttcgggctgccaacattctggtgtctgacaccctgagctgcaagattgcagactttggcctagcacgcctcattgaggacaacgagtacacagccagggagggggccaagtttcccattaagtggacagcgccagaagccattaactacgggacattcacccacggccgcatcccttacccagggatgaccaacccggaggtgattcagaacctggagcgaggctaccgcatggtgcgccctgacaactgtccagaggagctgtaccaactcatgaggctgtgctggaaggagcgcccagaggaccggcccacctttgactacctgcgcagtgtgctggaggacttcttcacggccacagagggccagtaccagcctcagccttgagaggccttgagaggccctggggttctccccctttctctccagcctgacttggggagatggagttcttgtgccatagtcacatggcctatgcacatatggactctgcacatgaatcccacccacatgtgacacatatgcaccttgtgtctgtacacgtgtcctgtagttgcgtggactctgcacatgtcttgtacatgtgtagcctgtgcatgtatgtcttggacactgtacaaggtacccctttctggctctcccatttcctgagaccacagagagaggggagaagcctgggattgacagaagcttctgcccacctacttttctttcctcagatcatccagaagttcctcaagggccaggactttatctaatacctctgtgtgctcctccttggtgcctggcctggcacacatcaggagttcaataaatgtctgttgatgactgttgt

SEQ ID NO: 2307 - DNA, 3068 bp, Homo sapiens
  source 1..3068: mol_type = genomic DNA
aagatctaaaacggacatctccagcgtgggtggctcctttttctttttctttttttcccacccttcaggaagtggacgtttcgttatcttctgatccttgcaccttcttttggggcaaacggggcccttctgcccagatcccctctcttttctcggaaaacaaactactaagtcggcatccggggtaactacagtggagagggtttccgcggagacgcgccgccggaccctcctctgcactttggggaggcgtgctccctccagaaccggcgttctccgcgcgcaaatcccggcgacgcggggtcgcggggtggccgccggggcagcctcgtctagcgcgcgccgcgcagacgcccccggagtcgccagctaccgcagccctcgccgcccagtgcccttcggcctcgggggcgggcgcctgcgtcggtctccgcgaagcgggaaagcgcggcggccgccgggattcgggcgccgcggcagctgctccggctgccggccggcggccccgcgctcgcccgccccgcttccgcccgctgtcctgctgcacgaacccttccaactctcctttcctcccccacccttgagttacccctctgtctttcctgctgttgcgcgggtgctcccacagcggagcggagattacagagccgccgggatgccccaactctccggaggaggtggcggcggcgggggggacccggaactctgcgccacggacgagatgatccccttcaaggacgagggcgatcctcagaaggaaaagatcttcgccgagatcagtcatcccgaagaggaaggcgatttagctgacatcaagtcttccttggtgaacgagtctgaaatcatcccggccagcaacggacacgaggtggccagacaagcacaaacctctcaggagccctaccacgacaaggccagagaacaccccgatgacggaaagcatccagatggaggcctctacaacaagggaccctcctactcgagttattccgggtacataatgatgccaaatatgaataacgacccatacatgtcaaatggatctctttctccacccatcccgagaacatcaaataaagtgcccgtggtgcagccatcccatgcggtccatcctctcacccccctcatcacttacagtgacgagcacttttctccaggatcacacccgtcacacatcccatcagatgtcaactccaaacaaggcatgtccagacatcctccagctcctgatatccctactttttatcccttgtctccgggtggtgttggacagatcaccccacctcttggctggcaaggtcagcctgtatatcccatcacgggtggattcaggcaaccctacccatcctcactgtcagtcgacacttccatgtccaggttttcccatcatatgattcccggtcctcctggtccccacacaactggcatccctcatccagctattgtaacacctcaggtcaaacaggaacatccccacactgacagtgacctaatgcacgtgaagcctcagcatgaacagagaaaggagcaggagccaaaaagacctcacattaagaagcctctgaatgcttttatgttatacatgaaagaaatgagagcgaatgtcgttgctgagtgtactctaaaagaaagtgcagctatcaaccagattcttggcagaaggtggcatgccctctcccgtgaagagcaggctaaatattatgaattagcacggaaagaaagacagctacatatgcagctttatccaggctggtctgcaagagacaattatggtaagaaaaagaagaggaagagagagaaactacaggaatctgcatcaggtacaggtccaagaatgacagctgcctacatctgaaacatggtggaaaacgaagctcattcccaacgtgcaaagccaaggcagcgaccccaggacctcttctggagatggaagcttgttgaaaacccagactgtctccacggcctgcccagtcgaccccaaaggaacactgacatcaattttaccctgaggtcactgctagagacgctgatccataaagacaatcactgccaacccctctttcgtctactgcaagagccaagttccaaaataaagcataaaaaggttttttaaaaggaaatgtaaaagcacatgagaatgctagcaggctgtggggcagctgagcagcttttctcccctcatatctgcgtgcacttcccagagcatcttgcatccaaacctgtaacctttcggcaaggacggtaacttggctgcatttgcctgtcatgcgcaactggagccagcaaccagcacatccatcagcaccccagtggaggagttcatggaagagttccctctttgtttctgcttcatttttctttcttttcttttctcctaaagcttttatttaacagtgcaaaaggatcgtttttttttgcttttttaaacttgaatttttttaatttacactttttagttttaattttcttgtatattttgctagctatgagcttttaaataaaattgaaagttctggaaaagtttgaaataatgacataaaaagaagccttctttttctgagacagcttgtctggtaagtggcttctctgtgaattgcctgtaacacatagtggcttctccgcccttgtaaggtgttcagtagagctaaataaatgtaatagccaaacccactctgttggtagcaattggcagccctatttcagtttattttttcttctgttttcttcttttctttttttaaacagtaaaccttaacagatgcgttcagcagactggtttgcagtgaattttcatttctttccttatcacccccttgttgtaaaaagcccagcacttgaattgttattactttaaatgttctgtatttgtatctgtttttattagccaattagtgggattttatgccagttgttaaaatgagcattgatgtacccattttttaaaaaagcaaggcacagcctttgcccaaaactgtcatcctaacgtttgtcattccagtttgagttaatgtgctgagcatttttttaaaagaagctttgtaataaaacatttttaaaaattgtcattt

SEQ ID NO: 2308 - DNA, 3477 bp, Homo sapiens
  source 1..3477: mol_type = genomic DNA
agcgccggcgaggcgcgggaggaggagaagcagtggggaggcgcagccgctcacctgcggggcagggcgcggaggagggacccgggctgcgcgctctcgggccgaggaaccaggacgcgcccggagcctcgcacgcggccaagctcggggcgtcccctcccctcggccgggcgaactcaaggggcgcagctctttgctttgacagagctggccggcggaggcgtgcagagcggcgagccggcgagccaggctgagaaactcgagccgggaacaaagaggggtcggactgagtgtgtgtgtcggctcgagctccgggcagaggcatttgggcccgaggcccccgctgtgactccccgagactccgcagtgccctccactgcggagtccccgcgcttgccggcaaaaactttattcttggcaaacttctctttctcttcccctcctcctcggcccccatcttctgctcctcctccttctctagcagattaaatgagcctcgagaagaaaaaccgaagcgaaagggaagaaaataagaagatctaaaacggacatctccagcgtgggtggctcctttttctttttctttttttcccacccttcaggaagtggacgtttcgttatcttctgatccttgcaccttcttttggggcaaacggggcccttctgcccagatcccctctcttttctcggaaaacaaactactaagtcggcatccggggtaactacagtggagagggtttccgcggagacgcgccgccggaccctcctctgcactttggggaggcgtgctccctccagaaccggcgttctccgcgcgcaaatcccggcgacgcggggtcgcggggtggccgccggggcagcctcgtctagcgcgcgccgcgcagacgcccccggagtcgccagctaccgcagccctcgccgcccagtgcccttcggcctcgggggcgggcgcctgcgtcggtctccgcgaagcgggaaagcgcggcggccgccgggattcgggcgccgcggcagctgctccggctgccggccggcggccccgcgctcgcccgccccgcttccgcccgctgtcctgctgcacgaacccttccaactctcctttcctcccccacccttgagttacccctctgtctttcctgctgttgcgcgggtgctcccacagcggagcggagattacagagccgccgggatgccccaactctccggaggaggtggcggcggcgggggggacccggaactctgcgccacggacgagatgatccccttcaaggacgagggcgatcctcagaaggaaaagatcttcgccgagatcagtcatcccgaagaggaaggcgatttagctgacatcaagtcttccttggtgaacgagtctgaaatcatcccggccagcaacggacacgaggtggccagacaagcacaaacctctcaggagccctaccacgacaaggccagagaacaccccgatgacggaaagcatccagatggaggcctctacaacaagggaccctcctactcgagttattccgggtacataatgatgccaaatatgaataacgacccatacatgtcaaatggatctctttctccacccatcccgagaacatcaaataaagtgcccgtggtgcagccatcccatgcggtccatcctctcacccccctcatcacttacagtgacgagcacttttctccaggatcacacccgtcacacatcccatcagatgtcaactccaaacaaggcatgtccagacatcctccagctcctgatatccctactttttatcccttgtctccgggtggtgttggacagatcaccccacctcttggctggttttcccatcatatgattcccggtcctcctggtccccacacaactggcatccctcatccagctattgtaacacctcaggtcaaacaggaacatccccacactgacagtgacctaatgcacgtgaagcctcagcatgaacagagaaaggagcaggagccaaaaagacctcacattaagaagcctctgaatgcttttatgttatacatgaaagaaatgagagcgaatgtcgttgctgagtgtactctaaaagaaagtgcagctatcaaccagattcttggcagaaggtggcatgccctctcccgtgaagagcaggctaaatattatgaattagcacggaaagaaagacagctacatatgcagctttatccaggctggtctgcaagagacaattatggtaagaaaaagaagaggaagagagagaaactacaggaatctgcatcaggtggaaaacgaagctcattcccaacgtgcaaagccaaggcagcgaccccaggacctcttctggagatggaagcttgttgaaaacccagactgtctccacggcctgcccagtcgaccccaaaggaacactgacatcaattttaccctgaggtcactgctagagacgctgatccataaagacaatcactgccaacccctctttcgtctactgcaagagccaagttccaaaataaagcataaaaaggttttttaaaaggaaatgtaaaagcacatgagaatgctagcaggctgtggggcagctgagcagcttttctcccctcatatctgcgtgcacttcccagagcatcttgcatccaaacctgtaacctttcggcaaggacggtaacttggctgcatttgcctgtcatgcgcaactggagccagcaaccagcacatccatcagcaccccagtggaggagttcatggaagagttccctctttgtttctgcttcatttttctttcttttcttttctcctaaagcttttatttaacagtgcaaaaggatcgtttttttttgcttttttaaacttgaatttttttaatttacactttttagttttaattttcttgtatattttgctagctatgagcttttaaataaaattgaaagttctggaaaagtttgaaataatgacataaaaagaagccttctttttctgagacagcttgtctggtaagtggcttctctgtgaattgcctgtaacacatagtggcttctccgcccttgtaaggtgttcagtagagctaaataaatgtaatagccaaacccactctgttggtagcaattggcagccctatttcagtttattttttcttctgttttcttcttttctttttttaaacagtaaaccttaacagatgcgttcagcagactggtttgcagtgaattttcatttctttccttatcacccccttgttgtaaaaagcccagcacttgaattgttattactttaaatgttctgtatttgtatctgtttttattagccaattagtgggattttatgccagttgttaaaatgagcattgatgtacccattttttaaaaaagcaaggcacagcctttgcccaaaactgtcatcctaacgtttgtcattccagtttgagttaatgtgctgagcatttttttaaaagaagctttgtaataaaacatttttaaaaattgtcattt

SEQ ID NO: 2309 - DNA, 1488 bp, Homo sapiens
  source 1..1488: mol_type = genomic DNA
acagcggagcggagattacagagccgccgggatgccccaactctccggaggaggtggcggcggcgggggggacccggaactctgcgccacggacgagatgatccccttcaaggacgagggcgatcctcagaaggaaaagatcttcgccgagatcagtcatcccgaagaggaaggcgatttagctgacatcaagtcttccttggtgaacgagtctgaaatcatcccggccagcaacggacacgaggtggccagacaagcacaaacctctcaggagccctaccacgacaaggccagagaacaccccgatgacggaaagcatccagatggaggcctctacaacaagggaccctcctactcgagttattccgggtacataatgatgccaaatatgaataacgacccatacatgtcaaatggatctctttctccacccatcccgagaacatcaaataaagtgcccgtggtgcagccatcccatgcggtccatcctctcacccccctcatcacttacagtgacgagcacttttctccaggatcacacccgtcacacatcccatcagatgtcaactccaaacaaggcatgtccagacatcctccagctcctgatatccctactttttatcccttgtctccgggtggtgttggacagatcaccccacctcttggctggttttcccatcatatgattcccggtcctcctggtccccacacaactggcatccctcatccagctattgtaacacctcaggtcaaacaggaacatccccacactgacagtgacctaatgcacgtgaagcctcagcatgaacagagaaaggagcaggagccaaaaagacctcacattaagaagcctctgaatgcttttatgttatacatgaaagaaatgagagcgaatgtcgttgctgagtgtactctaaaagaaagtgcagctatcaaccagattcttggcagaaggtggcatgccctctcccgtgaagagcaggctaaatattatgaattagcacggaaagaaagacagctacatatgcagctttatccaggctggtctgcaagagacaattatggtaagaaaaagaagaggaagagagagaaactacaggaatctgcatcaggtacaggtccaagaatgacagctgcctacatctgaaacatggtggaaaacgaagctcattcccaacgtgcaaagccaaggcagcgaccccaggacctcttctggagatggaagcttgttgaaaacccagactgtctccacggcctgcccagtcgaccccaaaggaacactgacatcaattttaccctgaggtcactgctagagacgctgatccataaagacaatcactgccaacccctctttcgtctactgcaagagccaagttccaaaataaagcataaaaaggttttttaaaaggaaatgtaaaagcacatgagaatgctagcaggctgtggggcagctgagcagcttttctcccctcatatctgcgtgcactt

SEQ ID NO: 2310 - DNA, 1472 bp, Homo sapiens
  source 1..1472: mol_type = genomic DNA
actagtcctgcagggtggaaggcgctttatcgggtcttctggcccgctgcgggcgatagagctggtaacctgagtagagtaaatagagacacgtgggtgctggctagagaaagcgcggagcagggccgcgctggagggctgtttgaagcctagtccagagctggtctagggggcggatggaccctgatacccgacactccactggtcacccttgttccacaactgggaaaccctctggaggaaatccggtagaaaagtcctgacacccgaatgatttaaccaacgccttttccctccaaagaaacttggaggatatacctttttttccttaaatggcatctttctacccccaaaaagaaagtgtgtggttttgagggcggggacattttgggttttaaacagcgcgtttaagaacacctcagatctgccttctctatcccaatggcagaggtggccagacaagcacaaacctctcaggagccctaccacgacaaggccagagaacaccccgatgacggaaagcatccagatggaggcctctacaacaagggaccctcctactcgagttattccgggtacataatgatgccaaatatgaataacgacccatacatgtcaaatggatctctttctccacccatcccgagaacatcaaataaagtgcccgtggtgcagccatcccatgcggtccatcctctcacccccctcatcacttacagtgacgagcacttttctccaggatcacacccgtcacacatcccatcagatgtcaactccaaacaaggcatgtccagacatcctccagctcctgatatccctactttttatcccttgtctccgggtggtgttggacagatcaccccacctcttggctggttttcccatcatatgattcccggtcctcctggtccccacacaactggcatccctcatccagctattgtaacacctcaggtcaaacaggaacatccccacactgacagtgacctaatgcacgtgaagcctcagcatgaacagagaaaggagcaggagccaaaaagacctcacattaagaagcctctgaatgcttttatgttatacatgaaagaaatgagagcgaatgtcgttgctgagtgtactctaaaagaaagtgcagctatcaaccagattcttggcagaaggtggcatgccctctcccgtgaagagcaggctaaatattatgaattagcacggaaagaaagacagctacatatgcagctttatccaggctggtctgcaagagacaattatggtaagaaaaagaagaggaagagagagaaactacaggaatctgcatcaggtacaggtccaagaatgacagctgcctacatctgaaacatggtggaaaacgaagctcattcccaacgtgcaaagccaaggcagcgaccccaggacctcttctggagatggaagcttgttgaaaacccagactgtctccacggcctgcccagtcg

SEQ ID NO: 2311 - DNA, 2504 bp, Homo sapiens
  source 1..2504: mol_type = genomic DNA
aaagggggagttgtaagagaggcggtatcaacagcctgctgatgaaagaggcgactctgcagaaagaggcaacttgacatatcaggactttaaccgctgtagaaatagctcaggcataccaagcccatgcaaacacagaattgcagaagttcaggagaggcttatcacttccctgagaagaaaaacacattttcagttttgcctgcatcataagagtgagcactccattgctttctttcctggccacactgctacaatccagcactaactatccatgtccagggtaaggatcgagatcgagaagcccacactgccagtgaaaaagctacgtctttactgcataaattagaggaagcaatttcggaacaacggaaccttcaaactataaatactgaattatcgaacacttgccaggcacttcagcagaagacaaggaaactgaagaagctttttagatgaggaatttcctcactatgattccctgtcctgcgcagatgcaattcaacaacctcttcaagaaaaattgaagcagtgttgccacaaactatatggtggtcaagaagcaagaatacatcagacacccctgaccttgaaacatacgtgctggtacacacctctgctggatgccttatctctggatagttttacagcagttccaaccctggaatcaacacctttctcaggtgtagccaaccaaatccacactctgtgtgaaaggcccacatatggagaagtaaaggatggtgctttggatgtaaaaagacaacacaagtgcccaggccccacaagtggccccagcccaggaacgaatctctcaggctgcatcaggatgaatgatgacccaagtatggaagagaatggtgttgaacgcgtgtgtcctgagagcctgctgcagtccagggaatattcctcactaccattacccagacacacttcatcgacagacggtactataacttcaagtgatcctggattagaaattctgaatatggcttcttgtgaccttgacagaaactcgctctgtaagaaagaggaggatacaagatcagcttctcccacgatagaggcccaaggcacaagtccagctcatgataatattgcattccaagactctacgagtaaggataaaaccatattaaatctggaagccaaagaggaaccagaaacaatagaagaacataaaaaagaacatgcttcaggagactctgtggtttcccctcttcctgtaaccactgtgaaatcggttaaccttagacaaagtgagaacacttctgctaatgagaaggaggtggaggcagaatttctcagattatctttgggatttaagtgtgactggtttaccttggagaagagagtgaagcttgaagagaggtcccgtgacttggcagaagaaaatttgaagaaagaaatcactaactgtttaaaactattagagtctttaacacctctgtgtgaagatgacaaccaggcacaggaaatcattaagaagctggagaagagtataaagtttcttagccagtgtgcagcacgagtggccagtagggctgagatgttgggagccatcaatcaggaaagccgggttagtaaagcagttgaagtgatgattcagcacgtagaaaacttgaagaggatgtatgccaaagagcacgctgaattagaagaactgaaacaggttcttctgcagaatgaaaggtctttcaatcctcttgaagatgatgatgactgccaaattaaaaaacgttcagcttctctaaactccaagccatcttctctacgaagagtgactattgcctctttacccagaaatattggaaatgcaggaatggtggctgggatggaaaataatgatcgattcagtagaaggtcaagcagttggcgtattttggggtcaaagcagagtgaacaccgtccctcattacctcgatttattagcacctattcctgggcagatgctgaagaagaaaaatgtgaactaaaaactaaagatgactcagagccatctggagaagaaacagtagaaaggacaaggaagccaagtctttctgaaaagaaaaataatccatcaaagtgggatgtctcttcagtttatgacacaatagcttcctgggcaacaaatctcaagtcctccatcagaaaggctaataaggccctctggctctctattgcattcattgtactgtttgcagctttgatgagcttcctcacaggccaattattccagaagtctgtggatgccgctcccacacagcaagaggactcatggacgtctctagaacatatcttgtggccatttaccagactccgacacaatgggccaccaccagtgtgacagcaggacatcctaatatatggatcttgatttttaagtttcagtatctgaacttcgtaaattagtaacttttagctgggaaagtatagcatgaaaccagaggttctcagaatgactgtaagatagcttacatttcctctttttgcctttatctccccaactaaaatacaatggg

SEQ ID NO: 2312 - DNA, 2208 bp, Homo sapiens
  source 1..2208: mol_type = genomic DNA
tgctttctttcctggccacactgctacaatccagcactaactatccatgtccagggtaaggatcgagatcgagaagcccacactgccagtgaaaaagctacgtctttactgcataaattagaggaagcaatttcggaacaacggaaccttcaaactataaatactgaattatcgaacacttgccaggcacttcagcagaagacaaggaaactgaagaaagcagtgttgccacaaactatatggtggtcaagaagcaagaatacatcagacacccctgaccttgaaacatacgtgctggtacacacctctgctggatgccttatctctggatagttttacagcagttccaaccctggaatcaacacctttctcaggtgtagccaaccaaatccacactctgtgtgaaaggcccacatatggagaagtaaaggatggtgctttggatgtaaaaagacaacacaagtgcccaggccccacaagtggccccagcccaggaacgaatctctcaggctgcatcaggatgaatgatgacccaagtatggaagagaatggtgttgaacgcgtgtgtcctgagagcctgctgcagtccagggaatattcctcactaccattacccagacacacttcatcgacagacggtactataacttcaagtgatcctggattagaaattctgaatatggcttcttgtgaccttgacagaaactcgctctgtaagaaagaggaggatacaagatcagcttctcccacgatagaggcccaaggcacaagtccagctcatgataatattgcattccaagactctacgagtaaggataaaaccatattaaatctggaagccaaagaggaaccagaaacaatagaagaacataaaaaagaacatgcttcaggagactctgtggtttcccctcttcctgtaaccactgtgaaatcggttaaccttagacaaagtgagaacacttctgctaatgagaaggaggtggaggcagaatttctcagattatctttgggatttaagtgtgactggtttaccttggagaagagagtgaagcttgaagagaggtcccgtgacttggcagaagaaaatttgaagaaagaaatcactaactgtttaaaactattagagtctttaacacctctgtgtgaagatgacaaccaggcacaggaaatcattaagaagctggagaagagtataaagtttcttagccagtgtgcagcacgagtggccagtagggctgagatgttgggagccatcaatcaggaaagccgggttagtaaagcagttgaagtgatgattcagcacgtagaaaacttgaagaggatgtatgccaaagagcacgctgaattagaagaactgaaacaggttcttctgcagaatgaaaggtctttcaatcctcttgaagatgatgatgactgccaaattaaaaaacgttcagcttctctaaactccaagccatcttctctacgaagagtgactattgcctctttacccagaaatattggaaatgcaggaatggtggctgggatggaaaataatgatcgattcagtagaaggtcaagcagttggcgtattttggggtcaaagcagagtgaacaccgtccctcattacctcgatttattagcacctattcctgggcagatgctgaagaagaaaaatgtgaactaaaaactaaagatgactcagagccatctggagaagaaacagtagaaaggacaaggaagccaagtctttctgaaaagaaaaataatccatcaaagtgggatgtctcttcagtttatgacacaatagcttcctgggcaacaaatctcaagtcctccatcagaaaggctaataaggccctctggctctctattgcattcattgtactgtttgcagctttgatgagcttcctcacaggccaattattccagaagtctgtggatgccgctcccacacagcaagaggactcatggacgtctctagaacatatcttgtggccatttaccagactccgacacaatgggccaccaccagtgtgacagcaggacatcctaatatatggatcttgatttttaagtttcagtatctgaacttcgtaaattagtaacttttagctgggaaagtatagcatgaaaccagaggttctcagaatgactgtaagatagcttacatttcctctttttgcctttatctccccaactaaaatacaatggggaagaagtctgcc

SEQ ID NO: 2313 - DNA, 2193 bp, Homo sapiens
  source 1..2193: mol_type = genomic DNA
aaacacagaattgcagaagttcaggagaggcttatcacttccctgagaagaaaaacacattttcagttttgcctgcatcataagagtgagcactccattgctttctttcctggccacactgctacaatccagcactaactatccatgtccagggtaaggatcgagatcgagaagcccacactgccagtgaaaaagctacgtctttactgcataaattagaggaagcaatttcggaacaacggaaccttcaaactataaatactgaattatcgaacacttgccaggcacttcagcagaagacaaggaaactgaagaagctttttagatgaggaatttcctcactatgattccctgtcctgcgcagatgcaattcaacaacctcttcaagaaaaattgcagtgttgccacaaactatatggtggtcaagaagcaagaatacatcagacacccctgaccttgaaacatacgtgctggtacacacctctgctgggtgcccaggccccacaagtggccccagcccaggaacgaatctctcaggctgcatcaggatgaatgatgacccaagtatggaagagaatggtgttgaacgcgtgtgtcctgagagcctgctgcagtccagggaatattcctcactaccattacccagacacacttcatcgacagacggtactataacttcaagtgatcctggattagaaattctgaatatggcttcttgtgaccttgacagaaactcgctctgtaagaaagaggaggatacaagatcagcttctcccacgatagaggcccaaggcacaagtccagctcatgataatattgcattccaagactctacgagtaaggataaaaccatattaaatctggaagccaaagaggaaccagaaacaatagaagaacataaaaaagaacatgcttcaggagactctgtggtttcccctcttcctgtaaccactgtgaaatcggttaaccttagacaaagtgagaacacttctgctaatgagaaggaggtggaggcagaatttctcagattatctttgggatttaagtgtgactggtttaccttggagaagagagtgaagcttgaagagaggtcccgtgacttggcagaagaaaatttgaagaaagaaatcactaactgtttaaaactattagagtctttaacacctctgtgtgaagatgacaaccaggcacaggaaatcattaagaagctggagaagagtataaagtttcttagccagtgtgcagcacgagtggccagtagggctgagatgttgggagccatcaatcaggaaagccgggttagtaaagcagttgaagtgatgattcagcacgtagaaaacttgaagaggatgtatgccaaagagcacgctgaattagaagaactgaaacaggttcttctgcagaatgaaaggtctttcaatcctcttgaagatgatgatgactgccaaattaaaaaacgttcagcttctctaaactccaagccatcttctctacgaagagtgactattgcctctttacccagaaatattggaaatgcaggaatggtggctgggatggaaaataatgatcgattcagtagaaggtcaagcagttggcgtattttggggtcaaagcagagtgaacaccgtccctcattacctcgatttattagcacctattcctgggcagatgctgaagaagaaaaatgtgaactaaaaactaaagatgactcagagccatctggagaagaaacagtagaaaggacaaggaagccaagtctttctgaaaagaaaaataatccatcaaagtgggatgtctcttcagtttatgacacaatagcttcctgggcaacaaatctcaagtcctccatcagaaaggctaataaggccctctggctctctattgcattcattgtactgtttgcagctttgatgagcttcctcacaggccaattattccagaagtctgtggatgccgctcccacacagcaagaggactcatggacgtctctagaacatatcttgtggccatttaccagactccgacacaatgggccaccaccagtgtgacagcaggacatcctaatatatggatcttgatttttaagtttcagtatctgaacttcgtaaattagtaacttttagctgggaaagtatagcatgaaaccagaggttctcagaatgactgtaagatagcttacatttcctctttttg

SEQ ID NO: 2314 - DNA, 785 bp, Homo sapiens
  source 1..785: mol_type = genomic DNA
attttcagttttgcctgcatcataagagtgagcactccattgctttctttcctggccacactgctacaatccagcactaactatccatgtccagggtaaggatcgagatcgagaagcccacactgccagtgaaaaagctacgtctttactgcataaattagaggaagcaatttcggaacaacggaaccttcaaactataaatactgaattatcgaacacttgccaggcacttcagcagaagacaaggaaactgaagacaacaattgagtcacttcaaaaggagttcattgaaggggaacaccatggcttgctgtttcagagctttttagatgaggaatttcctcactatgattccctgtcctgcgcagatgcaattcaacaacctcttcaagaaaaattgaagcagtgttgccacaaactatatggtggtcaagaagcaagaatacatcagacacccctgaccttgaaacatacgtgctggtacacacctctgctgggtgcccaggccccacaagtggccccagcccaggaacgaatctctcaggctgcatcaggatgaatgatgacccaagtatggaagagaatggtgttgaacgcgtgtgtcctgagagcctgctgcagtccagggaatattcctcactaccattacccagacacacttcatcgacagacggtactataacttcaagtgatcctggattagaaattctgaatatggcttcttgtgaccttgacagaaactcgctctgtaagaaagaggaggatacaagatcagcttctcccac

SEQ ID NO: 2315 - DNA, 759 bp, Homo sapiens
  source 1..759: mol_type = genomic DNA
ggagaggcttatcacttccctgagaagaaaaacacattttcagttttgcctgcatcataagagtgagcactccattgctttctttcctggccacactgctacaatccagcactaactatccatgtccagggtaaggatcgagatcgagaagcccacactgccagtgaaaaagctacgtctttactgcataaattagaggaagcaatttcggaacaacggaaccttcaaactataaatactgaattatcgaacacttgccaggcacttcagcagaagacaaggaaactgaagacaacaattgagtcacttcaaaaggagttcattgaaggggaacaccatggcttgctgtttcagagctttttagatgaggaatttcctcactatgattccctgtcctgcgcagatgcaattcaacaacctcttcaagaaaaattgcagtgttgccacaaactatatggtggtcaagaagcaagaatacatcagacacccctgaccttgaaacatacgtgctggtacacacctctgctggatgccttatctctggatagttttacagcagttccaaccctggaatcaacacctttctcaggtgtagccaaccaaatccacactctgtgtgaaaggcccacatatggagaagtaaaggatggtgctttggatgtaaaaagacaacacaagtgcccaggccccacaagtggccccagcccaggaacgaatctctcaggctgcatcaggatgaatgatgacccaagtatggaa

SEQ ID NO: 2316 - DNA, 1422 bp, Homo sapiens
  source 1..1422: mol_type = genomic DNA
ccaggggctccgcacagcaggtgaggctctcctgccccatctccttgggctgcccgtgcttcgtgctttggactaccgccccgcagtgtcctgccctctgcctgggcctcggtccctcctgcacctgctgcctggatccccggcctgcctgggcctgggccttggttctccccatgacaccacctgaacgtctcttcctcccaagggtgcgtggcaccaccctacacctcctccttctggggctgctgctggttctgctgcctggggcccaggggctccctggtgttggcctcacaccttcagctgcccagactgcccgtcagcaccccaagatgcatcttgcccacagcaccctcaaacctgctgctcacctcattggagaccccagcaagcagaactcactgctctggagagcaaacacggaccgtgccttcctccaggatggtttctccttgagcaacaattctctcctggtccccaccagtggcatctacttcgtctactcccaggtggtcttctctgggaaagcctactctcccaaggccacctcctccccactctacctggcccatgaggtccagctcttctcctcccagtaccccttccatgtgcctctcctcagctcccagaagatggtgtatccagggctgcaggaaccctggctgcactcgatgtaccacggggctgcgttccagctcacccagggagaccagctatccacccacacagatggcatcccccacctagtcctcagccctagtactgtcttctttggagccttcgctctgtagaacttggaaaaatccagaaagaaaaaataattgatttcaagaccttctccccattctgcctccattctgaccatttcaggggtcgtcaccacctctcctttggccattccaacagctcaagtcttccctgatcaagtcaccggagctttcaaagaaggaattctaggcatcccaggggaccacacctccctgaaccatccctgatgtctgtctggctgaggatttcaagcctgcctaggaattcccagcccaaagctgttggtctgtcccaccagctaggtggggcctagatccacacacagaggaagagcaggcacatggaggagcttgggggatgactagaggcagggaggggactatttatgaaggcaaaaaaattaaattatttatttatggaggatggagagaggggaataatagaagaacatccaaggagaaacagagacaggcccaagagatgaagagtgagagggcatgcgcacaaggctgaccaagagagaaagaagtaggcatgagggatcacagggccccagaaggcagggaaaggctctgaaagccagctgccgaccagagccccacacggaggcatctgcaccctcgatgaagcccaataaacctcttttctctgaaa

SEQ ID NO: 2317 - DNA, 1507 bp, Homo sapiens
  source 1..1507: mol_type = genomic DNA
tcccagcccacgattcccctgacccgactccctttcccagaactcagtcgcctgaacccccagcctgtggttctctcctaggcctcagcctttcctgcctttgactgaaacagcagtatcttctaagccctgggggcttccccgggccccagccccgacctagaacccgcccgctgcctgccacgctgccactgccgcttcctctataaagggacctgagcgtccgggcccaggggctccgcacagcaggttctccccatgacaccacctgaacgtctcttcctcccaagggtgcgtggcaccaccctacacctcctccttctggggctgctgctggttctgctgcctggggcccaggggctccctggtgttggcctcacaccttcagctgcccagactgcccgtcagcaccccaagatgcatcttgcccacagcaccctcaaacctgctgctcacctcattggagaccccagcaagcagaactcactgctctggagagcaaacacggaccgtgccttcctccaggatggtttctccttgagcaacaattctctcctggtccccaccagtggcatctacttcgtctactcccaggtggtcttctctgggaaagcctactctcccaaggccacctcctccccactctacctggcccatgaggtccagctcttctcctcccagtaccccttccatgtgcctctcctcagctcccagaagatggtgtatccagggctgcaggaaccctggctgcactcgatgtaccacggggctgcgttccagctcacccagggagaccagctatccacccacacagatggcatcccccacctagtcctcagccctagtactgtcttctttggagccttcgctctgtagaacttggaaaaatccagaaagaaaaaataattgatttcaagaccttctccccattctgcctccattctgaccatttcaggggtcgtcaccacctctcctttggccattccaacagctcaagtcttccctgatcaagtcaccggagctttcaaagaaggaattctaggcatcccaggggaccacacctccctgaaccatccctgatgtctgtctggctgaggatttcaagcctgcctaggaattcccagcccaaagctgttggtctgtcccaccagctaggtggggcctagatccacacacagaggaagagcaggcacatggaggagcttgggggatgactagaggcagggaggggactatttatgaaggcaaaaaaattaaattatttatttatggaggatggagagaggggaataatagaagaacatccaaggagaaacagagacaggcccaagagatgaagagtgagagggcatgcgcacaaggctgaccaagagagaaagaagtaggcatgagggatcacagggccccagaaggcagggaaaggctctgaaagccagctgccgaccagagccccacacggaggcatctgcaccctcgatgaagcccaataaacctcttttctctgaaa

SEQ ID NO: 2318 - DNA, 554 bp, Homo sapiens
  source 1..554: mol_type = genomic DNA
gccccatctccttgggctgcccgtgcttcgtgctttggactaccgccccgcagtgtcctgccctctgcctgggcctcggtccctcctgcacctgctgcctggatccccggcctgcctgggcctgggccttggttctccccatgacaccacctgaacgtctcttcctcccaagggtgcgtggcaccaccctacacctcctccttctggggctgctgctggttctgctgcctggggcccaggggctccctggtgttggcctcacaccttcagctgcccagactgcccgtcagcaccccaagatgcatcttgcccacagcaccctcaaacctgctgctcacctcattggagaccccagcaagcagaactcactgctctggagagcaaacacggaccgtgccttcctccaggatggtttctccttgagcaacaattctctcctggtccccaccagtggcatctacttcgtctactcccaggggtcgtcaccacctctcctttggccattccaacagctcaagtcttccctgatcaagtcaccggagctttcaaagaag

SEQ ID NO: 2319 - DNA, 2260 bp, Homo sapiens
  source 1..2260: mol_type = genomic DNA
gctttcccggccgcccctcccgccccgcatcgaggcagacaagcctgttcctcttccctgggctgcgattgcgacaggccggcctggctcccagcgctccctgtccccgccccgcggccagctcgctccactcccacttcctgagctccgccatgggagccctggaggcccggcctggccgctcccggccctggggtgcacatcggccctgagtcccgtcccaggctctgggctcgggcagccgccgccaccgctgcccaggacgtcgggcctcctgccttcctcccaggcccccacgttgctggccgcctggccgagtggccgccatgctcctgccttgggccacctctgcccccggcctggcctgggggcctctggtgctgggcctcttcgggctcctggcagcatcgcagccccaggcggtgcctccatatgcgtcggagaaccagacctgcagggaccaggaaaaggaatactatgagccccagcaccgcatctgctgctcccgctgcccgccaggcacctatgtctcagctaaatgtagccgcatccgggacacagtttgtgccacatgtgccgagaattcctacaacgagcactggaactacctgaccatctgccagctgtgccgcccctgtgacccagtgatgggcctcgaggagattgccccctgcacaagcaaacggaagacccagtgccgctgccagccgggaatgttctgtgctgcctgggccctcgagtgtacacactgcgagctactttctgactgcccgcctggcactgaagccgagctcaaagatgaagttgggaagggtaacaaccactgcgtcccctgcaaggccgggcacttccagaatacctcctcccccagcgcccgctgccagccccacaccaggtgtgagaaccaaggtctggtggaggcagctccaggcactgcccagtccgacacaacctgcaaaaatccattagagccactgcccccagagatgtcaggaaccatgctgatgctggccgttctgctgccactggccttctttctgctccttgccaccgtcttctcctgcatctggaagagccacccttctctctgcaggaaactgggatcgctgctcaagaggcgtccgcagggagagggacccaatcctgtagctggaagctgggagcctccgaaggcccatccatacttccctgacttggtacagccactgctacccatttctggagatgtttccccagtatccactgggctccccgcagccccagttttggaggcaggggtgccgcaacagcagagtcctctggacctgaccagggagccgcagttggaacccggggagcagagccaggtggcccacggtaccaatggcattcatgtcaccggcgggtctatgactatcactggcaacatctacatctacaatggaccagtactggggggaccaccgggtcctggagacctcccagctacccccgaacctccataccccattcccgaagagggggaccctggccctcccgggctctctacaccccaccaggaagatggcaaggcttggcacctagcggagacagagcactgtggtgccacaccctctaacaggggcccaaggaaccaatttatcacccatgactgactgagtctgagaaaaggcagaagaaggggggcacaagggcaccttctcccttgaggctgccctgcccacgtgggattcacaggggcctgagtagggcccggggaagcagagccctaagggattaaggctcagacacctctgagagcaggtgggcactggctgggtacggtgccctccacaggactctccctactgcctgagcaaacctgaggcctcccggcagacccacccaccccctggggctgctcagcctcaggcacggacagggcacatgataccaactgctgcccactacggcacgccgcaccggagcacggcaccgagggagccgccacacggtcacctgcaaggacgtcacgggcccctctaaaggattcgtggtgctcatccccaagcttcagagaccctttggggttccacacttcacgtggactgaggtagaccctgcatgaagatgaaattatagggaggacgctccttccctcccctcctagaggagaggaaagggagtcattaacaactagggggttgggtaggattcctaggtatggggaagagttttggaaggggaggaaaatggcaagtgtatttatattgtaaccacatgcaaataaaaagaatgggac

SEQ ID NO: 2320 - DNA, 2088 bp, Homo sapiens
  source 1..2088: mol_type = genomic DNA
ccactcccacttcctgagctccgccatgggagccctggaggcccggcctggccgctcccggccctggggtgcacatcggccctgagtcccgtcccaggctctgggctcgggcagccgccgccaccgctgcccaggacgtcgggcctcctgccttcctcccaggcccccacgttgctggccgcctggccgagtggccgccatgctcctgccttgggccactgctgggcctcttcgggctcctggcagcatcgcagccccaggcggtgcctccatatgcgtcggagaaccagacctgcagggaccaggaaaaggaatactatgagccccagcaccgcatctgctgctcccgctgcccgccagctaaatgtagccgcatccgggacacagtttgtgccacatgtgccgagaattcctacaacgagcactggaactacctgaccatctgccagctgtgccgcccctgtgacccagtgatgggcctcgaggagattgccccctgcacaagcaaacggaagacccagtgccgctgccagccgggaatgttctgtgctgcctgggccctcgagtgtacacactgcgagctactttctgactgcccgcctggcactgaagccgagctcaaagatgaagttgggaagggtaacaaccactgcgtcccctgcaaggccgggcacttccagaatacctcctcccccagcgcccgctgccagccccacaccaggtgtgagaaccaaggtctggtggaggcagctccaggcactgcccagtccgacacaacctgcaaaaatccattagagccactgcccccagagatgtcaggaaccatgctgatgctggccgttctgctgccactggccttctttctgctccttgccaccgtcttctcctgcatctggaagagccacccttctctctgcaggaaactgggatcgctgctcaagaggcgtccgcagggagagggacccaatcctgtagctggaagctgggagcctccgaaggcccatccatacttccctgacttggtacagccactgctacccatttctggagatgtttccccagtatccactgggctccccgcagccccagttttggaggcaggggtgccgcaacagcagagtcctctggacctgaccagggagccgcagttggaacccggggagcagagccaggtggcccacggtaccaatggcattcatgtcaccggcgggtctatgactatcactggcaacatctacatctacaatggaccagtactggggggaccaccgggtcctggagacctcccagctacccccgaacctccataccccattcccgaagagggggaccctggccctcccgggctctctacaccccaccaggaagatggcaaggcttggcacctagcggagacagagcactgtggtgccacaccctctaacaggggcccaaggaaccaatttatcacccatgactgactgagtctgagaaaaggcagaagaaggggggcacaagggcaccttctcccttgaggctgccctgcccacgtgggattcacaggggcctgagtagggcccggggaagcagagccctaagggattaaggctcagacacctctgagagcaggtgggcactggctgggtacggtgccctccacaggactctccctactgcctgagcaaacctgaggcctcccggcagacccacccaccccctggggctgctcagcctcaggcacggacagggcacatgataccaactgctgcccactacggcacgccgcaccggagcacggcaccgagggagccgccacacggtcacctgcaaggacgtcacgggcccctctaaaggattcgtggtgctcatccccaagcttcagagaccctttggggttccacacttcacgtggactgaggtagaccctgcatgaagatgaaattatagggaggacgctccttccctcccctcctagaggagaggaaagggagtcattaacaactagggggttgggtaggattcctaggtatggggaagagttttggaaggggaggaaaatggcaagtgtatttatattgtaaccacatgcaaataaaaagaatgggacct

SEQ ID NO: 2321 - DNA, 2358 bp, Homo sapiens
  source 1..2358: mol_type = genomic DNA
gttgcttattcattcagagtgggaaagcgccagccgagcggccagccagtgcggggctggccatgtaaggcccacaggcggtcctgcccgcccggtgccctgcggagagcctcgtgcagccctgggcaccgcccctgccctgccctgaccccttggccttgaaatgctgtcatcggaggagccgtcccgctcgggacaaggccagcatggacaaagctagagctggggcaagcaaggagccttcctgtcctcgaggccgtgggaagagaagcacgcccagggggccactcctgagagcctctctgtccaccaggcctctgcagaggggtcaccatggctctggcccgaggcagccggcagctgggggccctggtgtggggcgcctgcctgtgcgtgctggtgcacgggcagcaggcgcagcccgggcagggctcggaccccgcccgctggcggcagctgatccagtgggagaacaacgggcaggtgtacagcttgctcaactcgggctcagagtacgtgccggccggacctcagcgctccgagagtagctcccgggtgctgctggccggcgcgccccaggcccagcagcggcgcagccacgggagcccccggcgtcggcaggcgccgtccctgcccctgccggggcgcgtgggctcggacaccgtgcgcggccaggcgcggcacccattcggctttggccaggtgcccgacaactggcgcgaggtggccgtcggggacagcacgggcatggcccgggcccgcacctccgtctcccagcaacggcacgggggctccgcctcctcggtctcggcttcggccttcgccagcacctaccgccagcagccctcctacccgcagcagttcccctacccgcaggcgcccttcgtcagccagtacgagaactacgaccccgcgtcgcggacctacgaccagggtttcgtgtactaccggcccgcgggcggcggcgtgggcgcgggggcggcggccgtggcctcggcgggggtcatctacccctaccagccccgggcgcgctacgaggagtacggcggcggcgaagagctgcccgagtacccgcctcagggcttctacccggcccccgagaggccctacgtgccgccgccgccgccgccccccgacggcctggaccgccgctactcgcacagtctgtacagcgagggcacccccggcttcgagcaggcctaccctgaccccggtcccgaggcggcgcaggcccatggcggagacccacgcctgggctggtacccgccctacgccaacccgccgcccgaggcgtacgggccgccgcgcgcgctggagccgccctacctgccggtgcgcagctccgacacgcccccgccgggtggggagcggaacggcgcgcagcagggccgcctcagcgtgggcagcgtgtaccggcccaaccagaacggccgcggtctccctgacttggtcccagaccccaactatgtgcaagcatccacttatgtgcagagagcccacctgtactccctgcgctgtgctgcggaggagaagtgtctggccagcacagcctatgcccctgaggccaccgactacgatgtgcgggtgctactgcgcttcccccagcgcgtgaagaaccagggcacagcagacttcctccccaaccggccacggcacacctgggagtggcacagctgccaccagcattaccacagcatggacgagttcagccactacgacctactggatgcagccacaggcaagaaggtggccgagggccacaaggccagtttctgcctggaggacagcacctgtgacttcggcaacctcaagcgctatgcatgcacctctcatacccagggcctgagcccaggctgctatgacacctacaatgcggacatcgactgccagtggatcgacataaccgacgtgcagcctgggaactacatcctcaaggtgcacgtgaacccaaagtatattgttttggagtctgacttcaccaacaacgtggtgagatgcaacattcactacacaggtcgctacgtttctgcaacaaactgcaaaattgtccaatcctgatctccgggagggacagatggccaatctctccccttccaaagcaggccctgctccccgggcagcctcccgccgaggggcccagcccccaacccacaggcacggaggggcatccctccctgccggcctcagggagcgaacgtggatgaaaaccacagggattccggacgccagaccccattttatacttcacttttctctacagtgttgttttgttgttgttggtttttattttttatactttggccataccacagagctagattgcccaggtctgggctgaataaaacaaggtttttctac

SEQ ID NO: 2322 - DNA, 1953 bp, Homo sapiens
  source 1..1953: mol_type = genomic DNA
attcagagtgggaaagcgccagccgagcggccagccagtgcggggctggccatgtaaggcccacaggcggtcctgcccgcccggtgccctgcggagagcctcgtgcagccctgggcaccgcccctgccctgccctgaccccttggccttgaaatgctgtcatcggaggagccgtcccgctcgggacaaggccagcatggacaaagctagagctggggcaagcaaggagccttcctgccggggcgcgtgggctcggacaccgtgcgcggccaggcgcggcacccattcggctttggccaggtgcccgacaactggcgcgaggtggccgtcggggacagcacgggcatggcccgggcccgcacctccgtctcccagcaacggcacgggggctccgcctcctcggtctcggcttcggccttcgccagcacctaccgccagcagccctcctacccgcagcagttcccctacccgcaggcgcccttcgtcagccagtacgagaactacgaccccgcgtcgcggacctacgaccagggtttcgtgtactaccggcccgcgggcggcggcgtgggcgcgggggcggcggccgtggcctcggcgggggtcatctacccctaccagccccgggcgcgctacgaggagtacggcggcggcgaagagctgcccgagtacccgcctcagggcttctacccggcccccgagaggccctacgtgccgccgccgccgccgccccccgacggcctggaccgccgctactcgcacagtctgtacagcgagggcacccccggcttcgagcaggcctaccctgaccccggtcccgaggcggcgcaggcccatggcggagacccacgcctgggctggtacccgccctacgccaacccgccgcccgaggcgtacgggccgccgcgcgcgctggagccgccctacctgccggtgcgcagctccgacacgcccccgccgggtggggagcggaacggcgcgcagcagggccgcctcagcgtgggcagcgtgtaccggcccaaccagaacggccgcggtctccctgacttggtcccagaccccaactatgtgcaagcatccacttatgtgcagagagcccacctgtactccctgcgctgtgctgcggaggagaagtgtctggccagcacagcctatgcccctgaggccaccgactacgatgtgcgggtgctactgcgcttcccccagcgcgtgaagaaccagggcacagcagacttcctccccaaccggccacggcacacctgggagtggcacagctgccaccagcattaccacagcatggacgagttcagccactacgacctactggatgcagccacaggcaagaaggtggccgagggccacaaggccagtttctgcctggaggacagcacctgtgacttcggcaacctcaagcgctatgcatgcacctctcatacccagggcctgagcccaggctgctatgacacctacaatgcggacatcgactgccagtggatcgacataaccgacgtgcagcctgggaactacatcctcaaggtgcacgtgaacccaaagtatattgttttggagtctgacttcaccaacaacgtggtgagatgcaacattcactacacaggtcgctacgtttctgcaacaaactgcaaaattgtccaatcctgatctccgggagggacagatggccaatctctccccttccaaagcaggccctgctccccgggcagcctcccgccgaggggcccagcccccaacccacaggcacggaggggcatccctccctgccggcctcagggagcgaacgtggatgaaaaccacagggattccggacgccagaccccattttatacttcacttttctctacagtgttgttttgttgttgttggtttttattttttatactttggccataccacagagctagattgcccaggtctgggctgaataaaacaaggtttttct

SEQ ID NO: 2323 - DNA, 1852 bp, Homo sapiens
  source 1..1852: mol_type = genomic DNA
gaggaggggcggcgggtggcgggctcgactgcccccagccgaggggcagccccggggccgggcccggcgcgcacccggccagcgcgccctcgccagctgcgctctgagttctgggccagctccccagaggcctaggcgccgccgccgcgagggcgcggggcagacaaaggaggcagacaaaggcgggcgcagcccagcagccgtgcgggcaccgggcgaggcaggcccactcctcccgtaatatcatctctgagggcccttacaggacttccagaccgagtccacgcccctgggggacttgggagcagtaaaatgtagtggcaggaggcacctcggccatcgcccaccccaccagctgggagactcgggcaggttattcacccttctgcacctcgcttgacttatctgtataaagagaacagtcacagtaactgcctcatggagttactcccaggactgagataatccacggacacacttagcccagtgcccagcactcggctggagctccaaaaagccctcttccggcgcctgctaaagcgagagaaatgccctcgggggaagatatgtagcgatccaatggaacgtggagatcaacgttgtgttttcttcgcgcccacccgaagttgaagggaggtggcgcggcgggtctcagcccctcccggacgccgaggcccggcccccgcccctcggagacccgcccccgcatgcggaaccgccctctgcgaggcccggtttgggccgtgcgggaatgggcgtggcctgggcggggcgggcgctaggacccaccggagcgccgtgaacgtcaccgagcggcgccgaggccccgggttgagcgggaggcgcgatcggtccggtcggtggctccccgcggcggggccgggcccgatctcgggcgggaaccgagcgcagagccggtagcgggaaggatgaccacgctcacacgacaagacctcaactttggccaagtggtggccgatgtgctctgcgagttcctggaggtggctgtgcatctcatcctctacgtgcgcgaggtctaccccgtgggcatcttccagaaacgcaagaagtacaacgtgccggtccagatgtcctgccacccggagctgaatcagtatatccaggacacgctgcactgcgtcaagccactcctggagaagaatgatgtggagaaagtggtggtggtgattttggataaagagcaccgcccagtggagaaattcgtctttgagatcacccagcctccactgctgtccatcagctcagactcgctgttgtctcatgtggagcagctgctccgggccttcatcctgaagatcagcgtgtgcgatgccgtcctggaccacaaccccccaggctgtaccttcacagtcctggtgcacacgagagaagccgccactcgcaacatggagaagatccaggtcatcaaggatttcccctggatcctggcggatgagcaggatgtccacatgcatgacccccggctgataccactaaaaaccatgacgtcggacattttaaagatgcagctttacgtggaagagcgcgctcataaaggcagctgagggggcacctgccaccccactgatgcccaaactgtcagactttgggggatccccgcctagggcagtgctgcatggctgccctgattccaagtgctcttatcgcctctgtgtgtggatcgcccgccccagcccggggccgctcaggtctgcttggaggatgcctcccccaggagggcagtgagggatgccgcaacctcgacttctcagcctcctggggttccgccggccaacactgtctgtctcaaatactgtgctgtgagttgtttcaataaaggggccccaagggc

SEQ ID NO: 2324 - DNA, 1095 bp, Homo sapiens
  source 1..1095: mol_type = genomic DNA
ccgggcccggcgcgcacccggccagcgcgccctcgccagctgcgctctgagttctgggccagctccccagaggcctaggcgccgccgccgcgagggcgcggggcagacaaaggaggcagacaaaggcgggcgcagcccagcagccgtgcgggcaccgggcgaggcaggcccactcctcccggtagcgggaaggatgaccacgctcacacgacaagacctcaactttggccaagtggtggccgatgtgctctgcgagttcctggaggtggctgtgcatctcatcctctacgtgcgcgaggtctaccccgtgggcatcttccagaaacgcaagaagtacaacgtgccggtccagatgtcctgccacccggagctgaatcagtatatccaggacacgctgcactgcgtcaagccactcctggagaaggtgagggtgcactgggctccccagccatctcaccccatgctcacccccgtccctgtgtgctcacagtccaactctgggatggggtgaagctaggactctgtggggtcttcatggctccaatacccagaagcctgttccctgcactctggagaccatcccaacccaggggcaggccccaaggcatgcgggccatgttcagggtgccttgggcctgggagcccgggttggagctggctctaagtaggggctgccccagagggttcggggttcttctcacatccgtcccctgttctccacgctaaacgttctgtctgagctgagcccctcagggtttcttccccatctagtcctgatctcagacttcctgggaccttccctatggggcccgggcattctctcagcctacaccactcatgctggagggtgccggcttctcaaactcgctatctggcctcttggggacccccagcctagcagctgagcagggctgtgagtgggccgtttctcctccttccttgggcaagggggtggaggcagggtggtgtagtcggggtggggtgcctggctctgcagtgggggttcctctctttgcagaatgatgtggagaaagtggtggtggtgattttggataaagagcaccgcccagtggagaaattcgtctttgagatcac

SEQ ID NO: 2325 - DNA, 910 bp, Homo sapiens
  source 1..910: mol_type = genomic DNA
gcgatcggtccggtcggtggctccccgcggcggggccgggcccgatctcgggcgggaaccgagcgcagagccggtagcgggaaggatgaccacgctcacacgacaagacctcaactttggccaagtggtggccgatgtgctctgcgagttcctggaggtggctgtgcatctcatcctctacgtgcgcgaggtctaccccgtgggcatcttccagaaacgcaagaagtacaacgtgccggtccagaatgatgtggagaaagtggtggtggtgattttggataaagagcaccgcccagtggagaaattcgtctttgagatcacccagcctccactgctgtccatcagctcagactcgctgttgtctcatgtggagcagctgctccgggccttcatcctgaagatcagcgtgtgcgatgccgtcctggaccacaaccccccaggtgtgtccactccccaccctctcttcccttggcatttccatggttatctcgggttggtctgtgttcccaggtccatgtttggctgttctgagactcatctcttcctaaccctgagagtccacctcctctgggaagcttccctgattgattctacctggcttccatctccctattgactggggcttttcttagcacttgctttgccatctgctctgggggtgctgctgagccagcaagggaagtgggaagaggctgggcccagtggctggcaccagggcggtgggggagcctccaccaacctcttgcctctccaggctgtaccttcacagtcctggtgcacacgagagaagccgccactcgcaacatggagaagatccaggtcatcaaggtgagatgagatgggtctgggtctgggcgcaggctctagaaacgtgatgtcgcagttccaggcgggcaggggcactgcctgt

SEQ ID NO: 2326 - DNA, 872 bp, Homo sapiens
  source 1..872: mol_type = genomic DNA
aggggcagccccggggccgggcccggcgcgcacccggccagcgcgccctcgccagctgcgctctgagttctgggccagctccccagaggcctaggcgccgccgccgcgagggcgcggggcagacaaaggaggcagacaaaggcgggcgcagcccagcagccgtgcgggcaccgggcgaggcaggcccactcctcccggtagcgggaaggatgaccacgctcacacgacaagacctcaactttggccaagtggtggccgatgtgctctgcgagttcctggaggtggctgtgcatctcatcctctacgtgcgcgaggtctaccccgtgggcatcttccagaaacgcaagaagtacaacgtgccggtccagatgtcctgccacccggagctgaatcagtatatccaggacacgctgcactgcgtcaagccactcctggagaagaatgatgtggagaaagtggtggtggtgattttggataaagagcaccgcccagtggagaaattcgtctttgagatcacccagcctccactgctgtccatcagctcagactcgctgttgtctcatgtggagcagctgctccgggccttcatcctgaagatcagcgtgtgcgatgccgtcctggaccacaaccccccaggctgtaccttcacagtcctggtgcacacgagagaagccgccactcgcaacatggagaagatccaggtcatcaaggatttcccctggatcctggcggatgagcaggatgtccacatgcatgacccccggctgataccactaaaaaccatgacgtcggacattttaaagatgcagctttacgtggaagagcgcgctcataaaggcagctgagggggcacctgccaccccactgatgcc

SEQ ID NO: 2327 - DNA, 864 bp, Homo sapiens
  source 1..864: mol_type = genomic DNA
gggaggcgcgatcggtccggtcggtggctccccgcggcggggccgggcccgatctcgggcgggaaccgagcgcagagccggtagcgggaaggatgaccacgctcacacgacaagacctcaactttggccaagtggtggccgatgtgctctgcgagttcctggaggtggctgtgcatctcatcctctacgtgcgcgaggtctaccccgtgggcatcttccagaaacgcaagaagtacaacgtgccggtccagatgtcctgccacccggagctgaatcagtatatccaggacacgctgcactgcgtcaagccactcctggagaagaatgatgtggagaaagtggtggtggtgattttggataaagagcaccgcccagtggagaaattcgtctttgagatcacccagcctccactgctgtccatcaggtgggctgcccctgcccctcgcccactagctggcatcagctcagactcgctgttgtctcatgtggagcagctgctccgggccttcatcctgaagatcagcgtgtgcgatgccgtcctggaccacaaccccccaggctgtaccttcacagtcctggtgcacacgagagaagccgccactcgcaacatggagaagatccaggtcatcaaggatttcccctggatcctggcggatgagcaggatgtccacatgcatgacccccggctgataccactaaaaaccatgacgtcggacattttaaagatgcagctttacgtggaagagcgcgctcataaaggcagctgagggggcacctgccaccccactgatgcccaaactgtcagactttgggggatccccgcctagggcagtgctgcatggctgccctgattccaagtgctct

SEQ ID NO: 2328 - DNA, 1002 bp, Homo sapiens
  source 1..1002: mol_type = genomic DNA
cagacaaaggcgggcgcagcccagcagccgtgcgggcaccgggcgaggcaggcccactcctcccggtagcgggaaggatgaccacgctcacacgacaagacctcaactttggccaagtggtggccgatgtgctctgcgagttcctggaggtggctgtgcatctcatcctctacgtgcgcgaggtctaccccgtgggcatcttccagaaacgcaagaagtacaacgtgccggtccagatgtcctgccacccggagctgaatcagtatatccaggacacgctgcactgcgtcaagccactcctggagaagaatgatgtggagaaagtggtggtggtgattttggataaagagcaccgcccagtggagaaattcgtctttgagatcacccagcctccactgctgtccatcaggtgggctgcccctgcccctcgcccactagctggcatcagctcagactcgctgttgtctcatgtggagcagctgctccgggccttcatcctgaagatcagcgtgtgcgatgccgtcctggaccacaaccccccaggctgtaccttcacagtcctggtgcacacgagagaagccgccactcgcaacatggagaagatccaggtcatcaaggatttcccctggatcctggcggatgagcaggatgtccacatgcatgacccccggctgataccactaaaaaccatgacgtcggacattttaaagatgcagctttacgtggaagagcgcgctcataaaggcagctgagggggcacctgccaccccactgatgcccaaactgtcagactttgggggatccccgcctagggcagtgctgcatggctgccctgattccaagtgctcttatcgcctctgtgtgtggatcgcccgccccagcccggggccgctcaggtctgcttggaggatgcctcccccaggagggcagtgagggatgccgcaacctcgacttctcagcctcctggggttccgccggccaacactgtctgtctcaaatact

SEQ ID NO: 2329 - DNA, 1118 bp, Homo sapiens
  source 1..1118: mol_type = genomic DNA
ccgtgcgggaatgggcgtggcctgggcggggcgggcgctaggacccaccggagcgccgtgaacgtcaccgagcggcgccgaggccccgggttgagcgggaggcgcgatcggtccggtcggtggctccccgcggcggggccgggcccgatctcgggcgggaaccgagcgcagagccggtagcgggaaggatgaccacgctcacacgacaagacctcaactttggccaagtggtggccgatgtgctctgcgagttcctggaggtggctgtgcatctcatcctctacgtgcgcgaggtctaccccgtgggcatcttccagaaacgcaagaagtacaacgtgccggtccagatgtcctgccacccggagctgaatcagtatatccaggacacgctgcactgcgtcaagccactcctggagaagaatgatgtggagaaagtggtggtggtgattttggataaagagcaccgcccagtggagaaattcgtctttgagatcacccagcctccactgctgtccatcagctcagactcgctgttgtctcatgtggagcagctgctccgggccttcatcctgaagatcagcgtgtgcgatgccgtcctggaccacaaccccccaggctgtaccttcacagtcctggtgcacacgagagaagccgccactcgcaacatggagaagatccaggtcatcaaggatttcccctggatcctggcggatgagcaggatgtccacatgcatgacccccggctgataccactaaaaaccatgacgtcggacattttaaagatgcagctttacgtggaagagcgcgctcataaaggcagctgagggggcacctgccaccccactgatgcccaaactgtcagactttgggggatccccgcctagggcagtgctgcatggctgccctgattccaagtgctcttatcgcctctgtgtgtggatcgcccgccccagcccggggccgctcaggtctgcttggaggatgcctcccccaggagggcagtgagggatgccgcaacctcgacttctcagcctcctggggttccgccggccaacactgtctgtctcaaatactgtgctgtgagttgtttcaataaaggggccccaagggctgggctg

SEQ ID NO: 2330 - DNA, 678 bp, Homo sapiens
  source 1..678: mol_type = genomic DNA
gcgatcggtccggtcggtggctccccgcggcggggccgggcccgatctcgggcgggaaccgagcgcagagccggtagcgggaaggatgaccacgctcacacgacaagacctcaactttggccaaggtagggaggctggacctgcgggcccgggggcgggggcgtctgggccggcgggcttcctcgagcgcgccaccggcttgtgcccccctgcagtggtggccgatgtgctctgcgagttcctggaggtggctgtgcatctcatcctctacgtgcgcgaggtctaccccgtgggcatcttccagaaacgcaagaagtacaacgtgccggtccagatgtcctgccacccggagctgaatcagtatatccaggacacgctgcactgcgtcaagccactcctggagaagaatgatgtggagaaagtggtggtggtgattttggataaagagcaccgcccagtggagaaattcgtctttgagatcacccagcctccactgctgtccatcagctcagactcgctgttgtctcatgtggagcagctgctccgggccttcatcctgaagatcagcgtgtgcgatgccgtcctggaccacaaccccccaggctgtaccttcacagtcctggtgcacacgagagaagccgccactcgcaacatggagaagatccaggtcatcaaggt

SEQ ID NO: 2331 - DNA, 1032 bp, Homo sapiens
  source 1..1032: mol_type = genomic DNA
ccccgggttgagcgggaggcgcgatcggtccggtcggtggctccccgcggcggggccgggcccgatctcgggcgggaaccgagcgcagagccggtactgggggaggggagagggggcgggattcccgccgggagggatccggcgtagcagggggcggagtcttattccaaccccgcttcgctttccgcatgtcccgctttgcgctcccggccctgggcatcccgctgtttccctctgcgtccgcggccctgcccttttcgggggcacagctgtggtctttccaccccgcgagacagcggggcgagggggcgcgggcggccagtggatagaggctgatgcccccaagcacggacgccagcgtgggggtggaggttcttccagctgccctgagcctgtgcgaagcgggaggtccttccccagttcccacagactgtggggagggaagagacggtggaagcgagcgggttctgggctcctgggtctctggaactaccctctgcccttgccccaacactcaggtagcgggaaggatgaccacgctcacacgacaagacctcaactttggccaagtggtggccgatgtgctctgcgagttcctggaggtggctgtgcatctcatcctctacgtgcgcgaggtctaccccgtgggcatcttccagaaacgcaagaagtacaacgtgccggtccagatgtcctgccacccggagctgaatcagtatatccaggacacgctgcactgcgtcaagccactcctggagaagaatgatgtggagaaagtggtggtggtgattttggataaagagcaccgcccagtggagaaattcgtctttgagatcacccagcctccactgctgtccatcagctcagactcgctgttgtctcatgtggagcagctgctccgggccttcatcctgaagatcagcgtgtgcgatgccgtcctggaccacaaccccccaggctgtaccttcacagtcctggtgcacacgagagaagccgccactcgcaacatggagaagatccaggtcatcaagg

SEQ ID NO: 2332 - DNA, 6414 bp, Homo sapiens
  source 1..6414: mol_type = genomic DNA
ccggcgggcggcgctgccgcttcccaatcgcgccctcccagcgccggggacgcggcgcccgcgctcccgcccgagcccggggaaacggagacaaggaggcgccgccgccccctccccgcggctgcgccccagccctgcgcccgcagcatgcccgccgccgggccgagcgccgccctcccccaggagctcgaggaggcgacgccgctgccggccgcgggaccgcggctgcgagggtagcggggccggagccgggccccccgaggcgccgcgcggcgggcggagagggaggaggagcaggcatcctccgcggcgcgcgggcggcggccctgctgcccggcgcgcccatggcccggccgcagggagaatgcaagctgctctccacgcgctcggcgtcccccggagccgctcgcgtcgccgccgccccctagccgccagcgctcggccgctggctgcgctaggacccgcggccgccggccgccgagcgcgggagggcaggcaggggcaggagccggagggcccggggcgcggcgcggcatgtagctgcgggctcccgcgtccgcgtgaggctgtcggcccggggccccgccatggctgggatggacagtggcaacctgaagaccgcgaggctgtggcgggacgccgccctgcgtgccaggaagctgcggagcaacctgcgccagctcacgcttaccgccgccggggcctgccccggggccggggccgacgcgctcgagtcccccgcctccccccagctcgtgctgccggccaacctcggggacattgaggcactgaacctggggaacaacggcctggaggaggtacccgaggggctggggtcggcgctgggcagcctgcgcgtcctggtcctgcgcaggaaccgcttcgcccggctgcccccggcggtggccgagctcggccaccacctcaccgagctggacgtgagccacaaccggctgaccgccctgggcgcggaggtggtgagtgctctgagggagctgcggaagctcaacctcagccacaaccagctgcccgccctgcccgcccagctgggcgctctcgctcacctggaggagctggatgtcagctttaaccggctggcgcacctgcctgactccctctcctgcctctcccgcctgcgcaccctggacgtggatcacaaccagctcactgccttcccccggcagctgctgcagctggtggccctggaggagctggacgtgtccagcaaccggctgcggggcctgcctgaggatatcagtgccctgcgtgccctcaagatcctctggctgagtggggccgagcttggcacgctgcccgccggcttctgcgagctggccagtttggagagcctcatgctagacaacaacgggctgcaggctctgcccgcccagttcagctgcctgcagcggctcaaaatgctcaacctctcctccaacctcttcgaggagttccctgccgcgctgctgcccctggctggtctggaggagctctaccttagtcgcaaccagctcacctcggtgccatcccttatctcgggcctgggccggcttctcaccttgtggctggataataaccgcatccgctacctgccggactccatcgtggagctgaccggcctggaggagctcgtgctgcaggggaaccagatcgcggtgctgcccgaccactttggccagctctcccgggtgggtttgtggaagatcaaagacaacccactgatccagcccccctacgaggtctgcatgaaggggatcccctacatcgcagcctaccagaaggaactggctcattcccagccggcggtgcagccccggctcaagctgctcctgatggggcataaggctgcaggaaagactttgctgcgccactgcctcaccgaggagagagtggagggatgcccaggaggaggggacaaggagaagtgctacccaccgtcacctccccctgtgagcaagggcatcgaggtgaccagctggacggccgatgcctcccggggcctgcggttcatcgtgtatgacttagctggggatgaaagttatgaggtgatccagcccttcttcctgtccccaggggccctatacgtgctggtggtcaacttggccacctatgagcctcgccactttcctaccaccgtgggctccttcttgcatcgggtcggggcgagagtgccccacgcggtggtgtgcatcgtgggcacccacgcagacctgtgcggagagcgtgagctggaggagaaatgtctggacattcaccgccagatcgccctgcaggagaagcacgacgcggagggactgagccgcttggccaaggtggtggacgaggcactggcccgggacttcgagctgcgctctgccagcccccacgcagcctactatggcgtttcggacaagaaccttcgacggcgcaaggcccattttcaatacctgctcaaccaccggctgcagatcctctcccccgtgttgcctgttagctgcagggacccgcgccacttacgacgccttcgggacaagttgctgtcagttgctgagcaccgagagatcttccccaacttacacagagtactgcctcgatcctggcaggtgctggaggaactgcatttccagccacctcaggcccagcgactgtggctaagctggtgggactcggcgcgcttgggcctgcaggcgggtctgaccgaggaccgactgcagagtgccctctcctacctgcatgagagcggcaagctactctactttgaggacagtccggctctcaaggagcacgtcttccacaacctcacccgcctcatcgacatcctcaatgtcttcttccagagggatccctctttgctgctgcataagctgctcctagggaccagtggagagggcaaggcggagggggaaagctccccgcccatggcgcggtccacccccagccaggaactgctccgggccacccagctccatcagtatgtggagggctttctgttgcatgggctcttgccagctcatgtcattcggttgctgcttaagcctcatgtccaggcccagcaggacttgcagctgttgctggagctgctggagaagatgggactctgttactgcctcaataaacccaagggcaagcctttgaatgggtccacagcttggtacaagttcccatgctatgtgcagaacgaggtgccccatgcagaagcctggattaatgggaccaacctagctgggcagtcttttgtggctgagcagttgcagattgaatatagctttccttttacttttccacttgggttgtttgcacgctacagtgtccagatcaacagccatgtggtgcacaggtcggatggtaaatttcagatctttgcctatagagggaaagttcctgtggttgtgagttacagacctgccaggggagtcctgcagccagacaccctgtccattgctagccatgcatcattaccaaatatatggaccgcatggcaagccataacccccttggtggaggaactgaatgtcctacttcaggaatggcctggactgcactacaccgtgcacattctctgttctaagtgccttaagagaggatcgcccaatccacatgcttttccaggggagttgctgagtcagcccagaccggaaggagtggcagagatcatttgccccaagaacggcagcgagcgagtaaatgttgccttggtttacccacccacgccgactgtgatcagcccctgttccaagaagaatgttggtgaaaagcacagaaaccagtgacgtttgtggctgtggaatttccatggagaaaagagagcatctgaacacctggaccatcttttgcacctggcagaccctctgcactcaccccagcgtgttctgtgaacttgagtgacaacgcgtgcttgcagggtgctttttggacgactggggaagaggtggggagggggtggtggggggaagcatggacgagaacatggagcaaatgttttacaacctgaacctcagaactgtgatcctccaaggagcgcgctacttgaagaaaagaaaaaaaaaaaaaaaaagtcgaatggcttctcagggattttgttttccgtgcacatataagccatagttacagtacaggtggcagtatttagagcactcagatttcagttctgttaaatgtgaaagagggatcgactgacgttcattgctgttccataactagtgtaaaatatgtatatgtttatctttatttttataatatgcaaatacatttaaatttatacagtttgaagcttctagcgttagttcacactgggtgcaatattctgcatgagaactgtgccaagatggggctgatttcttattttagtataagacttttttgttttttctttattctttaatcctcttcacattaaaaaaaaaatctctctgttagcccatggattaagtgttggttcatagagattgccaataatcagaaagaaccttaaatgtgcatttaagacagtgtcccttcccttcttttcaatgaaggtccctgcctatataaatcatctggcacgctggtgggaaatcctttgctcttccaacgtgttattagtgctgggcagagatggggcacactcaggggccaaagaggacaaaaagtccatgcaaaacttgagtcttttaatggcttaagataatcaggagtcagttctgaatcttacaaagtgctctgcttaataagtaccttacttagcagagcactttgcaaacatattacttattagcagagctctttgtagaccttccacatctggctgtcagatcttaaggttgtgaatttaggctccagttacattcactggagagcataatcccacacgggttatttataaatacagagcctctgattggacggtctcctgccaagaactagtaatacccttgttttaaaatcttcacaaggtaaaacttaaaaagccaaccaaacaaattgctctccattctacttttaattgggccaaacagcatatgctacagtagtaacatgtttttcggagagtgtaaaaaactctgtttacatttgcctcctccgtgggttgatcgaaaatgtataaaactgactgcttctcgccagcctcagacaagaagagtgagttgctggtactcgctactcttttacttcttttgtaaagtattgactcttggaaggctacagtatacaaagtctcaacatgttttttaaaagaaataaggagcaagcgactgccctgctagaaatcacaaaccgatttttgtagaatattttgtgccccaggcattaatttcactgactccagaacctgcagttcagagaatgatttcttatgatgataaaaatcgaatgggatcagacgatgtttgcatttttttaatacttgaataggacacctcaagtttgagatttcattttcttttagaacacagtcacaagattaatctggtgaatccttttgtcacagttctcgtgtgtgtgtgcgcgtctccgtgtgtgtgtgtgtgcatgtgtgtaaaactgaatggtcacatttaattgctttttggaccattgaatagttgggaagtaagaattttttaattggcatgagacggttcctcaactgttaaattaaccaactttgacctgtctttagaaaaaggcttatttgtatgattttgggctaactccccggggaccatattaaatgacaaaaatgctcctttgggtgacacaccctacaaagtatttgctgttacgaacataaacgcccacattcttaatatctaatatttttgaccagtgatgttttatgctgtcatctgaaccctagagaagcagtgtcagaggaaaccttggtgtcacatgtgtcttagcaaaagggttaccatgatcgagggtcatgtgaccaaaagatgctccagagaagcttgagaatttgtttcaagttgggaggagggttggagatacaaaaatcactctgctctacaggactcttcagctgtctatgcaagaaattccgttttctctttcagcacctggaaagacacagcagcccaccgaggcgataggtgattcactaagcacaagaggaatgttttctaagcaaggcgtcccttgcctctcaaacaaatgccctccaagtttgttagggtttctattcctgcaacttgtggtatcaaaaccacttcctggaattgtcaaagcactgccaaaataaatgtttttcccccttctaagaaaaaaaaaatgacagtgctcatatttgacacttgtgtattggactctcttttgaatgaataaaaaggaaaaggggtttggtgtaattcctgatggggtgcgtgttgtttttcatgccatggtttgtgaattttaattgtggtttcccatttcgttgttgtaactgggcagaaattaaaaaagaaaaatcaataaaaatacaaagaaatggttaaa

SEQ ID NO: 2333 - DNA, 1130 bp, Homo sapiens
  source 1..1130: mol_type = genomic DNA
taagatcctctttctctctcccccgcccctgccatcctgactccctaaggttttctatagtactatgctctcactcccaacttgaacacttctttaagctttccatccgtagtccttaattgggtttcagtccctccactcccattgttttttctccttacccctctttctcttttgccccctcccccaattctgtctccattcctagggttctaccaatcacatccgtgcactgtgatttagaggcatattctctgtagctgagaggggagccctgcgctcactgccatatgtttattagttatgaactgaataaaggaaggcttgacttcctgggtcatgggagtgaaggagtctgggtgacaggaagcaagcggcctgtcatgcctattgcctagctgccagattaaccttgccttgaaaataacgattgccccataggctattcagtgtaaggaagacaaaaattccttgggaacctactagtgggtttgccttccagatttggtagacgcaaaaagcaaagggggaacatgggcaaaggaagatttgatgaaaaagaaaatgtgtccaactgcatccagttgaaaacttcagttattaagggtattaagaatcaattgatagagcaatttccaggtattgaaccatggcttaatcaaatcatgcctaagaaagatcctgtcaaaatagtccgatgccatgaacatatagaaatccttacagtaaatggagaattactcttttttagacaaagagaagggcctttttatccaaccctaagattacttcacaaatatccttttatcctgccacaccagcaggttgataaaggagccatcaaatttgtactcagtggagcaaatatcatgtgtccaggcttaacttctcctggagctaagctttaccctgctgcagtagataccattgttgctatcatggcagaaggaaaacagcatgctctatgtgttggagtcatgaagatgtctgcagaagacattgagaaagtcaacaaaggaattggcattgaaaatatccattatttaaatgatgggctgtggcatatgaagacatataaatgagcctcagaaggaatgcacttgggctaaatatggatattgtgctgtatc

SEQ ID NO: 2334 - DNA, 1018 bp, Homo sapiens
  source 1..1018: mol_type = genomic DNA
gctacctccaactgctgaggaaccggttgcctaaaaggagccggcaaaagcgcctacgtggagtccagaggagcggaagtagtcagatttgactgagagccgtaaagcgcggctggctctcgttttccggataacgactacagctccgactgtcagtgccggccttcctcgtgtgaggggatctgccggacccctgcaaattcaatttctttcccattccgggcccttccctatcgtcgcccccttcaccttggatcatgttcaagaaatttgatgaaaaagaaaatgtgtccaactgcatccagttgaaaacttcagttattaagggtattaagaatcaattgatagagcaatttccaggtattgaaccatggcttaatcaaatcatgcctaagaaagatcctgtcaaaatagtccgatgccatgaacatatagaaatccttacagtaaatggagaattactcttttttagacaaagagaagggcctttttatccaaccctaagattacttcacaaatatccttttatcctgccacaccagcaggttgataaaggagccatcaaatttgtactcagtggagcaaatatcatgtgtccaggcttaacttctcctggagctaagctttaccctgctgcagtagataccattgttgctatcatggcagaaggaaaacagcatgctctatgtgttggagtcatgaagatgtctgcagaagacattgagaaagtcaacaaaggaattggcattgaaaatatccattatttaaatgatgggctgtggcatatgaagacatataaatgagcctcagaaggaatgcacttgggctaaatatggatattgtgctgtatctgtgtttgtgtctgtgtgtgacagcatgaagataatgcctgtggttatgctgaataaattcaccagatgctaaaattctgttagcttcagaaattattttaagttttcttaaactcaagttaaaattgggtagcaaacttggacattaaaaggtatctggtaagtaa

SEQ ID NO: 2335 - DNA, 2421 bp, Homo sapiens
  source 1..2421: mol_type = genomic DNA
cagcagaatggaagtgaggaaaggcaaccagctgacacaggagccagagtgagaccagcagactctcacactcaacctacaccatgaatttgtgtctatcttctacgcgttaagagccaaggacaggtgaagttgccagagagcaatggctctcttcactccgtggaagttgtcctctcagaagctgggctttttcctggtgacttttggcttcatttggggtatgatgcttctgcactttaccatccagcagcgaactcagcctgaaagcagctccatgctgcgcgagcagatcctggacctcagcaaaaggtacatcaaggcactggcagaagaaaacaggaatgtggtggatgggccatacgctggagtcatgacagcttatgatctgaagaaaacccttgctgtgttattagataacattttgcagcgcattggcaagttggagtcgaaggtggacaatcttgttgtcaatggcaccggaacaaactcaaccaactccactacagctgttcccagcttggttgcacttgagaaaattaatgtggcagatatcattaacggagctcaagaaaaatgtgtattgcctcctatggacggctaccctcactgtgagggaaagatcaagtggatgaaagacatgtggcgttcagatccctgctacgcagactatggagtggatggatccacctgctctttttttatttacctcagtgaggttgaaaattggtgtcctcatttaccttggagagcaaaaaatccctacgaagaagctgatcataattcattggcggaaattcgtacagattttaatattctctacagtatgatgaaaaagcatgaagaattccggtggatgagactacggatccggcgaatggctgacgcatggatccaagcaatcaagtccctggcagaaaagcagaaccttgaaaagagaaagcggaagaaagtcctcgttcacctgggactcctgaccaaggaatctggatttaagattgcagagacagctttcagtggtggccctcttggtgaattagttcaatggagtgatttaattacatctctgtacttactgggccatgacattaggatttcagcttcactggctgagctcaaggaaatcatgaagaaggttgtaggaaaccgatctggctgcccaactgtaggagacagaattgttgagctcatttacattgatattgtaggacttgctcaattcaagaaaactcttggaccatcctgggttcattaccagtgcatgctccgagtccttgattcatttggtactgaacccgaatttaatcatgcaaattatgcccaatcgaaaggccacaagaccccttggggaaaatggaatctgaaccctcagcagttttataccatgttccctcataccccagacaacagctttctggggtttgtggttgagcagcacctgaactccagtgatatccaccacattaatgaaatcaaaaggcagaaccagtcccttgtgtatggcaaagtggatagcttctggaagaataagaagatctacttggacattattcacacatacatggaagtgcatgcaactgtttatggctccagcacaaagaatattcccagttacgtgaaaaaccatggtatcctcagtggacgggacctgcagttccttcttcgagaaaccaagttgtttgttggacttgggttcccttacgagggcccagctcccctggaagctatcgcaaatggatgtgcttttctgaatcccaagttcaacccacccaaaagcagcaaaaacacagactttttcattggcaagccaactctgagagagctgacatcccagcatccttacgctgaagttttcatcgggcggccacatgtgtggactgttgacctcaacaatcaggaggaagtagaggatgcagtgaaagcaattttaaatcagaagattgagccatacatgccatatgaatttacgtgcgaggggatgctacagagaatcaatgctttcattgaaaaacaggacttctgccatgggcaagtgatgtggccacccctcagcgccctacaggtcaagcttgctgagcccgggcagtcctgcaagcaggtgtgccaggagagccagctcatctgcgagccttctttcttccagcacctcaacaaggacaaggacatgctgaagtacaaggtgacctgccaaagctcagagctggccaaggacatcctggtgccctcctttgaccctaagaataagcactgtgtgtttcaaggtgacctcctgctcttcagctgtgcaggcgcccaccccaggcaccagagggtctgcccctgccgggacttcatcaagggccaggtggctctctgcaaagactgcctatagcagctacctgctcagccctgcaccatgctgctggggaagacagtggcccc

SEQ ID NO: 2336 - DNA, 8252 bp, Homo sapiens
  source 1..8252: mol_type = genomic DNA
agcccaggtagccgcgccgcaggctcggggcgtcgcgacctcgcgcctcgggccgcgtgggcacggcggccggcgggtgctcccggctgctgctgctgcccaacaaggagcagaatggaagtgaggaaaggcaaccagctgacacaggagccagagtgagaccagcagactctcacactcaacctacaccatgaatttgtgtctatcttctacgcgttaagagccaaggacaggtgaagttgccagagagcaatggctctcttcactccgtggaagttgtcctctcagaagctgggctttttcctggtgacttttggcttcatttggggtatgatgcttctgcactttaccatccagcagcgaactcagcctgaaagcagctccatgctgcgcgagcagatcctggacctcagcaaaaggtacatcaaggcactggcagaagaaaacaggaatgtggtggatgggccatacgctggagtcatgacagcttatgatctgaagaaaacccttgctgtgttattagataacattttgcagcgcattggcaagttggagtcgaaggtggacaatcttgttgtcaatggcaccggaacaaactcaaccaactccactacagctgttcccagcttggttgcacttgagaaaattaatgtggcagatatcattaacggagctcaagaaaaatgtgtattgcctcctatggacggctaccctcactgtgagggaaagatcaagtggatgaaagacatgtggcgttcagatccctgctacgcagactatggagtggatggatccacctgctctttttttatttacctcagtgaggttgaaaattggtgtcctcatttaccttggagagcaaaaaatccctacgaagaagctgatcataattcattggcggaaattcgtacagattttaatattctctacagtatgatgaaaaagcatgaagaattccggtggatgagactacggatccggcgaatggctgacgcatggatccaagcaatcaagtccctggcagaaaagcagaaccttgaaaagagaaagcggaagaaagtcctcgttcacctgggactcctgaccaaggaatctggatttaagattgcagagacagctttcagtggtggccctcttggtgaattagttcaatggagtgatttaattacatctctgtacttactgggccatgacattaggatttcagcttcactggctgagctcaaggaaatcatgaagaaggttgtaggaaaccgatctggctgcccaactgtaggagacagaattgttgagctcatttacattgatattgtaggacttgctcaattcaagaaaactcttggaccatcctgggttcattaccagtgcatgctccgagtccttgattcatttggtactgaacccgaatttaatcatgcaaattatgcccaatcgaaaggccacaagaccccttggggaaaatggaatctgaaccctcagcagttttataccatgttccctcataccccagacaacagctttctggggtttgtggttgagcagcacctgaactccagtgatatccaccacattaatgaaatcaaaaggcagaaccagtcccttgtgtatggcaaagtggatagcttctggaagaataagaagatctacttggacattattcacacatacatggaagtgcatgcaactgtttatggctccagcacaaagaatattcccagttacgtgaaaaaccatggtatcctcagtggacgggacctgcagttccttcttcgagaaaccaagttgtttgttggacttgggttcccttacgagggcccagctcccctggaagctatcgcaaatggatgtgcttttctgaatcccaagttcaacccacccaaaagcagcaaaaacacagactttttcattggcaagccaactctgagagagctgacatcccagcatccttacgctgaagttttcatcgggcggccacatgtgtggactgttgacctcaacaatcaggaggaagtagaggatgcagtgaaagcaattttaaatcagaagattgagccatacatgccatatgaatttacgtgcgaggggatgctacagagaatcaatgctttcattgaaaaacaggacttctgccatgggcaagtgatgtggccacccctcagcgccctacaggtcaagcttgctgagcccgggcagtcctgcaagcaggtgtgccaggagagccagctcatctgcgagccttctttcttccagcacctcaacaaggacaaggacatgctgaagtacaaggtgacctgccaaagctcagagctggccaaggacatcctggtgccctcctttgaccctaagaataagcactgtgtgtttcaaggtgacctcctgctcttcagctgtgcaggcgcccaccccaggcaccagagggtctgcccctgccgggacttcatcaagggccaggtggctctctgcaaagactgcctatagcagctacctgctcagccctgcaccatgctgctggggaagacagtggccccagccccgtcaggcagggccagggacagaagtcatgcagggactctggcaagagcctgaactttttcgtagaaggttctgaattggcattgcccttgctgcactccgagcaacccagtggagtcttcaccaaaacaaaacaagagcgtatgtcaggccaggagcctggcttgtccctggcacaacatcatttctgtttctcaaggagcaactgtgggaagactgtcactgcagctgctccagggcaaaagaaagtctcaagagtcctttaaaacaaaacaggaggaattgagctgatgggaaagaactctgaatgggaatattcctaaacccattaacttatttattcgggtgggagggaggggaccgcgggagggagaggagggattgatcacaggcttcttttatttccactgttaatcatccaccttcactatactgttgttctgtctgctttgggcagggtgcaggagagagaccgtgtgccgtggggctggtggcctgctcagggacagccatggggacctggcagctcaaaacagatggcagcagaacaaaagaaacttttgctttggaagcacagccaaactccccagggcatcgtcatagatggcacctagagcatgggctgcctcagtcagggggacgtgcctgtgttgtccagagagcccagccagggacgaaaaaggagatgaggcccctttcctccatgtccccatgcccagacacataccttggccgtaatttcttttagaatccctttgggaaggaaatacaggattgagggattttggagtttctggtaaactcaccctccctccagccccgctatgaggaggaaagtagagatgaaagactcacgctgttcatggacttggagaggattatctttgagccaagatttggacaggagtgaagtcggtccttaagaatttgtggcgcgaccggagctgggctcctgacaggtgggcttgtgttgtgtcccctctgatggcaccaaagtccagggaagggggctcttgatgtctgctgggggagtgggggcagctcaggatgaatgcagtgccctgtcctggctactcacctgagggtgtagctcgcaaaggtgggaatctggtgctggcttttccttcaggcaggatcactctgacttgttgagtaatcagtcatcaggttggcctggtcagacacactggaccccaccttccaaaccctggacccccccatgctctgcctttgtataagttcccaccccactgaatcattgctgccatgctctgtacaagtttgtaagtttctgaaaagcccctgacatctccatgctgatgcaagtgagaccccttctgcctaatgtgagcggttggcgtcctccacttggcctctgctgggcgcctcagtcgctcaatgatgtgctctgtgccggggcttccaagcacccttcctgctaacagagggcggcccagtggagcctccgctgggcagaactgatgggcaaggcgtaatggctggtagctttcagaatgtgagggaaaggaagaattccgcttcatggggactagagttagtgtggggcctttaagtctgggaagttacattctgcttctttctcaattgctacacaaatgtgcagccagccttttttcttaggcccactgagatccctgctcagtgcgtctcaattgtatctccagtctaagaggagggtggggggcacccggggcctcctccactccttaggtggcccccaagcacatctgccaggtagagtaccatggggaggcctctgccctgagcatcatcacaggggcgcctccagacctggctgagaatagcctctgcttgggcctaggaagaagggcagaagtccaaaggaaaccttggtgagtgagtgtgtgtgtgtgtgtgtgtgtgtgtgtgtgtgtgtgtgtgtgtgtgtatgagcctgtgcatttcttttaagcaagggcagtttcctgcagtaggagggcagatgactggcatccttgctgtaaggaagagctttttccttgtgaatgggcctcttggctgtaccctagggtgtgggaatttgctagagttccctgacctgcaatccctgggccagtgccgccctctcctgggctcttccaggagcattgaacactgaggatgtcaatgcaagtatctgaccaacagggggagcctgcaggccgagcaaagtttaacccacttagccactgctacttaagcaaggaagctgaaaggtaaccttagccctgccttgtgttccaaaagctgcaaggatcatttgctggctgtccctaagttcaaggcctccctaccttccccttcttttccaagtcacaacccgccctgcccgggccagacagcccagaagaacacttttctgccatttaaaaatccctctttcatcccccccagtccagtattgagtggaagtgcgccggagttccactgacagggcagctgctcttggagcaaacaagcccacactccagttgtttagggcattatctgaagagtcagtgacccctgaatgtgtactggctcccaggcctcctcagacttggcccaggtctagtcagtgatcctggagaggaaactggggagggggcttccaactgccctgcatggaagaggagaggaaggtgcccctgtgtgggctggaagcctgcggaggttttgccattgctgatcttgatagaatcctaaaccgatttatagctgataacagttccatggggagagaaatcctaagttatgattaatgtttttccccgctataatatcttgcctgtttttttggattattttccccattgtgatcctaagctcttaaaaaacttgagggaaaacattcatctaatttactaaaagagaaagctttccattgaaaggtagatactttgaggagtaaaaagacttctttgaatgctggtaaacaccgcatttattttgtgtatgcagtttgatttgcacatgtataaatggagatgcttttcatttttgtttggactgggtttgtgtcactgctcattacagtttgcttttttgtgtgtttgctgtgcgtttggagatattagtcagtttctttagtgatatttgtttccttgatgtgccttttcgtttttctttggggtttttggaatccggatgctgttgaagggcaatagcagactcctccagctaagagacaggacatgttcttgagccactgtagctgttgaagctggacaccagacgctccctataacccccccgccaggccatagcgtgtatgcatgtgcacttccacccacagaggagggtgtgaagccttgagaacctcaagaaagggctggattctgccatacctttgggtctaccttgggactgctggttgccaacgtgtcaaccagcctgtgttccctgccacccacgcacttgctgaggtgtggctgaggcagaatcatgtgaatgggtgcatccaaggagttcagggccctgcttggagaagaaatactttagcatcatgaaagggaaagaacgtgcaccccttttttgtttctttagtgaatgcaagatttaataaaagtgaataatgagcttcccctttgggagtggagcccagtgcagctcactgacagggttgacatcagtatgatgtgttggactgaaactgtatgtctgtaggtaggtgtgtgccttttagggcagaccacggtggccaccccatttctccaaggtggtttacctagcttgtgtatattagacattgccaccctcacctctggccaaaaattcttgatttaaaaagaaaagtctattttgttaacgacaggctctgttgtatgtgttactatcccaagcctggattattttatttatttaaaagtattttaatttccatattggctttattctaatcccatccatccctgtggagctgcagagcatcttcatgtgagtagacggatggacataaatagattcatgctcatttaggaagctgggagtttcgtgaagctgagggtgagttcctgtgattcttgttcgcttcaacaaaaagtgggagaccaagtttttatagcaaaagaccaaattagctgtagagtcttgaatgcagaaaaaaattaccctagctttcttagcacttagggttttgtgaggattcagtgtttagcacagtgcttggcacatagtaagccctagtaaatgttaaatattgttattagtgtttcgtaaaacttgagaaatagagctgagctcattcccttcctgttgattcaaaaataatacctacatgaaaacatgattccaagttgattgaatgttgtaggaattactggtttagagtagcccagttctcggcctaccctgctggttgggatcttactgtattcttgaatgcactggtttgaaaatatgccagacttcagcccccaaggaaacaaggctgcaagaatttatgaactccagctggaaaaggtaaaggtgacctttggctagccacatactggaccttaccccactgacgtctttcagaacattccaagggttttcctcaaggaacatttttgagctagaaattaaaatgggttctctggcagactgcaccccttgagtcaaagttaacagtattcctttgaatgcaataatagaggcttttctgcgttaagggagaaggaatgaccaattgaacttacacattccccaggcaggtccctttgccggcccctacaggctggggtggcccctcctgtcctcagggatcagactcccagactggttagttctgcatgtttccatcaaattaaaggttattccctggccgcctcctggagaaaaccaaccccaccctgccagctgggggcaatggggcagggattttggcctctcagaacagctcctagaggctgctcatgactgaatgttttcccaaatcacctaaatatcggtttgctttttgttttgggggagaggatttagcctcttacttccctgatggattcaaagttttatctatctccttatctcctgccctgtcttggcacaactctggatagattgcaggtgtggaatttgctggagtttggtgacttcgtcaaattcctttggattctgttccgccaaatcagcagtctcgtcctgtggatgcagtgactggaatttcccatctgcaaagcatctctgtagcccagattttgtggagccttaagacactccctcaatgccaccctgaccccacggctggagaaccctgtgcttatgtggtgggcagggccactgttgatggaggatggcggggacggggtggtgctcaaaggatctgtggtgctggaggtctacacgcctctcaggacagcgtgtcaggaacctcagagcagcttcacatctgccaaagctgagagggagcgaacttgggaagcattttgctcattgtcctacccaagtattaatagcataatagttgatgccaaaggagatggtgacgtcccttccactgtagttgctgtcacaaccttgacgtctttaagctaatggccgtttgcatctgtgtcttcaaacagatcctggttacagccattttgtgtgattcacttcgggggttaagtaatgcaggattctgcaaacaaggtgtcgccgtccaaatgtactgtcctggcatagagagcactgctttgttttccactgttgtagagaaaactagggagaactttatttttcaataaacttttcttgtgtga

SEQ ID NO: 2337 - DNA, 1970 bp, Homo sapiens
  source 1..1970: mol_type = genomic DNA
atattggagcagcaagaggctgggaagccatcacttaccttgcactgagaaagaagacaaaggccagtatgcacagctttcctccactgctgctgctgctgttctggggtgtggtgtctcacagcttcccagcgactctagaaacacaagagcaagatgtggacttagtccagaaatacctggaaaaatactacaacctgaagaatgatgggaggcaagttgaaaagcggagaaatagtggcccagtggttgaaaaattgaagcaaatgcaggaattctttgggctgaaagtgactgggaaaccagatgctgaaaccctgaaggtgatgaagcagcccagatgtggagtgcctgatgtggctcagtttgtcctcactgaggggaaccctcgctgggagcaaacacatctgacctacaggattgaaaattacacgccagatttgccaagagcagatgtggaccatgccattgagaaagccttccaactctggagtaatgtcacacctctgacattcaccaaggtctctgagggtcaagcagacatcatgatatcttttgtcaggggagatcatcgggacaactctccttttgatggacctggaggaaatcttgctcatgcttttcaaccaggcccaggtattggaggggatgctcattttgatgaagatgaaaggtggaccaacaatttcagagagtacaacttacatcgtgttgcagctcatgaactcggccattctcttggactctcccattctactgatatcggggctttgatgtaccctagctacaccttcagtggtgatgttcagctagctcaggatgacattgatggcatccaagccatatatggacgttcccaaaatcctgtccagcccatcggcccacaaaccccaaaagcgtgtgacagtaagctaacctttgatgctataactacgattcggggagaagtgatgttctttaaagacagattctacatgcgcacaaatcccttctacccggaagttgagctcaatttcatttctgttttctggccacaactgccaaatgggcttgaagctgcttacgaatttgccgacagagatgaagtccggtttttcaaagggaataagtactgggctgttcagggacagaatgtgctacacggataccccaaggacatctacagctcctttggcttccctagaactgtgaagcatatcgatgctgctctttctgaggaaaacactggaaaaacctacttctttgttgctaacaaatactggaggtatgatgaatataaacgatctatggatccaggttatcccaaaatgatagcacatgactttcctggaattggccacaaagttgatgcagttttcatgaaagatggatttttctatttctttcatggaacaagacaatacaaatttgatcctaaaacgaagagaattttgactctccagaaagctaatagctggttcaactgcaggaaaaattgaacattactaatttgaatggaaaacacatggtgtgagtccaaagaaggtgttttcctgaagaactgtctattttctcagtcatttttaacctctagagtcactgatacacagaatataatcttatttatacctcagtttgcatatttttttactatttagaatgtagccctttttgtactgatataatttagttccacaaatggtgggtacaaaaagtcaagtttgtggcttatggattcatataggccagagttgcaaagatcttttccagagtatgcaactctgacgttgatcccagagagcagcttcagtgacaaacatatcctttcaagacagaaagagacaggagacatgagtctttgccggaggaaaagcagctcaagaacacatgtgcagtcactggtgtcaccctggataggcaagggataactcttctaacacaaaataagtgttttatgtttggaataaagtcaaccttgtttctactgtttt

SEQ ID NO: 2338 - DNA, 1758 bp, Homo sapiens
  source 1..1758: mol_type = genomic DNA
agaagcccagtagacaaagaaggtaagggcagtgagaatgatgcatcttgcattccttgtgctgttgtgtctgccagtctgctctgcctatcctctgagtggggcagcaaaagaggaggactccaacaaggatcttgcccagcaatacctagaaaagtactacaacctcgaaaaggatgtgaaacagtttagaagaaaggacagtaatctcattgttaaaaaaatccaaggaatgcagaagttccttgggttggaggtgacagggaagctagacactgacactctggaggtgatgcgcaagcccaggtgtggagttcctgacgttggtcacttcagctcctttcctggcatgccgaagtggaggaaaacccaccttacatacaggattgtgaattatacaccagatttgccaagagatgctgttgattctgccattgagaaagctctgaaagtctgggaagaggtgactccactcacattctccaggctgtatgaaggagaggctgatataatgatctcttttgcagttaaagaacatggagacttttactcttttgatggcccaggacacagtttggctcatgcctacccacctggacctgggctttatggagatattcactttgatgatgatgaaaaatggacagaagatgcatcaggcaccaatttattcctcgttgctgctcatgaacttggccactccctggggctctttcactcagccaacactgaagctttgatgtacccactctacaactcattcacagagctcgcccagttccgcctttcgcaagatgatgtgaatggcattcagtctctctacggacctccccctgcctctactgaggaacccctggtgcccacaaaatctgttccttcgggatctgagatgccagccaagtgtgatcctgctttgtccttcgatgccatcagcactctgaggggagaatatctgttctttaaagacagatatttttggcgaagatcccactggaaccctgaacctgaatttcatttgatttctgcattttggccctctcttccatcatatttggatgctgcatatgaagttaacagcagggacaccgtttttatttttaaaggaaatgagttctgggccatcagaggaaatgaggtacaagcaggttatccaagaggcatccataccctgggttttcctccaaccataaggaaaattgatgcagctgtttctgacaaggaaaagaagaaaacatacttctttgcagcggacaaatactggagatttgatgaaaatagccagtccatggagcaaggcttccctagactaatagctgatgactttccaggagttgagcctaaggttgatgctgtattacaggcatttggatttttctacttcttcagtggatcatcacagtttgagtttgaccccaatgccaggatggtgacacacatattaaagagtaacagctggttacattgctaggcgagatagggggaagacagatatgggtgtttttaataaatctaataattattcatctaatgtattatgagccaaaatggttaatttttcctgcatgttctgtgactgaagaagatgagccttgcagatatctgcatgtgtcatgaagaatgtttctggaattcttcacttgcttttgaattgcactgaacagaattaagaaatactcatgtgcaataggtgagagaatgtattttcatagatgtgttattacttcctcaataaaaagttttattttgggcctgttcctt

SEQ ID NO: 2339 - DNA, 2291 bp, Homo sapiens
  source 1..2291: mol_type = genomic DNA
ataaggggcggcggcccggagcggcccagcaagcccagcagccccggggcggatggctccggccgcctggctccgcagcgcggccgcgcgcgccctcctgcccccgatgctgctgctgctgctccagccgccgccgctgctggcccgggctctgccgccggacgcccaccacctccatgccgagaggagggggccacagccctggcatgcagccctgcccagtagcccggcacctgcccctgccacgcaggaagccccccggcctgccagcagcctcaggcctccccgctgtggcgtgcccgacccatctgatgggctgagtgcccgcaaccgacagaagaggttcgtgctttctggcgggcgctgggagaagacggacctcacctacaggatccttcggttcccatggcagttggtgcaggagcaggtgcggcagacgatggcagaggccctaaaggtatggagcgatgtgacgccactcacctttactgaggtgcacgagggccgtgctgacatcatgatcgacttcgccaggtactggcatggggacgacctgccgtttgatgggcctgggggcatcctggcccatgccttcttccccaagactcaccgagaaggggatgtccacttcgactatgatgagacctggactatcggggatgaccagggcacagacctgctgcaggtggcagcccatgaatttggccacgtgctggggctgcagcacacaacagcagccaaggccctgatgtccgccttctacacctttcgctacccactgagtctcagcccagatgactgcaggggcgttcaacacctatatggccagccctggcccactgtcacctccaggaccccagccctgggcccccaggctgggatagacaccaatgagattgcaccgctggagccagacgccccgccagatgcctgtgaggcctcctttgacgcggtctccaccatccgaggcgagctctttttcttcaaagcgggctttgtgtggcgcctccgtgggggccagctgcagcccggctacccagcattggcctctcgccactggcagggactgcccagccctgtggacgctgccttcgaggatgcccagggccacatttggttcttccaaggtgctcagtactgggtgtacgacggtgaaaagccagtcctgggccccgcacccctcaccgagctgggcctggtgaggttcccggtccatgctgccttggtctggggtcccgagaagaacaagatctacttcttccgaggcagggactactggcgtttccaccccagcacccggcgtgtagacagtcccgtgccccgcagggccactgactggagaggggtgccctctgagatcgacgctgccttccaggatgctgatggctatgcctacttcctgcgcggccgcctctactggaagtttgaccctgtgaaggtgaaggctctggaaggcttcccccgtctcgtgggtcctgacttctttggctgtgccgagcctgccaacactttcctctgaccatggcttggatgccctcaggggtgctgacccctgccaggccacgaatatcaggctagagacccatggccatctttgtggctgtgggcaccaggcatgggactgagcccatgtctcctcagggggatggggtggggtacaaccaccatgacaactgccgggagggccacgcaggtcgtggtcacctgccagcgactgtctcagactgggcagggaggctttggcatgacttaagaggaagggcagtcttgggcccgctatgcaggtcctggcaaacctggctgccctgtctccatccctgtccctcagggtagcaccatggcaggactgggggaactggagtgtccttgctgtatccctgttgtgaggttccttccaggggctggcactgaagcaagggtgctggggccccatggccttcagccctggctgagcaactgggctgtagggcagggccacttcctgaggtcaggtcttggtaggtgcctgcatctgtctgccttctggctgacaatcctggaaatctgttctccagaatccaggccaaaaagttcacagtcaaatggggaggggtattcttcatgcaggagaccccaggccctggaggctgcaacatacctcaatcctgtcccaggccggatcctcctgaagcccttttcgcagcactgctatcctccaaagccattgtaaatgtgtgtacagtgtgtataaaccttcttcttctttttttttttttaaactgaggattgtcattaaacacagttgttttcta

SEQ ID NO: 2340 - DNA, 2716 bp, Homo sapiens
  source 1..2716: mol_type = genomic DNA
acaacagtccccaggcatcaccattcaagatgcatccaggggtcctggctgccttcctcttcttgagctggactcattgtcgggccctgccccttcccagtggtggtgatgaagatgatttgtctgaggaagacctccagtttgcagagcgctacctgagatcatactaccatcctacaaatctcgcgggaatcctgaaggagaatgcagcaagctccatgactgagaggctccgagaaatgcagtctttcttcggcttagaggtgactggcaaacttgacgataacaccttagatgtcatgaaaaagccaagatgcggggttcctgatgtgggtgaatacaatgttttccctcgaactcttaaatggtccaaaatgaatttaacctacagaattgtgaattacacccctgatatgactcattctgaagtcgaaaaggcattcaaaaaagccttcaaagtttggtccgatgtaactcctctgaattttaccagacttcacgatggcattgctgacatcatgatctcttttggaattaaggagcatggcgacttctacccatttgatgggccctctggcctgctggctcatgcttttcctcctgggccaaattatggaggagatgcccattttgatgatgatgaaacctggacaagtagttccaaaggctacaacttgtttcttgttgctgcgcatgagttcggccactccttaggtcttgaccactccaaggaccctggagcactcatgtttcctatctacacctacaccggcaaaagccactttatgcttcctgatgacgatgtacaagggatccagtctctctatggtccaggagatgaagaccccaaccctaaacatccaaaaacgccagacaaatgtgacccttccttatcccttgatgccattaccagtctccgaggagaaacaatgatctttaaagacagattcttctggcgcctgcatcctcagcaggttgatgcggagctgtttttaacgaaatcattttggccagaacttcccaaccgtattgatgctgcatatgagcacccttctcatgacctcatcttcatcttcagaggtagaaaattttgggctcttaatggttatgacattctggaaggttatcccaaaaaaatatctgaactgggtcttccaaaagaagttaagaagataagtgcagctgttcactttgaggatacaggcaagactctcctgttctcaggaaaccaggtctggagatatgatgatactaaccatattatggataaagactatccgagactaatagaagaagacttcccaggaattggtgataaagtagatgctgtctatgagaaaaatggttatatctattttttcaacggacccatacagtttgaatacagcatctggagtaaccgtattgttcgcgtcatgccagcaaattccattttgtggtgttaagtgtctttttaaaaattgttatttaaatcctgaagagcatttggggtaatacttccagaagtgcggggtaggggaagaagagctatcaggagaaagcttggttctgtgaacaagcttcagtaagttatctttgaatatgtagtatctatatgactatgcgtggctggaaccacattgaagaatgttagagtaatgaaatggaggatctctaaagagcatctgattcttgttgctgtacaaaagcaatggttgatgatacttcccacaccacaaatgggacacatggtctgtcaatgagagcataatttaaaaatatatttataaggaaattttacaagggcataaagtaaatacatgcatataatgaataaatcattcttactaaaaagtataaaatagtatgaaaatggaaatttgggagagccatacataaaagaaataaaccaaaggaaaatgtctgtaataatagactgtaacttccaaataaataattttcattttgcactgaggatattcagatgtatgtgcccttcttcacacagacactaacgaaatatcaaagtcattaaagacaggagacaaaagagcagtggtaagaatagtagatgtggcctttgaattctgtttaattttcacttttggcaatgactcaaagtctgctctcatataagacaaatattcctttgcatattataaaggataaagaaggatgatgtctttttattaaaatatttcaggttcttcagaagtcacacattacaaagttaaaattgttatcaaaatagtctaaggccatggcatccctttttcataaattatttgattatttaagactaaaagttgcattttaaccctattttacctagctaattatttaattgtccagtttgtcttggatatataggctattttctaaagacttgtatagcatgaaataaaatatatcttataaagtggaagtatgtatattaaaaaagagacatccaaatttttttttaaagcagtctactagattgtgatcccttgagatatggaaggatgcctttttttctctgcatttaaaaaaatcccccagcacttcccacagtgcctattgatacttggggagggtgcttggcacttattgaatatatgatcggccatcaagggaagaactattgtgctcagagacactgttgataaaaactcaggcaaagaaaatgaaatgcatatttgcaaagtgtattaggaagtgtttatgttgtttataataaaaatatattttcaacaga

SEQ ID NO: 2341 - DNA, 1470 bp, Homo sapiens
  source 1..1470: mol_type = genomic DNA
atgcatccaggggtcctggctgccttcctcttcttgagctggactcattgtcgggccctgccccttcccagtggtggtgatgaagatgatttgtctgaggaagacctccagtttgcagagcgctacctgagatcatactaccatcctacaaatctcgcgggaatcctgaaggagaatgcagcaagctccatgactgagaggctccgagaaatgcagtctttcttcggcttagaggtgactggcaaacttgacgataacaccttagatgtcatgaaaaagccaagatgcggggttcctgatgtgggtgaatacaatgttttccctcgaactcttaaatggtccaaaatgaatttaacctacagaattgtgaattacacccctgatatgactcattctgaagtcgaaaaggcattcaaaaaagccttcaaagtttggtccgatgtaactcctctgaattttaccagacttcacgatggcattgctgacatcatgatctcttttggaattaaggagcatggcgacttctacccatttgatgggccctctggcctgctggctcatgcttttcctcctgggccaaattatggaggagatgcccattttgatgatgatgaaacctggacaagtagttccaaaggctacaacttgtttcttgttgctgcgcatgagttcggccactccttaggtcttgaccactccaaggaccctggagcactcatgtttcctatctacacctacaccggcaaaagccactttatgcttcctgatgacgatgtacaagggatccagtctctctatggtccaggagatgaagaccccaaccctaaacatccaaaaacgccagacaaatgtgacccttccttatcccttgatgccattaccagtctccgaggagaaacaatgatctttaaagacagattcttctggcgcctgcatcctcagcaggttgatgcggagctgtttttaacgaaatcattttggccagaacttcccaaccgtattgatgctgcatatgagcacccttctcatgacctcatcttcatcttcagaggtagaaaattttgggctcttaatggttatgacattctggaaggttatcccaaaaaaatatctgaactgggtcttccaaaagaagttaagaagataagtgcagctgttcactttgaggatacaggcaagactctcctgttctcaggaaaccaggtctggagatatgatgatactaaccatattatggataaagactatccgagactaatagaagaagacttcccaggaattggtgataaagtagatgctgtctatgagaaaaatgagtctcactctgtcacccaggctggagttcattgtcgcaatctgagctcgctgcaacctccgcctcctgggttcaagagattctcctgcctcagcctctggagtagctgggattacaggttatatctattttttcaacggacccatacagtttga

SEQ ID NO: 2342 - DNA, 1152 bp, Homo sapiens
  source 1..1152: mol_type = genomic DNA
atgcatccaggggtcctggctgccttcctcttcttgagctggactcattgtcgggccctgccccttcccagtggtggtgatgaagatgatttgtctgaggaagacctccagtttgcagagcgctacctgagatcatactaccatcctacaaatctcgcgggaatcctgaaggagaatgcagcaagctccatgactgagaggctccgagaaatgcagtctttcttcggcttagaggtgactggcaaacttgacgataacaccttagatgtcatgaaaaagccaagatgcggggttcctgatgtgggtgaatacaatgttttccctcgaactcttaaatggtccaaaatgaatttaacctacagaattgtgaattacacccctgatatgactcattctgaagtcgaaaaggcattcaaaaaagccttcaaagtttggtccgatgtaactcctctgaattttaccagacttcacgatggcattgctgacatcatgatctcttttggaattaaggagcatggcgacttctacccatttgatgggccctctggcctgctggctcatgcttttcctcctgggccaaattatggaggagatgcccattttgatgatgatgaaacctggacaagtagttccaaaggctacaacttgtttcttgttgctgcgcatgagttcggccactccttaggtcttgaccactccaaggaccctggagcactcatgtttcctatctacacctacaccggcaaaagccactttatgcttcctgatgacgatgtacaagggatccagtctctctatggtccaggagatgaagaccccaaccctaaacatccaaaaacgccagacaaatgtgacccttccttatcccttgatgccattaccagtctccgaggagaaacaatgatctttaaagacagattcttctggcgcctgcatcctcagcaggttgatgcggagctgtttttaacgaaatcattttggccagaacttcccaaccgtattgatgctgcatatgagcacccttctcatgacctcatcttcatcttcagaggtagaaaattttgggctcttaatggttatgacattctggaaggttatcccaaaaaaatatctgaactgggtcttccaaaagaagttaacaagcttcagtaa

SEQ ID NO: 2343 - DNA, 3732 bp, Homo sapiens
  source 1..3732: mol_type = genomic DNA
accagaggagagagcgagagagggaaccagaccccagttcgccgactaagcagaagaaagatcaaaaaccggaaaagaggagaagagcaaacaggcactttgaggaacaatcccctttaactccaagccgacagcggtctaggaattcaagttcagtgcctaccgaagacaaaggcgccccgagggagtggcggtgcgaccccagggcgtgggcccggccgcggagcccacactgcccggctgacccggtggtctcggaccatgtctcccgccccaagacccccccgttgtctcctgctccccctgctcacgctcggcaccgcgctcgcctccctcggctcggcccaaagcagcagcttcagccccgaagcctggctacagcaatatggctacctgcctcccggggacctacgtacccacacacagcgctcaccccagtcactctcagcggccatcgctgccatgcagaagttttacggcttgcaagtaacaggcaaagctgatgcagacaccatgaaggccatgaggcgcccccgatgtggtgttccagacaagtttggggctgagatcaaggccaatgttcgaaggaagcgctacgccatccagggtctcaaatggcaacataatgaaatcactttctgcatccagaattacacccccaaggtgggcgagtatgccacatacgaggccattcgcaaggcgttccgcgtgtgggagagtgccacaccactgcgcttccgcgaggtgccctatgcctacatccgtgagggccatgagaagcaggccgacatcatgatcttctttgccgagggcttccatggcgacagcacgcccttcgatggtgagggcggcttcctggcccatgcctacttcccaggccccaacattggaggagacacccactttgactctgccgagccttggactgtcaggaatgaggatctgaatggaaatgacatcttcctggtggctgtgcacgagctgggccatgccctggggctcgagcattccagtgacccctcggccatcatggcacccttttaccagtggatggacacggagaattttgtgctgcccgatgatgaccgccggggcatccagcaactttatgggggtgagtcagggttccccaccaagatgccccctcaacccaggactacctcccggccttctgttcctgataaacccaaaaaccccacctatgggcccaacatctgtgacgggaactttgacaccgtggccatgctccgaggggagatgtttgtcttcaaggagcgctggttctggcgggtgaggaataaccaagtgatggatggatacccaatgcccattggccagttctggcggggcctgcctgcgtccatcaacactgcctacgagaggaaggatggcaaattcgtcttcttcaaaggagacaagcattgggtgtttgatgaggcgtccctggaacctggctaccccaagcacattaaggagctgggccgagggctgcctaccgacaagattgatgctgctctcttctggatgcccaatggaaagacctacttcttccgtggaaacaagtactaccgtttcaacgaagagctcagggcagtggatagcgagtaccccaagaacatcaaagtctgggaagggatccctgagtctcccagagggtcattcatgggcagcgatgaagtcttcacttacttctacaaggggaacaaatactggaaattcaacaaccagaagctgaaggtagaaccgggctaccccaagtcagccctgagggactggatgggctgcccatcgggaggccggccggatgaggggactgaggaggagacggaggtgatcatcattgaggtggacgaggagggcggcggggcggtgagcgcggctgccgtggtgctgcccgtgctgctgctgctcctggtgctggcggtgggccttgcagtcttcttcttcagacgccatgggacccccaggcgactgctctactgccagcgttccctgctggacaaggtctgacgcccaccgccggcccgcccactcctaccacaaggactttgcctctgaaggccagtggcagcaggtggtggtgggtgggctgttcccatcgtcccgagccccctccccgcagcctccttgcttctctctgtcccctggctggcctccttcaccctgaccgcctccctccctcctgccccggcattgcatcttccctagataggtcccctgagggctgagtgggagggcggccctttccagcctctgcccctcaggggaaccctgtagctttgtgtctgtccagccccatctgaatgtgttgggggctctgcacttgaaggcaggaccctcagacctcgctggtaaaggtcaaatggggtcatctgctccttttccatcccctgacataccttaacctctgaactctgacctcaggaggctctgggcactccagccctgaaagccccaggtgtacccaattggcagcctctcactactctttctggctaaaaggaatctaatcttgttgagggtagagaccctgagacagtgtgagggggtggggactgccaagccaccctaagaccttgggaggaaaactcagagagggtcttcgttgctcagtcagtcaagttcctcggagatctgcctctgcctcacctaccccagggaacttccaaggaaggagcctgagccactggggactaagtgggcagaagaaacccttggcagccctgtgcctctcgaatgttagccttggatggggctttcacagttagaagagctgaaaccaggggtgcagctgtcaggtagggtggggccggtgggagaggcccgggtcagagccctgggggtgagcctgaaggccacagagaaagaaccttgcccaaactcaggcagctggggctgaggcccaaaggcagaacagccagagggggcaggaggggaccaaaaaggaaaatgaggacgtgcagcagcattggaaggctggggccgggcaggccaggccaagccaagcagggggccacagggtgggctgtggagctctcaggaagggccctgaggaaggcacacttgctcctgttggtccctgtccttgctgcccaggcagcgtggaggggaagggtagggcagccagagaaaggagcagagaaggcacacaaacgaggaatgaggggcttcacgagaggccacagggcctggctggccacgctgtcccggcctgctcaccatctcagtgaggggcaggagctggggctcgcttaggctgggtccacgcttccctggtgccagcacccctcaagcctgtctcaccagtggcctgccctctcgctcccccacccagcccacccattgaagtctccttgggccaccaaaggtggtggccatggtaccggggacttgggagagtgagacccagtggagggagcaagaggagagggatgtcgggggggtggggcacggggtaggggaaatggggtgaacggtgctggcagttcggctagatttctgtcttgtttgtttttttgttttgtttaatgtatatttttattataattattatatatgaattccattcaaatcgttcctttttgttaacaaggggcatggggaggggtgggggtgggggggcagaggcgtctgaccccaggaacctgcagggcggggctgggtcggtgccctctaaggacaattttgaccttgttcaacctttccacaaagaataaattgtgtttcacattc

SEQ ID NO: 2344 - DNA, 3741 bp, Homo sapiens
  source 1..3741: mol_type = genomic DNA
tggggtgacgaggtcgtgcactgagggtggacgtagaggccaggagtagcaggcggccggggaaaagaggtggagaaaggaaaaaagaggagaaaagtggaggagggcgagtaggggggtggggcagagaggggcgggcccgagtgcgccccccgcccccagccccgctctgccagctccctcccagcccagccggctacatctggcggctgccctcccttgtttccgctgcatccagacttcctcaggcggtggctggaggctgcgcatctggggctttaaacatacaaagggattgccaggacctgcggcggcggcggcggcggcgggggctggggcgcgggggccggaccatgagccgctgagccgggcaaaccccaggccaccgagccagcggaccctcggagcgcagccctgcgccgcggagcaggctccaaccaggcggcgaggcggccacacgcaccgagccagcgacccccgggcgacgcgcggggccagggagcgctacgatggaggcgctaatggcccggggcgcgctcacgggtcccctgagggcgctctgtctcctgggctgcctgctgagccacgccgccgccgcgccgtcgcccatcatcaagttccccggcgatgtcgcccccaaaacggacaaagagttggcagtgcaatacctgaacaccttctatggctgccccaaggagagctgcaacctgtttgtgctgaaggacacactaaagaagatgcagaagttctttggactgccccagacaggtgatcttgaccagaataccatcgagaccatgcggaagccacgctgcggcaacccagatgtggccaactacaacttcttccctcgcaagcccaagtgggacaagaaccagatcacatacaggatcattggctacacacctgatctggacccagagacagtggatgatgcctttgctcgtgccttccaagtctggagcgatgtgaccccactgcggttttctcgaatccatgatggagaggcagacatcatgatcaactttggccgctgggagcatggcgatggatacccctttgacggtaaggacggactcctggctcatgccttcgccccaggcactggtgttgggggagactcccattttgatgacgatgagctatggaccttgggagaaggccaagtggtccgtgtgaagtatgggaacgccgatggggagtactgcaagttccccttcttgttcaatggcaaggagtacaacagctgcactgataccggccgcagcgatggcttcctctggtgctccaccacctacaactttgagaaggatggcaagtacggcttctgtccccatgaagccctgttcaccatgggcggcaacgctgaaggacagccctgcaagtttccattccgcttccagggcacatcctatgacagctgcaccactgagggccgcacggatggctaccgctggtgcggcaccactgaggactacgaccgcgacaagaagtatggcttctgccctgagaccgccatgtccactgttggtgggaactcagaaggtgccccctgtgtcttccccttcactttcctgggcaacaaatatgagagctgcaccagcgccggccgcagtgacggaaagatgtggtgtgcgaccacagccaactacgatgatgaccgcaagtggggcttctgccctgaccaagggtacagcctgttcctcgtggcagcccacgagtttggccacgccatggggctggagcactcccaagaccctggggccctgatggcacccatttacacctacaccaagaacttccgtctgtcccaggatgacatcaagggcattcaggagctctatggggcctctcctgacattgaccttggcaccggccccacccccacgctgggccctgtcactcctgagatctgcaaacaggacattgtatttgatggcatcgctcagatccgtggtgagatcttcttcttcaaggaccggttcatttggcggactgtgacgccacgtgacaagcccatggggcccctgctggtggccacattctggcctgagctcccggaaaagattgatgcggtatacgaggccccacaggaggagaaggctgtgttctttgcagggaatgaatactggatctactcagccagcaccctggagcgagggtaccccaagccactgaccagcctgggactgccccctgatgtccagcgagtggatgccgcctttaactggagcaaaaacaagaagacatacatctttgctggagacaaattctggagatacaatgaggtgaagaagaaaatggatcctggcttccccaagctcatcgcagatgcctggaatgccatccccgataacctggatgccgtcgtggacctgcagggcggcggtcacagctacttcttcaagggtgcctattacctgaagctggagaaccaaagtctgaagagcgtgaagtttggaagcatcaaatccgactggctaggctgctgagctggccctggctcccacaggcccttcctctccactgccttcgatacaccgggcctggagaactagagaaggacccggaggggcctggcagccgtgccttcagctctacagctaatcagcattctcactcctacctggtaatttaagattccagagagtggctcctcccggtgcccaagaatagatgctgactgtactcctcccaggcgccccttccccctccaatcccaccaaccctcagagccacccctaaagagatactttgatattttcaacgcagccctgctttgggctgccctggtgctgccacacttcaggctcttctcctttcacaaccttctgtggctcacagaacccttggagccaatggagactgtctcaagagggcactggtggcccgacagcctggcacagggcagtgggacagggcatggccaggtggccactccagacccctggcttttcactgctggctgccttagaacctttcttacattagcagtttgctttgtatgcactttgtttttttctttgggtcttgttttttttttccacttagaaattgcatttcctgacagaaggactcaggttgtctgaagtcactgcacagtgcatctcagcccacatagtgatggttcccctgttcactctacttagcatgtccctaccgagtctcttctccactggatggaggaaaaccaagccgtggcttcccgctcagccctccctgcccctcccttcaaccattccccatgggaaatgtcaacaagtatgaataaagacacctactgagtggccgtgtttgccatctgttttagcagagcctagacaagggccacagacccagccagaagcggaaacttaaaaagtccgaatctctgctccctgcagggcacaggtgatggtgtctgctggaaaggtcagagcttccaaagtaaacagcaagagaacctcagggagagtaagctctagtccctctgtcctgtagaaagagccctgaagaatcagcaattttgttgctttattgtggcatctgttcgaggtttgcttcctctttaagtctgtttcttcattagcaatcatatcagttttaatgctactactaacaatgaacagtaacaataatatccccctcaattaatagagtgctttctatgtgcaaggcacttttcacgtgtcacctattttaacctttccaaccacataaataaaaaaggccattattagttgaatcttattgatgaagaga

SEQ ID NO: 2345 - DNA, 3377 bp, Homo sapiens
  source 1..3377: mol_type = genomic DNA
atgcctgccctcctgggaatgaagcacagcaggtctcagcctcatcttacccagccccccactcaagatggaggtgcctggtttgaacacctctgacaaatggaagtctgtgttgtccagaggcaatgcagtgggggcttaagaagataactctggacttagaccgcttggcttcaaatcaaagagtgcatgaaccaaccagctggcctagtgatgatgttaggcaagtgacttctcagtttcttcatctgcaaactgggaaatttcctatctcagggttaaaagagaggtaatcttaggtgcttacctagcacatgcaatacctgaacaccttctatggctgccccaaggagagctgcaacctgtttgtgctgaaggacacactaaagaagatgcagaagttctttggactgccccagacaggtgatcttgaccagaataccatcgagaccatgcggaagccacgctgcggcaacccagatgtggccaactacaacttcttccctcgcaagcccaagtgggacaagaaccagatcacatacaggatcattggctacacacctgatctggacccagagacagtggatgatgcctttgctcgtgccttccaagtctggagcgatgtgaccccactgcggttttctcgaatccatgatggagaggcagacatcatgatcaactttggccgctgggagcatggcgatggatacccctttgacggtaaggacggactcctggctcatgccttcgccccaggcactggtgttgggggagactcccattttgatgacgatgagctatggaccttgggagaaggccaagtggtccgtgtgaagtatgggaacgccgatggggagtactgcaagttccccttcttgttcaatggcaaggagtacaacagctgcactgataccggccgcagcgatggcttcctctggtgctccaccacctacaactttgagaaggatggcaagtacggcttctgtccccatgaagccctgttcaccatgggcggcaacgctgaaggacagccctgcaagtttccattccgcttccagggcacatcctatgacagctgcaccactgagggccgcacggatggctaccgctggtgcggcaccactgaggactacgaccgcgacaagaagtatggcttctgccctgagaccgccatgtccactgttggtgggaactcagaaggtgccccctgtgtcttccccttcactttcctgggcaacaaatatgagagctgcaccagcgccggccgcagtgacggaaagatgtggtgtgcgaccacagccaactacgatgatgaccgcaagtggggcttctgccctgaccaagggtacagcctgttcctcgtggcagcccacgagtttggccacgccatggggctggagcactcccaagaccctggggccctgatggcacccatttacacctacaccaagaacttccgtctgtcccaggatgacatcaagggcattcaggagctctatggggcctctcctgacattgaccttggcaccggccccacccccacgctgggccctgtcactcctgagatctgcaaacaggacattgtatttgatggcatcgctcagatccgtggtgagatcttcttcttcaaggaccggttcatttggcggactgtgacgccacgtgacaagcccatggggcccctgctggtggccacattctggcctgagctcccggaaaagattgatgcggtatacgaggccccacaggaggagaaggctgtgttctttgcagggaatgaatactggatctactcagccagcaccctggagcgagggtaccccaagccactgaccagcctgggactgccccctgatgtccagcgagtggatgccgcctttaactggagcaaaaacaagaagacatacatctttgctggagacaaattctggagatacaatgaggtgaagaagaaaatggatcctggcttccccaagctcatcgcagatgcctggaatgccatccccgataacctggatgccgtcgtggacctgcagggcggcggtcacagctacttcttcaagggtgcctattacctgaagctggagaaccaaagtctgaagagcgtgaagtttggaagcatcaaatccgactggctaggctgctgagctggccctggctcccacaggcccttcctctccactgccttcgatacaccgggcctggagaactagagaaggacccggaggggcctggcagccgtgccttcagctctacagctaatcagcattctcactcctacctggtaatttaagattccagagagtggctcctcccggtgcccaagaatagatgctgactgtactcctcccaggcgccccttccccctccaatcccaccaaccctcagagccacccctaaagagatactttgatattttcaacgcagccctgctttgggctgccctggtgctgccacacttcaggctcttctcctttcacaaccttctgtggctcacagaacccttggagccaatggagactgtctcaagagggcactggtggcccgacagcctggcacagggcagtgggacagggcatggccaggtggccactccagacccctggcttttcactgctggctgccttagaacctttcttacattagcagtttgctttgtatgcactttgtttttttctttgggtcttgttttttttttccacttagaaattgcatttcctgacagaaggactcaggttgtctgaagtcactgcacagtgcatctcagcccacatagtgatggttcccctgttcactctacttagcatgtccctaccgagtctcttctccactggatggaggaaaaccaagccgtggcttcccgctcagccctccctgcccctcccttcaaccattccccatgggaaatgtcaacaagtatgaataaagacacctactgagtggccgtgtttgccatctgttttagcagagcctagacaagggccacagacccagccagaagcggaaacttaaaaagtccgaatctctgctccctgcagggcacaggtgatggtgtctgctggaaaggtcagagcttccaaagtaaacagcaagagaacctcagggagagtaagctctagtccctctgtcctgtagaaagagccctgaagaatcagcaattttgttgctttattgtggcatctgttcgaggtttgcttcctctttaagtctgtttcttcattagcaatcatatcagttttaatgctactactaacaatgaacagtaacaataatatccccctcaattaatagagtgctttctatgtgcaaggcacttttcacgtgtcacctattttaacctttccaaccacataaataaaaaaggccattattagttg

SEQ ID NO: 2346 - DNA, 1978 bp, Homo sapiens
  source 1..1978: mol_type = genomic DNA
agatgttgtcttgtgagcgtgcgcgcgcctggctggaggggcactgagcctggccgcagtgttgccaatacctgaacaccttctatggctgccccaaggagagctgcaacctgtttgtgctgaaggacacactaaagaagatgcagaagttctttggactgccccagacaggtgatcttgaccagaataccatcgagaccatgcggaagccacgctgcggcaacccagatgtggccaactacaacttcttccctcgcaagcccaagtgggacaagaaccagatcacatacaggatcattggctacacacctgatctggacccagagacagtggatgatgcctttgctcgtgccttccaagtctggagcgatgtgaccccactgcggttttctcgaatccatgatggagaggcagacatcatgatcaactttggccgctgggagcatggcgatggatacccctttgacggtaaggacggactcctggctcatgccttcgccccaggcactggtgttgggggagactcccattttgatgacgatgagctatggaccttgggagaaggccaagtggtccgtgtgaagtatgggaacgccgatggggagtactgcaagttccccttcttgttcaatggcaaggagtacaacagctgcactgataccggccgcagcgatggcttcctctggtgctccaccacctacaactttgagaaggatggcaagtacggcttctgtccccatgaagccctgttcaccatgggcggcaacgctgaaggacagccctgcaagtttccattccgcttccagggcacatcctatgacagctgcaccactgagggccgcacggatggctaccgctggtgcggcaccactgaggactacgaccgcgacaagaagtatggcttctgccctgagaccgccatgtccactgttggtgggaactcagaaggtgccccctgtgtcttccccttcactttcctgggcaacaaatatgagagctgcaccagcgccggccgcagtgacggaaagatgtggtgtgcgaccacagccaactacgatgatgaccgcaagtggggcttctgccctgaccaagggtacagcctgttcctcgtggcagcccacgagtttggccacgccatggggctggagcactcccaagaccctggggccctgatggcacccatttacacctacaccaagaacttccgtctgtcccaggatgacatcaagggcattcaggagctctatggggcctctcctgacattgaccttggcaccggccccacccccacgctgggccctgtcactcctgagatctgcaaacaggacattgtatttgatggcatcgctcagatccgtggtgagatcttcttcttcaaggaccggttcatttggcggactgtgacgccacgtgacaagcccatggggcccctgctggtggccacattctggcctgagctcccggaaaagattgatgcggtatacgaggccccacaggaggagaaggctgtgttctttgcagggaatgaatactggatctactcagccagcaccctggagcgagggtaccccaagccactgaccagcctgggactgccccctgatgtccagcgagtggatgccgcctttaactggagcaaaaacaagaagacatacatctttgctggagacaaattctggagatacaatgaggtgaagaagaaaatggatcctggcttccccaagctcatcgcagatgcctggaatgccatccccgataacctggatgccgtcgtggacctgcagggcggcggtcacagctacttcttcaagggtgcctattacctgaagctggagaaccaaagtctgaagagcgtgaagtttggaagcatcaaatccgactggctaggctgctgagctggccctggctcccacaggcccttcctctccactgccttcgatacaccgggcctggagaactagagaaggacccggagggg

SEQ ID NO: 2347 - DNA, 2016 bp, Homo sapiens
  source 1..2016: mol_type = genomic DNA
aatcactgtgttgccttgcaaaattgggaaggttgagagaaattagtaaagtaggttgtatcatcctactttgaatttggaatgtttggaaatggtcctgctgccatttggatgaaagcaaggatgagtcaagctgcgggtgatccaaacaaacactgtcactctttaaaagctgcgctcccgaggttggacctacaaggaggcaggcaagacagcaaggcatagagacaacatagagctaagtaaagccagtggaaatgaagagtcttccaatcctactgttgctgtgcgtggcagtttgctcagcctatccattggatggagctgcaaggggtgaggacaccagcatgaaccttgttcagaaatatctagaaaactactacgacctcaaaaaagatgtgaaacagtttgttaggagaaaggacagtggtcctgttgttaaaaaaatccgagaaatgcagaagttccttggattggaggtgacggggaagctggactccgacactctggaggtgatgcgcaagcccaggtgtggagttcctgatgttggtcacttcagaacctttcctggcatcccgaagtggaggaaaacccaccttacatacaggattgtgaattatacaccagatttgccaaaagatgctgttgattctgctgttgagaaagctctgaaagtctgggaagaggtgactccactcacattctccaggctgtatgaaggagaggctgatataatgatctcttttgcagttagagaacatggagacttttacccttttgatggacctggaaatgttttggcccatgcctatgcccctgggccagggattaatggagatgcccactttgatgatgatgaacaatggacaaaggatacaacagggaccaatttatttctcgttgctgctcatgaaattggccactccctgggtctctttcactcagccaacactgaagctttgatgtacccactctatcactcactcacagacctgactcggttccgcctgtctcaagatgatataaatggcattcagtccctctatggacctccccctgactcccctgagacccccctggtacccacggaacctgtccctccagaacctgggacgccagccaactgtgatcctgctttgtcctttgatgctgtcagcactctgaggggagaaatcctgatctttaaagacaggcacttttggcgcaaatccctcaggaagcttgaacctgaattgcatttgatctcttcattttggccatctcttccttcaggcgtggatgccgcatatgaagttactagcaaggacctcgttttcatttttaaaggaaatcaattctgggctatcagaggaaatgaggtacgagctggatacccaagaggcatccacaccctaggtttccctccaaccgtgaggaaaatcgatgcagccatttctgataaggaaaagaacaaaacatatttctttgtagaggacaaatactggagatttgatgagaagagaaattccatggagccaggctttcccaagcaaatagctgaagactttccagggattgactcaaagattgatgctgtttttgaagaatttgggttcttttatttctttactggatcttcacagttggagtttgacccaaatgcaaagaaagtgacacacactttgaagagtaacagctggcttaattgttgaaagagatatgtagaaggcacaatatgggcactttaaatgaagctaataattcttcacctaagtctctgtgaattgaaatgttcgttttctcctgcctgtgctgtgactcgagtcacactcaagggaacttgagcgtgaatctgtatcttgccggtcatttttatgttattacagggcattcaaatgggctgctgcttagcttgcaccttgtcacatagagtgatctttcccaagagaaggggaagcactcgtgtgcaacagacaagtgactgtatctgtgtagactatttgcttatttaataaagacgatttgtcagttatttta

SEQ ID NO: 2348 - DNA, 1125 bp, Homo sapiens
  source 1..1125: mol_type = genomic DNA
gaaaacaccaaatcaaccataggtccaagaacaattgtctctggacggcagctatgcgactcaccgtgctgtgtgctgtgtgcctgctgcctggcagcctggccctgccgctgcctcaggaggcgggaggcatgagtgagctacagtgggaacaggctcaggactatctcaagagattttatctctatgactcagaaacaaaaaatgccaacagtttagaagccaaactcaaggagatgcaaaaattctttggcctacctataactggaatgttaaactcccgcgtcatagaaataatgcagaagcccagatgtggagtgccagatgttgcagaatactcactatttccaaatagcccaaaatggacttccaaagtggtcacctacaggatcgtatcatatactcgagacttaccgcatattacagtggatcgattagtgtcaaaggctttaaacatgtggggcaaagagatccccctgcatttcaggaaagttgtatggggaactgctgacatcatgattggctttgcgcgaggagctcatggggactcctacccatttgatgggccaggaaacacgctggctcatgcctttgcgcctgggacaggtctcggaggagatgctcacttcgatgaggatgaacgctggacggatggtagcagtctagggattaacttcctgtatgctgcaactcatgaacttggccattctttgggtatgggacattcctctgatcctaatgcagtgatgtatccaacctatggaaatggagatccccaaaattttaaactttcccaggatgatattaaaggcattcagaaactatatggaaagagaagtaattcaagaaagaaatagaaacttcaggcagaacatccattcattcattcattggattgtatatcattgttgcacaatcagaattgataagcactgttcctccactccatttagcaattatgtcacccttttttattgcagttggtttttgaatgtctttcactccttttaaggataaactcctttatggtgtgactgtgtcttattcatctatacttgcagtgggtagatgtcaataaatgttacatacacaaataaataaaatgtttattccatggtaaattta

SEQ ID NO: 2349 - DNA, 2336 bp, Homo sapiens
  source 1..2336: mol_type = genomic DNA
agacacctctgccctcaccatgagcctctggcagcccctggtcctggtgctcctggtgctgggctgctgctttgctgcccccagacagcgccagtccacccttgtgctcttccctggagacctgagaaccaatctcaccgacaggcagctggcagaggaatacctgtaccgctatggttacactcgggtggcagagatgcgtggagagtcgaaatctctggggcctgcgctgctgcttctccagaagcaactgtccctgcccgagaccggtgagctggatagcgccacgctgaaggccatgcgaaccccacggtgcggggtcccagacctgggcagattccaaacctttgagggcgacctcaagtggcaccaccacaacatcacctattggatccaaaactactcggaagacttgccgcgggcggtgattgacgacgcctttgcccgcgccttcgcactgtggagcgcggtgacgccgctcaccttcactcgcgtgtacagccgggacgcagacatcgtcatccagtttggtgtcgcggagcacggagacgggtatcccttcgacgggaaggacgggctcctggcacacgcctttcctcctggccccggcattcagggagacgcccatttcgacgatgacgagttgtggtccctgggcaagggcgtcgtggttccaactcggtttggaaacgcagatggcgcggcctgccacttccccttcatcttcgagggccgctcctactctgcctgcaccaccgacggtcgctccgacggcttgccctggtgcagtaccacggccaactacgacaccgacgaccggtttggcttctgccccagcgagagactctacacccaggacggcaatgctgatgggaaaccctgccagtttccattcatcttccaaggccaatcctactccgcctgcaccacggacggtcgctccgacggctaccgctggtgcgccaccaccgccaactacgaccgggacaagctcttcggcttctgcccgacccgagctgactcgacggtgatggggggcaactcggcgggggagctgtgcgtcttccccttcactttcctgggtaaggagtactcgacctgtaccagcgagggccgcggagatgggcgcctctggtgcgctaccacctcgaactttgacagcgacaagaagtggggcttctgcccggaccaaggatacagtttgttcctcgtggcggcgcatgagttcggccacgcgctgggcttagatcattcctcagtgccggaggcgctcatgtaccctatgtaccgcttcactgaggggccccccttgcataaggacgacgtgaatggcatccggcacctctatggtcctcgccctgaacctgagccacggcctccaaccaccaccacaccgcagcccacggctcccccgacggtctgccccaccggaccccccactgtccacccctcagagcgccccacagctggccccacaggtcccccctcagctggccccacaggtccccccactgctggcccttctacggccactactgtgcctttgagtccggtggacgatgcctgcaacgtgaacatcttcgacgccatcgcggagattgggaaccagctgtatttgttcaaggatgggaagtactggcgattctctgagggcagggggagccggccgcagggccccttccttatcgccgacaagtggcccgcgctgccccgcaagctggactcggtctttgaggagcggctctccaagaagcttttcttcttctctgggcgccaggtgtgggtgtacacaggcgcgtcggtgctgggcccgaggcgtctggacaagctgggcctgggagccgacgtggcccaggtgaccggggccctccggagtggcagggggaagatgctgctgttcagcgggcggcgcctctggaggttcgacgtgaaggcgcagatggtggatccccggagcgccagcgaggtggaccggatgttccccggggtgcctttggacacgcacgacgtcttccagtaccgagagaaagcctatttctgccaggaccgcttctactggcgcgtgagttcccggagtgagttgaaccaggtggaccaagtgggctacgtgacctatgacatcctgcagtgccctgaggactagggctcccgtcctgctttggcagtgccatgtaaatccccactgggaccaaccctggggaaggagccagtttgccggatacaaactggtattctgttctggaggaaagggaggagtggaggtgggctgggccctctcttctcacctttgttttttgttggagtgtttctaataaacttggattctctaaccttta

SEQ ID NO: 2350 - DNA, 1262 bp, Homo sapiens
  source 1..1262: mol_type = genomic DNA
aatggccccgccccagccactaaggttcggccttttctgcccagctggccgcctcttccttggtctggtgtcccaggcaccgcccacgggtctagcctcttctcaggagtgctctacagcgccccctaggccaccaagattgtttagctccctgtcgggtcggcccctgactccttattggactcatccatctggctcatccaaggccttgggtctctccagctgactcgacggtgatggggggcaactcggcgggggagctgtgcgtcttccccttcactttcctgggtaaggagtactcgaactttgacagcgacaagaagtggggcttctgcccggaccaaggatacagtttgttcctcgtggcggcgcatgagttcggccacgcgctgggcttagatcattcctcagtgccggaggcgctcatgtaccctatgtaccgcttcactgaggggccccccttgcataaggacgacgtgaatggcatccggcacctctatggtcctcgccctgaacctgagccacggcctccaaccaccaccacaccgcagcccacggctcccccgacggtctgccccaccggaccccccactgtccacccccccttccttatcgccgacaagtggcccgcgctgccccgcaagctggactcggtctttgaggagcggctctccaagaagcttttcttcttctctgggcgccaggtgtgggtgtacacaggcgcgtcggtgctgggcccgaggcgtctggacaagctgggcctgggagccgacgtggcccaggtgaccggggccctccggagtggcagggggaagatgctgctgttcagcgggcggcgcctctggaggttcgacgtgaaggcgcagatggtggatccccggagcgccagcgaggtggaccggatgttccccggggtgcctttggacacgcacgacgtcttccagtaccgagagaaagcctatttctgccaggaccgcttctactggcgcgtgagttcccggagtgagttgaaccaggtggaccaagtgggctacgtgacctatgacatcctgcagtgccctgaggactagggctcccgtcctgctttggcagtgccatgtaaatccccactgggaccaaccctggggaaggagccagtttgccggatacaaactggtattctgttctggaggaaagggaggagtggaggtgggctgggccctctcttctcacctttgttttttgttggagtgtttctaataaacttggattctctaaccttt

SEQ ID NO: 2351 - DNA, 570 bp, Homo sapiens
  source 1..570: mol_type = genomic DNA
gatttacaaaggaatgaatctgcatgaaagtttaccaacaagatccctgcctgccttttgcaggctctcctgcaaccatctacttcatttttgatctcaggaagaccagagctgaggcttaggtggagaaaagcagggctagaattggaacccaaagcccagaatggcaggagaggatgtgggggctccacccgatcacctctgggttcaccaagagggtatctaccgcgacgaataccagcgcacgtgggtggccgtcgtggaagaggagacgagtttcctaagggcacgagtccagcaaattcaggttcccttaggtgacgcagctaggccaagtcaccttcttacctcccagctacctctcatgtggcaactctacccggaggagcgctacatggataacaactctcgcttgtggcagatacagcatcatttaatggtcaggggagtacaggagctgttgcttaagcttttgcctgatgactaacctggtgctgggattctacgaagatatgctcctttgttctgttcagtatttggcaatcacttcatccactactgcagtgcacc

SEQ ID NO: 2352 - DNA, 2274 bp, Homo sapiens
  source 1..2274: mol_type = genomic DNA
ggggcggagggcggtggccggccgcggtccgggcgtcaggccgggcggcgggggcggcagggaggcggcgctctggggccgcaggcggacgtactctgtgagcggcgcccgggcgcctgggcaggcgcctcccgagtaccggcgcccattttgcccgcccgctaaggagacccgtgcgcggcctacacgcttgggggacagccctttaagacgacatctccgcgaacgccggcctcttgagccagggggacgctcttttgaaagtcagtcccaaaacagttaaggttttattttattttgttttatttccaagtcacagcccccgaatctcgtacaactctccctggaccacttccggttgccggcccgcgcctcataacttcggttcgagtgacctcggcccgggatgcccctcggctcaccccgggctcacgtcgcgatcctggcttgagtggcccagggtgggagacctggaagttttagcctagctgttctcaaggcggattaattagcccaagaaacattatattcatgcttaggtggagaaaagcagggctagaattggaacccaaagcccagaatggcaggagaggatgtgggggctccacccgatcacctctgggttcaccaagagggtatctaccgcgacgaataccagcgcacgtgggtggccgtcgtggaagaggagacgagtttcctaagggcacgagtccagcaaattcaggttcccttaggtgacgcagctaggccaagtcaccttcttacctcccagctacctctcatgtggcaactctacccggaggagcgctacatggataacaactctcgcttgtggcagatacagcatcatttaatggtcaggggagtacaggagctgttgcttaagcttttgcctgatgactaacctggtgctgggattctacgaagatatgctcctttgttctgttcagtatttggcaatcacttcatccactactgcagtgcacccacccttgggcctggggggagggagtgggttgaaaaactgctcaagaaacagaagtttagcaagggtcatgaagaatactgcaagtgaaactgcagagagaggttacgtaggcagaaagcaagtcaacaaaagcacttagtcaggatccgtaacttgaaattgactcctttggaaattgccatagaacccttaatggacatcatcggctggacctgggatctgatgaatcccacaaaagtcagcaccttctacagaacagatgccctgatcaccaaggacttggtactgatttagagagaagagagcagctcctagcagcatcaacatctatttgtcgcttatttgccctgcagcaattcacctgcctttccttctcccatcctgtaaatatcctaggttttgctccagtgtttcccatcccagtactgacctaatttggatctgctgagtatttagagggctctgaaaagagatatgcattgatgaaattagctacaaaggcttgtgggcctttttttctatctgaaatcgtgtcttcaaattactggaagttgctgatcaaaattgtgggctcttgaattcattctctgattacagatattttaaataagctggtttctataagaacttcaagaaaaaccattttagctgcttaactggcacctttctcaggaagtaataacaccaaatattgctgattcctaggaaaacatttactacttgtaaagaatttcctgagttaaagtagttataacagtttatatacattaaaagtaaggttttactttaaaaaaaaaagtcttgggaataatagctaccatgtattggagtcctttccaggcactattgtatgtactttatatactttatcacatttaatcctcctgtcaatgctttgaggtaggtatgattcccattttatatatgagtaataaaaaaagctcaaggagtttaatcatttatcaagggtttcttctgcgaatgatagagccaggctgcgccgtcggctcctctagcctaacgttggtttacagtattcaaaaagagttgattgaattcaaggttttttttccatgtaaagctatttatatcttccaagcctaatgaaatggatattataaaaatacagttgattcatcctatgtttgggaagagtatttttagtgtaattattttccagcaattgtaagggcatatactgcttgtctcagaagaaaattccacgtagaggggctttaaagtctttatggaaaaaagaaaaataaaaatcatttttcttgttttag

SEQ ID NO: 2353 - DNA, 1361 bp, Homo sapiens
  source 1..1361: mol_type = genomic DNA
cgcgaaaaccccggatggtgaggagcaggcaaatgtgcaataccaacatgtctgtacctactgatggtgctgtaaccacctcacagattccagcttcggaacaagagaccctggttagaccaaagccattgcttttgaagttattaaagtctgttggtgcacaaaaagacacttatactatgaaagaggttcttttttatcttggccagtatattatgactaaacgattatatgatgagaagcaacaacatattgtatattgttcaaatgatcttctaggagatttgtttggcgtgccaagcttctctgtgaaagagcacaggaaaatatataccatgatctacaggaacttggtagtagtcaatcagcaggaagaaaattcagatgaattatctggtgaacgacaaagaaaacgccacaaatctgatagtatttccctttcctttgatgaaagcctggctctgtgtgtaataagggagatatgttgtgaaagaagcagtagcagtgaatctacagggacgccatcgaatccggatcttgatgctggtgtaagtgaacattcaggtgattggttggatcaggattcagtttcagatcagtttagtgtagaatttgaagttgaatctctcgactcagaagattatagccttagtgaagaaggacaagaactctcagatgaagatgatgaggtatatcaagttactgtgtatcaggcaggggagagtgatacagattcatttgaagaagatcctgaaatttccttagctgactattggaaatgcacttcatgcaatgaaatgaatcccccccttccatcacattgcaacagatgttgggcccttcgtgagaattggcttcctgaagataaagggaaagataaaggggaaatctctgagaaagccaaactggaaaactcaacacaagctgaagagggctttgatgttcctgattgtaaaaaaactatagtgaatgattccagagagtcatgtgttgaggaaaatgatgataaaattacacaagcttcacaatcacaagaaagtgaagactattctcagccatcaacttctagtagcattatttatagcagccaagaagatgtgaaagagtttgaaagggaagaaacccaagacaaagaagagagtgtggaatctagtttgccccttaatgccattgaaccttgtgtgatttgtcaaggtcgacctaaaaatggttgcattgtccatggcaaaacaggacatcttatggcctgctttacatgtgcaaagaagctaaagaaaaggaataagccctgcccagtatgtagacaaccaattcaaatgattgtgctaacttatttcccctagttgacctgtctataagag

SEQ ID NO: 2354 - DNA, 7198 bp, Homo sapiens
  source 1..7198: mol_type = genomic DNA
gcaccgcggcgagcttggctgcttctggggcctgtgtggccctgtgtgtcggaaagatggagcaagaagccgagcccgaggggcggccgcgacccctctgaccgagatcctgctgctttcgcagccaggagcaccgtccctccccggattagtgcgtacgagcgcccagtgccctggcccggagagtggaatgatccccgaggcccagggcgtcgtgcttccgcgcgccccgtgaaggaaactggggagtcttgagggacccccgactccaagcgcgaaaaccccggatggtgaggagcaggcaaatgtgcaataccaacatgtctgtacctactgatggtgctgtaaccacctcacagattccagcttcggaacaagagaccctggttagaccaaagccattgcttttgaagttattaaagtctgttggtgcacaaaaagacacttatactatgaaagaggttcttttttatcttggccagtatattatgactaaacgattatatgatgagaagcaacaacatattgtatattgttcaaatgatcttctaggagatttgtttggcgtgccaagcttctctgtgaaagagcacaggaaaatatataccatgatctacaggaacttggtagtagtcaatcagcaggaagaaaattcagatgaattatctggtgaacgacaaagaaaacgccacaaatctgatagtatttccctttcctttgatgaaagcctggctctgtgtgtaataagggagatatgttgtgaaagaagcagtagcagtgaatctacagggacgccatcgaatccggatcttgatgctggtgtaagtgaacattcaggtgattggttggatcaggattcagtttcagatcagtttagtgtagaatttgaagttgaatctctcgactcagaagattatagccttagtgaagaaggacaagaactctcagatgaagatgatgaggtatatcaagttactgtgtatcaggcaggggagagtgatacagattcatttgaagaagatcctgaaatttccttagctgactattggaaatgcacttcatgcaatgaaatgaatcccccccttccatcacattgcaacagatgttgggcccttcgtgagaattggcttcctgaagataaagggaaagataaaggggaaatctctgagaaagccaaactggaaaactcaacacaagctgaagagggctttgatgttcctgattgtaaaaaaactatagtgaatgattccagagagtcatgtgttgaggaaaatgatgataaaattacacaagcttcacaatcacaagaaagtgaagactattctcagccatcaacttctagtagcattatttatagcagccaagaagatgtgaaagagtttgaaagggaagaaacccaagacaaagaagagagtgtggaatctagtttgccccttaatgccattgaaccttgtgtgatttgtcaaggtcgacctaaaaatggttgcattgtccatggcaaaacaggacatcttatggcctgctttacatgtgcaaagaagctaaagaaaaggaataagccctgcccagtatgtagacaaccaattcaaatgattgtgctaacttatttcccctagttgacctgtctataagagaattatatatttctaactatataaccctaggaatttagacaacctgaaatttattcacatatatcaaagtgagaaaatgcctcaattcacatagatttcttctctttagtataattgacctactttggtagtggaatagtgaatacttactataatttgacttgaatatgtagctcatcctttacaccaactcctaattttaaataatttctactctgtcttaaatgagaagtacttggtttttttttttcttaaatatgtatatgacatttaaatgtaacttattattttttttgagaccgagtcttgctctgttacccaggctggagtgcagtggcgtgatcttggctcactgcaagctctgcctcccgggttcgcaccattctcctgcctcagcctcccaattagcttggcctacagtcatctgccaccacacctggctaattttttgtacttttagtagagacagggtttcaccgtgttagccaggatggtctcgatctcctgacctcgtgatccgcccacctcggcctcccaaagtgctgggattacaggcatgagccaccgcgtccggcctaaatgtcacttagtacctttgatataaagagaaaatgtgtgaaagatttagttttttgtttttttgtttgtttgtttgtttgtttgttttgagatgagtctctctgtcgcccaggctggagtgcagtgtcatgatctagcagtctccgcttcccgggttcaagccattctcctggctcagcctctggagcagctgggattacaggcatgcaccaccatgcccagctaatttttgtatttttagtagagatagggtttcaccatgttggccaggctggtcacgaactcctgacctcaagtgaggtcacccgcctcggcctcccgaagtgctgggattgcagatgtgagccaccatgtccagccaagaattagtatttaaattttagatactctttttttttttttttttttttttttttgagacagagtcttgctccatcacccatgctagagtgcagtggagtgatctcggctcactgcaacttccgccttctgggttcaagctattctcctgcctcagccttccaagtaactgggattacaggcatgtaccaccataccagctgatttttttgtatttttagtaaagacagggtttcaccatgttagccaggctgatcttgaactcctaaactcaagtgatctactcacctcagcctcccaaaatgctgggattacagatgtgaggcacctggcctcagatttttgatactcttaaaccttctgatccttagtttctctctccaaaatactctttctaggttaaaaaaaaaaaggctcttatatttggtgctatgtaaatgaaaatgttttttaggttttcttgatttaacaatagagacagggtctccctgtgttgcccaggctggtctcgaactcctgggctcaagagatcctcctgtcttggcctcgcaaagtgctaagtaggattacaggcgttagccaccacacccggctgtaaaaatgtacttattctccagcctcttttgtataaaccatagtaagggatgggagtaatgatgttatctgtgaaaatagccaccatttacccgtaagacaaaacttgttaaagcctcctgagtctaacctagattacatcaggccctttttcacacacaaaaaaatcctttatgggatttaatggaatctgttgtttccccctaagttgaaaaacaactctaagacactttaaagtaccttcttggcctgggttacatggttcccagcctaggtttcagacttttgcttaaggccagttttagaaacccgtgaattcagaaaagttaattcagaaatttgataaacagaattgttatttaaaaactaactggaaagattgttaagttctttctgaattattcagaaattatgcatcattttccttcaagaatgacagggtcagcatgtggaattccaagatacctcttgacttcctctcaagctccgtgtttggtcagtggaggcccatccgagctcagcactgagaagtgttagtttctttgggacccatctaccctgaccacatcatgatgttcatctgcagctgttgcaaggtgttcagattgtataaacataaatgtcacaaaaactttaaaagaagtgcaattctcaaaaggttaggtggactaaagcattctgtaaagcaactgctaataatgagcttacagtggatttgaatttgaaaaatatagtaacaagcctgtcaaatatctgcaagaactatggaataaaactactgatgcagtgaagacagttgaaaagatcaaacaaatgccaagctatatttataatgaacaaattcaagaaaaaggactacggaaagttcaggacatcaaagaagtcaggcaaaactcatcttgacccctgttgcaggcaaaggaacgcagctggaagaaaagatgatataacagttaacaggatgcagacatggcagaggtttcctaaaaatctcattatctataaccatttctatatttacatttgaaaatctcctttggagacttagaacctctaaattattgacttattttttatataaggtcactccgatgaaaggtgattacaaaatcatctacattgctgtctacaaaacagataatatggatgtttgatcgcatctcattgttaactctttactgatatgtttgtaaatacagaagtgaaatgtggacataaaatagttacgctatttggttaatggtactagacaacatgtaattaatgacattcaaaaatttatggctagtgatatatataaagtaaaattttctttgcagtaaaatatgccctttattatagaagggaggatataaggaaccaacagtttgtatgaaaatagctcaaataatatcttttattttgattttaatatttcttattttggtttattagtgtcttagaacaaaatggccttatataatgaagcctagttatgctggactgttttgatctcttttaattgttctgacagatagttggggatgagagccgaataaggtttgcctgaaataactgacactatataatttctgctttggcaaatactaagttctaacttgtcattcctggtagaacaagctttatttttcgagcctagcaatgatctagaagcagatgttatctcagtgccttttgcaatttgttgtgtgggtttttttttttttaaagccacacaataattttggaaaacaatgtatgggtagaacatgtgtctgttaattgcacacaaaaccacttttaatgggtacagagttaaatttgaaggaataagttctagctgaagtattatgaactccaaataatgctttgaggacctccaaaggtaaaagtactaatccctttggccatttattgagagagagagagagagagagtagggtgactatagttaatgtattgaatgttcttgctacaaataaatgatatttgagctgatgggtgtgctaattacactgatttgatcaatacccattgtatgtgaaacagtacatacaccatatttacaattatgtatttaacatttaaaatttctaatataagtatctctcaaactgtggattaacttcttgatttatatttaaatatgaatcttaagcaaaacagtgaaaataaccatcttgatttagtgtttttctcccatatgtgaattgtatatacttaggtgaagacaataaaatcaactgaactgtaagcttagaataggactgaggtaattctgcacagcaactttactaatggtacattgttgcttcaaaactctctctctctctctctgtctgtctcaataaatggccaaagggattagtagtttacctgtggaggtcctccaagcattatttggagttgataatacttcagctacaaccaagcagaatctcttttttttggaggtcctcgaagcattatttggagttgataatacttcagcttcaatttggagttgataatatttcagctagaacctagtagaatctgtttttttcctttggaggtcctcaaagcattattggagttcataatactgaagctagaaccaagcagaatctgtttttttctgaggagtatcggtagcataaatgtgattataaacatagtacacttgatatatggaggcagtgacagctatttttacaaaatttaaatctgcaaatggattcaacatgtttatgggttattaaaattgtctgatttcttaggttctttatagtacacgtgttgaaaataaatgattaagaattgtttcaagaatgcaattatttgatcttaaatttttatgagttgttaaaatagaaattatttgaatatcatatatttgggtaacaaaaggcacaagtctgaatgtgtttctttttctggaatggccatgcctgcccactttagaaatacaaatatcactgggcagcttgaagcagttgggagcctccaatgagagcaacttgagagaatgatgttgcaagttagtaggagtaagaaatgctgtgttctccctgtcttctcttaggtcacatggcagcctggcctaagtgatcgtgaatggtctataagggaggtagctgggacagggaggggagtttgggctagccaccgtaccacttgtcagcgtgaaaagtaagattgtaattgcctgtttagttttctgcctcatctttgaaagttccaccaagctgggaacctcttgattgtgaggcacaaatgtaagtacatcagaaaaaaacaaaaaaactggctttaaagcaggagcttgtgggcccctaagccagacggggactagcttttggcattatataattaagattttttaaatccttaataagggttttattttatttttatttattttttgagacggagtcttgctctgtggctcaggctggagtacagtggtgcaatcttggctcactgcaacctctgcctcctggctgtgttcaagtggttctgcttcagcctcccaagtagctggggttagagcaccctgtcaccacgccccgctaatttttgtatttctagcagagatgaagtttcactatgttggccaggctgggctcaaactcctgacctcaagtgatctgcccgccttggccccccaaagtgctgtgattacaggcgtgagccgccacgcccagcctaataagggttttaaagataattagtgtgtaggtctgtaggcttatgatggtaaccacaagttgttaatggcattgtgaaaagtttttagttgcgctttatgggtggatgctgaattacattttgatttgatacttataaaaagaaaaagtatttcttcagcttaaaaaattgtttaaaagtttgtgatcatattgtctaccatgtagccagctttcaattatatgtaagagggactttttgacatttacaaataatactttgaggtagatatctgaaagcaccagcacttggaaggtgttcagaagtaacaaattataaaatgagctaacaaacgaaaggcaaaataaaaccgtaaagcaagc

SEQ ID NO: 2355 - DNA, 966 bp, Homo sapiens
  source 1..966: mol_type = genomic DNA
atgtgcaataccaacatgtctgtacctactgatggtgctgtaaccacctcacagattccagcttcggaacaagagaccctggttagaccaaagccattgcttttgaagttattaaagtctgttggtgcacaaaaagacacttatactatgaaagaggatcttgatgctggtgtaagtgaacattcaggtgattggttggatcaggattcagtttcagatcagtttagtgtagaatttgaagttgaatctctcgactcagaagattatagccttagtgaagaaggacaagaactctcagatgaagatgatgaggtatatcaagttactgtgtatcaggcaggggagagtgatacagattcatttgaagaagatcctgaaatttccttagctgactattggaaatgcacttcatgcaatgaaatgaatcccccccttccatcacattgcaacagatgttgggcccttcgtgagaattggcttcctgaagataaagggaaagataaaggggaaatctctgagaaagccaaactggaaaactcaacacaagctgaagagggctttgatgttcctgattgtaaaaaaactatagtgaatgattccagagagtcatgtgttgaggaaaatgatgataaaattacacaagcttcacaatcacaagaaagtgaagactattctcagccatcaacttctagtagcattatttatagcagccaagaagatgtgaaagagtttgaaagggaagaaacccaagacaaagaagagagtgtggaatctagtttgccccttaatgccattgaaccttgtgtgatttgtcaaggtcgacctaaaaatggttgcattgtccatggcaaaacaggacatcttatggcctgctttacatgtgcaaagaagctaaagaaaaggaataagccctgcccagtatgtagacaaccaattcaaatgattgtgctaacttatttcccctag

SEQ ID NO: 2356 - DNA, 1582 bp, Homo sapiens
  source 1..1582: mol_type = genomic DNA
gcggccgcgacccctctgaccgagatcctgctgctttcgcagccaggagcaccgtccctccccggattagtgcgtacgagcgcccagtgccctggcccggagagtggaatgatccccgaggcccagggcgtcgtgcttccgcgcgccccgtgaaggaaactggggagtcttgagggacccccgactccaagcgcgaaaaccccggatggtgaggagcaggcaaatgtgcaataccaacatgtctgtacctactgatggtgctgtaaccacctcacagattccagcttcggaacaagagaccctggttagaccaaagccattgcttttgaagttattaaagtctgttggtgcacaaaaagacacttatactatgaaagagaaaatatataccatgatctacaggaacttggtagtagtcaatcagcaggaatcatcggactcaggtacatctgtgagtgagaacaggtgtcaccttgaaggtgggagtgatcaaaaggaccttgtacaagagcttcaggaagagaaaccttcatcttcacatttggtttctagaccatctacctcatctagaaggagagcaattagtgagacagaagaaaattcagatgaattatctggtgaacgacaaagaaaacgccacaaatctgatagtatttccctttcctttgatgaaagcctggctctgtgtgtaataagggagatatgttgtgaaagaagcagtagcagtgaatctacagggacgccatcgaatccggatcttgatgctggtgtaagtgaacattcaggtgattggttggatcaggattcagtttcagatcagtttagtgtagaatttgaagttgaatctctcgactcagaagattatagccttagtgaagaaggacaagaactctcagatgaagatgatgaggtatatcaagttactgtgtatcaggcaggggagagtgatacagattcatttgaagaagatcctgaaatttccttagctgactattggaaatgcacttcatgcaatgaaatgaatcccccccttccatcacattgcaacagatgttgggcccttcgtgagaattggcttcctgaagataaagggaaagataaaggggaaatctctgagaaagccaaactggaaaactcaacacaagctgaagagggctttgatgttcctgattgtaaaaaaactatagtgaatgattccagagagtcatgtgttgaggaaaatgatgataaaattacacaagcttcacaatcacaagaaagtgaagactattctcagccatcaacttctagtagcattatttatagcagccaagaagatgtgaaagagtttgaaagggaagaaacccaagacaaagaagagagtgtggaatctagtttgccccttaatgccattgaaccttgtgtgatttgtcaaggtcgacctaaaaatggttgcattgtccatggcaaaacaggacatcttatggcctgctttacatgtgcaaagaagctaaagaaaaggaataagccctgcccagtatgtagacaaccaattcaaatgattgtgctaacttatttcccctagttgacctgtctataagag

SEQ ID NO: 2357 - DNA, 1076 bp, Homo sapiens
  source 1..1076: mol_type = genomic DNA
gcaccgcggcgagcttggctgcttctggggcctgtgtggccctgtgtgtcggaaagatggagcaagaagccgagcccgaggggcggccgcgacccctctgaccgagatcctgctgctttcgcagccaggagcaccgtccctccccggattagtgcgtacgagcgcccagtgccctggcccggagagtggaatgatccccgaggcccagggcgtcgtgcttccgcgcgccccgtgaaggaaactggggagtcttgagggacccccgactccaagcgcgaaaaccccggatggtgaggagcaggcaaatgtgcaataccaacatgtctgtacctactgatggtgctgtaaccacctcacagattccagcttcggaacaagagaccctggttagaccaaagccattgcttttgaagttattaaagtctgttggtgcacaaaaagacacttatactatgaaagaggttcttttttatcttggccagtatattatgactaaacgattatatgatgagaagcaacaacatattgtatattgttcaaatgatcttctaggagatttgtttggcgtgccaagcttctctgtgaaagagcacaggaaaatatataccatgatctacaggaacttggtagtagtcaatcagcaggaatcatcggactcaggtacatctgtgagtgagaacaggtgtcaccttgaaggtgggagtgatcaaaaggaccttgtacaagagcttcaggaagagaaaccttcatcttcacatttggtttctagaccatctacctcatctagaaggagagcaattagtgagacagaagaaaattcagatgaattatctggtgaacgacaaagaaaacgccacaaatctgatagtatttccctttcctttgatgaaagcctggctctgtgtgtaataagggagatatgttgtgaaagaagcagtagcagtgaatctacagggacgccatcgaatccggacttattactaggagtatatcaagttactgtgtatcaggcaggggagagtgatacagattcatttgaagaagatcctgaaatttccttagctcattatttatag

SEQ ID NO: 2358 - DNA, 798 bp, Homo sapiens
  source 1..798: mol_type = genomic DNA
atgtctgtacctactgatggtgctgtaaccacctcacagattccagcttcggaacaagagaccctggatcttgatgctggtgtaagtgaacattcaggtgattggttggatcaggattcagtttcagatcagtttagtgtagaatttgaagttgaatctctcgactcagaagattatagccttagtgaagaaggacaagaactctcagatgaagatgatgaggactattggaaatgcacttcatgcaatgaaatgaatcccccccttccatcacattgcaacagatgttgggcccttcgtgagaattggcttcctgaagataaagggaaagataaaggggaaatctctgagaaagccaaactggaaaactcaacacaagctgaagagggctttgatgttcctgattgtaaaaaaactatagtgaatgattccagagagtcatgtgttgaggaaaatgatgataaaattacacaagcttcacaatcacaagaaagtgaagactattctcagccatcaacttctagtagcattatttatagcagccaagaagatgtgaaagagtttgaaagggaagaaacccaagacaaagaagagagtgtggaatctagtttgccccttaatgccattgaaccttgtgtgatttgtcaaggtcgacctaaaaatggttgcattgtccatggcaaaacaggacatcttatggcctgctttacatgtgcaaagaagctaaagaaaaggaataagccctgcccagtatgtagacaaccaattcaaatgattgtgctaacttatttcccctag

SEQ ID NO: 2359 - DNA, 1401 bp, Homo sapiens
  source 1..1401: mol_type = genomic DNA
atgtgcaataccaacatgtctgtacctactgatggtgctgtaaccacctcacagattccagcttcggaacaagagaccctggttcttttttatcttggccagtatattatgactaaacgattatatgatgagaagcaacaacatattgtatattgttcaaatgatcttctaggagatttgtttggcgtgccaagcttctctgtgaaagagcacaggaaaatatataccatgatctacaggaacttggtagtagtcaatcagcaggaatcatcggactcaggtacatctgtgagtgagaacaggtgtcaccttgaaggtgggagtgatcaaaaggaccttgtacaagagcttcaggaagagaaaccttcatcttcacatttggtttctagaccatctacctcatctagaaggagagcaattagtgagacagaagaaaattcagatgaattatctggtgaacgacaaagaaaacgccacaaatctgatagtatttccctttcctttgatgaaagcctggctctgtgtgtaataagggagatatgttgtgaaagaagcagtagcagtgaatctacagggacgccatcgaatccggatcttgatgctggtgtaagtgaacattcaggtgattggttggatcaggattcagtttcagatcagtttagtgtagaatttgaagttgaatctctcgactcagaagattatagccttagtgaagaaggacaagaactctcagatgaagatgatgaggtatatcaagttactgtgtatcaggcaggggagagtgatacagattcatttgaagaagatcctgaaatttccttagctgactattggaaatgcacttcatgcaatgaaatgaatcccccccttccatcacattgcaacagatgttgggcccttcgtgagaattggcttcctgaagataaagggaaagataaaggggaaatctctgagaaagccaaactggaaaactcaacacaagctgaagagggctttgatgttcctgattgtaaaaaaactatagtgaatgattccagagagtcatgtgttgaggaaaatgatgataaaattacacaagcttcacaatcacaagaaagtgaagactattctcagccatcaacttctagtagcattatttatagcagccaagaagatgtgaaagagtttgaaagggaagaaacccaagacaaagaagagagtgtggaatctagtttgccccttaatgccattgaaccttgtgtgatttgtcaaggtcgacctaaaaatggttgcattgtccatggcaaaacaggacatcttatggcctgctttacatgtgcaaagaagctaaagaaaaggaataagccctgcccagtatgtagacaaccaattcaaatgattgtgctaacttatttcccctag

SEQ ID NO: 2360 - DNA, 6853 bp, Homo sapiens
  source 1..6853: mol_type = genomic DNA
gcaccgcggcgagcttggctgcttctggggcctgtgtggccctgtgtgtcggaaagatggagcaagaagccgagcccgaggggcggccgcgacccctctgaccgagatcctgctgctttcgcagccaggagcaccgtccctccccggattagtgcgtacgagcgcccagtgccctggcccggagagtggaatgatccccgaggcccagggcgtcgtgcttccgcgcgccccgtgaaggaaactggggagtcttgagggacccccgactccaagcgcgaaaaccccggatggtgaggagcaggcaaatgtgcaataccaacatgtctgtacctactgatggtgctgtaaccacctcacagattccagcttcggaacaagagaccctggttagaccaaagccattgcttttgaagttattaaagtctgttggtgcacaaaaagacacttatactatgaaagaggatcttgatgctggtgtaagtgaacattcaggtgattggttggatcaggattcagtttcagatcagtttagtgtagaatttgaagttgaatctctcgactcagaagattatagccttagtgaagaaggacaagaactctcagatgaagatgatgaggtatatcaagttactgtgtatcaggcaggggagagtgatacagattcatttgaagaagatcctgaaatttccttagctgactattggaaatgcacttcatgcaatgaaatgaatcccccccttccatcacattgcaacagatgttgggcccttcgtgagaattggcttcctgaagataaagggaaagataaaggggaaatctctgagaaagccaaactggaaaactcaacacaagctgaagagggctttgatgttcctgattgtaaaaaaactatagtgaatgattccagagagtcatgtgttgaggaaaatgatgataaaattacacaagcttcacaatcacaagaaagtgaagactattctcagccatcaacttctagtagcattatttatagcagccaagaagatgtgaaagagtttgaaagggaagaaacccaagacaaagaagagagtgtggaatctagtttgccccttaatgccattgaaccttgtgtgatttgtcaaggtcgacctaaaaatggttgcattgtccatggcaaaacaggacatcttatggcctgctttacatgtgcaaagaagctaaagaaaaggaataagccctgcccagtatgtagacaaccaattcaaatgattgtgctaacttatttcccctagttgacctgtctataagagaattatatatttctaactatataaccctaggaatttagacaacctgaaatttattcacatatatcaaagtgagaaaatgcctcaattcacatagatttcttctctttagtataattgacctactttggtagtggaatagtgaatacttactataatttgacttgaatatgtagctcatcctttacaccaactcctaattttaaataatttctactctgtcttaaatgagaagtacttggtttttttttttcttaaatatgtatatgacatttaaatgtaacttattattttttttgagaccgagtcttgctctgttacccaggctggagtgcagtggcgtgatcttggctcactgcaagctctgcctcccgggttcgcaccattctcctgcctcagcctcccaattagcttggcctacagtcatctgccaccacacctggctaattttttgtacttttagtagagacagggtttcaccgtgttagccaggatggtctcgatctcctgacctcgtgatccgcccacctcggcctcccaaagtgctgggattacaggcatgagccaccgcgtccggcctaaatgtcacttagtacctttgatataaagagaaaatgtgtgaaagatttagttttttgtttttttgtttgtttgtttgtttgtttgttttgagatgagtctctctgtcgcccaggctggagtgcagtgtcatgatctagcagtctccgcttcccgggttcaagccattctcctggctcagcctctggagcagctgggattacaggcatgcaccaccatgcccagctaatttttgtatttttagtagagatagggtttcaccatgttggccaggctggtcacgaactcctgacctcaagtgaggtcacccgcctcggcctcccgaagtgctgggattgcagatgtgagccaccatgtccagccaagaattagtatttaaattttagatactctttttttttttttttttttttttttttgagacagagtcttgctccatcacccatgctagagtgcagtggagtgatctcggctcactgcaacttccgccttctgggttcaagctattctcctgcctcagccttccaagtaactgggattacaggcatgtaccaccataccagctgatttttttgtatttttagtaaagacagggtttcaccatgttagccaggctgatcttgaactcctaaactcaagtgatctactcacctcagcctcccaaaatgctgggattacagatgtgaggcacctggcctcagatttttgatactcttaaaccttctgatccttagtttctctctccaaaatactctttctaggttaaaaaaaaaaaggctcttatatttggtgctatgtaaatgaaaatgttttttaggttttcttgatttaacaatagagacagggtctccctgtgttgcccaggctggtctcgaactcctgggctcaagagatcctcctgtcttggcctcgcaaagtgctaagtaggattacaggcgttagccaccacacccggctgtaaaaatgtacttattctccagcctcttttgtataaaccatagtaagggatgggagtaatgatgttatctgtgaaaatagccaccatttacccgtaagacaaaacttgttaaagcctcctgagtctaacctagattacatcaggccctttttcacacacaaaaaaatcctttatgggatttaatggaatctgttgtttccccctaagttgaaaaacaactctaagacactttaaagtaccttcttggcctgggttacatggttcccagcctaggtttcagacttttgcttaaggccagttttagaaacccgtgaattcagaaaagttaattcagaaatttgataaacagaattgttatttaaaaactaactggaaagattgttaagttctttctgaattattcagaaattatgcatcattttccttcaagaatgacagggtcagcatgtggaattccaagatacctcttgacttcctctcaagctccgtgtttggtcagtggaggcccatccgagctcagcactgagaagtgttagtttctttgggacccatctaccctgaccacatcatgatgttcatctgcagctgttgcaaggtgttcagattgtataaacataaatgtcacaaaaactttaaaagaagtgcaattctcaaaaggttaggtggactaaagcattctgtaaagcaactgctaataatgagcttacagtggatttgaatttgaaaaatatagtaacaagcctgtcaaatatctgcaagaactatggaataaaactactgatgcagtgaagacagttgaaaagatcaaacaaatgccaagctatatttataatgaacaaattcaagaaaaaggactacggaaagttcaggacatcaaagaagtcaggcaaaactcatcttgacccctgttgcaggcaaaggaacgcagctggaagaaaagatgatataacagttaacaggatgcagacatggcagaggtttcctaaaaatctcattatctataaccatttctatatttacatttgaaaatctcctttggagacttagaacctctaaattattgacttattttttatataaggtcactccgatgaaaggtgattacaaaatcatctacattgctgtctacaaaacagataatatggatgtttgatcgcatctcattgttaactctttactgatatgtttgtaaatacagaagtgaaatgtggacataaaatagttacgctatttggttaatggtactagacaacatgtaattaatgacattcaaaaatttatggctagtgatatatataaagtaaaattttctttgcagtaaaatatgccctttattatagaagggaggatataaggaaccaacagtttgtatgaaaatagctcaaataatatcttttattttgattttaatatttcttattttggtttattagtgtcttagaacaaaatggccttatataatgaagcctagttatgctggactgttttgatctcttttaattgttctgacagatagttggggatgagagccgaataaggtttgcctgaaataactgacactatataatttctgctttggcaaatactaagttctaacttgtcattcctggtagaacaagctttatttttcgagcctagcaatgatctagaagcagatgttatctcagtgccttttgcaatttgttgtgtgggtttttttttttttaaagccacacaataattttggaaaacaatgtatgggtagaacatgtgtctgttaattgcacacaaaaccacttttaatgggtacagagttaaatttgaaggaataagttctagctgaagtattatgaactccaaataatgctttgaggacctccaaaggtaaaagtactaatccctttggccatttattgagagagagagagagagagagtagggtgactatagttaatgtattgaatgttcttgctacaaataaatgatatttgagctgatgggtgtgctaattacactgatttgatcaatacccattgtatgtgaaacagtacatacaccatatttacaattatgtatttaacatttaaaatttctaatataagtatctctcaaactgtggattaacttcttgatttatatttaaatatgaatcttaagcaaaacagtgaaaataaccatcttgatttagtgtttttctcccatatgtgaattgtatatacttaggtgaagacaataaaatcaactgaactgtaagcttagaataggactgaggtaattctgcacagcaactttactaatggtacattgttgcttcaaaactctctctctctctctctgtctgtctcaataaatggccaaagggattagtagtttacctgtggaggtcctccaagcattatttggagttgataatacttcagctacaaccaagcagaatctcttttttttggaggtcctcgaagcattatttggagttgataatacttcagcttcaatttggagttgataatatttcagctagaacctagtagaatctgtttttttcctttggaggtcctcaaagcattattggagttcataatactgaagctagaaccaagcagaatctgtttttttctgaggagtatcggtagcataaatgtgattataaacatagtacacttgatatatggaggcagtgacagctatttttacaaaatttaaatctgcaaatggattcaacatgtttatgggttattaaaattgtctgatttcttaggttctttatagtacacgtgttgaaaataaatgattaagaattgtttcaagaatgcaattatttgatcttaaatttttatgagttgttaaaatagaaattatttgaatatcatatatttgggtaacaaaaggcacaagtctgaatgtgtttctttttctggaatggccatgcctgcccactttagaaatacaaatatcactgggcagcttgaagcagttgggagcctccaatgagagcaacttgagagaatgatgttgcaagttagtaggagtaagaaatgctgtgttctccctgtcttctcttaggtcacatggcagcctggcctaagtgatcgtgaatggtctataagggaggtagctgggacagggaggggagtttgggctagccaccgtaccacttgtcagcgtgaaaagtaagattgtaattgcctgtttagttttctgcctcatctttgaaagttccaccaagctgggaacctcttgattgtgaggcacaaatgtaagtacatcagaaaaaaacaaaaaaactggctttaaagcaggagcttgtgggcccctaagccagacggggactagcttttggcattatataattaagattttttaaatccttaataagggttttattttatttttatttattttttgagacggagtcttgctctgtggctcaggctggagtacagtggtgcaatcttggctcactgcaacctctgcctcctggctgtgttcaagtggttctgcttcagcctcccaagtagctggggttagagcaccctgtcaccacgccccgctaatttttgtatttctagcagagatgaagtttcactatgttggccaggctgggctcaaactcctgacctcaagtgatctgcccgccttggccccccaaagtgctgtgattacaggcgtgagccgccacgcccagcctaataagggttttaaagataattagtgtgtaggtctgtaggcttatgatggtaaccacaagttgttaatggcattgtgaaaagtttttagttgcgctttatgggtggatgctgaattacattttgatttgatacttataaaaagaaaaagtatttcttcagcttaaaaaattgtttaaaagtttgtgatcatattgtctaccatgtagccagctttcaattatatgtaagagggactttttgacatttacaaataatactttgaggtagatatctgaaagcaccagcacttggaaggtgttcagaagtaacaaattataaaatgagctaacaaacgaaaggcaaaataaaaccgtaaagcaagc

SEQ ID NO: 2361 - DNA, 754 bp, Homo sapiens
  source 1..754: mol_type = genomic DNA
ctgtgtggccctgtgtgtcggaaagatggagcaagaagccgagcccgaggggcggccgcgacccctctgaccgagatcctgctgctttcgcagccaggagcaccgtccctccccggattagtgcgtacgagcgcccagtgccctggcccggagagtggaatgatccccgaggcccagggcgtcgtgcttccgcgcgccccgtgaaggaaactggggagtcttgagggacccccgactccaagcgcgaaaaccccggatggtgaggagcaggcaaatgtgcaataccaacatgtctgtacctactgatggtgctgtaaccacctcacagattccagcttcggaacaagagaccctggttagaccaaagccattgcttttgaagttattaaagtctgttggtgcacaaaaagacacttatactatgaaagaggatcttgatgctggtgtaagtgaacattcaggtgattggttggatcaggattcagtttcagatcagtttagtgtagaatttgaagttgaatctctcgactcagaagattatagccttagtgaagaaggacaagaactctcagatgaagatgatgaggtatatcaagttactgtgtatcaggcaggggagagtgatacagattcatttgaagaagatcctgaaatttccttagctgactattggaaatgcctaaagaaaaggaataagccctgcccagtatgtagacaaccaattcaaatgattgtgctaacttatttcccctag

SEQ ID NO: 2362 - DNA, 891 bp, Homo sapiens
  source 1..891: mol_type = genomic DNA
atgtgcaataccaacatgtctgtacctactgatggtgctgtaaccacctcacagattccagcttcggaacaagagaccctggatcttgatgctggtgtaagtgaacattcaggtgattggttggatcaggattcagtttcagatcagtttagtgtagaatttgaagttgaatctctcgactcagaagattatagccttagtgaagaaggacaagaactctcagatgaagatgatgaggtatatcaagttactgtgtatcaggcaggggagagtgatacagattcatttgaagaagatcctgaaatttccttagctgactattggaaatgcacttcatgcaatgaaatgaatcccccccttccatcacattgcaacagatgttgggcccttcgtgagaattggcttcctgaagataaagggaaagataaaggggaaatctctgagaaagccaaactggaaaactcaacacaagctgaagagggctttgatgttcctgattgtaaaaaaactatagtgaatgattccagagagtcatgtgttgaggaaaatgatgataaaattacacaagcttcacaatcacaagaaagtgaagactattctcagccatcaacttctagtagcattatttatagcagccaagaagatgtgaaagagtttgaaagggaagaaacccaagacaaagaagagagtgtggaatctagtttgccccttaatgccattgaaccttgtgtgatttgtcaaggtcgacctaaaaatggttgcattgtccatggcaaaacaggacatcttatggcctgctttacatgtgcaaagaagctaaagaaaaggaataagccctgcccagtatgtagacaaccaattcaaatgattgtgctaacttatttcccctag

SEQ ID NO: 2363 - DNA, 732 bp, Homo sapiens
  source 1..732: mol_type = genomic DNA
atgtgcaataccaacatgtctgtacctactgatggtgctgtaaccacctcacagattccagcttcggaacaagagaccctggttagaccaaagccattgcttttgaagttattaaagtctgttggtgcacaaaaagacacttatactatgaaagaggactattggaaatgcacttcatgcaatgaaatgaatcccccccttccatcacattgcaacagatgttgggcccttcgtgagaattggcttcctgaagataaagggaaagataaaggggaaatctctgagaaagccaaactggaaaactcaacacaagctgaagagggctttgatgttcctgattgtaaaaaaactatagtgaatgattccagagagtcatgtgttgaggaaaatgatgataaaattacacaagcttcacaatcacaagaaagtgaagactattctcagccatcaacttctagtagcattatttatagcagccaagaagatgtgaaagagtttgaaagggaagaaacccaagacaaagaagagagtgtggaatctagtttgccccttaatgccattgaaccttgtgtgatttgtcaaggtcgacctaaaaatggttgcattgtccatggcaaaacaggacatcttatggcctgctttacatgtgcaaagaagctaaagaaaaggaataagccctgcccagtatgtagacaaccaattcaaatgattgtgctaacttatttcccctag

SEQ ID NO: 2364 - DNA, 1171 bp, Homo sapiens
  source 1..1171: mol_type = genomic DNA
ctgtgtggccctgtgtgtcggaaagatggagcaagaagccgagcccgaggggcggccgcgacccctctgaccgagatcctgctgctttcgcagccaggagcaccgtccctccccggattagtgcgtacgagcgcccagtgccctggcccggagagtggaatgatccccgaggcccagggcgtcgtgcttccgcgcgccccgtgaaggaaactggggagtcttgagggacccccgactccaagcgcgaaaaccccggatggtgaggagcaggcaaatgtgcaataccaacatgtctgtacctactgatggtgctgtaaccacctcacagattccagcttcggaacaagagaccctggactattggaaatgcacttcatgcaatgaaatgaatcccccccttccatcacattgcaacagatgttgggcccttcgtgagaattggcttcctgaagataaagggaaagataaaggggaaatctctgagaaagccaaactggaaaactcaacacaagctgaagagggctttgatgttcctgattgtaaaaaaactatagtgaatgattccagagagtcatgtgttgaggaaaatgatgataaaattacacaagcttcacaatcacaagaaagtgaagactattctcagccatcaacttctagtagcattatttatagcagccaagaagatgtgaaagagtttgaaagggaagaaacccaagacaaagaagagagtgtggaatctagtttgccccttaatgccattgaaccttgtgtgatttgtcaaggtcgacctaaaaatggttgcattgtccatggcaaaacaggacatcttatggcctgctttacatgtgcaaagaagctaaagaaaaggaataagccctgcccagtatgtagacaaccaattcaaatgattgtgctaacttatttcccctagttgacctgtctataagagaattatatatttctaactatataaccctaggaatttagacaacctgaaatttattcacatatatcaaagtgagaaaatgcctcaattcacatagatttcttctctttagtataattgacctactttggtagtggaatagtgaatacttactataatttgacttgaatatgtagctcatcctttacaccaactcctaattttaaataatttctactctgtctt

SEQ ID NO: 2365 - DNA, 657 bp, Homo sapiens
  source 1..657: mol_type = genomic DNA
atgtgcaataccaacatgtctgtacctactgatggtgctgtaaccacctcacagattccagcttcggaacaagagaccctggactattggaaatgcacttcatgcaatgaaatgaatcccccccttccatcacattgcaacagatgttgggcccttcgtgagaattggcttcctgaagataaagggaaagataaaggggaaatctctgagaaagccaaactggaaaactcaacacaagctgaagagggctttgatgttcctgattgtaaaaaaactatagtgaatgattccagagagtcatgtgttgaggaaaatgatgataaaattacacaagcttcacaatcacaagaaagtgaagactattctcagccatcaacttctagtagcattatttatagcagccaagaagatgtgaaagagtttgaaagggaagaaacccaagacaaagaagagagtgtggaatctagtttgccccttaatgccattgaaccttgtgtgatttgtcaaggtcgacctaaaaatggttgcattgtccatggcaaaacaggacatcttatggcctgctttacatgtgcaaagaagctaaagaaaaggaataagccctgcccagtatgtagacaaccaattcaaatgattgtgctaacttatttcccctag

SEQ ID NO: 2366 - DNA, 842 bp, Homo sapiens
  source 1..842: mol_type = genomic DNA
tgtgttcagtggcgattggagggtagacctgtgggcacggacgcacgccactttttctctgctgatccaggcaaatgtgcaataccaacatgtctgtacctactgatggtgctgtaaccacctcacagattccagcttcggaacaagagaccctggttagaccaaagccattgcttttgaagttattaaagtctgttggtgcacaaaaagacacttatactatgaaagaggttcttttttatcttggccagtatattatgactaaacgattatatgatgagaagcaacaacatattgtatattgttcaaatgatcttctaggagatttgtttggcgtgccaagcttctctgtgaaagagcacaggaaaatatataccatgatctacaggaacttggtagtagtcaatcagcaggaatcatcggactcaggtacatctgtgagtgagaacaggtgtcaccttgaaggtgggagtgatcaaaaggaccttgtacaagagcttcaggaagagaaaccttcatcttcacatttggtttctagaccatctacctcatctagaaggagagcaattagtgagacagaagaaaattcagatgaattatctggtgaacgacaaagaaaacgccacaaatctgatagtatttccctttcctttgatgaaagcctggctctgtgtgtaataagggagatatgttgtgaaagaagcagtagcagtgaatctacagggacgccatcgaatccggatcttgatgctggtgtatatcaagttactgtgtatcaggcaggggagagtgatacagattcatttgaagaagatcctgaaatttccttagctgactattgg

SEQ ID NO: 2367 - DNA, 6700 bp, Homo sapiens
  source 1..6700: mol_type = genomic DNA
gcaccgcggcgagcttggctgcttctggggcctgtgtggccctgtgtgtcggaaagatggagcaagaagccgagcccgaggggcggccgcgacccctctgaccgagatcctgctgctttcgcagccaggagcaccgtccctccccggattagtgcgtacgagcgcccagtgccctggcccggagagtggaatgatccccgaggcccagggcgtcgtgcttccgcgcgccccgtgaaggaaactggggagtcttgagggacccccgactccaagcgcgaaaaccccggatggtgaggagcaggcaaatgtgcaataccaacatgtctgtacctactgatggtgctgtaaccacctcacagattccagcttcggaacaagagaccctggatcttgatgctggtgtaagtgaacattcaggtgattggttggatcaggattcagtttcagatcagtttagtgtagaatttgaagttgaatctctcgactcagaagattatagccttagtgaagaaggacaagaactctcagatgaagatgatgaggactattggaaatgcacttcatgcaatgaaatgaatcccccccttccatcacattgcaacagatgttgggcccttcgtgagaattggcttcctgaagataaagggaaagataaaggggaaatctctgagaaagccaaactggaaaactcaacacaagctgaagagggctttgatgttcctgattgtaaaaaaactatagtgaatgattccagagagtcatgtgttgaggaaaatgatgataaaattacacaagcttcacaatcacaagaaagtgaagactattctcagccatcaacttctagtagcattatttatagcagccaagaagatgtgaaagagtttgaaagggaagaaacccaagacaaagaagagagtgtggaatctagtttgccccttaatgccattgaaccttgtgtgatttgtcaaggtcgacctaaaaatggttgcattgtccatggcaaaacaggacatcttatggcctgctttacatgtgcaaagaagctaaagaaaaggaataagccctgcccagtatgtagacaaccaattcaaatgattgtgctaacttatttcccctagttgacctgtctataagagaattatatatttctaactatataaccctaggaatttagacaacctgaaatttattcacatatatcaaagtgagaaaatgcctcaattcacatagatttcttctctttagtataattgacctactttggtagtggaatagtgaatacttactataatttgacttgaatatgtagctcatcctttacaccaactcctaattttaaataatttctactctgtcttaaatgagaagtacttggtttttttttttcttaaatatgtatatgacatttaaatgtaacttattattttttttgagaccgagtcttgctctgttacccaggctggagtgcagtggcgtgatcttggctcactgcaagctctgcctcccgggttcgcaccattctcctgcctcagcctcccaattagcttggcctacagtcatctgccaccacacctggctaattttttgtacttttagtagagacagggtttcaccgtgttagccaggatggtctcgatctcctgacctcgtgatccgcccacctcggcctcccaaagtgctgggattacaggcatgagccaccgcgtccggcctaaatgtcacttagtacctttgatataaagagaaaatgtgtgaaagatttagttttttgtttttttgtttgtttgtttgtttgtttgttttgagatgagtctctctgtcgcccaggctggagtgcagtgtcatgatctagcagtctccgcttcccgggttcaagccattctcctggctcagcctctggagcagctgggattacaggcatgcaccaccatgcccagctaatttttgtatttttagtagagatagggtttcaccatgttggccaggctggtcacgaactcctgacctcaagtgaggtcacccgcctcggcctcccgaagtgctgggattgcagatgtgagccaccatgtccagccaagaattagtatttaaattttagatactctttttttttttttttttttttttttttgagacagagtcttgctccatcacccatgctagagtgcagtggagtgatctcggctcactgcaacttccgccttctgggttcaagctattctcctgcctcagccttccaagtaactgggattacaggcatgtaccaccataccagctgatttttttgtatttttagtaaagacagggtttcaccatgttagccaggctgatcttgaactcctaaactcaagtgatctactcacctcagcctcccaaaatgctgggattacagatgtgaggcacctggcctcagatttttgatactcttaaaccttctgatccttagtttctctctccaaaatactctttctaggttaaaaaaaaaaaggctcttatatttggtgctatgtaaatgaaaatgttttttaggttttcttgatttaacaatagagacagggtctccctgtgttgcccaggctggtctcgaactcctgggctcaagagatcctcctgtcttggcctcgcaaagtgctaagtaggattacaggcgttagccaccacacccggctgtaaaaatgtacttattctccagcctcttttgtataaaccatagtaagggatgggagtaatgatgttatctgtgaaaatagccaccatttacccgtaagacaaaacttgttaaagcctcctgagtctaacctagattacatcaggccctttttcacacacaaaaaaatcctttatgggatttaatggaatctgttgtttccccctaagttgaaaaacaactctaagacactttaaagtaccttcttggcctgggttacatggttcccagcctaggtttcagacttttgcttaaggccagttttagaaacccgtgaattcagaaaagttaattcagaaatttgataaacagaattgttatttaaaaactaactggaaagattgttaagttctttctgaattattcagaaattatgcatcattttccttcaagaatgacagggtcagcatgtggaattccaagatacctcttgacttcctctcaagctccgtgtttggtcagtggaggcccatccgagctcagcactgagaagtgttagtttctttgggacccatctaccctgaccacatcatgatgttcatctgcagctgttgcaaggtgttcagattgtataaacataaatgtcacaaaaactttaaaagaagtgcaattctcaaaaggttaggtggactaaagcattctgtaaagcaactgctaataatgagcttacagtggatttgaatttgaaaaatatagtaacaagcctgtcaaatatctgcaagaactatggaataaaactactgatgcagtgaagacagttgaaaagatcaaacaaatgccaagctatatttataatgaacaaattcaagaaaaaggactacggaaagttcaggacatcaaagaagtcaggcaaaactcatcttgacccctgttgcaggcaaaggaacgcagctggaagaaaagatgatataacagttaacaggatgcagacatggcagaggtttcctaaaaatctcattatctataaccatttctatatttacatttgaaaatctcctttggagacttagaacctctaaattattgacttattttttatataaggtcactccgatgaaaggtgattacaaaatcatctacattgctgtctacaaaacagataatatggatgtttgatcgcatctcattgttaactctttactgatatgtttgtaaatacagaagtgaaatgtggacataaaatagttacgctatttggttaatggtactagacaacatgtaattaatgacattcaaaaatttatggctagtgatatatataaagtaaaattttctttgcagtaaaatatgccctttattatagaagggaggatataaggaaccaacagtttgtatgaaaatagctcaaataatatcttttattttgattttaatatttcttattttggtttattagtgtcttagaacaaaatggccttatataatgaagcctagttatgctggactgttttgatctcttttaattgttctgacagatagttggggatgagagccgaataaggtttgcctgaaataactgacactatataatttctgctttggcaaatactaagttctaacttgtcattcctggtagaacaagctttatttttcgagcctagcaatgatctagaagcagatgttatctcagtgccttttgcaatttgttgtgtgggtttttttttttttaaagccacacaataattttggaaaacaatgtatgggtagaacatgtgtctgttaattgcacacaaaaccacttttaatgggtacagagttaaatttgaaggaataagttctagctgaagtattatgaactccaaataatgctttgaggacctccaaaggtaaaagtactaatccctttggccatttattgagagagagagagagagagagtagggtgactatagttaatgtattgaatgttcttgctacaaataaatgatatttgagctgatgggtgtgctaattacactgatttgatcaatacccattgtatgtgaaacagtacatacaccatatttacaattatgtatttaacatttaaaatttctaatataagtatctctcaaactgtggattaacttcttgatttatatttaaatatgaatcttaagcaaaacagtgaaaataaccatcttgatttagtgtttttctcccatatgtgaattgtatatacttaggtgaagacaataaaatcaactgaactgtaagcttagaataggactgaggtaattctgcacagcaactttactaatggtacattgttgcttcaaaactctctctctctctctctgtctgtctcaataaatggccaaagggattagtagtttacctgtggaggtcctccaagcattatttggagttgataatacttcagctacaaccaagcagaatctcttttttttggaggtcctcgaagcattatttggagttgataatacttcagcttcaatttggagttgataatatttcagctagaacctagtagaatctgtttttttcctttggaggtcctcaaagcattattggagttcataatactgaagctagaaccaagcagaatctgtttttttctgaggagtatcggtagcataaatgtgattataaacatagtacacttgatatatggaggcagtgacagctatttttacaaaatttaaatctgcaaatggattcaacatgtttatgggttattaaaattgtctgatttcttaggttctttatagtacacgtgttgaaaataaatgattaagaattgtttcaagaatgcaattatttgatcttaaatttttatgagttgttaaaatagaaattatttgaatatcatatatttgggtaacaaaaggcacaagtctgaatgtgtttctttttctggaatggccatgcctgcccactttagaaatacaaatatcactgggcagcttgaagcagttgggagcctccaatgagagcaacttgagagaatgatgttgcaagttagtaggagtaagaaatgctgtgttctccctgtcttctcttaggtcacatggcagcctggcctaagtgatcgtgaatggtctataagggaggtagctgggacagggaggggagtttgggctagccaccgtaccacttgtcagcgtgaaaagtaagattgtaattgcctgtttagttttctgcctcatctttgaaagttccaccaagctgggaacctcttgattgtgaggcacaaatgtaagtacatcagaaaaaaacaaaaaaactggctttaaagcaggagcttgtgggcccctaagccagacggggactagcttttggcattatataattaagattttttaaatccttaataagggttttattttatttttatttattttttgagacggagtcttgctctgtggctcaggctggagtacagtggtgcaatcttggctcactgcaacctctgcctcctggctgtgttcaagtggttctgcttcagcctcccaagtagctggggttagagcaccctgtcaccacgccccgctaatttttgtatttctagcagagatgaagtttcactatgttggccaggctgggctcaaactcctgacctcaagtgatctgcccgccttggccccccaaagtgctgtgattacaggcgtgagccgccacgcccagcctaataagggttttaaagataattagtgtgtaggtctgtaggcttatgatggtaaccacaagttgttaatggcattgtgaaaagtttttagttgcgctttatgggtggatgctgaattacattttgatttgatacttataaaaagaaaaagtatttcttcagcttaaaaaattgtttaaaagtttgtgatcatattgtctaccatgtagccagctttcaattatatgtaagagggactttttgacatttacaaataatactttgaggtagatatctgaaagcaccagcacttggaaggtgttcagaagtaacaaattataaaatgagctaacaaacgaaaggcaaaataaaaccgtaaagcaagc

SEQ ID NO: 2368 - DNA, 7381 bp, Homo sapiens
  source 1..7381: mol_type = genomic DNA
ggggcgcgcaccgaggcaccgcggcgagcttggctgcttctggggcctgtgtggccctgtgtgtcggaaagatggagcaagaagccgagcccgaggggcggccgcgacccctctgaccgagatcctgctgctttcgcagccaggagcaccgtccctccccggattagtgcgtacgagcgcccagtgccctggcccggagagtggaatgatccccgaggcccagggcgtcgtgcttccgcgcgccccgtgaaggaaactggggagtcttgagggacccccgactccaagcgcgaaaaccccggatggtgaggagcaggcaaatgtgcaataccaacatgtctgtacctactgatggtgctgtaaccacctcacagattccagcttcggaacaagagaccctggttagaccaaagccattgcttttgaagttattaaagtctgttggtgcacaaaaagacacttatactatgaaagaggttcttttttatcttggccagtatattatgactaaacgattatatgatgagaagcaacaacatattgtatattgttcaaatgatcttctaggagatttgtttggcgtgccaagcttctctgtgaaagagcacaggaaaatatataccatgatctacaggaacttggtagtagtcaatcagcaggaatcatcggactcaggtacatctgtgagtgagaacaggtgtcaccttgaaggtgggagtgatcaaaaggaccttgtacaagagcttcaggaagagaaaccttcatcttcacatttggtttctagaccatctacctcatctagaaggagagcaattagtgagacagaagaaaattcagatgaattatctggtgaacgacaaagaaaacgccacaaatctgatagtatttccctttcctttgatgaaagcctggctctgtgtgtaataagggagatatgttgtgaaagaagcagtagcagtgaatctacagggacgccatcgaatccggatcttgatgctggtgtaagtgaacattcaggtgattggttggatcaggattcagtttcagatcagtttagtgtagaatttgaagttgaatctctcgactcagaagattatagccttagtgaagaaggacaagaactctcagatgaagatgatgaggtatatcaagttactgtgtatcaggcaggggagagtgatacagattcatttgaagaagatcctgaaatttccttagctgactattggaaatgcacttcatgcaatgaaatgaatcccccccttccatcacattgcaacagatgttgggcccttcgtgagaattggcttcctgaagataaagggaaagataaaggggaaatctctgagaaagccaaactggaaaactcaacacaagctgaagagggctttgatgttcctgattgtaaaaaaactatagtgaatgattccagagagtcatgtgttgaggaaaatgatgataaaattacacaagcttcacaatcacaagaaagtgaagactattctcagccatcaacttctagtagcattatttatagcagccaagaagatgtgaaagagtttgaaagggaagaaacccaagacaaagaagagagtgtggaatctagtttgccccttaatgccattgaaccttgtgtgatttgtcaaggtcgacctaaaaatggttgcattgtccatggcaaaacaggacatcttatggcctgctttacatgtgcaaagaagctaaagaaaaggaataagccctgcccagtatgtagacaaccaattcaaatgattgtgctaacttatttcccctagttgacctgtctataagagaattatatatttctaactatataaccctaggaatttagacaacctgaaatttattcacatatatcaaagtgagaaaatgcctcaattcacatagatttcttctctttagtataattgacctactttggtagtggaatagtgaatacttactataatttgacttgaatatgtagctcatcctttacaccaactcctaattttaaataatttctactctgtcttaaatgagaagtacttggtttttttttttcttaaatatgtatatgacatttaaatgtaacttattattttttttgagaccgagtcttgctctgttacccaggctggagtgcagtggcgtgatcttggctcactgcaagctctgcctcccgggttcgcaccattctcctgcctcagcctcccaattagcttggcctacagtcatctgccaccacacctggctaattttttgtacttttagtagagacagggtttcaccgtgttagccaggatggtctcgatctcctgacctcgtgatccgcccacctcggcctcccaaagtgctgggattacaggcatgagccaccgcgtccggcctaaatgtcacttagtacctttgatataaagagaaaatgtgtgaaagatttagttttttgtttttttgtttgtttgtttgtttgtttgttttgagatgagtctctctgtcgcccaggctggagtgcagtgtcatgatctagcagtctccgcttcccgggttcaagccattctcctggctcagcctctggagcagctgggattacaggcatgcaccaccatgcccagctaatttttgtatttttagtagagatagggtttcaccatgttggccaggctggtcacgaactcctgacctcaagtgaggtcacccgcctcggcctcccgaagtgctgggattgcagatgtgagccaccatgtccagccaagaattagtatttaaattttagatactctttttttttttttttttttttttttttgagacagagtcttgctccatcacccatgctagagtgcagtggagtgatctcggctcactgcaacttccgccttctgggttcaagctattctcctgcctcagccttccaagtaactgggattacaggcatgtaccaccataccagctgatttttttgtatttttagtaaagacagggtttcaccatgttagccaggctgatcttgaactcctaaactcaagtgatctactcacctcagcctcccaaaatgctgggattacagatgtgaggcacctggcctcagatttttgatactcttaaaccttctgatccttagtttctctctccaaaatactctttctaggttaaaaaaaaaaaggctcttatatttggtgctatgtaaatgaaaatgttttttaggttttcttgatttaacaatagagacagggtctccctgtgttgcccaggctggtctcgaactcctgggctcaagagatcctcctgtcttggcctcgcaaagtgctaagtaggattacaggcgttagccaccacacccggctgtaaaaatgtacttattctccagcctcttttgtataaaccatagtaagggatgggagtaatgatgttatctgtgaaaatagccaccatttacccgtaagacaaaacttgttaaagcctcctgagtctaacctagattacatcaggccctttttcacacacaaaaaaatcctttatgggatttaatggaatctgttgtttccccctaagttgaaaaacaactctaagacactttaaagtaccttcttggcctgggttacatggttcccagcctaggtttcagacttttgcttaaggccagttttagaaacccgtgaattcagaaaagttaattcagaaatttgataaacagaattgttatttaaaaactaactggaaagattgttaagttctttctgaattattcagaaattatgcatcattttccttcaagaatgacagggtcagcatgtggaattccaagatacctcttgacttcctctcaagctccgtgtttggtcagtggaggcccatccgagctcagcactgagaagtgttagtttctttgggacccatctaccctgaccacatcatgatgttcatctgcagctgttgcaaggtgttcagattgtataaacataaatgtcacaaaaactttaaaagaagtgcaattctcaaaaggttaggtggactaaagcattctgtaaagcaactgctaataatgagcttacagtggatttgaatttgaaaaatatagtaacaagcctgtcaaatatctgcaagaactatggaataaaactactgatgcagtgaagacagttgaaaagatcaaacaaatgccaagctatatttataatgaacaaattcaagaaaaaggactacggaaagttcaggacatcaaagaagtcaggcaaaactcatcttgacccctgttgcaggcaaaggaacgcagctggaagaaaagatgatataacagttaacaggatgcagacatggcagaggtttcctaaaaatctcattatctataaccatttctatatttacatttgaaaatctcctttggagacttagaacctctaaattattgacttattttttatataaggtcactccgatgaaaggtgattacaaaatcatctacattgctgtctacaaaacagataatatggatgtttgatcgcatctcattgttaactctttactgatatgtttgtaaatacagaagtgaaatgtggacataaaatagttacgctatttggttaatggtactagacaacatgtaattaatgacattcaaaaatttatggctagtgatatatataaagtaaaattttctttgcagtaaaatatgccctttattatagaagggaggatataaggaaccaacagtttgtatgaaaatagctcaaataatatcttttattttgattttaatatttcttattttggtttattagtgtcttagaacaaaatggccttatataatgaagcctagttatgctggactgttttgatctcttttaattgttctgacagatagttggggatgagagccgaataaggtttgcctgaaataactgacactatataatttctgctttggcaaatactaagttctaacttgtcattcctggtagaacaagctttatttttcgagcctagcaatgatctagaagcagatgttatctcagtgccttttgcaatttgttgtgtgggtttttttttttttaaagccacacaataattttggaaaacaatgtatgggtagaacatgtgtctgttaattgcacacaaaaccacttttaatgggtacagagttaaatttgaaggaataagttctagctgaagtattatgaactccaaataatgctttgaggacctccaaaggtaaaagtactaatccctttggccatttattgagagagagagagagagagagtagggtgactatagttaatgtattgaatgttcttgctacaaataaatgatatttgagctgatgggtgtgctaattacactgatttgatcaatacccattgtatgtgaaacagtacatacaccatatttacaattatgtatttaacatttaaaatttctaatataagtatctctcaaactgtggattaacttcttgatttatatttaaatatgaatcttaagcaaaacagtgaaaataaccatcttgatttagtgtttttctcccatatgtgaattgtatatacttaggtgaagacaataaaatcaactgaactgtaagcttagaataggactgaggtaattctgcacagcaactttactaatggtacattgttgcttcaaaactctctctctctctctctgtctgtctcaataaatggccaaagggattagtagtttacctgtggaggtcctccaagcattatttggagttgataatacttcagctacaaccaagcagaatctcttttttttggaggtcctcgaagcattatttggagttgataatacttcagcttcaatttggagttgataatatttcagctagaacctagtagaatctgtttttttcctttggaggtcctcaaagcattattggagttcataatactgaagctagaaccaagcagaatctgtttttttctgaggagtatcggtagcataaatgtgattataaacatagtacacttgatatatggaggcagtgacagctatttttacaaaatttaaatctgcaaatggattcaacatgtttatgggttattaaaattgtctgatttcttaggttctttatagtacacgtgttgaaaataaatgattaagaattgtttcaagaatgcaattatttgatcttaaatttttatgagttgttaaaatagaaattatttgaatatcatatatttgggtaacaaaaggcacaagtctgaatgtgtttctttttctggaatggccatgcctgcccactttagaaatacaaatatcactgggcagcttgaagcagttgggagcctccaatgagagcaacttgagagaatgatgttgcaagttagtaggagtaagaaatgctgtgttctccctgtcttctcttaggtcacatggcagcctggcctaagtgatcgtgaatggtctataagggaggtagctgggacagggaggggagtttgggctagccaccgtaccacttgtcagcgtgaaaagtaagattgtaattgcctgtttagttttctgcctcatctttgaaagttccaccaagctgggaacctcttgattgtgaggcacaaatgtaagtacatcagaaaaaaacaaaaaaactggctttaaagcaggagcttgtgggcccctaagccagacggggactagcttttggcattatataattaagattttttaaatccttaataagggttttattttatttttatttattttttgagacggagtcttgctctgtggctcaggctggagtacagtggtgcaatcttggctcactgcaacctctgcctcctggctgtgttcaagtggttctgcttcagcctcccaagtagctggggttagagcaccctgtcaccacgccccgctaatttttgtatttctagcagagatgaagtttcactatgttggccaggctgggctcaaactcctgacctcaagtgatctgcccgccttggccccccaaagtgctgtgattacaggcgtgagccgccacgcccagcctaataagggttttaaagataattagtgtgtaggtctgtaggcttatgatggtaaccacaagttgttaatggcattgtgaaaagtttttagttgcgctttatgggtggatgctgaattacattttgatttgatacttataaaaagaaaaagtatttcttcagcttaaaaaattgtttaaaagtttgtgatcatattgtctaccatgtagccagctttcaattatatgtaagagggactttttgacatttacaaataatactttgaggtagatatctgaaagcaccagcacttggaaggtgttcagaagtaacaaattataaaatgagctaacaaacgaaaggcaaaataaaaccgtaaagcaagcaga

SEQ ID NO: 2369 - DNA, 393 bp, Homo sapiens
  source 1..393: mol_type = genomic DNA
atgtgcaataccaacatgtctgtacctactgatggtgctgtaaccacctcacagattccagcttcggaacaagagaccctggttagaccaaagccattgcttttgaagttattaaagtctgttggtgcacaaaaagacacttatactatgaaagagtttgaaagggaagaaacccaagacaaagaagagagtgtggaatctagtttgccccttaatgccattgaaccttgtgtgatttgtcaaggtcgacctaaaaatggttgcattgtccatggcaaaacaggacatcttatggcctgctttacatgtgcaaagaagctaaagaaaaggaataagccctgcccagtatgtagacaaccaattcaaatgattgtgctaacttatttcccctag

SEQ ID NO: 2370 - DNA, 845 bp, Homo sapiens
  source 1..845: mol_type = genomic DNA
tgtgttcagtggcgattggagggtagacctgtgggcacggacgcacgccactttttctctgctgatccaggcaaatgtgcaataccaacatgtctgtacctactgatggtgctgtaaccacctcacagattccagcttcggaacaagagaccctggttagaccaaagccattgcttttgaagttattaaagtctgttggtgcacaaaaagacacttatactatgaaagaggttcttttttatcttggccagtatattatgactaaacgattatatgatgagaagcaacaacatattgtatattgttcaaatgatcttctaggagatttgtttggcgtgccaagcttctctgtgaaagagcacaggaaaatatataccatgatctacaggaacttggtagtagtcaatcagcaggaatcatcggactcaggtacatctgtgagtgagaacaggtgtcaccttgaaggtgggagtgatcaaaaggaccttgtacaagagcttcaggaagagaaaccttcatcttcacatttggtttctagaccatctacctcatctagaaggagagcaattagtgagacagaagaaaattcagatgaattatctggtgaacgacaaagaaaacgccacaaatctgatagtatttccctttcctttgatgaaagcctggctctgtgtgtaataagggagatatgttgtgaaagaagcagtagcagtgaatctacagggacgccatcgaatccggatcttgatgctggtgtaagtgaacattcaggtgattggttggatcaggattcagtttcagatcagtttagtgtagaatttgaagttgaatctctcgactcagaa

SEQ ID NO: 2371 - DNA, 6778 bp, Homo sapiens
  source 1..6778: mol_type = genomic DNA
gcaccgcggcgagcttggctgcttctggggcctgtgtggccctgtgtgtcggaaagatggagcaagaagccgagcccgaggggcggccgcgacccctctgaccgagatcctgctgctttcgcagccaggagcaccgtccctccccggattagtgcgtacgagcgcccagtgccctggcccggagagtggaatgatccccgaggcccagggcgtcgtgcttccgcgcgccccgtgaaggaaactggggagtcttgagggacccccgactccaagcgcgaaaaccccggatggtgaggagcaggcaaatgtgcaataccaacatgtctgtacctactgatggtgctgtaaccacctcacagattccagcttcggaacaagagaccctggatcttgatgctggtgtaagtgaacattcaggtgattggttggatcaggattcagtttcagatcagtttagtgtagaatttgaagttgaatctctcgactcagaagattatagccttagtgaagaaggacaagaactctcagatgaagatgatgaggtatatcaagttactgtgtatcaggcaggggagagtgatacagattcatttgaagaagatcctgaaatttccttagctgactattggaaatgcacttcatgcaatgaaatgaatcccccccttccatcacattgcaacagatgttgggcccttcgtgagaattggcttcctgaagataaagggaaagataaaggggaaatctctgagaaagccaaactggaaaactcaacacaagctgaagagggctttgatgttcctgattgtaaaaaaactatagtgaatgattccagagagtcatgtgttgaggaaaatgatgataaaattacacaagcttcacaatcacaagaaagtgaagactattctcagccatcaacttctagtagcattatttatagcagccaagaagatgtgaaagagtttgaaagggaagaaacccaagacaaagaagagagtgtggaatctagtttgccccttaatgccattgaaccttgtgtgatttgtcaaggtcgacctaaaaatggttgcattgtccatggcaaaacaggacatcttatggcctgctttacatgtgcaaagaagctaaagaaaaggaataagccctgcccagtatgtagacaaccaattcaaatgattgtgctaacttatttcccctagttgacctgtctataagagaattatatatttctaactatataaccctaggaatttagacaacctgaaatttattcacatatatcaaagtgagaaaatgcctcaattcacatagatttcttctctttagtataattgacctactttggtagtggaatagtgaatacttactataatttgacttgaatatgtagctcatcctttacaccaactcctaattttaaataatttctactctgtcttaaatgagaagtacttggtttttttttttcttaaatatgtatatgacatttaaatgtaacttattattttttttgagaccgagtcttgctctgttacccaggctggagtgcagtggcgtgatcttggctcactgcaagctctgcctcccgggttcgcaccattctcctgcctcagcctcccaattagcttggcctacagtcatctgccaccacacctggctaattttttgtacttttagtagagacagggtttcaccgtgttagccaggatggtctcgatctcctgacctcgtgatccgcccacctcggcctcccaaagtgctgggattacaggcatgagccaccgcgtccggcctaaatgtcacttagtacctttgatataaagagaaaatgtgtgaaagatttagttttttgtttttttgtttgtttgtttgtttgtttgttttgagatgagtctctctgtcgcccaggctggagtgcagtgtcatgatctagcagtctccgcttcccgggttcaagccattctcctggctcagcctctggagcagctgggattacaggcatgcaccaccatgcccagctaatttttgtatttttagtagagatagggtttcaccatgttggccaggctggtcacgaactcctgacctcaagtgaggtcacccgcctcggcctcccgaagtgctgggattgcagatgtgagccaccatgtccagccaagaattagtatttaaattttagatactctttttttttttttttttttttttttttgagacagagtcttgctccatcacccatgctagagtgcagtggagtgatctcggctcactgcaacttccgccttctgggttcaagctattctcctgcctcagccttccaagtaactgggattacaggcatgtaccaccataccagctgatttttttgtatttttagtaaagacagggtttcaccatgttagccaggctgatcttgaactcctaaactcaagtgatctactcacctcagcctcccaaaatgctgggattacagatgtgaggcacctggcctcagatttttgatactcttaaaccttctgatccttagtttctctctccaaaatactctttctaggttaaaaaaaaaaaggctcttatatttggtgctatgtaaatgaaaatgttttttaggttttcttgatttaacaatagagacagggtctccctgtgttgcccaggctggtctcgaactcctgggctcaagagatcctcctgtcttggcctcgcaaagtgctaagtaggattacaggcgttagccaccacacccggctgtaaaaatgtacttattctccagcctcttttgtataaaccatagtaagggatgggagtaatgatgttatctgtgaaaatagccaccatttacccgtaagacaaaacttgttaaagcctcctgagtctaacctagattacatcaggccctttttcacacacaaaaaaatcctttatgggatttaatggaatctgttgtttccccctaagttgaaaaacaactctaagacactttaaagtaccttcttggcctgggttacatggttcccagcctaggtttcagacttttgcttaaggccagttttagaaacccgtgaattcagaaaagttaattcagaaatttgataaacagaattgttatttaaaaactaactggaaagattgttaagttctttctgaattattcagaaattatgcatcattttccttcaagaatgacagggtcagcatgtggaattccaagatacctcttgacttcctctcaagctccgtgtttggtcagtggaggcccatccgagctcagcactgagaagtgttagtttctttgggacccatctaccctgaccacatcatgatgttcatctgcagctgttgcaaggtgttcagattgtataaacataaatgtcacaaaaactttaaaagaagtgcaattctcaaaaggttaggtggactaaagcattctgtaaagcaactgctaataatgagcttacagtggatttgaatttgaaaaatatagtaacaagcctgtcaaatatctgcaagaactatggaataaaactactgatgcagtgaagacagttgaaaagatcaaacaaatgccaagctatatttataatgaacaaattcaagaaaaaggactacggaaagttcaggacatcaaagaagtcaggcaaaactcatcttgacccctgttgcaggcaaaggaacgcagctggaagaaaagatgatataacagttaacaggatgcagacatggcagaggtttcctaaaaatctcattatctataaccatttctatatttacatttgaaaatctcctttggagacttagaacctctaaattattgacttattttttatataaggtcactccgatgaaaggtgattacaaaatcatctacattgctgtctacaaaacagataatatggatgtttgatcgcatctcattgttaactctttactgatatgtttgtaaatacagaagtgaaatgtggacataaaatagttacgctatttggttaatggtactagacaacatgtaattaatgacattcaaaaatttatggctagtgatatatataaagtaaaattttctttgcagtaaaatatgccctttattatagaagggaggatataaggaaccaacagtttgtatgaaaatagctcaaataatatcttttattttgattttaatatttcttattttggtttattagtgtcttagaacaaaatggccttatataatgaagcctagttatgctggactgttttgatctcttttaattgttctgacagatagttggggatgagagccgaataaggtttgcctgaaataactgacactatataatttctgctttggcaaatactaagttctaacttgtcattcctggtagaacaagctttatttttcgagcctagcaatgatctagaagcagatgttatctcagtgccttttgcaatttgttgtgtgggtttttttttttttaaagccacacaataattttggaaaacaatgtatgggtagaacatgtgtctgttaattgcacacaaaaccacttttaatgggtacagagttaaatttgaaggaataagttctagctgaagtattatgaactccaaataatgctttgaggacctccaaaggtaaaagtactaatccctttggccatttattgagagagagagagagagagagtagggtgactatagttaatgtattgaatgttcttgctacaaataaatgatatttgagctgatgggtgtgctaattacactgatttgatcaatacccattgtatgtgaaacagtacatacaccatatttacaattatgtatttaacatttaaaatttctaatataagtatctctcaaactgtggattaacttcttgatttatatttaaatatgaatcttaagcaaaacagtgaaaataaccatcttgatttagtgtttttctcccatatgtgaattgtatatacttaggtgaagacaataaaatcaactgaactgtaagcttagaataggactgaggtaattctgcacagcaactttactaatggtacattgttgcttcaaaactctctctctctctctctgtctgtctcaataaatggccaaagggattagtagtttacctgtggaggtcctccaagcattatttggagttgataatacttcagctacaaccaagcagaatctcttttttttggaggtcctcgaagcattatttggagttgataatacttcagcttcaatttggagttgataatatttcagctagaacctagtagaatctgtttttttcctttggaggtcctcaaagcattattggagttcataatactgaagctagaaccaagcagaatctgtttttttctgaggagtatcggtagcataaatgtgattataaacatagtacacttgatatatggaggcagtgacagctatttttacaaaatttaaatctgcaaatggattcaacatgtttatgggttattaaaattgtctgatttcttaggttctttatagtacacgtgttgaaaataaatgattaagaattgtttcaagaatgcaattatttgatcttaaatttttatgagttgttaaaatagaaattatttgaatatcatatatttgggtaacaaaaggcacaagtctgaatgtgtttctttttctggaatggccatgcctgcccactttagaaatacaaatatcactgggcagcttgaagcagttgggagcctccaatgagagcaacttgagagaatgatgttgcaagttagtaggagtaagaaatgctgtgttctccctgtcttctcttaggtcacatggcagcctggcctaagtgatcgtgaatggtctataagggaggtagctgggacagggaggggagtttgggctagccaccgtaccacttgtcagcgtgaaaagtaagattgtaattgcctgtttagttttctgcctcatctttgaaagttccaccaagctgggaacctcttgattgtgaggcacaaatgtaagtacatcagaaaaaaacaaaaaaactggctttaaagcaggagcttgtgggcccctaagccagacggggactagcttttggcattatataattaagattttttaaatccttaataagggttttattttatttttatttattttttgagacggagtcttgctctgtggctcaggctggagtacagtggtgcaatcttggctcactgcaacctctgcctcctggctgtgttcaagtggttctgcttcagcctcccaagtagctggggttagagcaccctgtcaccacgccccgctaatttttgtatttctagcagagatgaagtttcactatgttggccaggctgggctcaaactcctgacctcaagtgatctgcccgccttggccccccaaagtgctgtgattacaggcgtgagccgccacgcccagcctaataagggttttaaagataattagtgtgtaggtctgtaggcttatgatggtaaccacaagttgttaatggcattgtgaaaagtttttagttgcgctttatgggtggatgctgaattacattttgatttgatacttataaaaagaaaaagtatttcttcagcttaaaaaattgtttaaaagtttgtgatcatattgtctaccatgtagccagctttcaattatatgtaagagggactttttgacatttacaaataatactttgaggtagatatctgaaagcaccagcacttggaaggtgttcagaagtaacaaattataaaatgagctaacaaacgaaaggcaaaataaaaccgtaaagcaagc

SEQ ID NO: 2372 - DNA, 7228 bp, Homo sapiens
  source 1..7228: mol_type = genomic DNA
gcaccgcggcgagcttggctgcttctggggcctgtgtggccctgtgtgtcggaaagatggagcaagaagccgagcccgaggggcggccgcgacccctctgaccgagatcctgctgctttcgcagccaggagcaccgtccctccccggattagtgcgtacgagcgcccagtgccctggcccggagagtggaatgatccccgaggcccagggcgtcgtgcttccgcgcgccccgtgaaggaaactggggagtcttgagggacccccgactccaagcgcgaaaaccccggatggtgaggagcaggcaaatgtgcaataccaacatgtctgtacctactgatggtgctgtaaccacctcacagattccagcttcggaacaagagaccctggttagaccaaagccattgcttttgaagttattaaagtctgttggtgcacaaaaagacacttatactatgaaagagaaaatatataccatgatctacaggaacttggtagtagtcaatcagcaggaatcatcggactcaggtacatctgtgagtgagaacaggtgtcaccttgaaggtgggagtgatcaaaaggaccttgtacaagagcttcaggaagagaaaccttcatcttcacatttggtttctagaccatctacctcatctagaaggagagcaattagtgagacagaagaaaattcagatgaattatctggtgaacgacaaagaaaacgccacaaatctgatagtatttccctttcctttgatgaaagcctggctctgtgtgtaataagggagatatgttgtgaaagaagcagtagcagtgaatctacagggacgccatcgaatccggatcttgatgctggtgtaagtgaacattcaggtgattggttggatcaggattcagtttcagatcagtttagtgtagaatttgaagttgaatctctcgactcagaagattatagccttagtgaagaaggacaagaactctcagatgaagatgatgaggtatatcaagttactgtgtatcaggcaggggagagtgatacagattcatttgaagaagatcctgaaatttccttagctgactattggaaatgcacttcatgcaatgaaatgaatcccccccttccatcacattgcaacagatgttgggcccttcgtgagaattggcttcctgaagataaagggaaagataaaggggaaatctctgagaaagccaaactggaaaactcaacacaagctgaagagggctttgatgttcctgattgtaaaaaaactatagtgaatgattccagagagtcatgtgttgaggaaaatgatgataaaattacacaagcttcacaatcacaagaaagtgaagactattctcagccatcaacttctagtagcattatttatagcagccaagaagatgtgaaagagtttgaaagggaagaaacccaagacaaagaagagagtgtggaatctagtttgccccttaatgccattgaaccttgtgtgatttgtcaaggtcgacctaaaaatggttgcattgtccatggcaaaacaggacatcttatggcctgctttacatgtgcaaagaagctaaagaaaaggaataagccctgcccagtatgtagacaaccaattcaaatgattgtgctaacttatttcccctagttgacctgtctataagagaattatatatttctaactatataaccctaggaatttagacaacctgaaatttattcacatatatcaaagtgagaaaatgcctcaattcacatagatttcttctctttagtataattgacctactttggtagtggaatagtgaatacttactataatttgacttgaatatgtagctcatcctttacaccaactcctaattttaaataatttctactctgtcttaaatgagaagtacttggtttttttttttcttaaatatgtatatgacatttaaatgtaacttattattttttttgagaccgagtcttgctctgttacccaggctggagtgcagtggcgtgatcttggctcactgcaagctctgcctcccgggttcgcaccattctcctgcctcagcctcccaattagcttggcctacagtcatctgccaccacacctggctaattttttgtacttttagtagagacagggtttcaccgtgttagccaggatggtctcgatctcctgacctcgtgatccgcccacctcggcctcccaaagtgctgggattacaggcatgagccaccgcgtccggcctaaatgtcacttagtacctttgatataaagagaaaatgtgtgaaagatttagttttttgtttttttgtttgtttgtttgtttgtttgttttgagatgagtctctctgtcgcccaggctggagtgcagtgtcatgatctagcagtctccgcttcccgggttcaagccattctcctggctcagcctctggagcagctgggattacaggcatgcaccaccatgcccagctaatttttgtatttttagtagagatagggtttcaccatgttggccaggctggtcacgaactcctgacctcaagtgaggtcacccgcctcggcctcccgaagtgctgggattgcagatgtgagccaccatgtccagccaagaattagtatttaaattttagatactctttttttttttttttttttttttttttgagacagagtcttgctccatcacccatgctagagtgcagtggagtgatctcggctcactgcaacttccgccttctgggttcaagctattctcctgcctcagccttccaagtaactgggattacaggcatgtaccaccataccagctgatttttttgtatttttagtaaagacagggtttcaccatgttagccaggctgatcttgaactcctaaactcaagtgatctactcacctcagcctcccaaaatgctgggattacagatgtgaggcacctggcctcagatttttgatactcttaaaccttctgatccttagtttctctctccaaaatactctttctaggttaaaaaaaaaaaggctcttatatttggtgctatgtaaatgaaaatgttttttaggttttcttgatttaacaatagagacagggtctccctgtgttgcccaggctggtctcgaactcctgggctcaagagatcctcctgtcttggcctcgcaaagtgctaagtaggattacaggcgttagccaccacacccggctgtaaaaatgtacttattctccagcctcttttgtataaaccatagtaagggatgggagtaatgatgttatctgtgaaaatagccaccatttacccgtaagacaaaacttgttaaagcctcctgagtctaacctagattacatcaggccctttttcacacacaaaaaaatcctttatgggatttaatggaatctgttgtttccccctaagttgaaaaacaactctaagacactttaaagtaccttcttggcctgggttacatggttcccagcctaggtttcagacttttgcttaaggccagttttagaaacccgtgaattcagaaaagttaattcagaaatttgataaacagaattgttatttaaaaactaactggaaagattgttaagttctttctgaattattcagaaattatgcatcattttccttcaagaatgacagggtcagcatgtggaattccaagatacctcttgacttcctctcaagctccgtgtttggtcagtggaggcccatccgagctcagcactgagaagtgttagtttctttgggacccatctaccctgaccacatcatgatgttcatctgcagctgttgcaaggtgttcagattgtataaacataaatgtcacaaaaactttaaaagaagtgcaattctcaaaaggttaggtggactaaagcattctgtaaagcaactgctaataatgagcttacagtggatttgaatttgaaaaatatagtaacaagcctgtcaaatatctgcaagaactatggaataaaactactgatgcagtgaagacagttgaaaagatcaaacaaatgccaagctatatttataatgaacaaattcaagaaaaaggactacggaaagttcaggacatcaaagaagtcaggcaaaactcatcttgacccctgttgcaggcaaaggaacgcagctggaagaaaagatgatataacagttaacaggatgcagacatggcagaggtttcctaaaaatctcattatctataaccatttctatatttacatttgaaaatctcctttggagacttagaacctctaaattattgacttattttttatataaggtcactccgatgaaaggtgattacaaaatcatctacattgctgtctacaaaacagataatatggatgtttgatcgcatctcattgttaactctttactgatatgtttgtaaatacagaagtgaaatgtggacataaaatagttacgctatttggttaatggtactagacaacatgtaattaatgacattcaaaaatttatggctagtgatatatataaagtaaaattttctttgcagtaaaatatgccctttattatagaagggaggatataaggaaccaacagtttgtatgaaaatagctcaaataatatcttttattttgattttaatatttcttattttggtttattagtgtcttagaacaaaatggccttatataatgaagcctagttatgctggactgttttgatctcttttaattgttctgacagatagttggggatgagagccgaataaggtttgcctgaaataactgacactatataatttctgctttggcaaatactaagttctaacttgtcattcctggtagaacaagctttatttttcgagcctagcaatgatctagaagcagatgttatctcagtgccttttgcaatttgttgtgtgggtttttttttttttaaagccacacaataattttggaaaacaatgtatgggtagaacatgtgtctgttaattgcacacaaaaccacttttaatgggtacagagttaaatttgaaggaataagttctagctgaagtattatgaactccaaataatgctttgaggacctccaaaggtaaaagtactaatccctttggccatttattgagagagagagagagagagagtagggtgactatagttaatgtattgaatgttcttgctacaaataaatgatatttgagctgatgggtgtgctaattacactgatttgatcaatacccattgtatgtgaaacagtacatacaccatatttacaattatgtatttaacatttaaaatttctaatataagtatctctcaaactgtggattaacttcttgatttatatttaaatatgaatcttaagcaaaacagtgaaaataaccatcttgatttagtgtttttctcccatatgtgaattgtatatacttaggtgaagacaataaaatcaactgaactgtaagcttagaataggactgaggtaattctgcacagcaactttactaatggtacattgttgcttcaaaactctctctctctctctctgtctgtctcaataaatggccaaagggattagtagtttacctgtggaggtcctccaagcattatttggagttgataatacttcagctacaaccaagcagaatctcttttttttggaggtcctcgaagcattatttggagttgataatacttcagcttcaatttggagttgataatatttcagctagaacctagtagaatctgtttttttcctttggaggtcctcaaagcattattggagttcataatactgaagctagaaccaagcagaatctgtttttttctgaggagtatcggtagcataaatgtgattataaacatagtacacttgatatatggaggcagtgacagctatttttacaaaatttaaatctgcaaatggattcaacatgtttatgggttattaaaattgtctgatttcttaggttctttatagtacacgtgttgaaaataaatgattaagaattgtttcaagaatgcaattatttgatcttaaatttttatgagttgttaaaatagaaattatttgaatatcatatatttgggtaacaaaaggcacaagtctgaatgtgtttctttttctggaatggccatgcctgcccactttagaaatacaaatatcactgggcagcttgaagcagttgggagcctccaatgagagcaacttgagagaatgatgttgcaagttagtaggagtaagaaatgctgtgttctccctgtcttctcttaggtcacatggcagcctggcctaagtgatcgtgaatggtctataagggaggtagctgggacagggaggggagtttgggctagccaccgtaccacttgtcagcgtgaaaagtaagattgtaattgcctgtttagttttctgcctcatctttgaaagttccaccaagctgggaacctcttgattgtgaggcacaaatgtaagtacatcagaaaaaaacaaaaaaactggctttaaagcaggagcttgtgggcccctaagccagacggggactagcttttggcattatataattaagattttttaaatccttaataagggttttattttatttttatttattttttgagacggagtcttgctctgtggctcaggctggagtacagtggtgcaatcttggctcactgcaacctctgcctcctggctgtgttcaagtggttctgcttcagcctcccaagtagctggggttagagcaccctgtcaccacgccccgctaatttttgtatttctagcagagatgaagtttcactatgttggccaggctgggctcaaactcctgacctcaagtgatctgcccgccttggccccccaaagtgctgtgattacaggcgtgagccgccacgcccagcctaataagggttttaaagataattagtgtgtaggtctgtaggcttatgatggtaaccacaagttgttaatggcattgtgaaaagtttttagttgcgctttatgggtggatgctgaattacattttgatttgatacttataaaaagaaaaagtatttcttcagcttaaaaaattgtttaaaagtttgtgatcatattgtctaccatgtagccagctttcaattatatgtaagagggactttttgacatttacaaataatactttgaggtagatatctgaaagcaccagcacttggaaggtgttcagaagtaacaaattataaaatgagctaacaaacgaaaggcaaaataaaaccgtaaagcaagc

SEQ ID NO: 2373 - DNA, 697 bp, Homo sapiens
  source 1..697: mol_type = genomic DNA
ggggaaactttatagtcatcttggtacgtggcgagggtttcatatgttttctgaattatgcctaattttgtagtagactggagggtttatacagatagcctgtttttaacagtagattttggcctttgtgcagaggaaagttccacttccagaaaaagaactacagaagacgatatccccacactgcctacctcagagcataaatgcatacattctagagaagatgaagacttaattgaaaatttagcccaagatgaaacatctaggctggaccttggatttgaggagtgggatgtagctggcctgccttggtggtttttaggaaacttgagaagcaactatacacctagaagtaatggctcaactgatttacagacaaatcaggatgtgggtactgccattgtttcagatactacagatgacttgtggtttttgaatgagtcagtatcagagcagttaggtgttggaataaaagttgaagctgctgatactgaacaaacaagtgaagaagtagggaaagtaagtgacaaaaaggtgattgaagtgggaaaaaatgatgacctggaggactctaagtccttaagtgatgataccgatgtagaggttacctctgaggatgagtggcagtgtactgaatgcaagaaatttaactctccaagcaagaggtactgttttcgttgttgggccttgaggaagg

SEQ ID NO: 2374 - DNA, 547 bp, Homo sapiens
  source 1..547: mol_type = genomic DNA
caacagactgcagtttcttcactaccaaaatgacatcattttccacctctgctcagtgttcaacatctgacagtgcttgcaggatctctcctggacaaatcaatcaggtacgaccaaaactgccgcttttgaagattttgcatgcagcaggtgcgcaaggtgaaatgttcactgttaaagaggtcatgcactatttaggtcagtacataatggtgaagcaactttatgatcagcaggagcagcatatggtatattgtggtggagatcttttgggagaactactgggacgtcagagcttctccgtgaaagacccaagccctctctatgatatgctaagaaagaatcttgtcactttagccactgctactacagaaatgggtcatttgttctgtagaatttcccacgctctagagttggcagattaatgtcgctttagatgaagatgctattgttttatgaagcaaacggggaaaaatccagatttcaagatcccataaccctgtatgacttaacacttgaaagttgaaattaaatgtaaaaagccata

SEQ ID NO: 2375 - DNA, 10073 bp, Homo sapiens
  source 1..10073: mol_type = genomic DNA
gggaggccggaagttgcggcttcattactcgccatttcaaaatgctgccgaggccctaggatctgtgactgccacccctccccccacccgggctcggcgggggagcgactcatggagctgccgtaagttttaccaacagactgcagtttcttcactaccaaaatgacatcattttccacctctgctcagtgttcaacatctgacagtgcttgcaggatctctcctggacaaatcaatcaggtacgaccaaaactgccgcttttgaagattttgcatgcagcaggtgcgcaaggtgaaatgttcactgttaaagaggtcatgcactatttaggtcagtacataatggtgaagcaactttatgatcagcaggagcagcatatggtatattgtggtggagatcttttgggagaactactgggacgtcagagcttctccgtgaaagacccaagccctctctatgatatgctaagaaagaatcttgtcactttagccactgctactacagatgctgctcagactctcgctctcgcacaggatcacagtatggatattccaagtcaagaccaactgaagcaaagtgcagaggaaagttccacttccagaaaaagaactacagaagacgatatccccacactgcctacctcagagcataaatgcatacattctagagaagatgaagacttaattgaaaatttagcccaagatgaaacatctaggctggaccttggatttgaggagtgggatgtagctggcctgccttggtggtttttaggaaacttgagaagcaactatacacctagaagtaatggctcaactgatttacagacaaatcaggatgtgggtactgccattgtttcagatactacagatgacttgtggtttttgaatgagtcagtatcagagcagttaggtgttggaataaaagttgaagctgctgatactgaacaaacaagtgaagaagtagggaaagtaagtgacaaaaaggtgattgaagtgggaaaaaatgatgacctggaggactctaagtccttaagtgatgataccgatgtagaggttacctctgaggatgagtggcagtgtactgaatgcaagaaatttaactctccaagcaagaggtactgttttcgttgttgggccttgaggaaggattggtattcagattgttcaaagttaacccattctctctccacgtctgatatcactgccatacctgaaaaggaaaatgaaggaaatgatgtccctgattgtcgaagaaccatttcggctcctgtcgttagacctaaagatgcgtatataaagaaagaaaactccaaactttttgatccctgcaactcagtggaattcttggatttggctcacagttctgaaagccaagagaccatctcaagcatgggagaacagttagataacctttctgaacagagaacagatacagaaaacatggaggattgccagaatctcttgaagccatgtagcttatgtgagaaaagaccacgagacgggaacattattcatggaaggacgggccatcttgtcacttgttttcactgtgccagaagactaaagaaggctggggcttcatgccctatttgcaagaaagagattcagctggttattaaggtttttatagcataatggtagtacgaacataaaaatgcatttattccgttcacttaccacattatttgaaaatcaatcctttatttaattttatttccaacctgtcagagaatgttcttaggcatcaaaatccaaggtagctgtaagaaaaatactggagctaacaatgaagaacagaagtaatctgattagtcaaattattaagtgccatggattactttatgcagcagtcaggtacatagttaggtgaacccaaaagaaaaactcttgaaaacaagagatttcttccatgcacatttacaatattgaggtataattaacatgataaagtgtttccttctaacgagttgtagaaatctgagtaaccacccaaaaaagcaatagaatgtttctgtcaccccaaaacactcccttctgcccctcttcagacagtccttcagctatttcatggctctcaccctagttttttttttttttgcacttttttttttccgggggtataggggaggtgtggggcgacagggtctgtcttgttctgtctcccaggctgaagtgcagtgcagtggtatgatcatggctcactgcagccttggtttcctgggcataagtggtcttcccacttcagcctcctgagtagctgagactatagactagcataaccacactggctaattttttgtggagatgaagtctcactatgttgcccaggctggtctcgaactcctgggctcaaacaatcctcccgcctcagccttccaaattgctgggattatagtcatgaggcacctagtctggcccttttgcaagactttaatctgaaatctaaatttttaaaatttaagtacttacaaaggatatactatccaacatattgcatattatatatgtgctttaaagtttttttttttttttgagagacggtctcactttgtcatccaagctggagtgcagtggtgcaaacacggcccacctcctgggctcaagtgatcctccagcctcagcttccctcacaggcattcactatcactcccagctaattaaaataatttgtagacggtgtctcgttatgttgcccaggctggtctcgaactcctgggtttaagtgattcccccgcctcagcctcccaaagtgttgggcttacagccttgagccactatgcttggctcaaagatatttttatgaaagccctgggactatagatttagctgattaaatttatagaaaaagtcctgtcatataaactggcaaagtctgttcttaatttaattagccaaatcagacttaacttccgtcagaacatgtcttggttttaattcagataaacacacaaacatacttctctggcacagccttcagaagcatcagtttttgttttgttttgttttgttttttgagacagggtcttgctctgtcgcccaggctggagtgcactggcacaatcacagttcactgcagcctcgacctcccagatccaagcaatcctcccacctaagcctcccaagtagctgggtctataggcgcgtgccaccaccatgcccagctgaattttgtattttttgtacagacagcattttgccatgttgcccaggctggtcccaaacttctagcctcaagcaaccctcctgcctcagcctctcaaagtgctaggattgcagtcctgagctactgccccctaccctctttgcgtcttaggagtcatttagattttttttgatccttttgtttagtgcctctggagctgcttacaccaaggcaatacgccttgatatactggatggttgagaggcagcctctttttttttttttttttttttttttttttggaggatagggagtatggctgttgtgaaaagggaggtaaagagaaatggtagatctgaagaggcctcatcagagcacatattttaggacaacacatatggaaattggacatctttaagttggtttccatagagctatgcatgtatccttacccccatgggaaaatgttggtgtgttctcaagggtatgcatgtgtcattttgaagaccaaggccctagaattgtcaaacttaaggatcataaaaatcatgagggttgcttgttaaaaatgtccaaacgtgcagagactgatctttgagatctggaccaggaatttgcatttgaacaagtgttcctggaatctctatgcaagttttatacagaacatacttttggaatccttgccctagacaggggtgtccaatcttttggcttccctggtccacaatggaagaagaattgtcttggaccacacataaaatacactaacactaacaatagctgatgagctaaaaaaaaaaaaaaaaaaaatcgtggaccgggcgtagtggctcacgcctgtaatcccaacactttgggagatcacctaggtcgggagtttgagaccagcctgaccgacatggagaaaccccatttttactaaaaatacaaaaaattagctgggcatggtggtgcatgcctgtagtcccagctactcaggaggctgaggcaggagaatcgcttgaacctgagagggggagattgcggtgagctgagattgcgccattgcaccccagcctgggcaacaatagcgaaactgtctcagaaaaaagaaaaaaaaaatcgcaaaaagaaaaatctcataatgtcgttgttggtttttttttttttttttgagacagtctcactctgttgcccaggctggagtgcaatggcatgatctctgctcaccgcaacctctgcctcccgggttcaggtgattctcctgcctcagcctcccagatagctgggactacaggcacataccaccatgcctggctaatttttgtatttttagtagagatgggggtttcactgtgttggccaggctggtctcgaactcctgacctcatgatccacacacctcggcctcccaaagtcctgcgattacaggcgtgagctaccgcacccagccaagttgtaatttttaataaaacttaagaagtaaacattttacttatgtttataggtatttgatcctaaatttgacacatcattgcccatgaaagaatcctcttaggctgctcagcttcactcttcctgcttgcccaccggggtttttcactgcttctgttagcactaagtacttagacgatcctaagatatgtgcttgagccgaatttcatctttacttgtaggaaactttaaactatttcttttcttttcttttttttttttttttacttgagatggagttttgctcttgtcgcccaggctggagtgcagtggagtgatctcggctcactgcaacctctgcctcccgggttcaaatgattctcctgcctcagcctcccaagtagctgggattacaggtgtgcaccaccatgtctggctaattttgtatttttagtagagatggtttcaccatgttggtcaggctggtctcgaactcctgacctcaggtcatccacccacctcagcctcgcaaagtgctgagattacaggcatgagccacagcgcccagcttaaactattttcttggtctgtttttgattttcttttttccttgccactgcggtacagattttttttactcactgccactaaactaaagcaaggcatagtttatatgtgaagtgttcagagtttactgctataaggaaacttccaaatactgacatttaccttttagctgtagttattgggaccatgtgctctggttttctggagactgccaaattgctcccatttttctgcatcccacctggtttctttctgcatgtcccctttcactttcaaacctcttcatttggatgttaaattatatggtcacctagttataggtaagccttgttcgagttgatatcttgattgtgaggaaggatctgtgtcattggagcttgtttctgctgcaacgtgctgtagactatgaataatgaaatcacaccacattaccatcagatttcttgttttagttgtcaaattaatatttatgattgttatcttgggcgaaaagttcagagcagagatgacaaatcattagaacaacgatgaatttcagtattacggctaaaaagttcttctgtctgaatattaactcactctccttccagtgtacttcacagtaattggtatgcttttttatttaatgcttaaatcaaactttataaaaatcttagaccagatctttaatatggtatgccatttccccagtctaccaatggaatagtatgggtttctaatcctaggcttgtacaatggattggagttgagccatgccagcctccacactgccactaacttctgtaatgtaagattgagtcactgccaagcatttgaaatatgcagttgtgttttaattataatttatgtatagttagatgtatgtagtgcattgtgtggtattatttggtttgtaagaatttatttttaagggtcaaggtcatttgtaacattttgtgtgtgtcaattcaatgcaatgttggctgccttttgaagtctttgatatattggtgaatattcttctgatctataatacaaagctatgtaatgttacctcttgactcgcttttgaaaggaagacaattgttaactagatatttgagttttttcccctcagaattatgtgaatttctgatatatggctttagatactgtgaatctgttttccatttagtcagttatctgcttaaattgttcagaactatatcctaacgagcaattagttctgatggttctcccagtcatgagtgtgcatgtgtgcaagcatgttttgatcctgatgctacctttgctaaaaatggccatagattaggaactagctatgtttttagaatcaaagatgaaccggtaagctgtctcatgtaccaaacgtgaaatttacagtgtttacaaatgtctggaattttgcactgccatagggaatgttaaggttacttggctggaatttatcagacttgtgagtaaacaagttgaagtttagcagatgagggggaatattgaggcccctaaggctaaacaaaataatcagtatctgagatagtggctaatgtggctccccaggcctaatttgggaacagtttttcctgattgctttgagaagtactttcttttgacagaaattttcattctgcttgccattgctatattctccctttataggagccattggatttctttccttttgtgggaaatgtcccattagcattttcagatcttttgatgtgcactaatgccattattggtaatgccgttattggtgaatacagcatagttaaataaactgttacagtaaatctacacttggatttgctgcacctctaccaatagccttttgaatgactgaaagtgttaacagagaaagaggcatgtctgcagaaagagatagctaatattttttggtactttatctgaaatccaagatgctgcttcccctgcaggttgttttccttcttacgatcctcattgaatcccctctgggagcacaggacagttagtagaactctccatttctttttttttttttttagacggagtctctctctgtcgccccggctggagtgcagtggcgcgatctcggctcactgcaacctccgcctcccgggttcaccccattctcctgcctcagcctccctagtagctgggactataggcgcccgccaccacgcctggctaatttttgtatttttattggagacggggtttcaccgtcttagccaggatggtcttgatctcctgacctcgtgatctgcccacctcagcctcccaaagtactgggattacaggcgtgagccaccgcgcccggccggaactctccatttcttaaggtaaagagggtcaaggatacctaaaaagggtcaaataatgctagaagagcaattcctctttcagagcagttgctgtaatttggcaaatgctttatcgaagattgatattaggctaggggcggtggcttacgcctgtaatcccagcactttgggaggccgaggtgggtggattgcctgagctcaggagttcgagaccagtctgaccagtatggtgaaaccctgtctctactaaaaatacaaaaattagccggtcgtggtggcgtgcacctgtagtcccagctacttggcaggttgagacaggagaatcgcttgaacctgggaggtggaggttgcagtgagccgagactgcaccactgcgctcccacctgggtgacagagactctgtctcaaaaaaaaggacatttatcattataacatcttattagagcccctaatttcttatctgaaggcactgtttttttttttaaacagttaagtactgatgtcaacagacaaatatttctgatcagatagtcccctgtcaacagtagcaaatgtggtttcataaagtgggaagaaaacagcattttaaagtaactttttgggagactgatttgagtaataataaaactctggtctcccttaagaaaaaaaaacccttccacctttactgtgtcatttatatccccttagttccaaagttaattatcttatttctggatattgcttttataccaaagacccttatcagcccttgtaactacagtatctttagataagattcctctttccagtcagtcctgggaaatgtttctgttgcagagttaggcggtagatgggaagctgtgatggcagagctactatctaataaagtaacaactcgtagttgaggcttcctttctgtgtgtgatgggggatagggagttagctcccctgttgtctcagcactaagaaattgaggtcaggccaggcgcggtggttcactcctgttattccagcactggggtggccaaagtgggcagattgcttgcgctctggagctcgagaccagcctgggcaacatggtgaaaccctgtctctaccaaaaatacaaaaaaaaagctgggcatggtgggtgcatgcttgtcccagctactgaggaggctgaggtgggaggatcgcttgagcctgggaggtggaggttgcagtgagctgagatggcaccactgcaatccaaggtgggtgacagagacgctgtctcaaagaaattgaggtcaggcttccttcttacagaattatttttttctctgtagtttgcctcattttttcactttcttttcaatgagaatcgaagtgtttcttttgggtttttttttcccccttttaaaatcaacaggaaatgtttcaaaggagggatgaaatgcttcttggcttcctcagcacttggcaaggtagacctcatagcaaccttgaatatgactttctttagtctctagctatgcactattaagtgcctcttgggtagaggtagagttaagtattgagtgccagtcttgacgtccgtatgcctcagtttttctcatatataaaaagcagtatacatacctacccttttctacctcatcatttgttgtagggattaaatccgggagagcaattctgaagcctataaatttccttgaagagatctaagaacctattatgctcttggtgtaccaagctctggggtatatattcagaatacctcatgttctggaagctgagcactagctcccctttattgcctgcctggcagagcctgtttgattactgcaggcccttttacccatgcttctagtttaggtattctttctttgatatgaggctcttgaccagaaaagagttctttctctaggtgttctgagagaagtttgtaaatttggatagtacattctatcctgataaaaccaccttgctgtggtcttgatgtacaaaaaaaaattttttttttgagacagagtcttactctgtcacccaggctggaatgcagtggcgcaatcttggttcactgcaacccccgcctcctgggttcaagcgatcctcctgcctcaacctctcaagtagctgggactacaggcgtgcaccaccacacctggctaattttgtatttttagtagagacagggtttcaccatgttggccaggctggtcttgaactcctgacctcaggcgatctgcccgccttggcctcccaaagtactgggattacaggcgtgagcaactgctcctggcccaaaacatctctttctacatacacttgagtaggtggcataaaatgcactgtcaatatatagaaaacatgaaattttccaaatatttccgatcagagaatcacaagagcagcaaatgtggtttcatcaagtgggaagaaagcagcaatttaaaataactttttgggagactgaattgagtaataataaaacttcagtctttcgctaataataataataataataataataacaacaacttattgaatgtggccagctcactagatgaggaaagaggaaggcattttctgcattcttgcctagttttccttataagcaccactaagttaatagctctgtctttttggtgtttgcactatgtaatgcttttaatactttttaattgtgcttttttatgtattaaatgtttttccttttgcca

SEQ ID NO: 2376 - DNA, 646 bp, Homo sapiens
  source 1..646: mol_type = genomic DNA
ctcatggagctgccgtaagttttaccaacagactgcagtttcttcactaccaaaatgacatcattttccacctctgctcagtgttcaacatctgacagtgcttgcaggatctctcctggacaaatcaatcaggaaaatgaaggaaatgatgtccctgattgtcgaagaaccatttcggctcctgtcgttagacctaaagatgcgtatataaagaaagaaaactccaaactttttgatccctgcaactcagtggaattcttggatttggctcacagttctgaaagccaagagaccatctcaagcatgggagaacagttagataacctttctgaacagagaacagatacagaaaacatggaggattgccagaatctcttgaagccatgtagcttatgtgagaaaagaccacgagacgggaacattattcatggaaggacgggccatcttgtcacttgttttcactgtgccagaagactaaagaaggctggggcttcatgccctatttgcaagaaagagattcagctggttattaaggtttttatagcataatggtagtacgaacataaaaatgcatttattccgttcacttaccacattatttgaaaatcaatcctttatttaattttatttccaacctgtcagagaa

SEQ ID NO: 2377 - DNA, 1405 bp, Homo sapiens
  source 1..1405: mol_type = genomic DNA
atgacatcattttccacctctgctcagtgttcaacatctgacagtgcttgcaggatctctcctggacaaatcaatcaggtacgaccaaaactgccgcttttgaagattttgcatgcagcaggtgcgcaaggtgaaatgttcactgttaaagaggtcatgcactatttaggtcagtacataatggtgaagcaactttatgatcagcaggagcagcatatggtatattgtggtggagatcttttgggagaactactgggacgtcagagcttctccgtgaaagacccaagccctctctatgatatgctaagaaagaatcttgtcactttagccactgctactacagcaaagtgcagaggaaagttccacttccagaaaaagaactacagaagacgatatccccacactgcctacctcagagcataaatgcatacattctagagaagatgaagacttaattgaaaatttagcccaagatgaaacatctaggctggaccttggatttgaggagtgggatgtagctggcctgccttggtggtttttaggaaacttgagaagcaactatacacctagaagtaatggctcaactgatttacagacaaatcaggatgtgggtactgccattgtttcagatactacagatgacttgtggtttttgaatgagtcagtatcagagcagttaggtgttggaataaaagttgaagctgctgatactgaacaaacaagtgaagaagtagggaaagtaagtgacaaaaaggtgattgaagtgggaaaaaatgatgacctggaggactctaagtccttaagtgatgataccgatgtagaggttacctctgaggatgagtggcagtgtactgaatgcaagaaatttaactctccaagcaagaggtactgttttcgttgttgggccttgaggaaggattggtattcagattgttcaaagttaacccattctctctccacgtctgatatcactgccatacctgaaaaggaaaatgaaggaaatgatgtccctgattgtcgaagaaccatttcggctcctgtcgttagacctaaagatgcgtatataaagaaagaaaactccaaactttttgatccctgcaactcagtggaattcttggatttggctcacagttctgaaagccaagagaccatctcaagcatgggagaacagttagataacctttctgaacagagaacagatacagaaaacatggaggattgccagaatctcttgaagccatgtagcttatgtgagaaaagaccacgagacgggaacattattcatggaaggacgggccatcttgtcacttgttttcactgtgccagaagactaaagaaggctggggcttcatgccctatttgcaagaaagagattcagctggttattaaggtttttatagcataa

SEQ ID NO: 2378 - DNA, 513 bp, Homo sapiens
  source 1..513: mol_type = genomic DNA
gacttaattgaaaatttagcccaagatgaaacatctaggctggaccttggatttgaggagtgggatgtagctggcctgccttggtggtttttaggaaacttgagaagcaactatacacctagaagtaatggctcaactgatttacagacaaatcaggtgattgaagtgggaaaaaatgatgacctggaggactctaagtccttaagtgatgataccgatgtagaggttacctctgaggatgagtggcagtgtactgaatgcaagaaatttaactctccaagcaagaggtactgttttcgttgttgggccttgaggaaggattggtattcagattgttcaaagttaacccattctctctccacgtctgatatcactgccatacctgaaaaggaaaatgaaggaaatgatgtccctgattgtcgaagaaccatttcggctcctgtcgttagacctaaagatgcgtatataaagaaagaaaactccaaactttttgatccctgcaactcagtggaa

SEQ ID NO: 2379 - DNA, 1477 bp, Homo sapiens
  source 1..1477: mol_type = genomic DNA
agcgactcatggagctgccgtaagttttaccaacagactgcagtttcttcactaccaaaatgacatcattttccacctctgctcagtgttcaacatctgacagtgcttgcaggatctctcctggacaaatcaatcaggtacgaccaaaactgccgcttttgaagattttgcatgcagcaggtgcgcaaggtgaaatgttcactgttaaagaggtcatgcactatttaggtcagtacataatggtgaagcaactttatgatcagcaggagcagcatatggtatattgtggtggagatcttttgggagaactactgggacgtcagagcttctccgtgaaagacccaagccctctctatgatatgctaagaaagaatcttgtcactttagccactgctactacagatgctgctcagactctcgctctcgcacaggatcacagtatggatattccaagtcaagaccaactgaagcaaagtgcagaggaaagttccacttccagaaaaagaactacagaagacgatatccccacactgcctacctcagagcataaatgcatacattctagagaagatgaagacttaattgaaaatttagcccaagatgaaacatctaggctggaccttggatttgaggagtgggatgtagctggcctgccttggtggtttttaggaaacttgagaagcaactatacacctagaagtaatggctcaactgatttacagacaaatcaggtgattgaagtgggaaaaaatgatgacctggaggactctaagtccttaagtgatgataccgatgtagaggttacctctgaggatgagtggcagtgtactgaatgcaagaaatttaactctccaagcaagaggtactgttttcgttgttgggccttgaggaaggattggtattcagattgttcaaagttaacccattctctctccacgtctgatatcactgccatacctgaaaaggaaaatgaaggaaatgatgtccctgattgtcgaagaaccatttcggctcctgtcgttagacctaaagatgcgtatataaagaaagaaaactccaaactttttgatccctgcaactcagtggaattcttggatttggctcacagttctgaaagccaagagaccatctcaagcatgggagaacagttagataacctttctgaacagagaacagatacagaaaacatggaggattgccagaatctcttgaagccatgtagcttatgtgagaaaagaccacgagacgggaacattattcatggaaggacgggccatcttgtcacttgttttcactgtgccagaagactaaagaaggctggggcttcatgccctatttgcaagaaagagattcagctggttattaaggtttttatagcataatggtagtacgaacataaaaatgcatttattccgttcacttaccacattatttgaaaatcaatcctttatttaattttatttccaacctgtcagag

SEQ ID NO: 2380 - DNA, 863 bp, Homo sapiens
  source 1..863: mol_type = genomic DNA
attactcgccatttcaaaatgctgccgaggccctaggatctgtgactgccacccctccccccacccgggctcggcgggggagcgactcatggagctgccgtaagttttaccaacagactgcagtttcttcactaccaaaatgacatcattttccacctctgctcagtgttcaacatctgacagtgcttgcaggatctctcctggacaaatcaatcaggtacgaccaaaactgccgcttttgaagattttgcatgcagcaggtgcgcaaggtgaaatgttcactgttaaagaggtcatgcactatttaggtcagtacataatggtgaagcaactttatgatcagcaggagcagcatatggtatattgtggtggagatcttttgggagaactactgggacgtcagagcttctccgtgaaagacccaagccctctctatgatatgctaagaaagaatcttgtcactttagccactgctactacaggatgccaaagaagagtgaatggcccacaaagagcctggtagcacatacgcttttcaaaaggtcatgcacttacagctaaagccattaagggtctcactctgtcaccaggctggagtgcagtggcacaatctaggctcactgcagcctcgacctcccaggttcaagcaatcctcccacctcagcctcccggttagctgggactatagctatgcgccaccatgtccctatgttgcccagcctcggtgtctggatgcccagcctaaccaagtcagcttcccatctttggctgagacaaggagaaccctgctgggctaggggacccagatagtgaccaggttctgcatgtgatttccctgtggaattccaaccaaggacagacag

SEQ ID NO: 2381 - DNA, 5592 bp, Homo sapiens
  source 1..5592: mol_type = genomic DNA
attactcgccatttcaaaatgctgccgaggccctaggatctgtgactgccacccctccccccacccgggctcggcgggggagcgactcatggagctgccgtaagttttaccaacagactgcagtttcttcactaccaaaatgacatcattttccacctctgctcagtgttcaacatctgacagtgcttgcaggatctctcctggacaaatcaatcaggtacgaccaaaactgccgcttttgaagattttgcatgcagcaggtgcgcaaggtgaaatgttcactgttaaagaggtcatgcactatttaggtcagtacataatggtgaagcaactttatgatcagcaggagcagcatatggtatattgtggtggagatcttttgggagaactactgggacgtcagagcttctccgtgaaagacccaagccctctctatgatatgctaagaaagaatcttgtcactttagccactgctactacaggatcacagtatggatattccaagtcaagaccaactgaagcaaagtgcagaggaaagttccacttccagaaaaagaactacagaagacgatatccccacactgcctacctcagagcataaatgcatacattctagagaagatgaagacttaattgaaaatttagcccaagatgaaacatctaggctggaccttggatttgaggagtgggatgtagctggcctgccttggtggtttttaggaaacttgagaagcaactatacacctagaagtaatggctcaactgatttacagacaaatcaggatgtgggtactgccattgtttcagatactacagatgacttgtggtttttgaatgagtcagtatcagagcagttaggtgttggaataaaagttgaagctgctgatactgaacaaacaagtgaagaagtagggaaagtaagtgacaaaaaggtgattgaagtgggaaaaaatgatgacctggaggactctaagtccttaagtgatgataccgatgtagaggttacctctgaggatgagtggcagtgtactgaatgcaagaaatttaactctccaagcaagaggtactgttttcgttgttgggccttgaggaaggattggtattcagattgttcaaagttaacccattctctctccacgtctgatatcactgccatacctgaaaaggaaaatgaaggaaatgatgtccctgattgtcgaagaaccatttcggctcctgtcgttagacctaaagatgcgtatataaagaaagaaaactccaaactttttgatccctgcaactcagtggaattcttggatttggctcacagttctgaaagccaagagaccatctcaagcatgggagaacagttagataacctttctgaacagagaacagatacagaaaacatggaggattgccagaatctcttgaagccatgtagcttatgtgagaaaagaccacgagacgggaacattattcatggaaggacgggccatcttgtcacttgttttcactgtgccagaagactaaagaaggctggggcttcatgccctatttgcaagaaagagattcagctggttattaaggtttttatagcataatggtagtacgaacataaaaatgcatttattccgttcacttaccacattatttgaaaatcaatcctttatttaattttatttccaacctgtcagagaatgttcttaggcatcaaaatccaaggtagctgtaagaaaaatactggagctaacaatgaagaacagaagtaatctgattagtcaaattattaagtgccatggattactttatgcagcagtcaggtacatagttaggtgaacccaaaagaaaaactcttgaaaacaagagatttcttccatgcacatttacaatattgaggtataattaacatgataaagtgtttccttctaacgagttgtagaaatctgagtaaccacccaaaaaagcaatagaatgtttctgtcaccccaaaacactcccttctgcccctcttcagacagtccttcagctatttcatggctctcaccctagttttttttttttttgcacttttttttttccgggggtataggggaggtgtggggcgacagggtctgtcttgttctgtctcccaggctgaagtgcagtgcagtggtatgatcatggctcactgcagccttggtttcctgggcataagtggtcttcccacttcagcctcctgagtagctgagactatagactagcataaccacactggctaattttttgtggagatgaagtctcactatgttgcccaggctggtctcgaactcctgggctcaaacaatcctcccgcctcagccttccaaattgctgggattatagtcatgaggcacctagtctggcccttttgcaagactttaatctgaaatctaaatttttaaaatttaagtacttacaaaggatatactatccaacatattgcatattatatatgtgctttaaagtttttttttttttttgagagacggtctcactttgtcatccaagctggagtgcagtggtgcaaacacggcccacctcctgggctcaagtgatcctccagcctcagcttccctcacaggcattcactatcactcccagctaattaaaataatttgtagacggtgtctcgttatgttgcccaggctggtctcgaactcctgggtttaagtgattcccccgcctcagcctcccaaagtgttgggcttacagccttgagccactatgcttggctcaaagatatttttatgaaagccctgggactatagatttagctgattaaatttatagaaaaagtcctgtcatataaactggcaaagtctgttcttaatttaattagccaaatcagacttaacttccgtcagaacatgtcttggttttaattcagataaacacacaaacatacttctctggcacagccttcagaagcatcagtttttgttttgttttgttttgttttttgagacagggtcttgctctgtcgcccaggctggagtgcactggcacaatcacagttcactgcagcctcgacctcccagatccaagcaatcctcccacctaagcctcccaagtagctgggtctataggcgcgtgccaccaccatgcccagctgaattttgtattttttgtacagacagcattttgccatgttgcccaggctggtcccaaacttctagcctcaagcaaccctcctgcctcagcctctcaaagtgctaggattgcagtcctgagctactgccccctaccctctttgcgtcttaggagtcatttagattttttttgatccttttgtttagtgcctctggagctgcttacaccaaggcaatacgccttgatatactggatggttgagaggcagcctctttttttttttttttttttttttttttttggaggatagggagtatggctgttgtgaaaagggaggtaaagagaaatggtagatctgaagaggcctcatcagagcacatattttaggacaacacatatggaaattggacatctttaagttggtttccatagagctatgcatgtatccttacccccatgggaaaatgttggtgtgttctcaagggtatgcatgtgtcattttgaagaccaaggccctagaattgtcaaacttaaggatcataaaaatcatgagggttgcttgttaaaaatgtccaaacgtgcagagactgatctttgagatctggaccaggaatttgcatttgaacaagtgttcctggaatctctatgcaagttttatacagaacatacttttggaatccttgccctagacaggggtgtccaatcttttggcttccctggtccacaatggaagaagaattgtcttggaccacacataaaatacactaacactaacaatagctgatgagctaaaaaaaaaaaaaaaaaaaatcgtggaccgggcgtagtggctcacgcctggtctcgaactcctgacctcatgatccacacacctcggcctcccaaagtcctgcgattacaggcgtgagctaccgcacccagccaagttgtaatttttaataaaacttaagaagtaaacattttacttatgtttataggtatttgatcctaaatttgacacatcattgcccatgaaagaatcctcttaggctgctcagcttcactcttcctgcttgcccaccggggtttttcactgcttctgttagcactaagtacttagacgatcctaagatatgtgcttgagccgaatttcatctttacttgtaggaaactttaaactatttcttttcttttcttttttttttttttttacttgagatggagttttgctcttgtcgcccaggctggagtgcagtggagtgatctcggctcactgcaacctctgcctcccgggttcaaatgattctcctgcctcagcctcccaagtagctgggattacaggtgtgcaccaccatgtctggctaattttgtatttttagtagagatggtttcaccatgttggtcaggctggtctcgaactcctgacctcaggtcatccacccacctcagcctcgcaaagtgctgagattacaggcatgagccacagcgcccagcttaaactattttcttggtctgtttttgattttcttttttccttgccactgcggtacagattttttttactcactgccactaaactaaagcaaggcatagtttatatgtgaagtgttcagagtttactgctataaggaaacttccaaatactgacatttaccttttagctgtagttattgggaccatgtgctctggttttctggagactgccaaattgctcccatttttctgcatcccacctggtttctttctgcatgtcccctttcactttcaaacctcttcatttggatgttaaattatatggtcacctagttataggtaagccttgttcgagttgatatcttgattgtgaggaaggatctgtgtcattggagcttgtttctgctgcaacgtgctgtagactatgaataatgaaatcacaccacattaccatcagatttcttgttttagttgtcaaattaatatttatgattgttatcttgggcgaaaagttcagagcagagatgacaaatcattagaacaacgatgaatttcagtattacggctaaaaagttcttctgtctgaatattaactcactctccttccagtgtacttcacagtaattggtatgcttttttatttaatgcttaaatcaaactttataaaaatcttagaccagatctttaatatggtatgccatttccccagtctaccaatggaatagtatgggtttctaatcctaggcttgtacaatggattggagttgagccatgccagcctccacactgccactaacttctgtaatgtaagattgagtcactgccaagcatttgaaatatgcagttgtgttttaattataatttatgtatagttagatgtatgtagtgcattgtgtggtattatttggtttgtaagaatttatttttaagggtcaaggtcatttgtaacattttgtgtgtgtcaattcaatgcaatgttggctgccttttgaagtctttgatatattggtgaatattcttctgatctataatacaaagctatgtaatgtt

SEQ ID NO: 2382 - DNA, 8677 bp, Homo sapiens
  source 1..8677: mol_type = genomic DNA
ggggcctgaagcggcggtaccggtgctggcggcggcagctgaggccttggccgaagccgcgcgaacctcagggcaagatgcttggaaccggacctgccgccgccaccaccgctgccaccacatctagcaatgtgagcgtcctgcagcagtttgccagtggcctaaagagccggaatgaggaaaccagggccaaagccgccaaggagctccagcactatgtcaccatggaactccgagagatgagtcaagaggagtctactcgcttctatgaccaactgaaccatcacatttttgaattggtttccagctcagatgccaatgagaggaaaggtggcatcttggccatagctagcctcataggagtggaaggtgggaatgccacccgaattggcagatttgccaactatcttcggaacctcctcccctccaatgacccagttgtcatggaaatggcatccaaggccattggccgtcttgccatggcaggggacacttttaccgctgagtacgtggaatttgaggtgaagcgagccctggaatggctgggtgctgaccgcaatgagggccggagacatgcagctgtcctggttctccgtgagctggccatcagcgtccctaccttcttcttccagcaagtgcaacccttctttgacaacatttttgtggccgtgtgggaccccaaacaggccatccgtgagggagctgtagccgcccttcgtgcctgtctgattctcacaacccagcgtgagccgaaggagatgcagaagcctcagtggtacaggcacacatttgaagaagcagagaagggatttgatgagaccttggccaaagagaagggcatgaatcgggatgatcggatccatggagccttgttgatccttaacgagctggtccgaatcagcagcatggagggagagcgtctgagagaagaaatggaagaaatcacacagcagcagctggtacacgacaagtactgcaaagatctcatgggcttcggaacaaaacctcgtcacattacccccttcaccagtttccaggctgtacagccccagcagtcaaatgccttggtggggctgctggggtacagctctcaccaaggcctcatgggatttgggacctcccccagtccagctaagtccaccctggtggagagccggtgttgcagagacttgatggaggagaaatttgatcaggtgtgccagtgggtgctgaaatgcaggaatagcaagaactcgctgatccaaatgacaatccttaatttgttgccccgcttggctgcattccgaccttctgccttcacagatacccagtatctccaagataccatgaaccatgtcctaagctgtgtcaagaaggagaaggaacgtacagcggccttccaagccctggggctactttctgtggctgtgaggtctgagtttaaggtctatttgcctcgcgtgctggacatcatccgagcggccctgcccccaaaggacttcgcccataagaggcagaaggcaatgcaggtggatgccacagtcttcacttgcatcagcatgctggctcgagcaatggggccaggcatccagcaggatatcaaggagctgctggagcccatgctggcagtgggactaagccctgccctcactgcagtgctctacgacctgagccgtcagattccacagctaaagaaggacattcaagatgggctactgaaaatgctgtccctggtccttatgcacaaaccccttcgccacccaggcatgcccaagggcctggcccatcagctggcctctcctggcctcacgaccctccctgaggccagcgatgtgggcagcatcactcttgccctccgaacgcttggcagctttgaatttgaaggccactctctgacccaatttgttcgccactgtgcggatcatttcctgaacagtgagcacaaggagatccgcatggaggctgcccgcacctgctcccgcctgctcacaccctccatccacctcatcagtggccatgctcatgtggttagccagaccgcagtgcaagtggtggcagatgtgcttagcaaactgctcgtagttgggataacagatcctgaccctgacattcgctactgtgtcttggcgtccctggacgagcgctttgatgcacacctggcccaggcggagaacttgcaggccttgtttgtggctctgaatgaccaggtgtttgagatccgggagctggccatctgcactgtgggccgactcagtagcatgaaccctgcctttgtcatgcctttcctgcgcaagatgctcatccagattttgacagagttggagcacagtgggattggaagaatcaaagagcagagtgcccgcatgctggggcacctggtctccaatgccccccgactcatccgcccctacatggagcctattctgaaggcattaattttgaaactgaaagatccagaccctgatccaaacccaggtgtgatcaataatgtcctggcaacaataggagaattggcacaggttagtggcctggaaatgaggaaatgggttgatgaactttttattatcatcatggacatgctccaggattcctctttgttggccaaaaggcaggtggctctgtggaccctgggacagttggtggccagcactggctatgtagtagagccctacaggaagtaccctactttgcttgaggtgctactgaattttctgaagactgagcagaaccagggtacacgcagagaggccatccgtgtgttagggcttttaggggctttggatccttacaagcacaaagtgaacattggcatgatagaccagtcccgggatgcctctgctgtcagcctgtcagaatccaagtcaagtcaggattcctctgactatagcactagtgaaatgctggtcaacatgggaaacttgcctctggatgagttctacccagctgtgtccatggtggccctgatgcggatcttccgagaccagtcactctctcatcatcacaccatggttgtccaggccatcaccttcatcttcaagtccctgggactcaaatgtgtgcagttcctgccccaggtcatgcccacgttccttaacgtcattcgagtctgtgatggggccatccgggaatttttgttccagcagctgggaatgttggtgtcctttgtgaagagccacatcagaccttatatggatgaaatagtcaccctcatgagagaattctgggtcatgaacacctcaattcagagcacgatcattcttctcattgagcaaattgtggtagctcttgggggtgaatttaagctctacctgccccagctgatcccacacatgctgcgtgtcttcatgcatgacaacagcccaggccgcattgtctctatcaagttactggctgcaatccagctgtttggcgccaacctggatgactacctgcatttactgctgcctcctattgttaagttgtttgatgcccctgaagctccactgccatctcgaaaggcagcgctagagactgtggaccgcctgacggagtccctggatttcactgactatgcctcccggatcattcaccctattgttcgaacactggaccagagcccagaactgcgctccacagccatggacacgctgtcttcacttgtttttcagctggggaagaagtaccaaattttcattccaatggtgaataaagttctggtgcgacaccgaatcaatcatcagcgctatgatgtgctcatctgcagaattgtcaagggatacacacttgctgatgaagaggaggatcctttgatttaccagcatcggatgcttaggagtggccaaggggatgcattggctagtggaccagtggaaacaggacccatgaagaaactgcacgtcagcaccatcaacctccaaaaggcctggggcgctgccaggagggtctccaaagatgactggctggaatggctgagacggctgagcctggagctgctgaaggactcatcatcgccctccctgcgctcctgctgggccctggcacaggcctacaacccgatggccagggatctcttcaatgctgcatttgtgtcctgctggtctgaactgaatgaagatcaacaggatgagctcatcagaagcatcgagttggccctcacctcacaagacatcgctgaagtcacacagaccctcttaaacttggctgaattcatggaacacagtgacaagggccccctgccactgagagatgacaatggcattgttctgctgggtgagagagctgccaagtgccgagcatatgccaaagcactacactacaaagaactggagttccagaaaggccccacccctgccattctagaatctctcatcagcattaataataagctacagcagccggaggcagcggccggagtgttagaatatgccatgaaacactttggagagctggagatccaggctacctggtatgagaaactgcacgagtgggaggatgcccttgtggcctatgacaagaaaatggacaccaacaaggacgacccagagctgatgctgggccgcatgcgctgcctcgaggccttgggggaatggggtcaactccaccagcagtgctgtgaaaagtggaccctggttaatgatgagacccaagccaagatggcccggatggctgctgcagctgcatggggtttaggtcagtgggacagcatggaagaatacacctgtatgatccctcgggacacccatgatggggcattttatagagctgtgctggcactgcatcaggacctcttctccttggcacaacagtgcattgacaaggccagggacctgctggatgctgaattaactgcgatggcaggagagagttacagtcgggcatatggggccatggtttcttgccacatgctgtccgagctggaggaggttatccagtacaaacttgtccccgagcgacgagagatcatccgccagatctggtgggagagactgcagggctgccagcgtatcgtagaggactggcagaaaatccttatggtgcggtcccttgtggtcagccctcatgaagacatgagaacctggctcaagtatgcaagcctgtgcggcaagagtggcaggctggctcttgctcataaaactttagtgttgctcctgggagttgatccgtctcggcaacttgaccatcctctgccaacagttcaccctcaggtgacctatgcctacatgaaaaacatgtggaagagtgcccgcaagatcgatgccttccagcacatgcagcattttgtccagaccatgcagcaacaggcccagcatgccatcgctactgaggaccagcagcataagcaggaactgcacaagctcatggcccgatgcttcctgaaacttggagagtggcagctgaatctacagggcatcaatgagagcacaatccccaaagtgctgcagtactacagcgccgccacagagcacgaccgcagctggtacaaggcctggcatgcgtgggcagtgatgaacttcgaagctgtgctacactacaaacatcagaaccaagcccgcgatgagaagaagaaactgcgtcatgccagcggggccaacatcaccaacgccaccactgccgccaccacggccgccactgccaccaccactgccagcaccgagggcagcaacagtgagagcgaggccgagagcaccgagaacagccccaccccatcgccgctgcagaagaaggtcactgaggatctgtccaaaaccctcctgatgtacacggtgcctgccgtccagggcttcttccgttccatctccttgtcacgaggcaacaacctccaggatacactcagagttctcaccttatggtttgattatggtcactggccagatgtcaatgaggccttagtggagggggtgaaagccatccagattgatacctggctacaggttatacctcagctcattgcaagaattgatacgcccagacccttggtgggacgtctcattcaccagcttctcacagacattggtcggtaccacccccaggccctcatctacccactgacagtggcttctaagtctaccacgacagcccggcacaatgcagccaacaagattctgaagaacatgtgtgagcacagcaacaccctggtccagcaggccatgatggtgagcgaggagctgatccgagtggccatcctctggcatgagatgtggcatgaaggcctggaagaggcatctcgtttgtactttggggaaaggaacgtgaaaggcatgtttgaggtgctggagcccttgcatgctatgatggaacggggcccccagactctgaaggaaacatcctttaatcaggcctatggtcgagatttaatggaggcccaagagtggtgcaggaagtacatgaaatcagggaatgtcaaggacctcacccaagcctgggacctctattatcatgtgttccgacgaatctcaaagcagctgcctcagctcacatccttagagctgcaatatgtttccccaaaacttctgatgtgccgggaccttgaattggctgtgccaggaacatatgaccccaaccagccaatcattcgcattcagtccatagcaccgtctttgcaagtcatcacatccaagcagaggccccggaaattgacacttatgggcagcaacggacatgagtttgttttccttctaaaaggccatgaagatctgcgccaggatgagcgtgtgatgcagctcttcggcctggttaacacccttctggccaatgacccaacatctcttcggaaaaacctcagcatccagagatacgctgtcatccctttatcgaccaactcgggcctcattggctgggttccccactgtgacacactgcacgccctcatccgggactacagggagaagaagaagatccttctcaacatcgagcatcgcatcatgttgcggatggctccggactatgaccacttgactctgatgcagaaggtggaggtgtttgagcatgccgtcaataatacagctggggacgacctggccaagctgctgtggctgaaaagccccagctccgaggtgtggtttgaccgaagaaccaattatacccgttctttagcggtcatgtcaatggttgggtatattttaggcctgggagatagacacccatccaacctgatgctggaccgtctgagtgggaagatcctgcacattgactttggggactgctttgaggttgctatgacccgagagaagtttccagagaagattccatttagactaacaagaatgttgaccaatgctatggaggttacaggcctggatggcaactacagaatcacatgccacacagtgatggaggtgctgcgagagcacaaggacagtgtcatggccgtgctggaagcctttgtctatgaccccttgctgaactggaggctgatggacacaaataccaaaggcaacaagcgatcccgaacgaggacggattcctactctgctggccagtcagtcgaaattttggacggtgtggaacttggagagccagcccataagaaaacggggaccacagtgccagaatctattcattctttcattggagacggtttggtgaaaccagaggccctaaataagaaagctatccagattattaacagggttcgagataagctcactggtcgggacttctctcatgatgacactttggatgttccaacgcaagttgagctgctcatcaaacaagcgacatcccatgaaaacctctgccagtgctatattggctggtgccctttctggtaactggaggcccagatgtgcccatcacgttttttctgaggcttttgtactttagtaaatgcttccactaaactgaaaccatggtgagaaagtttgactttgttaaatattttgaaatgtaaatgaaaagaactactgtatattaaaagttggtttgaaccaactttctagctgctgttgaagaatatattgtcagaaacacaaggcttgatttggttcccaggacagtgaaacatagtaataccacgtaaatcaagccattcattttggggaacagaagatccataactttagaaatacgggttttgacttaactcacaagagaactcatcataagtacttgctgatggaagaatgacctagttgctcctctcaacatgggtacagcaaactcagcacagccaagaagcctcaggtcgtggagaacatggattaggatcctagactgtaaagacacagaagatgctgacctcacccctgccacctatcccaagacctcactggtctgtggacagcagcagaaatgtttgcaagataggccaaaatgagtacaaaaggtctgtcttccatcagacccagtgatgctgcgactcacacgcttcaattcaagacctgaccgctagtagggaggtttattcagatcgctggcagcctcggctgagcagatgcacagaggggatcactgtgcagtgggaccaccctcactggccttctgcagcagggttctgggatgttttcagtggtcaaaatactctgtttagagcaagggctcagaaaacagaaatactgtcatggaggtgctgaacacagggaaggtctggtacatattggaaattatgagcagaacaaatactcaactaaatgcacaaagtataaagtgtagccatgtctagacaccatgttgtatcagaataatttttgtgccaataaatgacatcagaattttaaacata

SEQ ID NO: 2383 - DNA, 4017 bp, Homo sapiens
  source 1..4017: mol_type = genomic DNA
ctttctctgtcaggctcctatgctcttcatgtcttcctttgtccactatctggtgacctgtcaaaactttgctcccttgaaatattgtgatgactgctgcttgcccccacttctgcttgccatttctgctctcccctaaatgtacactttatacccagtgcagctctgctttctgggtgaaagtgccagccctgtgcctgctccaggcgtgctttgctggcctcgctctcactcctcgcctgcatgtatcccctgcacggtcacattcatgggcttgtttcccgtgaaccaatctgcacatctctggccttattcttcccccttgccaagtagtccccaccgctgccttcttgtttccctccttgcccttctgcagctctcttccagacctaccccaaatccctcttcttgacaaagctttccaaatgcctgtccttgctactcccattgtgccttgcagagtacctaggtcttcaggtttgtgcgtgagctcccctaggaggccgggagatcccttgaggcaagagctctctcctgctcctcttgctgtgcccttctcgcagtgcactcatagtacgttatatagttagtgctccacaaagtgagtggatcatgttgaatttagtaaaacagccatttctgagtgtctccttgaagtgtttgctttatggacacacagaacaggcaggagcagctgttcctcagcatcgaccttgcgctcctctgagccctgctgttggtcacagctccagtgtctgtccttgcctttctccccaaccaggcctggcatgcgtgggcagtgatgaacttcgaagctgtgctacactacaaacatcagaaccaagcccgcgatgagaagaagaaactgcgtcatgccagcggggccaacatcaccaacgccaccactgccgccaccacggccgccactgccaccaccactgccagcaccgagggcagcaacagtgagagcgaggccgagagcaccgagaacagccccaccccatcgccgctgcagaagaaggtcactgaggatctgtccaaaaccctcctgatgtacacggtgcctgccgtccagggcttcttccgttccatctccttgtcacgaggcaacaacctccaggatacactcagagttctcaccttatggtttgattatggtcactggccagatgtcaatgaggccttagtggagggggtgaaagccatccagattgatacctggctacaggttatacctcagctcattgcaagaattgatacgcccagacccttggtgggacgtctcattcaccagcttctcacagacattggtcggtaccacccccaggccctcatctacccactgacagtggcttctaagtctaccacgacagcccggcacaatgcagccaacaagattctgaagaacatgtgtgagcacagcaacaccctggtccagcaggccatgatggtgagcgaggagctgatccgagtggccatcctctggcatgagatgtggcatgaaggcctggaagaggcatctcgtttgtactttggggaaaggaacgtgaaaggcatgtttgaggtgctggagcccttgcatgctatgatggaacggggcccccagactctgaaggaaacatcctttaatcaggcctatggtcgagatttaatggaggcccaagagtggtgcaggaagtacatgaaatcagggaatgtcaaggacctcacccaagcctgggacctctattatcatgtgttccgacgaatctcaaagcagctgcctcagctcacatccttagagctgcaatatgtttccccaaaacttctgatgtgccgggaccttgaattggctgtgccaggaacatatgaccccaaccagccaatcattcgcattcagtccatagcaccgtctttgcaagtcatcacatccaagcagaggccccggaaattgacacttatgggcagcaacggacatgagtttgttttccttctaaaaggccatgaagatctgcgccaggatgagcgtgtgatgcagctcttcggcctggttaacacccttctggccaatgacccaacatctcttcggaaaaacctcagcatccagagatacgctgtcatccctttatcgaccaactcgggcctcattggctgggttccccactgtgacacactgcacgccctcatccgggactacagggagaagaagaagatccttctcaacatcgagcatcgcatcatgttgcggatggctccggactatgaccacttgactctgatgcagaaggtggaggtgtttgagcatgccgtcaataatacagctggggacgacctggccaagctgctgtggctgaaaagccccagctccgaggtgtggtttgaccgaagaaccaattatacccgttctttagcggtcatgtcaatggttgggtatattttaggcctgggagatagacacccatccaacctgatgctggaccgtctgagtgggaagatcctgcacattgactttggggactgctttgaggttgctatgacccgagagaagtttccagagaagattccatttagactaacaagaatgttgaccaatgctatggaggttacaggcctggatggcaactacagaatcacatgccacacagtgatggaggtgctgcgagagcacaaggacagtgtcatggccgtgctggaagcctttgtctatgaccccttgctgaactggaggctgatggacacaaataccaaaggcaacaagcgatcccgaacgaggacggattcctactctgctggccagtcagtcgaaattttggacggtgtggaacttggagagccagcccataagaaaacggggaccacagtgccagaatctattcattctttcattggagacggtttggtgaaaccagaggccctaaataagaaagctatccagattattaacagggttcgagataagctcactggtcgggacttctctcatgatgacactttggatgttccaacgcaagttgagctgctcatcaaacaagcgacatcccatgaaaacctctgccagtgctatattggctggtgccctttctggtaactggaggcccagatgtgcccatcacgttttttctgaggcttttgtactttagtaaatgcttccactaaactgaaaccatggtgagaaagtttgactttgttaaatattttgaaatgtaaatgaaaagaactactgtatattaaaagttggtttgaaccaactttctagctgctgttgaagaatatattgtcagaaacacaaggcttgatttggttcccaggacagtgaaacatagtaataccacgtaaatcaagccattcattttggggaacagaagatccataactttagaaatacgggttttgacttaactcacaagagaactcatcataagtacttgctgatggaagaatgacctagttgctcctctcaacatgggtacagcaaactcagcacagccaagaagcctcaggtcgtggagaacatggattaggatcctagactgtaaagacacagaagatgctgacctcacccctgccacctatcccaagacctcactggtctgtggacagcagcagaaatgtttgcaagataggccaaaatgagtacaaaaggtctgtcttccatcagacccagtgatgctgcgactcacacgcttcaattcaagacctgaccgctagtagggaggtttattcagatcgctggcagcctcggctgagcagatgcacagaggggatcactgtgcagtgggaccaccctcactggccttctgcagcagggttctgggatgttttcagtggtcaaaatactctgtttagagcaagggctcagaaaacagaaatactgtcatggaggtgctgaacacagggaaggtctggtacatattggaaattatgagcagaacaaatactcaactaaatgcacaaagtataaagtgtagccatgtctagacaccatgttgtatcagaataatttttgtgccaataaatgacatcagaattttaaacata

SEQ ID NO: 2384 - DNA, 694 bp, Homo sapiens
  source 1..694: mol_type = genomic DNA
cctggaacagtacttaaacaagggagcgtgctgtgtgttccagtaaaactggacttgcagaagtggaggtggaggggctggattggctgagggctatcgtttgccaactcctagcttacagtatcacgtacttattgattttttcatccgttatctctgttgatccctccctgatctgtcttctgtttctcaaagacacccatccaacctgatgctggaccgtctgagtgggaagatcctgcacattgactttggggactgctttgaggttgctatgacccgagagaagtttccagagaagattccatttagactaacaagaatgttgaccaatgctatggaggttacaggcctggatggcaactacagaatcacatgccacacagtgatggaggtgctgcgagagcacaaggacagtgtcatggccgtgctggaagcctttgtctatgaccccttgctgaactggaggctgatggacacaaataccaaaggcaacaagcgatcccgaacgaggacggattcctactctgctggccagtcagtcgaaattttggacggtgtggaacttggagagccagcccataagaaaacggggaccacagtgccagaatctattcattctttcattggagacggtttggtgaaaccagaggccctaaataagaaagctatccagattattaacagggttcga

SEQ ID NO: 2385 - DNA, 5308 bp, Homo sapiens
  source 1..5308: mol_type = genomic DNA
gctcccggcttagaggacagcggggaaggcgggcggtggggcagggggcctgaagcggcggtaccggtgctggcggcggcagctgaggccttggccgaagccgcgcgaacctcagggcaagatgcttggaaccggacctgccgccgccaccaccgctgccaccacatctagcaatgtgagcgtcctgcagcagtttgccagtggcctaaagagccggaatgaggaaaccagggccaaagccgccaaggagctccagcactatgtcaccatggaactccgagagatgagtcaagaggagtctactcgcttctatgaccaactgaaccatcacatttttgaattggtttccagctcagatgccaatgagaggaaaggtggcatcttggccatagctagcctcataggagtggaaggtgggaatgccacccgaattggcagatttgccaactatcttcggaacctcctcccctccaatgacccagttgtcatggaaatggcatccaaggccattggccgtcttgccatggcaggggacacttttaccgctgagtacgtggaatttgaggtgaagcgagccctggaatggctgggtgctgaccgcaatgagggccggagacatgcagctgtcctggttctccgtgagctggccatcagcgtccctaccttcttcttccagcaagtgcaacccttctttgacaacatttttgtggccgtgtgggaccccaaacaggccatccgtgagggagctgtagccgcccttcgtgcctgtctgattctcacaacccagcgtgagccgaaggagatgcagaagcctcagtggtacaggcacacatttgaagaagcagagaagggatttgatgagaccttggccaaagagaagggcatgaatcgggatgatcggatccatggagccttgttgatccttaacgagctggtccgaatcagcagcatggagggagagcgtctgagagaagaaatggaagaaatcacacagcagcagctggtacacgacaagtactgcaaagatctcatgggcttcggaacaaaacctcgtcacattacccccttcaccagtttccaggctgtacagccccagcagtcaaatgccttggtggggctgctggggtacagctctcaccaaggcctcatgggatttgggacctcccccagtccagctaagtccaccctggtggagagccggtgttgcagagacttgatggaggagaaatttgatcaggtgtgccagtgggtgctgaaatgcaggaatagcaagaactcgctgatccaaatgacaatccttaatttgttgccccgcttggctgcattccgaccttctgccttcacagatacccagtatctccaagataccatgaaccatgtcctaagctgtgtcaagaaggagaaggaacgtacagcggccttccaagccctggggctactttctgtggctgtgaggtctgagtttaaggtctatttgcctcgcgtgctggacatcatccgagcggccctgcccccaaaggacttcgcccataagaggcagaaggcaatgcaggtggatgccacagtcttcacttgcatcagcatgctggctcgagcaatggggccaggcatccagcaggatatcaaggagctgctggagcccatgctggcagtgggactaagccctgccctcactgcagtgctctacgacctgagccgtcagattccacagctaaagaaggacattcaagatgggctactgaaaatgctgtccctggtccttatgcacaaaccccttcgccacccaggcatgcccaagggcctggcccatcagctggcctctcctggcctcacgaccctccctgaggccagcgatgtgggcagcatcactcttgccctccgaacgcttggcagctttgaatttgaaggccactctctgacccaatttgttcgccactgtgcggatcatttcctgaacagtgagcacaaggagatccgcatggaggctgcccgcacctgctcccgcctgctcacaccctccatccacctcatcagtggccatgctcatgtggttagccagaccgcagtgcaagtggtggcagatgtgcttagcaaactgctcgtagttgggataacagatcctgaccctgacattcgctactgtgtcttggcgtccctggacgagcgctttgatgcacacctggcccaggcggagaacttgcaggccttgtttgtggctctgaatgaccaggtgtttgagatccgggagctggccatctgcactgtgggccgactcagtagcatgaaccctgcctttgtcatgcctttcctgcgcaagatgctcatccagattttgacagagttggagcacagtgggattggaagaatcaaagagcagagtgcccgcatgctggggcacctggtctccaatgccccccgactcatccgcccctacatggagcctattctgaaggcattaattttgaaactgaaagatccagaccctgatccaaacccaggtgtgatcaataatgtcctggcaacaataggagaattggcacaggttagtggcctggaaatgaggaaatgggttgatgaactttttattatcatcatggacatgctccaggattcctctttgttggccaaaaggcaggtggctctgtggaccctgggacagttggtggccagcactggctatgtagtagagccctacaggaagtaccctactttgcttgaggtgctactgaattttctgaagactgagcagaaccagggtacacgcagagaggccatccgtgtgttagggcttttaggggctttggatccttacaagcacaaagtgaacattggcatgatagaccagtcccgggatgcctctgctgtcagcctgtcagaatccaagtcaagtcaggattcctctgactatagcactagtgaaatgctggtcaacatgggaaacttgcctctggatgagttctacccagctgtgtccatggtggccctgatgcggatcttccgagaccagtcactctctcatcatcacaccatggttgtccaggccatcaccttcatcttcaagtccctgggactcaaatgtgtgcagttcctgccccaggtcatgcccacgttccttaacgtcattcgagtctgtgatggggccatccgggaatttttgttccagcagctgggaatgttggtgtcctttgtgaagagccacatcagaccttatatggatgaaatagtcaccctcatgagagaattctgggtcatgaacacctcaattcagagcacgatcattcttctcattgagcaaattgtggtagctcttgggggtgaatttaagctctacctgccccagctgatcccacacatgctgcgtgtcttcatgcatgacaacagcccaggccgcattgtctctatcaagttactggctgcaatccagctgtttggcgccaacctggatgactacctgcatttactgctgcctcctattgttaagttgtttgatgcccctgaagctccactgccatctcgaaaggcagcgctagagactgtggaccgcctgacggagtccctggatttcactgactatgcctcccggatcattcaccctattgttcgaacactggaccagagcccagaactgcgctccacagccatggacacgctgtcttcacttgtttttcagctggggaagaagtaccaaattttcattccaatggtgaataaagttctggtgcgacaccgaatcaatcatcagcgctatgatgtgctcatctgcagaattgtcaagggatacacacttgctgatgaagaggaggatcctttgatttaccagcatcggatgcttaggagtggccaaggggatgcattggctagtggaccagtggaaacaggacccatgaagaaactgcacgtcagcaccatcaacctccaaaaggcctggggcgctgccaggagggtctccaaagatgactggctggaatggctgagacggctgagcctggagctgctgaaggactcatcatcgccctccctgcgctcctgctgggccctggcacaggcctacaacccgatggccagggatctcttcaatgctgcatttgtgtcctgctggtctgaactgaatgaagatcaacaggatgagctcatcagaagcatcgagttggccctcacctcacaagacatcgctgaagtcacacagaccctcttaaacttggctgaattcatggaacacagtgacaagggccccctgccactgagagatgacaatggcattgttctgctgggtgagagagctgccaagtgccgagcatatgccaaagcactacactacaaagaactggagttccagaaaggccccacccctgccattctagaatctctcatcagcattaataataagctacagcagccggaggcagcggccggagtgttagaatatgccatgaaacactttggagagctggagatccaggctacctggtatgagaaactgcacgagtgggaggatgcccttgtggcctatgacaagaaaatggacaccaacaaggacgacccagagctgatgctgggccgcatgcgctgcctcgaggccttgggggaatggggtcaactccaccagcagtgctgtgaaaagtggaccctggttaatgatgagacccaagccaagatggcccggatggctgctgcagctgcatggggtttaggtcagtgggacagcatggaagaatacacctgtatgatccctcgggacacccatgatggggcattttatagagctgtgctggcactgcatcaggacctcttctccttggcacaacagtgcattgacaaggccagggacctgctggatgctgaattaactgcgatggcaggagagagttacagtcgggcatatggggccatggtttcttgccacatgctgtccgagctggaggaggttatccagtacaaacttgtccccgagcgacgagagatcatccgccagatctggtgggagagactgcagggctgccagcgtatcgtagaggactggcagaaaatccttatggtgcggtcccttgtggtcagccctcatgaagacatgagaacctggctcaagtatgcaagcctgtgcggcaagagtggcaggctggcaattgctcctctcaacatgggtacagcaaactcagcacagccaagaagcctcaggtcgtggagaacatggattaggatcctagactgtaaagacacagaagatgctgacctcacccctgccacctatcccaagacctcactggtctgtggacagcagcagaaatgtttgcaagataggccaaaatga

SEQ ID NO: 2386 - DNA, 7576 bp, Homo sapiens
  source 1..7576: mol_type = genomic DNA
ttggatttaagaaaatgacctcaaaatgtccgtcagagacgtattcccaggaagaaagatattacttctactacaaaccaaatcaaaaggaaatgaaattccaatgcaacaggagtgaactgccacgcctacgggctgttctccaaactgcagcctccagccacgactgcaacgcgcaacccactttcatttctcatgagtcagcggacaccatgtctaggaggaccgaggaaaggcgctctggccttaccagacacgtcggacgtctatgacacagcccctctatccgttgccggcagctggcgccagactctctggtcgcggtttggaactgcgcgggaagtgggtggtgggcgggcaagcggtagtgggttgtcccttggagctgcccaatcgacgtgcattattctgttggcgcacggcggccttcaattaccgtctcattaactgatctcagcagcctgggagacaccacctatttgaactctaagggggcggggctttgggtgtgcctccgctcgactggctgcggttgtgaaagacagcggcagaagccaatcagcaaataagctctttttcggcacacgcagtcgctccacccgggtcgcgaccgttactggtggcgcgcgcggggacttaaagtagatcatggaggacacccaggctattgactgggatgttgaagaagaggaggagacagagcaatccagtgaatccttgaggtgtaacgtggagccagtagggcggctacatatctttagtggtgcccatggaccagaaaaagatttcccactacacctcgggaagaatgtggtaggccgaatgcctgactgctctgtggccctgccctttccatctatctccaaacaacatgcagagattgaaatcttagcctgggacaaggcacctatcctccgagactgtgggagccttaatggtactcaaatcctgagacctcctaaggttttgagccctggggtgagtcaccgtctgagggaccaggaattgattctctttgctgacttgctctgccagtaccatcgcctggatgtctctctgccctttgtctcccggggccctctgacagtagaagagacacccagagtacagggagaaactcaaccccagaggcttctgttggctgaggactcggaggaggaagtagattttctttctgaaaggcgtatggtaaaaaaatcaaggaccacatcttcctctgtgatagttccagagagtgatgaagaggggcattccccggtcctgggcggccttgggccgccttttgccttcaatttgaacagtgacacagatgtggaagaaggtcagcaaccagccacagaggaggcctcctcagctgccagaagaggtgccactgtagaggcaaagcagtctgaagctgaagttgtaactgaaatccagcttgaaaaggatcagcctttagtgaaggagaaggacaatgatacaaaagtcaagaggggtgcagggaatggggtggttccagctggggtgattctggagaggagccaacctcctggagaggacagtgacacagatgtggatgatgacagcaggcctcctggaaggccagctgaggtccatttggaaagggctcagccttttggcttcatcgacagcgacactgatgcggaagaagagaggatcccagcaaccccagttgtcattcctatgaagaagaggaagatcttccatggagtaggtacaaggggtcctggagcaccaggcctggcccatctgcaggagagccaggctggtagtgatacagatgtggaagaaggcaaggccccacaggctgtccctctggagaaaagccaagcttccatggttatcaacagcgatacagatgacgaggaagaagtctcagcagcgctgactttggcacatctgaaagagagccagcctgctatatggaacagagatgcagaagaggacatgccccaacgtgtggtccttctgcagcgaagccaaaccaccactgagagagacagtgacacagacgtggaggaggaagagctcccagtggaaaatagagaagctgtcctcaaggatcacacaaagattagagcccttgttagagcacattcagaaaaggaccaacctccttttggggacagtgatgacagtgtggaagcagataagagctcacctgggatccacctggagagaagccaagcctccaccacagtggacatcaacacacaagtggagaaggaagtcccgccagggtcagccattatacatataaagaagcatcaggtgtctgtggaggggacaaatcaaacagatgtgaaagcagttgggggaccagcaaagctgcttgtggtatctctagaggaagcctggcctctgcatggggactgtgaaacagatgcagaggagggcacctccctaacagcctcagtagttgcagatgtaagaaagagccagcttccagcagaaggggatgctggggcagagtgggctgcagctgttcttaagcaggagagagctcatgaggtgggggcccagggtgggccacctgtggcacaagtggagcaggacctccctatctcaagagagaacctcacagatctggtggtggacacagacactctaggggaatccacccagccacagagagagggagcccaggtccccacaggaagggagagagaacaacatgtgggtgggaccaaggactctgaagacaactatggtgattctgaagatctggacctacaagctacccagtgctttctggagaatcagggcctggaagcagtccagagcatggaggatgaacctacccaggccttcatgttgactccaccccaagagcttggcccttcccattgcagcttccagacaacaggtaccctagatgaaccatgggaggtcctggctacacagccattctgtctgagagagtctgaggactctgagacccagccttttgacacgcaccttgaggcctatggaccttgcctgtctccacctagggcaataccaggagaccaacatccagagagcccagttcacacagagccaatggggattcaaggcagagggaggcagactgtggataaagtcatgggtataccaaaagaaacagcagagagggtgggccctgagagagggccattggagagagaaactgagaaactgctaccagaaagacagacagatgtgacaggagaggaagaattaaccaaggggaaacaggacagagaacaaaaacagttgttagctagagacacccagagacaagaatctgacaaaaatggggaaagtgcaagtcctgaaagagatagggagagtttgaaggtagaaattgagacatctgaggaaatacaagagaaacaagtacagaagcagacccttccaagcaaagcatttgagagagaagtagagagaccagtagcaaacagagagtgcgatccagccgagttagaagagaaggtgcccaaagtgatcctggagagagatacacagagaggggagccagagggagggagccaggaccagaaagggcaggcctccagcccaacaccagagcctggggtgggggcgggggaccttccgggacctacctcagcccccgtaccttctgggagccagtcaggtggaaggggatccccagtgagccccaggaggcatcagaaaggcctcctgaattgcaagatgccacctgctgagaaggcttccaggatcagagctgctgagaaggtttccaggggcgatcaggaatctccagatgcttgtctgcctcctacagtacctgaagccccagccccaccccaaaagccccttaactctcagagccagaaacatcttgcacctccgccccttctttctccccttttaccttctatcaagccaaccgttcgtaagaccaggcaagatgggagtcaggaagctccagaggctcccttgtcctcagagctggagcctttccacccaaagcctaaaattagaactcggaagtcctccagaatgacaccctttccagctacctctgctgcccctgagccccacccttccacctccacagcccagccagtcactcccaagcccacatctcaggccactaggagcaggacaaataggtcctctgtcaagacccctgaaccagttgtccccacagcccctgagctccagccttccacctccacagaccagcctgtcacctctgagcccacatctcaggttactaggggaagaaaaagtagatcctctgtcaagacccctgaaacagttgtgcccacagcccttgagctccagccttccacctccaccgaccgacctgtcacctctgaacccacctctcaggctactaggggaagaaaaaatagatcctctgtcaagacccctgaaccagttgtccccacagcccctgagctccagccttccacctccacagaccagcctgtcacttctgagcccacatatcaggctactaggggaagaaaaaatagatcctctgtcaagacccctgaaccagttgtgcccacagcccctgagctccggccttccacctccacagaccgacctgtcacccccaagcccacatctcggaccactaggagcaggacaaatatgtcctctgtcaagacccctgaaacagttgtccccacagcccctgagctccagatttccacctccacagaccaacctgtcacccctaagcccacatctcggaccactaggagcaggacaaatatgtcctctgtgaagaaccctgaatcaactgtccctatagcccctgagctcccaccttccacctccacagagcagcctgtcacccctgagcccacatctcgggctactaggggaagaaaaaatagatcctctggcaagacccctgaaacacttgtccccacagcccctaagctcgagccttccacttccacagaccaacctgtcactcctgagcccacatctcaggccaccaggggcaggacaaataggtcctctgtgaagacccctgaaacagttgtccccacagcccctgagctccagccttccacctccacagaccagcctgttacccctgagcctacgtctcaggctactaggggaagaacagatagatcctctgtcaagactcctgaaacagttgtccccacagcccctgagctacaggcttccgcctccacagaccagcctgtcacctctgagcccacatctcggaccactaggggaagaaaaaatcggtcctctgtcaagacccctgaaacagttgtgcccgcagcccctgagctccagccttccacctccacagaccaacctgtcacccctgagcccacatctcgggccactaggggcaggacaaataggtcctctgtcaagacccctgaatcaattgtccctatagcccctgagcttcagccttccacctccagaaaccagcttgtcacccctgagcccacatctcgggccactaggtgcaggacaaataggtcctctgtcaagacccctgagccagttgtccccacagcccctgagccccatcctaccacctccacagaccagcctgtcacccccaagctcacatctagggccactaggagaaagacaaataggtcctctgtcaagactcccaaaccagttgaaccagcagcctctgatcttgagccttttacccccacagaccagtccgtcacccctgaggccatagctcagggtggtcagagcaaaacactgaggtcttccacagtaagagctatgccggttcctaccacccctgaattccaatctcctgtcaccacagaccagcctatttcccctgagcctattactcaacccagttgcatcaagaggcagagagccgctgggaaccctggctccctcgcagctcccattgaccataagccttgctctgcacccttggaacctaaatcccaggcctcaaggaaccaaagatggggagcagtgagagcagctgaatcccttacagccattcctgagcctgcctctccccagcttcttgagacaccaattcatgcctcccagatccaaaaggtggaaccagcaggtagatctaggttcaccccggagctccagcctaaggcctctcaaagccgcaagaggtctttagctaccatggattcaccaccacatcaaaaacagccccaaagaggggaagtctcccagaagacagtgattatcaaggaagaggaagaagatactgcagagaagccagggaaggaagaggatgtcgtgactccaaaaccaggcaagagaaagagagaccaggcagaggaggagcccaacagaataccaagccgcagcctccgacggaccaaacttaaccaagaatcaacagcccccaaagtgctcttcacaggagtggtggatgctcggggagagcgggctgtgctggcactggggggaagtctggctggttcagcggcagaggcttcccacctggtcactgatcgcatccgccggacagtcaagttcctgtgtgccctggggcggggaatccccattctgtccctggactggctgcatcagtcccgcaaggctggtttcttcttacccccggatgaatatgtggtgaccgaccctgagcaagagaagaactttggctttagccttcaagacgcactgagcagggctcgggagcgaaggctgctagagggctatgagatctatgtgacccctggagtccagccaccaccacctcagatgggagagattattagctgctgtggaggcacatacctacccagcatgcctcggtcctataagcctcagagagttgtgatcacatgccctcaggacttccctcattgctccattccactacgggttgggctgcccctcctctcgcctgagttcctgctgactggagtgctgaagcaggaagccaagccagaggcctttgtcctctcccctttggagatgtcatccacctgagaactccactacccttttccctcccagaccacgaattagaagatatgtggaagaaagaactcagggcgttagaaaggattggggtatattgatacaacttgtcctggaacatgggtgggaccagaaatctttatgaataaatgaaaagataagggatttggaagccacaggttgttttttgtttgtttgtttgtttttttaatggccattttattttatttgtatttatagttttttatttgtatagatttaggggatacaagatttcttacatgcatgtattaaatggccattttaaaattagctagtttcatgctcagatgtcataagtggcagctatctttagccagactgttgcagttattgctcgatgccactcatggtgtcctacctcctatttggaaaccatctctatttttttcttactgagattcttactttggggtcaggaacttgaagggatgcttggagtgagtagatttgagggtccagttatggagtgctactaaaacattttcttctctcctggcctctggaagcatctttagctttgactttgggcaagtctctgtacttttctggccagcttttccaggatttataaaattagagcttcggcttgacctctgtgataaataaatattcactctgtgcctta

SEQ ID NO: 2387 - DNA, 582 bp, Homo sapiens
  source 1..582: mol_type = genomic DNA
gtaccttgggtgcgactgggcggaggtgacttggaagttcgcttctcggactgtaatactcatccttacctggcgccccgctccgagtttagatcatggaggacacccaggctattgactgggatgttgaagaagaggaggagacagagcaatccagtgaatccttgaggtgtaacgtggagccagtagggcggctacatatctttagtggtgcccatggaccagaaaaagatttcccactacacctcgggaagaatgtggtaggccgaatgcctgactgctctgtggccctgccctttccatctatctccaaacaacatgcagagattgaaatcttagcctgggacaaggcacctatcctccgagactgtgggagccttaatggtactcaaatcctgagacctcctaaggttttgagccctggggtgagtcaccgtctgagggaccaggaattgattctctttgctgacttgctctgccagtaccatcgcctggatgtctctctgccctttgtctcccggggccctctgacagtagaagagacacccagagtacagggagaaactcaaccccagaggcttc

SEQ ID NO: 2388 - DNA, 582 bp, Homo sapiens
  source 1..582: mol_type = genomic DNA
attaactgatctcagcagcctgggagacaccacctatttgaactctaagggggcggggctttgggtgtgcctccgctcgactggctgcggttgtgaaagacagcggcagaagccaatcagcaaataagctctttttcggcacacgcagtcgctccacccgggtcgcgaccgttactggtggcgcgcgcggggacttaaaatcatggaggacacccaggctattgactgggatgttgaagaagaggaggagacagagcaatccagtgaatccttgaggtgtaacgtggagccagtagggcggctacatatctttagtggtgcccatggaccagaaaaagatttcccactacacctcgggaagaatgtggtaggccgaatgcctgactgctctgtggccctgccctttccatctatctccaaacaacatgcagagattgaaatcttagcctgggacaaggcacctatcctccgagactgtgggagccttaatggtactcaaatcctgagacctcctaaggttttgagccctggggtgagtcaccgtctgagggaccaggaattgattctctttgctgacttgct

SEQ ID NO: 2389 - DNA, 916 bp, Homo sapiens
  source 1..916: mol_type = genomic DNA
acatgtgggtgggaccaaggactctgaagacaactatggtgattctgaagatctggacctacaagctacccagtgctttctggagaatcagggcctggaagcagtccagagcatggaggatgaacctacccaggccttcatgttgactccaccccaagagcttggcccttcccattgcagcttccagacaacaggcctcctgaattgcaagatgccacctgctgagaaggcttccaggatcagagctgctgagaaggtttccaggggcgatcaggaatctccagatgcttgtctgcctcctacagtacctgaagccccagccccaccccaaaagccccttaactctcagagccagaaacatcttgcacctccgccccttctttctccccttttaccttctatcaagccaaccgttcgtaagaccaggcaagatgggagtcaggaagctccagaggctcccttgtcctcagagctggagcctttccacccaaagcctaaaattagaactcggaagtcctccagaatgacaccctttccagctacctctgctgcccctgagccccacccttccacctccacagcccagccagtcactcccaagcccacatctcaggccactaggagcaggacaaataggtcctctgtcaagacccctgaaccagttgtccccacagcccctgagctccagccttccacctccacagaccagcctgtcacctctgagcccacatctcaggttactaggggaagaaaaagtagatcctctgtcaagacccctgaaacagttgtgcccacagcccttgagctccagccttccacctccaccgaccgacctgtcacctctgaacccacctctcaggctactaggggaagaaaaaatagatcctctgtcaagacccctgaaccagttgtcccc

SEQ ID NO: 2390 - DNA, 583 bp, Homo sapiens
  source 1..583: mol_type = genomic DNA
aatactcatccttacctggcgccccgctccgagtttaggtatgaagacacagggagacgtcgggccacaagggaacccactgaggtggggaccaaagatggtggctctttgaattggagccaagcgtggtgggcacccgctgagttggcctgtcataaagacggagttgacactttatccatggggcatcctactttccctacctgtcaacagtttccctctagagtggcatattttcagatcatggaggacacccaggctattgactgggatgttgaagaagaggaggagacagagcaatccagtgaatccttgaggtgtaacgtggagccagtagggcggctacatatctttagtggtgcccatggaccagaaaaagatttcccactacacctcgggaagaatgtggtaggccgaatgcctgactgctctgtggccctgccctttccatctatctccaaacaacatgcagagattgaaatcttagcctgggacaaggcacctatcctccgagactgtgggagccttaatggtactcaaatcctgagacctcctaaggttttgagccctggggtgagtcacc

SEQ ID NO: 2391 - DNA, 6506 bp, Homo sapiens
  source 1..6506: mol_type = genomic DNA
caccatgtctaggaggaccgaggaaaggcgctctggccttaccagacacgtcggacgtctatgacacagcccctctatccgttgccggcagctggcgccagactctctggtcgcggtttggaactgcgcgggaagtgggtggtgggcgggcaagcggtagtgggttgtcccttggagctgcccaatcgacgtgcattattctgttggcgcacggcggccttcaattaccgtctcattaactgatctcagcagcctgggagacaccacctatttgaactctaagggggcggggctttgggtgtgcctccgctcgactggctgcggttgtgaaagacagcggcagaagccaatcagcaaataagctctttttcggcacacgcagtcgctccacccgggtcgcgaccgttactggtggcgcgcgcggggacttaaagtagatcatggaggacacccaggctattgactgggatgttgaagaagaggaggagacagagcaatccagtgaatccttgaggtgtaacgtggagccagtagggcggctacatatctttagtggtgcccatggaccagaaaaagatttcccactacacctcgggaagaatgtggtaggccgaatgcctgactgctctgtggccctgccctttccatctatctccaaacaacatgcagagattgaaatcttagcctgggacaaggcacctatcctccgagactgtgggagccttaatggtactcaaatcctgagacctcctaaggttttgagccctggggtgagtcaccgtctgagggaccaggaattgattctctttgctgacttgctctgccagtaccatcgcctggatgtctctctgccctttgtctcccggggccctctgacagtagaagagacacccagagtacagggagaaactcaaccccagaggcttctgttggctgaggactcggaggaggaagtagattttctttctgaaaggcgtatggtaaaaaaatcaaggaccacatcttcctctgtgatagttccagagagtgatgaagaggggcattccccggtcctgggcggccttgggccgccttttgccttcaatttgaacagtgacacagatgtggaagaaggtcagcaaccagccacagaggaggcctcctcagctgccagaagaggtgccactgtagaggcaaagcagtctgaagctgaagttgtaactgaaatccagcttgaaaaggatcagcctttagtgaaggagaaggacaatgatacaaaagtcaagaggggtgcagggaatggggtggttccagctggggtgattctggagaggagccaacctcctggagaggacagtgacacagatgtggatgatgacagcaggcctcctggaaggccagctgaggtccatttggaaagggctcagccttttggcttcatcgacagcgacactgatgcggaagaagagaggatcccagcaaccccagttgtcattcctatgaagaagaggaagatcttccatggagtaggtacaaggggtcctggagcaccaggcctggcccatctgcaggagagccaggctggtagtgatacagatgtggaagaaggcaaggccccacaggctgtccctctggagaaaagccaagcttccatggttatcaacagcgatacagatgacgaggaagaagtctcagcagcgctgactttggcacatctgaaagagagccagcctgctatatggaacagagatgcagaagaggacatgccccaacgtgtggtccttctgcagcgaagccaaaccaccactgagagagacagtgacacagacgtggaggaggaagagctcccagtggaaaatagagaagctgtcctcaaggatcacacaaagattagagcccttgttagagcacattcagaaaaggaccaacctccttttggggacagtgatgacagtgtggaagcagataagagctcacctgggatccacctggagagaagccaagcctccaccacagtggacatcaacacacaagtggagaaggaagtcccgccagggtcagccattatacatataaagaagcatcaggtgtctgtggaggggacaaatcaaacagatgtgaaagcagttgggggaccagcaaagctgcttgtggtatctctagaggaagcctggcctctgcatggggactgtgaaacagatgcagaggagggcacctccctaacagcctcagtagttgcagatgtaagaaagagccagcttccagcagaaggggatgctggggcagagtgggctgcagctgttcttaagcaggagagagctcatgaggtgggggcccagggtgggccacctgtggcacaagtggagcaggacctccctatctcaagagagaacctcacagatctggtggtggacacagacactctaggggaatccacccagccacagagagagggagcccaggtccccacaggaagggagagagaacaacatgtgggtgggaccaaggactctgaagacaactatggtgattctgaagatctggacctacaagctacccagtgctttctggagaatcagggcctggaagcagtccagagcatggaggatgaacctacccaggccttcatgttgactccaccccaagagcttggcccttcccattgcagcttccagacaacaggtaccctagatgaaccatgggaggtcctggctacacagccattctgtctgagagagtctgaggactctgagacccagccttttgacacgcaccttgaggcctatggaccttgcctgtctccacctagggcaataccaggagaccaacatccagagagcccagttcacacagagccaatggggattcaaggcagagggaggcagactgtggataaagtcatgggtataccaaaagaaacagcagagagggtgggccctgagagagggccattggagagagaaactgagaaactgctaccagaaagacagacagatgtgacaggagaggaagaattaaccaaggggaaacaggacagagaacaaaaacagttgttagctagagacacccagagacaagaatctgacaaaaatggggaaagtgcaagtcctgaaagagatagggagagtttgaaggtagaaattgagacatctgaggaaatacaagagaaacaagtacagaagcagacccttccaagcaaagcatttgagagagaagtagagagaccagtagcaaacagagagtgcgatccagccgagttagaagagaaggtgcccaaagtgatcctggagagagatacacagagaggggagccagagggagggagccaggaccagaaagggcaggcctccagcccaacaccagagcctggggtgggggcgggggaccttccgggacctacctcagcccccgtaccttctgggagccagtcaggtggaaggggatccccagtgagccccaggaggcatcagaaaggcctcctgaattgcaagatgccacctgctgagaaggcttccaggatcagagctgctgagaaggtttccaggggcgatcaggaatctccagatgcttgtctgcctcctacagtacctgaagccccagccccaccccaaaagccccttaactctcagagccagaaacatcttgcacctccgccccttctttctccccttttaccttctatcaagccaaccgttcgtaagaccaggcaagatgggagtcaggaagctccagaggctcccttgtcctcagagctggagcctttccacccaaagcctaaaattagaactcggaagtcctccagaatgacaccctttccagctacctctgctgcccctaagctcgagccttccacttccacagaccaacctgtcactcctgagcccacatctcaggccaccaggggcaggacaaataggtcctctgtgaagacccctgaaacagttgtccccacagcccctgagctccagccttccacctccacagaccagcctgttacccctgagcctacgtctcaggctactaggggaagaacagatagatcctctgtcaagactcctgaaacagttgtccccacagcccctgagctacaggcttccgcctccacagaccagcctgtcacctctgagcccacatctcggaccactaggggaagaaaaaatcggtcctctgtcaagacccctgaaacagttgtgcccgcagcccctgagctccagccttccacctccacagaccaacctgtcacccctgagcccacatctcgggccactaggggcaggacaaataggtcctctgtcaagacccctgaatcaattgtccctatagcccctgagcttcagccttccacctccagaaaccagcttgtcacccctgagcccacatctcgggccactaggtgcaggacaaataggtcctctgtcaagacccctgagccagttgtccccacagcccctgagccccatcctaccacctccacagaccagcctgtcacccccaagctcacatctagggccactaggagaaagacaaataggtcctctgtcaagactcccaaaccagttgaaccagcagcctctgatcttgagccttttacccccacagaccagtccgtcacccctgaggccatagctcagggtggtcagagcaaaacactgaggtcttccacagtaagagctatgccggttcctaccacccctgaattccaatctcctgtcaccacagaccagcctatttcccctgagcctattactcaacccagttgcatcaagaggcagagagccgctgggaaccctggctccctcgcagctcccattgaccataagccttgctctgcacccttggaacctaaatcccaggcctcaaggaaccaaagatggggagcagtgagagcagctgaatcccttacagccattcctgagcctgcctctccccagcttcttgagacaccaattcatgcctcccagatccaaaaggtggaaccagcaggtagatctaggttcaccccggagctccagcctaaggcctctcaaagccgcaagaggtctttagctaccatggattcaccaccacatcaaaaacagccccaaagaggggaagtctcccagaagacagtgattatcaaggaagaggaagaagatactgcagagaagccagggaaggaagaggatgtcgtgactccaaaaccaggcaagagaaagagagaccaggcagaggaggagcccaacagaataccaagccgcagcctccgacggaccaaacttaaccaagaatcaacagcccccaaagtgctcttcacaggagtggtggatgctcggggagagcgggctgtgctggcactggggggaagtctggctggttcagcggcagaggcttcccacctggtcactgatcgcatccgccggacagtcaagttcctgtgtgccctggggcggggaatccccattctgtccctggactggctgcatcagtcccgcaaggctggtttcttcttacccccggatgaatatgtggtgaccgaccctgagcaagagaagaactttggctttagccttcaagacgcactgagcagggctcgggagcgaaggctgctagagggctatgagatctatgtgacccctggagtccagccaccaccacctcagatgggagagattattagctgctgtggaggcacatacctacccagcatgcctcggtcctataagcctcagagagttgtgatcacatgccctcaggacttccctcattgctccattccactacgggttgggctgcccctcctctcgcctgagttcctgctgactggagtgctgaagcaggaagccaagccagaggcctttgtcctctcccctttggagatgtcatccacctgagaactccactacccttttccctcccagaccacgaattagaagatatgtggaagaaagaactcagggcgttagaaaggattggggtatattgatacaacttgtcctggaacatgggtgggaccagaaatctttatgaataaatgaaaagataagggatttggaagccacaggttgttttttgtttgtttgtttgtttttttaatggccattttattttatttgtatttatagttttttatttgtatagatttaggggatacaagatttcttacatgcatgtattaaatggccattttaaaattagctagtttcatgctcagatgtcataagtggcagctatctttagccagactgttgcagttattgctcgatgccactcatggtgtcctacctcctatttggaaaccatctctatttttttcttactgagattcttactttggggtcaggaacttgaagggatgcttggagtgagtagatttgagggtccagttatggagtgctactaaaacattttcttctctcctggcctctggaagcatctttagctttgactttgggcaagtctctgtacttttctggccagcttttccaggatttataaaattagagcttcggcttgacctctgtgataaataaatattcactctgtgcctt

SEQ ID NO: 2392 - DNA, 850 bp, Homo sapiens
  source 1..850: mol_type = genomic DNA
gaccgttactggtggcgcgcgcggggacttaaagtagatcatggaggacacccaggctattgactgggatgttgaagaagaggaggagacagagcaatccagtgaatccttgaggtgtaacgtggagccagtagggcggctacatatctttagtggtgcccatggaccagaaaaagatttcccactacacctcgggaagaatgtggtaggccgaatgcctgactgctctgtggccctgccctttccatctatctccaaacaacatgcagagattgaaatcttagcctgggacaaggcacctatcctccgagactgtgggagccttaatggtactcaaatcctgagctccagccttccacctccacagaccagcctgttacccctgagcctacgtctcaggctactaggggaagaacagatagatcctctgtcaagactcctgaaacagttgtccccacagcccctgagctacaggcttccgcctccacagaccagcctgtcacctctgagcccacatctcggaccactaggggaagaaaaaatcggtcctctgtcaagacccctgaaacagttgtgcccgcagcccctgagctccagccttccacctccacagaccaacctgtcacccctgagcccacatctcgggccactaggggcaggacaaataggtcctctgtcaagacccctgaatcaattgtccctatagcccctgagcttcagccttccacctccagaaaccagcttgtcacccctgagcccacatctcgggccactaggtgcaggacaaataggtcctctgtcaagacccctgagccagttgtccccacagcccctgagccccatcctacca

SEQ ID NO: 2393 - DNA, 3751 bp, Homo sapiens
  source 1..3751: mol_type = genomic DNA
caccatgtctaggaggaccgaggaaaggcgctctggccttaccagacacgtcggacgtctatgacacagcccctctatccgttgccggcagctggcgccagactctctggtcgcggtttggaactgcgcgggaagtgggtggtgggcgggcaagcggtagtgggttgtcccttggagctgcccaatcgacgtgcattattctgttggcgcacggcggccttcaattaccgtctcattaactgatctcagcagcctgggagacaccacctatttgaactctaagggggcggggctttgggtgtgcctccgctcgactggctgcggttgtgaaagacagcggcagaagccaatcagcaaataagctctttttcggcacacgcagtcgctccacccgggtcgcgaccgttactggtggcgcgcgcggggacttaaagtagatcatggaggacacccaggctattgactgggatgttgaagaagaggaggagacagagcaatccagtgaatccttgaggtgtaacgtggagccagtagggcggctacatatctttagtggtgcccatggaccagaaaaagatttcccactacacctcgggaagaatgtggtaggccgaatgcctgactgctctgtggccctgccctttccatctatctccaaacaacatgcagagattgaaatcttagcctgggacaaggcacctatcctccgagactgtgggagccttaatggtactcaaatcctgagacctcctaaggttttgagccctggggtgagtcaccgtctgagggaccaggaattgattctctttgctgacttgctctgccagtaccatcgcctggatgtctctctgccctttgtctcccggggccctctgacagtagaagagacacccagagtacagggagaaactcaaccccagaggcttctgttggctgaggactcggaggaggaagtagattttctttctgaaaggcgtatggtaaaaaaatcaaggaccacatcttcctctgtgatagttccagagagtgatgaagaggggcattccccggtcctgggcggccttgggccgccttttgccttcaatttgaacagtgacacagatgtggaagaaggtcagcaaccagccacagaggaggcctcctcagctgccagaagaggtgccactgtagaggcaaagcagtctgaagctgaagttgtaactgaaatccagcttgaaaaggatcagcctttagtgaaggagaaggacaatgatacaaaagtcaagaggggtgcagggaatggggtggttccagctggggtgattctggagaggagccaacctcctggagaggacagtgacacagatgtggatgatgacagcaggcctcctggaaggccagctgaggtccatttggaaagggctcagccttttggcttcatcgacagaccaacctgtcacccctaagcccacatctcggaccactaggagcaggacaaatatgtcctctgtgaagaaccctgaatcaactgtccctatagcccctgagctcccaccttccacctccacagagcagcctgtcacccctgagcccacatctcgggctactaggggaagaaaaaatagatcctctggcaagacccctgaaacacttgtccccacagcccctaagctcgagccttccacttccacagaccaacctgtcactcctgagcccacatctcaggccaccaggggcaggacaaataggtcctctgtgaagacccctgaaacagttgtccccacagcccctgagctccagccttccacctccacagaccagcctgttacccctgagcctacgtctcaggctactaggggaagaacagatagatcctctgtcaagactcctgaaacagttgtccccacagcccctgagctacaggcttccgcctccacagaccagcctgtcacctctgagcccacatctcggaccactaggggaagaaaaaatcggtcctctgtcaagacccctgaaacagttgtgcccgcagcccctgagctccagccttccacctccacagaccaacctgtcacccctgagcccacatctcgggccactaggggcaggacaaataggtcctctgtcaagacccctgaatcaattgtccctatagcccctgagcttcagccttccacctccagaaaccagcttgtcacccctgagcccacatctcgggccactaggtgcaggacaaataggtcctctgtcaagacccctgagccagttgtccccacagcccctgagccccatcctaccacctccacagaccagcctgtcacccccaagctcacatctagggccactaggagaaagacaaataggtcctctgtcaagactcccaaaccagttgaaccagcagcctctgatcttgagccttttacccccacagaccagtccgtcacccctgaggccatagctcagggtggtcagagcaaaacactgaggtcttccacagtaagagctatgccggttcctaccacccctgaattccaatctcctgtcaccacagaccagcctatttcccctgagcctattactcaacccagttgcatcaagaggcagagagccgctgggaaccctggctccctcgcagctcccattgaccataagccttgctctgcacccttggaacctaaatcccaggcctcaaggaaccaaagatggggagcagtgagagcagctgaatcccttacagccattcctgagcctgcctctccccagcttcttgagacaccaattcatgcctcccagatccaaaaggtggaaccagcaggtagatctaggttcaccccggagctccagcctaaggcctctcaaagccgcaagaggtctttagctaccatggattcaccaccacatcaaaaacagccccaaagaggggaagtctcccagaagacagtgattatcaaggaagaggaagaagatactgcagagaagccagggaaggaagaggatgtcgtgactccaaaaccaggcaagagaaagagagaccaggcagaggaggagcccaacagaataccaagccgcagcctccgacggaccaaacttaaccaagaatcaacagcccccaaagtgctcttcacaggagtggtggatgctcggggagagcgggctgtgctggcactggggggaagtctggctggttcagcggcagaggcttcccacctggtcactgatcgcatccgccggacagtcaagttcctgtgtgccctggggcggggaatccccattctgtccctggactggctgcatcagtcccgcaaggctggtttcttcttacccccggatgaatatgtggtgaccgaccctgagcaagagaagaactttggctttagccttcaagacgcactgagcagggctcgggagcgaaggctgctagagggctatgagatctatgtgacccctggagtccagccaccaccacctcagatgggagagattattagctgctgtggaggcacatacctacccagcatgcctcggtcctataagcctcagagagttgtgatcacatgccctcaggacttccctcattgctccattccactacgggttgggctgcccctcctctcgcctgagttcctgctgactggagtgctgaagcaggaagccaagccagaggcctttgtcctctcccctttggagatgtcatccacctgagaactccactacccttttccctcccagaccacgaattagaagatatgtggaagaaagaactcagggcgtt

SEQ ID NO: 2394 - DNA, 1172 bp, Homo sapiens
  source 1..1172: mol_type = genomic DNA
caccatgtctaggaggaccgaggaaaggcgctctggccttaccagacacgtcggacgtctatgacacagcccctctatccgttgccggcagctggcgccagactctctggtcgcggtttggaactgcgcgggaagtgggtggtgggcgggcaagcggtagtgggttgtcccttggagctgcccaatcgacgtgcattattctgttggcgcacggcggccttcaattaccgtctcattaactgatctcagcagcctgggagacaccacctatttgaactctaagggggcggggctttgggtgtgcctccgctcgactggctgcggttgtgaaagacagcggcagaagccaatcagcaaataagctctttttcggcacacgcagtcgctccacccgggtcgcgaccgttactggtggcgcgcgcggggacttaaagtagatcatggaggacacccaggctattgactgggatgttgaagaagaggaggagacagagcaatccagtgaatccttgaggtgtaacgtggagccagtagggcggctacatatctttagtggtgcccatggaccagaaaaagatttcccactacacctcgggaagaatgtggtaggccgaatgcctgactgctctgtggccctgccctttccatctatctccaaacaacatgcagagattgaaatcttagcctgggacaaggcacctatcctccgagactgtgggagccttaatggtactcaaatcctgagacctcctaaggttttgagccctggggtgagtcaccgtctgagggaccaggaattgattctctttgctgacttgctctgccagtaccatcgcctggatgtctctctgccctttgtctcccggggccctctgacagtagaagagacacccagagtacagggagaaactcaaccccagaggcttctgttggctgaggactcggaggaggaagtagattttctttctgaaaggcgtatggtaaaaaaatcaaggaccacatcttcctctgtgatagttccagagagtgatgaagaggggcattccccggtcctgggcggccttgggccgccttttgccttcaatttgaacagtgacacagatgtggaagaaggtcagcaaccacacagaggaggcctcctcagctgccagaagaggtgccactgtagaggc

SEQ ID NO: 2395 - DNA, 6575 bp, Homo sapiens
  source 1..6575: mol_type = genomic DNA
caccatgtctaggaggaccgaggaaaggcgctctggccttaccagacacgtcggacgtctatgacacagcccctctatccgttgccggcagctggcgccagactctctggtcgcggtttggaactgcgcgggaagtgggtggtgggcgggcaagcggtagtgggttgtcccttggagctgcccaatcgacgtgcattattctgttggcgcacggcggccttcaattaccgtctcattaactgatctcagcagcctgggagacaccacctatttgaactctaagggggcggggctttgggtgtgcctccgctcgactggctgcggttgtgaaagacagcggcagaagccaatcagcaaataagctctttttcggcacacgcagtcgctccacccgggtcgcgaccgttactggtggcgcgcgcggggacttaaagtagatcatggaggacacccaggctattgactgggatgttgaagaagaggaggagacagagcaatccagtgaatccttgaggtgtaacgtggagccagtagggcggctacatatctttagtggtgcccatggaccagaaaaagatttcccactacacctcgggaagaatgtggtaggccgaatgcctgactgctctgtggccctgccctttccatctatctccaaacaacatgcagagattgaaatcttagcctgggacaaggcacctatcctccgagactgtgggagccttaatggtactcaaatcctgagacctcctaaggttttgagccctggggtgagtcaccgtctgagggaccaggaattgattctctttgctgacttgctctgccagtaccatcgcctggatgtctctctgccctttgtctcccggggccctctgacagtagaagagacacccagagtacagggagaaactcaaccccagaggcttctgttggctgaggactcggaggaggaagtagattttctttctgaaaggcgtatggtaaaaaaatcaaggaccacatcttcctctgtgatagttccagagagtgatgaagaggggcattccccggtcctgggcggccttgggccgccttttgccttcaatttgaacagtgacacagatgtggaagaaggtcagcaaccagccacagaggaggcctcctcagctgccagaagaggtgccactgtagaggcaaagcagtctgaagctgaagttgtaactgaaatccagcttgaaaaggatcagcctttagtgaaggagaaggacaatgatacaaaagtcaagaggggtgcagggaatggggtggttccagctggggtgattctggagaggagccaacctcctggagaggacagtgacacagatgtggatgatgacagcaggcctcctggaaggccagctgaggtccatttggaaagggctcagccttttggcttcatcgacagcgacactgatgcggaagaagagaggatcccagcaaccccagttgtcattcctatgaagaagaggaagatcttccatggagtaggtacaaggggtcctggagcaccaggcctggcccatctgcaggagagccaggctggtagtgatacagatgtggaagaaggcaaggccccacaggctgtccctctggagaaaagccaagcttccatggttatcaacagcgatacagatgacgaggaagaagtctcagcagcgctgactttggcacatctgaaagagagccagcctgctatatggaacagagatgcagaagaggacatgccccaacgtgtggtccttctgcagcgaagccaaaccaccactgagagagacagtgacacagacgtggaggaggaagagctcccagtggaaaatagagaagctgtcctcaaggatcacacaaagattagagcccttgttagagcacattcagaaaaggaccaacctccttttggggacagtgatgacagtgtggaagcagataagagctcacctgggatccacctggagagaagccaagcctccaccacagtggacatcaacacacaagtggagaaggaagtcccgccagggtcagccattatacatataaagaagcatcaggtgtctgtggaggggacaaatcaaacagatgtgaaagcagttgggggaccagcaaagctgcttgtggtatctctagaggaagcctggcctctgcatggggactgtgaaacagatgcagaggagggcacctccctaacagcctcagtagttgcagatgtaagaaagagccagcttccagcagaaggggatgctggggcagagtgggctgcagctgttcttaagcaggagagagctcatgaggtgggggcccagggtgggccacctgtggcacaagtggagcaggacctccctatctcaagagagaacctcacagatctggtggtggacacagacactctaggggaatccacccagccacagagagagggagcccaggtccccacaggaagggagagagaacaacatgtgggtgggaccaaggactctgaagacaactatggtgattctgaagatctggacctacaagctacccagtgctttctggagaatcagggcctggaagcagtccagagcatggaggatgaacctacccaggccttcatgttgactccaccccaagagcttggcccttcccattgcagcttccagacaacaggcctcctgaattgcaagatgccacctgctgagaaggcttccaggatcagagctgctgagaaggtttccaggggcgatcaggaatctccagatgcttgtctgcctcctacagtacctgaagccccagccccaccccaaaagccccttaactctcagagccagaaacatcttgcacctccgccccttctttctccccttttaccttctatcaagccaaccgttcgtaagaccaggcaagatgggagtcaggaagctccagaggctcccttgtcctcagagctggagcctttccacccaaagcctaaaattagaactcggaagtcctccagaatgacaccctttccagctacctctgctgcccctgagccccacccttccacctccacagcccagccagtcactcccaagcccacatctcaggccactaggagcaggacaaataggtcctctgtcaagacccctgaaccagttgtccccacagcccctgagctccagccttccacctccacagaccagcctgtcacctctgagcccacatctcaggttactaggggaagaaaaagtagatcctctgtcaagacccctgaaacagttgtgcccacagcccttgagctccagccttccacctccaccgaccgacctgtcacctctgaacccacctctcaggctactaggggaagaaaaaatagatcctctgtcaagacccctgaaccagttgtccccacagcccctgagctccagccttccacctccacagaccagcctgtcacttctgagcccacatatcaggctactaggggaagaaaaaatagatcctctgtcaagacccctgaaccagttgtgcccacagcccctgagctccggccttccacctccacagaccgacctgtcacccccaagcccacatctcggaccactaggagcaggacaaatatgtcctctgtcaagacccctgaaacagttgtccccacagcccctgagctccagatttccacctccacagaccaacctgtcacccctaagcccacatctcggaccactaggagcaggacaaatatgtcctctgtgaagaaccctgaatcaactgtccctatagcccctgagctcccaccttccacctccacagagcagcctgtcacccctgagcccacatctcgggctactaggggaagaaaaaatagatcctctggcaagacccctgaaacacttgtccccacagcccctaagctcgagccttccacttccacagaccaacctgtcactcctgagcccacatctcaggccaccaggggcaggacaaataggtcctctgtgaagacccctgaaacagttgtccccacagcccctgagctccagccttccacctccacagaccagcctgttacccctgagcctacgtctcaggctactaggggaagaacagatagatcctctgtcaagactcctgaaacagttgtccccacagcccctgagctacaggcttccgcctccacagaccagcctgtcacctctgagcccacatctcggaccactaggggaagaaaaaatcggtcctctgtcaagacccctgaaacagttgtgcccgcagcccctgagctccagccttccacctccacagaccaacctgtcacccctgagcccacatctcgggccactaggggcaggacaaataggtcctctgtcaagacccctgaatcaattgtccctatagcccctgagcttcagccttccacctccagaaaccagcttgtcacccctgagcccacatctcgggccactaggtgcaggacaaataggtcctctgtcaagacccctgagccagttgtccccacagcccctgagccccatcctaccacctccacagaccagcctgtcacccccaagctcacatctagggccactaggagaaagacaaataggtcctctgtcaagactcccaaaccagttgaaccagcagcctctgatcttgagccttttacccccacagaccagtccgtcacccctgaggccatagctcagggtggtcagagcaaaacactgaggtcttccacagtaagagctatgccggttcctaccacccctgaattccaatctcctgtcaccacagaccagcctatttcccctgagcctattactcaacccagttgcatcaagaggcagagagccgctgggaaccctggctccctcgcagctcccattgaccataagccttgctctgcacccttggaacctaaatcccaggcctcaaggaaccaaagatggggagcagtgagagcagctgaatcccttacagccattcctgagcctgcctctccccagcttcttgagacaccaattcatgcctcccagatccaaaaggtggaaccagcaggtagatctaggttcaccccggagctccagcctaaggcctctcaaagccgcaagaggtctttagctaccatggattcaccaccacatcaaaaacagccccaaagaggggaagtctcccagaagacagtgattatcaaggaagaggaagaagatactgcagagaagccagggaaggaagaggatgtcgtgactccaaaaccaggcaagagaaagagagaccaggcagaggaggagcccaacagaataccaagccgcagcctccgacggaccaaacttaaccaagaatcaacagcccccaaagtgctcttcacaggagtggtggatgctcggggagagcgggctgtgctggcactggggggaagtctggctggttcagcggcagaggcttcccacctggtcactgatcgcatccgccggacagtcaagttcctgtgtgccctggggcggggaatccccattctgtccctggactggctgcatcagtcccgcaaggctggtttcttcttacccccggatgaatatgtggtgaccgaccctgagcaagagaagaactttggctttagccttcaagacgcactgagcagggctcgggagcgaaggctgctagagggctatgagatctatgtgacccctggagtccagccaccaccacctcagatgggagagattattagctgctgtggaggcacatacctacccagcatgcctcggtcctataagcctcagagagttgtgatcacatgccctcaggacttccctcattgctccattccactacgggttgggctgcccctcctctcgcctgagttcctgctgactggagtgctgaagcaggaagccaagccagaggcctttgtcctctcccctttggagatgtcatccacctgagaactccactacccttttccctcccagaccacgaattagaagatatgtggaagaaagaactcagggcgttagaaaggattggggtatattgatacaacttgtcctggaacatgggtgggaccagaaatctttatgaataaatgaaaagataagggatttggaagccacaggttgttttttgtttgtttgtttgtttttttaatggccattttattttatttgtatttatagttttttatttgtatagatttaggggatacaagatttcttacatgcatgtattaaatggccattttaaaattagctagtttcatgctcagatgtcataagtggcagctatctttagccagactgttgcagttattgctcgatgccactcatggtgtcctacctcctatttggaaaccatctctatttttttcttactgagattcttactttggggtcaggaacttgaagggatgcttggagtgagtagatttgagggtccagttatggagtgctactaaaacattttcttctctcctggcctctggaagcatctttagctttgactttgggcaagtctctgtacttttctggccagcttttccaggatttataaaattagagcttcggcttgacctctgtgataaataaatattcactctgtgcctt

SEQ ID NO: 2396 - DNA, 5648 bp, Homo sapiens
  source 1..5648: mol_type = genomic DNA
ccacggctccccgggagccatcttggttcccccagaaggcgggaggggcgtaccttgggtgcgactgggcggaggtgacttggaagttcgcttctcggactgtaatactcatccttacctggcgccccgctccgagtttagatcatggaggacacccaggctattgactgggatgttgaagaagaggaggagacagagcaatccagtgaatccttgaggtgtaacgtggagccagtagggcggctacatatctttagtggtgcccatggaccagaaaaagatttcccactacacctcgggaagaatgtggtaggccgaatgcctgactgctctgtggccctgccctttccatctatctccaaacaacatgcagagattgaaatcttagcctgggacaaggcacctatcctccgagactgtgggagccttaatgtaccatcgcctggatgtctctctgccctttgtctcccggggccctctgacagtagaagagacacccagagtacagggagaaactcaaccccagaggcttctgttggctgaggactcggaggaggaagtagattttctttctgaaaggcgtatggtaaaaaaatcaaggaccacatcttcctctgtgatagttccagagagtgatgaagaggggcattccccggtcctgggcggccttgggccgccttttgccttcaatttgaacagtgacacagatgtggaagaaggtcagcaaccagccacagaggaggcctcctcagctgccagaagaggtgccactgtagaggcaaagcagtctgaagctgaagttgtaactgaaatccagcttgaaaaggatcagcctttagtgaaggagaaggacaatgatacaaaagtcaagaggggtgcagggaatggggtggttccagctggggtgattctggagaggagccaacctcctggagaggacagtgacacagatgtggatgatgacagcaggcctcctggaaggccagctgaggtccatttggaaagggctcagccttttggcttcatcgacagcgacactgatgcggaagaagagaggatcccagcaaccccagttgtcattcctatgaagaagaggaagatcttccatggagtaggtacaaggggtcctggagcaccaggcctggcccatctgcaggagagccaggctggtagtgatacagatgtggaagaaggcaaggccccacaggctgtccctctggagaaaagccaagcttccatggttatcaacagcgatacagatgacgaggaagaagtctcagcagcgctgactttggcacatctgaaagagagccagcctgctatatggaacagagatgcagaagaggacatgccccaacgtgtggtccttctgcagcgaagccaaaccaccactgagagagacagtgacacagacgtggaggaggaagagctcccagtggaaaatagagaagctgtcctcaaggatcacacaaagattagagcccttgttagagcacattcagaaaaggaccaacctccttttggggacagtgatgacagtgtggaagcagataagagctcacctgggatccacctggagagaagccaagcctccaccacagtggacatcaacacacaagtggagaaggaagtcccgccagggtcagccattatacatataaagaagcatcaggtgtctgtggaggggacaaatcaaacagatgtgaaagcagttgggggaccagcaaagctgcttgtggtatctctagaggaagcctggcctctgcatggggactgtgaaacagatgcagaggagggcacctccctaacagcctcagtagttgcagatgtaagaaagagccagcttccagcagaaggggatgctggggcagagtgggctgcagctgttcttaagcaggagagagctcatgaggtgggggcccagggtgggccacctgtggcacaagtggagcaggacctccctatctcaagagagaacctcacagatctggtggtggacacagacactctaggggaatccacccagccacagagagagggagcccaggtccccacaggaagggagagagaacaacatgtgggtgggaccaaggactctgaagacaactatggtgattctgaagatctggacctacaagctacccagtgctttctggagaatcagggcctggaagtccagagcatggaggatgaacctacccaggccttcatgttgactccaccccaagagcttggcccttcccattgcagcttccagacaacaggcctcctgaattgcaagatgccacctgctgagaaggcttccaggatcagagctgctgagaaggtttccaggggcgatcaggaatctccagatgcttgtctgcctcctacagtacctgaagccccagccccaccccaaaagccccttaactctcagagccagaaacatcttgcacctccgccccttctttctccccttttaccttctatcaagccaaccgttcgtaagaccaggcaagatgggagtcaggaagctccagaggctcccttgtcctcagagctggagcctttccacccaaagcctaaaattagaactcggaagtcctccagaatgacaccctttccagctacctctgctgcccctgagccccacccttccacctccacagcccagccagtcactcccaagcccacatctcaggccactaggagcaggacaaataggtcctctgtcaagacccctgaaccagttgtccccacagcccctgagctccagccttccacctccacagaccagcctgtcacctctgagcccacatctcaggttactaggggaagaaaaagtagatcctctgtcaagacccctgaaacagttgtgcccacagcccttgagctccagccttccacctccaccgaccgacctgtcacctctgaacccacctctcaggctactaggggaagaaaaaatagatcctctgtcaagacccctgaaccagttgtccccacagcccctgagctccagccttccacctccacagaccagcctgtcacttctgagcccacatatcaggctactaggggaagaaaaaatagatcctctgtcaagacccctgaaccagttgtgcccacagcccctgagctccggccttccacctccacagaccgacctgtcacccctaagcccacatctcggaccactaggagcaggacaaatatgtcctctgtgaagaaccctgaatcaactgtccctatagcccctgagctcccaccttccacctccacagagcagcctgtcacccctgagcccacatctcgggctactaggggaagaaaaaatagatcctctggcaagacccctgaaacacttgtccccacagcccctaagctcgagccttccacttccacagaccaacctgtcactcctgagcccacatctcaggccaccaggggcaggacaaataggtcctctgtgaagacccctgaaacagttgtccccacagcccctgagctccagccttccacctccacagaccagcctgttacccctgagcctacgtctcaggctactaggggaagaacagatagatcctctgtcaagactcctgaaacagttgtccccacagcccctgagctacaggcttccgcctccacagaccagcctgtcacctctgagcccacatctcggaccactaggggaagaaaaaatcggtcctctgtcaagacccctgaaacagttgtgcccgcagcccctgagctccagccttccacctccacagaccaacctgtcacccctgagcccacatctcgggccactaggggcaggacaaataggtcctctgtcaagacccctgaatcaattgtccctatagcccctgagcttcagccttccacctccagaaaccagcttgtcacccctgagcccacatctcgggccactaggtgcaggacaaataggtcctctgtcaagacccctgagccagttgtccccacagcccctgagccccatcctaccacctccacagaccagcctgtcacccccaagctcacatctagggccactaggagaaagacaaataggtcctctgtcaagactcccaaaccagttgaaccagcagcctctgatcttgagccttttacccccacagaccagtccgtcacccctgaggccatagctcagggtggtcagagcaaaacactgaggtcttccacagtaagagctatgccggttcctaccacccctgaattccaatctcctgtcaccacagaccagcctatttcccctgagcctattactcaacccagttgcatcaagaggcagagagccgctgggaaccctggctccctcgcagctcccattgaccataagccttgctctgcacccttggaacctaaatcccaggcctcaaggaaccaaagatggggagcagtgagagcagctgaatcccttacagccattcctgagcctgcctctccccagcttcttgagacaccaattcatgcctcccagatccaaaaggtggaaccagcaggtagatctaggttcaccccggagctccagcctaaggcctctcaaagccgcaagaggtctttagctaccatggattcaccaccacatcaaaaacagccccaaagaggggaagtctcccagaagacagtgattatcaaggaagaggaagaagatactgcagagaagccagggaaggaagaggatgtcgtgactccaaaaccaggcaagagaaagagagaccaggcagaggaggagcccaacagaataccaagccgcagcctccgacggaccaaacttaaccaagaatcaacagcccccaaagtgctcttcacaggagtggtggatgctcggggagagcgggctgtgctggcactggggggaagtctggctggttcagcggcagaggcttcccacctggtcactgatcgcatccgccggacagtcaagttcctgtgtgccctggggcggggaatccccattctgtccctggactggctgcatcagtcccgcaaggctggtttcttcttacccccggatgaatatgtggtgaccgaccctgagcaagagaagaactttggctttagccttcaagacgcactgagcagggctcgggagcgaaggctgctagagggctatgagatctatgtgacccctggagtccagccaccaccacctcagatgggagagattattagctgctgtggaggcacatacctacccagcatgcctcggtcctataagcctcagagagttgtgatcacatgccctcaggacttccctcattgctccattccactacgggttgggctgcccctcctctcgcctgagttcctgctgactggagtgctgaagcaggaagccaagccagaggcctttgtcctctcccctttggagatgtcatccacctgagaactccactacccttttccctcccagaccacgaattagaagatatgtggaagaaagaactcagggcgttagaaaggattggggtatattgatacaacttgtcctggaacatgggtgggaccagaaatctttatgaataaatgaaaagataagggatttggaagccacaggttgttttttgtttgtttgtttgtttttttaatggccattttattttatttgtatttatagttttttatttgtatagatt

SEQ ID NO: 2397 - DNA, 3311 bp, Homo sapiens
  source 1..3311: mol_type = genomic DNA
ctccggccgggaagcatggggcttcccaggctggtctgcgccttcttgctcgccgcctgctgctgctgtcctcgcgtcgcgggtgtgcccggagaggctgagcagcctgcgcctgagctggtggaggtggaagtgggcagcacagcccttctgaagtgcggcctctcccagtcccaaggcaacctcagccatgtcgactggttttctgtccacaaggagaagcggacgctcatcttccgtgtgcgccagggccagggccagagcgaacctggggagtacgagcagcggctcagcctccaggacagaggggctactctggccctgactcaagtcaccccccaagacgagcgcatcttcttgtgccagggcaagcgccctcggtcccaggagtaccgcatccagctccgcgtctacaaagctccggaggagccaaacatccaggtcaaccccctgggcatccctgtgaacagtaaggagcctgaggaggtcgctacctgtgtagggaggaacgggtaccccattcctcaagtcatctggtacaagaatggccggcctctgaaggaggagaagaaccgggtccacattcagtcgtcccagactgtggagtcgagtggtttgtacaccttgcagagtattctgaaggcacagctggttaaagaagacaaagatgcccagttttactgtgagctcaactaccggctgcccagtgggaaccacatgaaggagtccagggaagtcaccgtccctgttttctacccgacagaaaaagtgtggctggaagtggagcccgtgggaatgctgaaggaaggggaccgcgtggaaatcaggtgtttggctgatggcaaccctccaccacacttcagcatcagcaagcagaaccccagcaccagggaggcagaggaagagacaaccaacgacaacggggtcctggtgctggagcctgcccggaaggaacacagtgggcgctatgaatgtcagggcctggacttggacaccatgatatcgctgctgagtgaaccacaggaactactggtgaactatgtgtctgacgtccgagtgagtcccgcagcccctgagagacaggaaggcagcagcctcaccctgacctgtgaggcagagagtagccaggacctcgagttccagtggctgagagaagagacaggccaggtgctggaaagggggcctgtgcttcagttgcatgacctgaaacgggaggcaggaggcggctatcgctgcgtggcgtctgtgcccagcatacccggcctgaaccgcacacagctggtcaacgtggccatttttggccccccttggatggcattcaaggagaggaaggtgtgggtgaaagagaatatggtgttgaatctgtcttgtgaagcgtcagggcacccccggcccaccatctcctggaacgtcaacggcacggcaagtgaacaagaccaagatccacagcgagtcctgagcaccctgaatgtcctcgtgaccccggagctgttggagacaggtgttgaatgcacggcctccaacgacctgggcaaaaacaccagcatcctcttcctggagctggtcaatttaaccaccctcacaccagactccaacacaaccactggcctcagcacttccactgccagtcctcataccagagccaacagcacctccacagagagaaagctgccggagccggagagccggggcgtggtcatcgtggctgtgattgtgtgcatcctggtcctggcggtgctgggcgctgtcctctatttcctctataagaagggcaagctgccgtgcaggcgctcagggaagcaggagatcacgctacccccgtctcgtaagagcgaacttgtagttgaagttaagtcagataagctcccagaagagatgggcctcctgcagggcagcagcggtgacaagagggctccgggagaccagggagagaaatacatcgatctgaggcattagccccgaatcacttcagctcccttccctgcctggaccattcccagctccctgctcactcttctctcagccaaagcctccaaagggactagagagaagcctcctgctcccctcgcctgcacaccccctttcagagggccactgggttaggacctgaggacctcacttggccctgcaaggcccgcttttcagggaccagtccaccaccatctcctccacgttgagtgaagctcatcccaagcaaggagccccagtctcccgagcgggtaggagagtttcttgcagaacgtgttttttctttacacacattatggctgtaaatacctggctcctgccagcagctgagctgggtagcctctctgagctggtttcctgccccaaaggctggcttccaccatccaggtgcaccactgaagtgaggacacaccggagccaggcgcctgctcatgttgaagtgcgctgttcacacccgctccggagagcaccccagcagcatccagaagcagctgcagtgttgctgccaccaccctcctgtctgcctcttcaaagtctcctgtgacattttttctttggtcagaagccaggaactggtgtcattccttaaaagatacgtgccggggccaggtgtggtggctcacgcctgtaatcccagcactttgggaggccgaggcgggcggatcacaaagtcaggacgagaccatcctggctaacacggtgaaaccctgtctctactaaaaatacaaaaaaaaattagctaggcgtagtggttggcacctatagtcccagctactcggaaggctgaagcaggagaatggtatgaatccaggaggtggagcttgcagtgagccgagaccgtgccactgcactccagcctgggcaacacagcgagactccgtctcgaggaaaaaaaaagaaaagatacgtgcctgcggtgaggaagctgggcgctgttttcgagttcaggtgaattagcctcaatcccccgtgttcacttggctcccatagccctcttgatggatcacgtaaaactgaaaggcagcggggagcagacaaagatgaggtctacactgtccttcatggggattaaagctatggttatattagcaccaaacttctacaaaccaagctcagggccccaaccctagaagggcccaaatgagagaatggtacttagggatggaaaacgggcctggctagagcttcgggtgtgtgtgtctgtctgtgtgtatgcatacatatgtgtgtatatatggttttgtcaggtgtgtaaatttgcaaattgtttcctttatatatgtatgtatatatatatatgaaaatatatatatatatgaaaaataaagcttaattgtcccaga

SEQ ID NO: 2398 - DNA, 3487 bp, Homo sapiens
  source 1..3487: mol_type = genomic DNA
ttgaaaatattttcatgagaatttaaactgacaaaaaatctagaagtttcttcttgcctgagaccccccctcccagaaataatctctgctatcagggtgtgttctttcaagcctatttctatgtatttgctcatatatagaaatatttctagaatgatataggcttctgtgttttattatctaaatcagtcattcttaaccaggggtgattttgtaccccctcctcctaggagatacttggcaatgtctggagatatttttggttgtcacacatagagggggtgctactgccatctagtaggtagagagaccaaggatgttgctaacatcctatagggcacaggacagcccccacaataaagaatcaacgtggcctaaaacatcagtagtgctggctgggctcacgcctgtaatcccagcacttttggaggccaaggtgggcggatcacctgaggtcgggagttcaagaccagcctgtccaacacggagaaaccccatctctactgaaaatacaaaagtagccgggcgtggtggcgcatgtctgtaatcccagctactcaggaggctgaggcaggagaatcacttgaagccgggagggaggtggaggttgcggtgagccgagattgtaccactgcactccagcctgggcaacaagagtgaaactctgtctgaaaaaaaaaaaaaaaaaattatcagtagtgctgagaaaccctggtctaagtggtggtgtatggtatacattgttagacaatttcttttatacaatgtttctgggtcagtctatttagatcaactgatcgttttgcttactgccaagttttccatactacgcatagcaggtagtcgagttcaccattccccatttagtggacatctagacggctgctcgtttttatcattgcagcattctttgcacacatccttggatatgagcagacatgaaaatgtttttctagggttgacactgagcagtaaaagtgctgggttgaagggtttccagcttgcatttgtacctggccttctacaggggacagggggctatttagatggtcccctgccaaccccagtggacaaccctagggtggggctggaggtggggctgaggctgagtcttcctccccttcctccctgcccaggggtccacattcagtcgtcccagactgtggagtcgagtggtttgtacaccttgcagagtattctgaaggcacagctggttaaagaagacaaagatgcccagttttactgtgagctcaactaccggctgcccagtgggaaccacatgaaggagtccagggaagtcaccgtccctgttttctacccgacagaaaaagtgtggctggaagtggagcccgtgggaatgctgaaggaaggggaccgcgtggaaatcaggtgtttggctgatggcaaccctccaccacacttcagcatcagcaagcagaaccccagcaccagggaggcagaggaagagacaaccaacgacaacggggtcctggtgctggagcctgcccggaaggaacacagtgggcgctatgaatgtcagggcctggacttggacaccatgatatcgctgctgagtgaaccacaggaactactggtgaactatgtgtctgacgtccgagtgagtcccgcagcccctgagagacaggaaggcagcagcctcaccctgacctgtgaggcagagagtagccaggacctcgagttccagtggctgagagaagagacaggccaggtgctggaaagggggcctgtgcttcagttgcatgacctgaaacgggaggcaggaggcggctatcgctgcgtggcgtctgtgcccagcatacccggcctgaaccgcacacagctggtcaacgtggccatttttggccccccttggatggcattcaaggagaggaaggtgtgggtgaaagagaatatggtgttgaatctgtcttgtgaagcgtcagggcacccccggcccaccatctcctggaacgtcaacggcacggcaagtgaacaagaccaagatccacagcgagtcctgagcaccctgaatgtcctcgtgaccccggagctgttggagacaggtgttgaatgcacggcctccaacgacctgggcaaaaacaccagcatcctcttcctggagctggtcaatttaaccaccctcacaccagactccaacacaaccactggcctcagcacttccactgccagtcctcataccagagccaacagcacctccacaggtaagccaggcctggcaagagaacagggctgtgccagggcatcctttctgccctgtccctccccagagagccctgtccagaaaggtgagtagcagccccatcttgtcggccctggactggctgggccaacgatggtgacgaagtggcctggggcagggagtgacgaggagtgtctttgtggcgcagagagaaagctgccggagccggagagccggggcgtggtcatcgtggctgtgattgtgtgcatcctggtcctggcggtgctgggcgctgtcctctatttcctctataagaagggcaagctgccgtgcaggcgctcagggaagcaggagatcacgctacccccgtctcgtaagagcgaacttgtagttgaagttaagtcagataagctcccagaagagatgggcctcctgcagggcagcagcggtgacaagagggctccgggagaccagggagagaaatacatcgatctgaggcattagccccgaatcacttcagctcccttccctgcctggaccattcccagctccctgctcactcttctctcagccaaagcctccaaagggactagagagaagcctcctgctcccctcgcctgcacaccccctttcagagggccactgggttaggacctgaggacctcacttggccctgcaaggcccgcttttcagggaccagtccaccaccatctcctccacgttgagtgaagctcatcccaagcaaggagccccagtctcccgagcgggctggcttccaccatccaggtgcaccactgaagtgaggacacaccggagccaggcgcctgctcatgttgaagtgcgctgttcacacccgctccggagagcaccccagcagcatccagaagcagctgcagtgttgctgccaccaccctcctgtctgcctcttcaaagtctcctgtgacattttttctttggtcagaagccaggaactggtgtcattccttaaaagatacgtgccggggccaggtgtggtggctcacgcctgtaatcccagcactttgggaggccgaggcgggcggatcacaaagtcaggacgagaccatcctggctaacacggtgaaaccctgtctctactaaaaatacaaaaaaaaattagctaggcgtagtggttggcacctatagtcccagctactcggaaggctgaagcaggagaatggtatgaatccaggaggtggagcttgcagtgagccgagaccgtgccactgcactccagcctgggcaacacagcgagactccgtctcgagg

SEQ ID NO: 2399 - DNA, 141 bp, Homo sapiens
  source 1..141: mol_type = genomic DNA
ggcgtggtcatcgtggctgtgattgtgtgcatcctggtcctggcggtgctgggcgctgtcctctatttcctctataagaagggcaagctgccgtgcaggcgctcagggaagcaggagatggagagaaatacatcgatctga

SEQ ID NO: 2400 - DNA, 2360 bp, Homo sapiens
  source 1..2360: mol_type = genomic DNA
tgggggctgggaatttgccattctgctgtacagacactgatttttttttcttctttttaaaaagcaagattttaggtgatgggcaagtcagaaagtcagatggatataactgatatcaacactccaaagccaaagaagaaacagcgatggactccactggagatcagcctctcggtccttgtcctgctcctcaccatcatagctgtgacaatgatcgcactctatgcaacctacgatgatggtatttgcaagtcatcagactgcataaaatcagctgctcgactgatccaaaacatggatgccaccactgagccttgtacagactttttcaaatatgcttgcggaggctggttgaaacgtaatgtcattcccgagaccagctcccgttacggcaactttgacattttaagagatgaactagaagtcgttttgaaagatgtccttcaagaacccaaaactgaagatatagtagcagtgcagaaagcaaaagcattgtacaggtcttgtataaatgaatctgctattgatagcagaggtggagaacctctactcaaactgttaccagacatatatgggtggccagtagcaacagaaaactgggagcaaaaatatggtgcttcttggacagctgaaaaagctattgcacaactgaattctaaatatgggaaaaaagtccttattaatttgtttgttggcactgatgataagaattctgtgaatcatgtaattcatattgaccaacctcgacttggcctcccttctagagattactatgaatgcactggaatctataaagaggcttgtacagcatatgtggattttatgatttctgtggccagattgattcgtcaggaagaaagattgcccatcgatgaaaaccagcttgctttggaaatgaataaagttatggaattggaaaaagaaattgccaatgctacggctaaacctgaagatcgaaatgatccaatgcttctgtataacaagatgacattggcccagatccaaaataacttttcactagagatcaatgggaagccattcagctggttgaatttcacaaatgaaatcatgtcaactgtgaatattagtattacaaatgaggaagatgtggttgtttatgctccagaatatttaaccaaacttaagcccattcttaccaaatattctgccagagatcttcaaaatttaatgtcctggagattcataatggatcttgtaagcagcctcagccgaacctacaaggagtccagaaatgctttccgcaaggccctttatggtacaacctcagaaacagcaacttggagacgttgtgcaaactatgtcaatgggaatatggaaaatgctgtggggaggctttatgtggaagcagcatttgctggagagagtaaacatgtggtcgaggatttgattgcacagatccgagaagtttttattcagactttagatgacctcacttggatggatgccgagacaaaaaagagagctgaagaaaaggccttagcaattaaagaaaggatcggctatcctgatgacattgtttcaaatgataacaaactgaataatgagtacctcgagttgaactacaaagaagatgaatacttcgagaacataattcaaaatttgaaattcagccaaagtaaacaactgaagaagctccgagaaaaggtggacaaagatgagtggataagtggagcagctgtagtcaatgcattttactcttcaggaagaaatcagatagtcttcccagccggcattctgcagccccccttctttagtgcccagcagtccaactcattgaactatgggggcatcggcatggtcataggacacgaaatcacccatggcttcgatgacaatggcagaaactttaacaaagatggagacctcgttgactggtggactcaacagtctgcaagtaactttaaggagcaatcccagtgcatggtgtatcagtatggaaacttttcctgggacctggcaggtggacagcaccttaatggaattaatacactgggagaaaacattgctgataatggaggtcttggtcaagcatacagagcctatcagaattatattaaaaagaatggcgaagaaaaattacttcctggacttgacctaaatcacaaacaactatttttcttgaactttgcacaggtgtggtgtggaacctataggccagagtatgcggttaactccattaaaacagatgtgcacagtccaggcaatttcaggattattgggactttgcagaactctgcagagttttcagaagcctttcactgccgcaagaattcatacatgaatccagaaaagaagtgccgggtttggtgatcttcaaaagaagcattgcagcccttggc

SEQ ID NO: 2401 - DNA, 5622 bp, Homo sapiens
  source 1..5622: mol_type = genomic DNA
gagagcgccgagacgcgcggggcgcggagatgtgcaagtggcgaagcttgaccgagagcaggctggagcagccgcccaactcctggcgcgggatctgctgaggggtcacgattttaggtgatgggcaagtcagaaagtcagatggatataactgatatcaacactccaaagccaaagaagaaacagcgatggactccactggagatcagcctctcggtccttgtcctgctcctcaccatcatagctgtgacaatgatcgcactctatgcaacctacgatgatggtatttgcaagtcatcagactgcataaaatcagctgctcgactgatccaaaacatggatgccaccactgagccttgtacagactttttcaaatatgcttgcggaggctggttgaaacgtaatgtcattcccgagaccagctcccgttacggcaactttgacattttaagagatgaactagaagtcgttttgaaagatgtccttcaagaacccaaaactgaagatatagtagcagtgcagaaagcaaaagcattgtacaggtcttgtataaatgaatctgctattgatagcagaggtggagaacctctactcaaactgttaccagacatatatgggtggccagtagcaacagaaaactgggagcaaaaatatggtgcttcttggacagctgaaaaagctattgcacaactgaattctaaatatgggaaaaaagtccttattaatttgtttgttggcactgatgataagaattctgtgaatcatgtaattcatattgaccaacctcgacttggcctcccttctagagattactatgaatgcactggaatctataaagaggcttgtacagcatatgtggattttatgatttctgtggccagattgattcgtcaggaagaaagattgcccatcgatgaaaaccagcttgctttggaaatgaataaagttatggaattggaaaaagaaattgccaatgctacggctaaacctgaagatcgaaatgatccaatgcttctgtataacaagatgacattggcccagatccaaaataacttttcactagagatcaatgggaagccattcagctggttgaatttcacaaatgaaatcatgtcaactgtgaatattagtattacaaatgaggaagatgtggttgtttatgctccagaatatttaaccaaacttaagcccattcttaccaaatattctgccagagatcttcaaaatttaatgtcctggagattcataatggatcttgtaagcagcctcagccgaacctacaaggagtccagaaatgctttccgcaaggccctttatggtacaacctcagaaacagcaacttggagacgttgtgcaaactatgtcaatgggaatatggaaaatgctgtggggaggctttatgtggaagcagcatttgctggagagagtaaacatgtggtcgaggatttgattgcacagatccgagaagtttttattcagactttagatgacctcacttggatggatgccgagacaaaaaagagagctgaagaaaaggccttagcaattaaagaaaggatcggctatcctgatgacattgtttcaaatgataacaaactgaataatgagtacctcgagttgaactacaaagaagatgaatacttcgagaacataattcaaaatttgaaattcagccaaagtaaacaactgaagaagctccgagaaaaggtggacaaagatgagtggataagtggagcagctgtagtcaatgcattttactcttcaggaagaaatcagatagtcttcccagccggcattctgcagccccccttctttagtgcccagcagtccaactcattgaactatgggggcatcggcatggtcataggacacgaaatcacccatggcttcgatgacaatggcagaaactttaacaaagatggagacctcgttgactggtggactcaacagtctgcaagtaactttaaggagcaatcccagtgcatggtgtatcagtatggaaacttttcctgggacctggcaggtggacagcaccttaatggaattaatacactgggagaaaacattgctgataatggaggtcttggtcaagcatacagagcctatcagaattatattaaaaagaatggcgaagaaaaattacttcctggacttgacctaaatcacaaacaactatttttcttgaactttgcacaggtgtggtgtggaacctataggccagagtatgcggttaactccattaaaacagatgtgcacagtccaggcaatttcaggattattgggactttgcagaactctgcagagttttcagaagcctttcactgccgcaagaattcatacatgaatccagaaaagaagtgccgggtttggtgatcttcaaaagaagcattgcagcccttggctagacttgccaacaccacagaaatggggaattctctaatcgaaagaaaatgggccctaggggtcactgtactgacttgagggtgattaacagagagggcaccatcacaatacagataacattaggttgtcctagaaagggtgtggagggaggaagggggtctaaggtctatcaagtcaatcatttctcactgtgtacataatgcttaatttctaaagataatattactgtttatttctgtttctcatatggtctaccagtttgctgatgtccctagaaaacaatgcaaaacctttgaggtagaccaggatttctaatcaaaagggaaaagaagatgttgaagaatacagttaggcaccagaagaacagtaggtgacactatagtttaaaacacattgcctaactactagtttttacttttatttgcaacatttacagtccttcaaaatccttccaaagaattcttatacacattggggccttggagcttacatagttttaaactcatttttgccatacatcagttattcattctgtgatcatttattttaagcactcttaaagcaaaaaatgaatgtctaaaattgttttttgttgtacctgctttgactgatgctgagattcttcaggcttcctgcaattttctaagcaatttcttgctctatctctcaaaacttggtatttttcagagatttatataaatgtaaaaataataatttttatatttaattattaactacatttatgagtaactattattataggtaatcaatgaatattgaagtttcagcttaaaataaacagttgtgaaccaagatctataaagcgatatacagatgaaaatttgagactatttaaacttataaatcatattgatgaaaagatttaagcacaaactttagggtaaaaattgccattggacagttgtctagagatatatatacttgtggttttcaaattggactttcaaaattaaatctgtccctgagagtgtctctgataaaagggcaaatctgcacctatgtagctctgcatctcctgtcttttcaggtttgtcatcagatggaaatattttgataataaattgaaattgtgaactcattgctccctaagactgtgacaactgtctaactttagaagtgcatttctgaatagaaatgggaggcctctgatggaccttctagaattataagtcacaaagagttctggaaaagaactgtttactgcttgataggaattcatcttttgaggcttctgttcctctcttttcctgttgtattgactattttcgttcattacttgattaagattttacaaaagaggagcacttccaaaattcttatttttcctaacaaaagatgaaagcagggaatttctatctaaatgatgagtattagttccctgtctcttgaaaaatgcccatttgcctttaaaaaaaaaagttacagaaatactataacatatgtacataaattgcataaagcataagtatacagttcaataaacttaactttaactgaacaatggccctgtagccagcacctgtaagaaacagagcagtaccagcgctctaaaagcacctccttgtcactttattactcccagaacaacaactatcctgacttctaatatcattcactagctttgcctggttttgtcttttatgcagatagaatcaatcagtatgtattcttttgtgcctggcttctttctctcagccttacatttgtgagattcctctgtattgtgctgattgtggatcttttcattctcattgcagaataatgttctattgtgggacttattacaatttgttcatcctattgttgatgggcacttgagaactttccattttggcgctattacaaatagtgcaactatgaatgtactgcatgttaccatcttacttgagcctttaatggacttatttcttcaaatccttccaaaaattattataagcattgaaattatagtttcaagccaactgtggatacccttaccctttcctcctttatcacaaccaccgttacaagtatacttatatttccctaaaatacatttaaaacttacctaagtgacatttgtagttggagtaataggagcttccagctctaataaaacagctgtctctaacttattttatttccatcatgtcagagcaggtgaagagccagaagtgaagagtgactagtacaaattataaaaagccactagactcttcactgttagctttttaaaacattaggctcccatccctatggaggaacaactctccagtgcctggatcccctctgtctacaaatataagattttctgggcctaaaggatagatcaaagtcaaaaatagcaatgcctccctatccctcacacatccagacatcatgaattttacatggtactcttgttgagttctgtagagccttctgatgtctctaaagcactaccgattctttggagttgtcacatcagataagacatatctctaattccatccataaatccagttctactatggctgagttctggtcaaagaaagaaagtttagaagctgagacacaaagggttgggagctgatgaaactcacaaatgatggtaggaagaagctctcgacaatacccgttggcaaggagtctgcctccatgctgcagtgttcgagtggattgtaggtgcaagatggaaaggattgtaggtgcaagctgtccagagaaaagagtccttgttccagccctattctgccactcctgacagggtgaccttgggtatttgcaatattcctttgggcctctgcttctctcacctaaaaaaagagaattagattatattggtggttctcagcaagagaaggagtatgtgtccaatgctgccttcccatgaatctgtctcccagttatgaatcagtgggcaggataaactgaaaactcccatttacgtgtctgaatcgagtgagacaaaattttagtccaaataacaagtaccaaagttttatcaagtttgggtctgtgctgctgttactgttaaccatttaagtggggcaaaaccttgctaattttctcaaaagcatttatcattcttgttgccacagctggagctctcaaactaaaagacatttgttattttggaaagaagaaagactctattctcaaagtttcctaatcagaaatttttatcagtttccagtctcaaaaatacaaaataaaaacaaacgtttttaatactattgc

SEQ ID NO: 2402 - DNA, 3590 bp, Homo sapiens
  source 1..3590: mol_type = genomic DNA
agagccagccgaggggagcggctgccgggaggtgcgctgagcagggtccgcagctaaggtccagcgcgatccgagcgcccaggaccctgcggccgtggaggaggcgtgccctgggaaggagccgctactgggacctgaagagtgaggggagggagaggggcccagagggtgacctggaggagggctctggaagtcacgtcagattttaggtgatgggcaagtcagaaagtcagatggatataactgatatcaacactccaaagccaaagaagaaacagcgatggactccactggagatcagcctctcggtccttgtcctgctcctcaccatcatagctgtgacaatgatcgcactctatgcaacctacgatgatggtatttgcaagtcatcagactgcataaaatcagctgctcgactgatccaaaacatggatgccaccactgagccttgtacagactttttcaaatatgcttgcggaggctggttgaaacgtaatgtcattcccgagaccagctcccgttacggcaactttgacattttaagagatgaactagaagtcgttttgaaagatgtccttcaagaacccaaaactgaagatatagtagcagtgcagaaagcaaaagcattgtacaggtcttgtataaatgaatctgctattgatagcagaggtggagaacctctactcaaactgttaccagacatatatgggtggccagtagcaacagaaaactgggagcaaaaatatggtgcttcttggacagctgaaaaagctattgcacaactgaattctaaatatgggaaaaaagtccttattaatttgtttgttggcactgatgataagaattctgtgaatcatgtaattcatattgaccaacctcgacttggcctcccttctagagattactatgaatgcactggaatctataaagaggcttgtacagcatatgtggattttatgatttctgtggccagattgattcgtcaggaagaaagattgcccatcgatgaaaaccagcttgctttggaaatgaataaagttatggaattggaaaaagaaattgccaatgctacggctaaacctgaagatcgaaatgatccaatgcttctgtataacaagatgacattggcccagatccaaaataacttttcactagagatcaatgggaagccattcagctggttgaatttcacaaatgaaatcatgtcaactgtgaatattagtattacaaatgaggaagatgtggttgtttatgctccagaatatttaaccaaacttaagcccattcttaccaaatattctgccagagatcttcaaaatttaatgtcctggagattcataatggatcttgtaagcagcctcagccgaacctacaaggagtccagaaatgctttccgcaaggccctttatggtacaacctcagaaacagcaacttggagacgttgtgcaaactatgtcaatgggaatatggaaaatgctgtggggaggctttatgtggaagcagcatttgctggagagagtaaacatgtggtcgaggatttgattgcacagatccgagaagtttttattcagactttagatgacctcacttggatggatgccgagacaaaaaagagagctgaagaaaaggccttagcaattaaagaaaggatcggctatcctgatgacattgtttcaaatgataacaaactgaataatgagtacctcgagttgaactacaaagaagatgaatacttcgagaacataattcaaaatttgaaattcagccaaagtaaacaactgaagaagctccgagaaaaggtggacaaagatgagtggataagtggagcagctgtagtcaatgcattttactcttcaggaagaaatcagatagtcttcccagccggcattctgcagccccccttctttagtgcccagcagtccaactcattgaactatgggggcatcggcatggtcataggacacgaaatcacccatggcttcgatgacaatggcagaaactttaacaaagatggagacctcgttgactggtggactcaacagtctgcaagtaactttaaggagcaatcccagtgcatggtgtatcagtatggaaacttttcctgggacctggcaggtggacagcaccttaatggaattaatacactgggagaaaacattgctgataatggaggtcttggtcaagcatacagagcctatcagaattatattaaaaagaatggcgaagaaaaattacttcctggacttgacctaaatcacaaacaactatttttcttgaactttgcacaggtgtggtgtggaacctataggccagagtatgcggttaactccattaaaacagatgtgcacagtccaggcaatttcaggattattgggactttgcagaactctgcagagttttcagaagcctttcactgccgcaagaattcatacatgaatccagaaaagaagtgccgggtttggtgatcttcaaaagaagcattgcagcccttggctagacttgccaacaccacagaaatggggaattctctaatcgaaagaaaatgggccctaggggtcactgtactgacttgagggtgattaacagagagggcaccatcacaatacagataacattaggttgtcctagaaagggtgtggagggaggaagggggtctaaggtctatcaagtcaatcatttctcactgtgtacataatgcttaatttctaaagataatattactgtttatttctgtttctcatatggtctaccagtttgctgatgtccctagaaaacaatgcaaaacctttgaggtagaccaggatttctaatcaaaagggaaaagaagatgttgaagaatacagttaggcaccagaagaacagtaggtgacactatagtttaaaacacattgcctaactactagtttttacttttatttgcaacatttacagtccttcaaaatccttccaaagaattcttatacacattggggccttggagcttacatagttttaaactcatttttgccatacatcagttattcattctgtgatcatttattttaagcactcttaaagcaaaaaatgaatgtctaaaattgttttttgttgtacctgctttgactgatgctgagattcttcaggcttcctgcaattttctaagcaatttcttgctctatctctcaaaacttggtatttttcagagatttatataaatgtaaaaataataatttttatatttaattattaactacatttatgagtaactattattataggtaatcaatgaatattgaagtttcagcttaaaataaacagttgtgaaccaagatctataaagcgatatacagatgaaaatttgagactatttaaacttataaatcatattgatgaaaagatttaagcacaaactttagggtaaaaattgccattggacagttgtctagagatatatatacttgtggttttcaaattggactttcaaaattaaatctgtccctgagagtgtctctgataaaagggcaaatctgcacctatgtagctctgcatctcctgtcttttcaggtttgtcatcagatggaaatattttgataataaattgaaattgtgaa

SEQ ID NO: 2403 - DNA, 593 bp, Homo sapiens
  source 1..593: mol_type = genomic DNA
aacaaaaaacaaaaggttgtgactgagacctgtcaaattcatttggctctatatactttgcattcagcaacaaaattttgacttctcaacagcaaaaatattttaggtgatgggcaagtcagaaagtcagatggatataactgatatcaacactccaaagccaaagaagaaacagcgatggactccactggagatcagcctctcggtccttgtcctgctcctcaccatcatagctgtgacaatgatcgcactctatgcaacctacgatgatggtatttgcaagtcatcagactgcataaaatcagctgctcgactgatccaaaacatggatgccaccactgagccttgtacagactttttcaaatatgcttgcggaggctggttgaaacgtaatgtcattcccgagaccagctcccgttacggcaactttgacattttaagagatgaactagaagtcgttttgaaagatgtccttcaagaacccaaaactgaagatatagtagcagtgcagaaagcaaaagcattgtacaggtcttgtataaatgaatctgctattgatagcagaggtggagaacctctactcaaactgttac

SEQ ID NO: 2404 - DNA, 892 bp, Homo sapiens
  source 1..892: mol_type = genomic DNA
tcaactggtataagaattgctgctttacattgctttgaaattaagcttacacttaaaatagtaatttattctgttggtaatattgtcgagctgaagtttgcaggttcttgttatcttagacctcctaattctctattctcgtctgtggcagtgtccacttttccgtttaaactttttatttaacacatcttcagttgaagtgaaatattttaagaatacaggtatgtttttgcgtaccctgctttatatgggactataagcctcaacttggtattttttttttttttgtattcttttgtttacttgtcccccttactcttctctatgggattgggtgtggttaagttggatattcaggtatttggggtttagtcatatgttccacagtgagattccagatactgtcccctgatgtcttaaagaaaaattgtgaaccttccagaattaactggaaatgaacgacaaagttaattaggagattaaacttgcatcatttctgcttttgctcaatgcttttgaaaaaaggctactaagagcaaaagacttcctttaagaatttacagggcatttacaagagggggagatggaggaagactttgcagattttaggtgatgggcaagtcagaaagtcagatggatataactgatatcaacactccaaagccaaagaagaaacagcgatggactccactggagatcagcctctcggtccttgtcctgctcctcaccatcatagctgtgacaatgatcgcactctatgcaacctacgatgatggtatttgcaagtcatcagactgcataaaatcagctgctcgactgatccaaaacatggatgccaccactgagccttgtacagactttttcaaatatgcttgcggaggctggttgaaac

SEQ ID NO: 2405 - DNA, 856 bp, Homo sapiens
  source 1..856: mol_type = genomic DNA
agcctggagcccgcgcgccttgggcggatgcacggactgagaggcgcttggctgggctctcagcccgccactgccacccggccccgtgcgctcattggtcgggatgtgtcggctcagcagcctccaacttctcccgaatcccactgattttaggtgatgggcaagtcagaaagtcagatggatataactgatatcaacactccaaagccaaagaagaaacagcgatggactccactggagatcagcctctcggtccttgtcctgctcctcaccatcatagctgtgacaatgatcgcactctatgcaacctacgatgatggtatttgcaagtcatcagactgcataaaatcagctgctcgactgatccaaaacatggatgccaccactgagccttgtacagactttttcaaatatgcttgcggaggctggttgaaacgtaatgtcattcccgagaccagctcccgttacggcaactttgacattttaagagatgaactagaagtcgttttgaaagatgtccttcaagaacccaaaactgaagatatagtagcagtgcagaaagcaaaagcattgtacaggtcttgtataaatgaatctgctattgatagcagaggtggagaacctctactcaaactgttaccagacatatatgggtggccagtagcaacagaaaactgggagcaaaaatatggtgcttcttggacagctgaaaaagctattgcacaactgaattctaaatatgggaaaaaagtccttattaatttgtttgttggcactgatgataagaattctgtgaatcatgtaattcatattgaccaacctcgacttggcctcccttctagagattactatgaat

SEQ ID NO: 2406 - DNA, 667 bp, Homo sapiens
  source 1..667: mol_type = genomic DNA
gtagagcagcactaaccaggggagtaatatggttggcacttcgtgtccagaactccgtatttcaggctgggaaacacctaattaatgtctgggaaacaagaagatgatttatcctgagtacctctgtcctcagcttctgcagacacagtttaaatatggaaactgtttctccttcttcctgtgcctcagtttccatagaacaaactgtaattgcatagcacagcttcaggaacctgcagatataagttaatgttataatgtgcagtgaagatgaaaactgcttagctaagtctaagtctattttaggtgatgggcaagtcagaaagtcagatggatataactgatatcaacactccaaagccaaagaagaaacagcgatggactccactggagatcagcctctcggtccttgtcctgctcctcaccatcatagctgtgacaatgatcgcactctatgcaacctacgatgatggtatttgcaagtcatcagactgcataaaatcagctgctcgactgatccaaaacatggatgccaccactgagccttgtacagactttttcaaatatgcttgcggaggctggttgaaacgtaatgtcattcccgagaccagctcccgttacggcaactttgacattttaagagatgaactagaagtcgttttgaaag

SEQ ID NO: 2407 - DNA, 2854 bp, Homo sapiens
  source 1..2854: mol_type = genomic DNA
acattcctactgagtatgacgaatggttgttgatggttatcactggagattgaaaactgggattcctttttcaccaggaattggtgcctaccatggctggggatacacagtgatggatttgtgacttgctcctctgaaagctggcccaagggtgtacagcatatgaatgtgggggagtttacactacacacgctcttggctattttaggtgatgggcaagtcagaaagtcagatggatataactgatatcaacactccaaagccaaagaagaaacagcgatggactccactggagatcagcctctcggtccttgtcctgctcctcaccatcatagctgtgacaatgatcgcactctatgcaacctacgatgatggtatttgcaagtcatcagactgcataaaatcagctgctcgactgatccaaaacatggatgccaccactgagccttgtacagactttttcaaatatgcttgcggaggctggttgaaacgtaatgtcattcccgagaccagctcccgttacggcaactttgacattttaagagatgaactagaagtcgttttgaaagatgtccttcaagaacccaaaactgaagatatagtagcagtgcagaaagcaaaagcattgtacaggtcttgtataaatgaatctgctattgatagcagaggtggagaacctctactcaaactgttaccagacatatatgggtggccagtagcaacagaaaactgggagcaaaaatatggtgcttcttggacagctgaaaaagctattgcacaactgaattctaaatatgggaaaaaagtccttattaatttgtttgttggcactgatgataagaattctgtgaatcatgtaattcatattgaccaacctcgacttggcctcccttctagagattactatgaatgcactggaatctataaagaggcttgtacagcatatgtggattttatgatttctgtggccagattgattcgtcaggaagaaagattgcccatcgatgaaaaccagcttgctttggaaatgaataaagttatggaattggaaaaagaaattgccaatgctacggctaaacctgaagatcgaaatgatccaatgcttctgtataacaagatgacattggcccagatccaaaataacttttcactagagatcaatgggaagccattcagctggttgaatttcacaaatgaaatcatgtcaactgtgaatattagtattacaaatgaggaagatgtggttgtttatgctccagaatatttaaccaaacttaagcccattcttaccaaatattctgccagagatcttcaaaatttaatgtcctggagattcataatggatcttgtaagcagcctcagccgaacctacaaggagtccagaaatgctttccgcaaggccctttatggtacaacctcagaaacagcaacttggagacgttgtgcaaactatgtcaatgggaatatggaaaatgctgtggggaggctttatgtggaagcagcatttgctggagagagtaaacatgtggtcgaggatttgattgcacagatccgagaagtttttattcagactttagatgacctcacttggatggatgccgagacaaaaaagagagctgaagaaaaggccttagcaattaaagaaaggatcggctatcctgatgacattgtttcaaatgataacaaactgaataatgagtacctcgagttgaactacaaagaagatgaatacttcgagaacataattcaaaatttgaaattcagccaaagtaaacaactgaagaagctccgagaaaaggtggacaaagatgagtggataagtggagcagctgtagtcaatgcattttactcttcaggaagaaatcagatagtcttcccagccggcattctgcagccccccttctttagtgcccagcagtccaactcattgaactatgggggcatcggcatggtcataggacacgaaatcacccatggcttcgatgacaatggcagaaactttaacaaagatggagacctcgttgactggtggactcaacagtctgcaagtaactttaaggagcaatcccagtgcatggtgtatcagtatggaaacttttcctgggacctggcaggtggacagcaccttaatggaattaatacactgggagaaaacattgctgataatggaggtcttggtcaagcatacagagcctatcagaattatattaaaaagaatggcgaagaaaaattacttcctggacttgacctaaatcacaaacaactatttttcttgaactttgcacaggtgtggtgtggaacctataggccagagtatgcggttaactccattaaaacagatgtgcacagtccaggcaatttcaggattattgggactttgcagaactctgcagagttttcagaagcctttcactgccgcaagaattcatacatgaatccagaaaagaagtgccgggtttggtgatcttcaaaagaagcattgcagcccttggctagacttgccaacaccacagaaatggggaattctctaatcgaaagaaaatgggccctaggggtcactgtactgacttgagggtgattaacagagagggcaccatcacaatacagataacattaggttgtcctagaaagggtgtggagggaggaagggggtctaaggtctatcaagtcaatcatttctcactgtgtacataatgcttaatttctaaagataatattactgtttatttctgtttctcatatggtctaccagtttgctgatgtccctagaaaacaatgcaaaacctttgaggtagaccaggatttctaatcaaaagggaaaagaagatgttgaagaatacagttaggcaccaga

SEQ ID NO: 2408 - DNA, 2556 bp, Homo sapiens
  source 1..2556: mol_type = genomic DNA
gcggctgccgggaggtgcgctgagcagggtccgcagctaaggtccagcgcgatccgagcgcccaggaccctgcggccgtggaggaggcgtgccctgggaaggagccgctactgggacctgaagaattttaggtgatgggcaagtcagaaagtcagatggatataactgatatcaacactccaaagccaaagaagaaacagcgatggactccactggagatcagcctctcggtccttgtcctgctcctcaccatcatagctgtgacaatgatcgcactctatgcaacctacgatgatggtatttgcaagtcatcagactgcataaaatcagctgctcgactgatccaaaacatggatgccaccactgagccttgtacagactttttcaaatatgcttgcggaggctggttgaaacgtaatgtcattcccgagaccagctcccgttacggcaactttgacattttaagagatgaactagaagtcgttttgaaagatgtccttcaagaacccaaaactgaagatatagtagcagtgcagaaagcaaaagcattgtacaggtcttgtataaatgaatctgctattgatagcagaggtggagaacctctactcaaactgttaccagacatatatgggtggccagtagcaacagaaaactgggagcaaaaatatggtgcttcttggacagctgaaaaagctattgcacaactgaattctaaatatgggaaaaaagtccttattaatttgtttgttggcactgatgataagaattctgtgaatcatgtaattcatattgaccaacctcgacttggcctcccttctagagattactatgaatgcactggaatctataaagaggcttgtacagcatatgtggattttatgatttctgtggccagattgattcgtcaggaagaaagattgcccatcgatgaaaaccagcttgctttggaaatgaataaagttatggaattggaaaaagaaattgccaatgctacggctaaacctgaagatcgaaatgatccaatgcttctgtataacaagatgacattggcccagatccaaaataacttttcactagagatcaatgggaagccattcagctggttgaatttcacaaatgaaatcatgtcaactgtgaatattagtattacaaatgaggaagatgtggttgtttatgctccagaatatttaaccaaacttaagcccattcttaccaaatattctgccagagatcttcaaaatttaatgtcctggagattcataatggatcttgtaagcagcctcagccgaacctacaaggagtccagaaatgctttccgcaaggccctttatggtacaacctcagaaacagcaacttggagacgttgtgcaaactatgtcaatgggaatatggaaaatgctgtggggaggctttatgtggaagcagcatttgctggagagagtaaacatgtggtcgaggatttgattgcacagatccgagaagtttttattcagactttagatgacctcacttggatggatgccgagacaaaaaagagagctgaagaaaaggccttagcaattaaagaaaggatcggctatcctgatgacattgtttcaaatgataacaaactgaataatgagtacctcgagttgaactacaaagaagatgaatacttcgagaacataattcaaaatttgaaattcagccaaagtaaacaactgaagaagctccgagaaaaggtggacaaagatgagtggataagtggagcagctgtagtcaatgcattttactcttcaggaagaaatcagatagtcttcccagccggcattctgcagccccccttctttagtgcccagcagtccaactcattgaactatgggggcatcggcatggtcataggacacgaaatcacccatggcttcgatgacaatggcagaaactttaacaaagatggagacctcgttgactggtggactcaacagtctgcaagtaactttaaggagcaatcccagtgcatggtgtatcagtatggaaacttttcctgggacctggcaggtggacagcaccttaatggaattaatacactgggagaaaacattgctgataatggaggtcttggtcaagcatacagagcctatcagaattatattaaaaagaatggcgaagaaaaattacttcctggacttgacctaaatcacaaacaactatttttcttgaactttgcacaggtgtggtgtggaacctataggccagagtatgcggttaactccattaaaacagatgtgcacagtccaggcaatttcaggattattgggactttgcagaactctgcagagttttcagaagcctttcactgccgcaagaattcatacatgaatccagaaaagaagtgccgggtttggtgatcttcaaaagaagcattgcagcccttggctagacttgccaacaccacagaaatggggaattctctaatcgaaagaaaatgggccctaggggtcactgtactgacttgagggtgattaacagagagggcaccatcacaatacagataacattaggttgtcctagaaaggg

SEQ ID NO: 2409 - DNA, 324 bp, Homo sapiens
  source 1..324: mol_type = genomic DNA
gaccattttcagaatgttgtctaaccagttaatagatactggtatcagtagtagtagtaattttgaactgtaaaaataaaggttgtttttatgactaaaataaactacttcatgtgttcattcgttttgctgtttatctatattaatatttcaaattattgcttagtcaaaacctcaaggtattagtcactggtttttgagcttataaaggaagccactggagcaagatataaaattaaccattgatgttagtccagagttcaaaaggattttaggtgatgggcaagtcagaaagtcagatggatataactgatatcaacactc

SEQ ID NO: 2410 - DNA, 3331 bp, Homo sapiens
  source 1..3331: mol_type = genomic DNA
gtctatcagcgatttcatcttcaggcctggactacaccactcaccctcccagtgtgcttgagaaacaaactgcacccactgaactccgcagctagcatccaaatcagcccttgagatttgaggccttggagactcaggagttttgagagcaaaatgacaacacccagaaattcagtaaatgggactttcccggcagagccaatgaaaggccctattgctatgcaatctggtccaaaaccactcttcaggaggatgtcttcactggtgggccccacgcaaagcttcttcatgagggaatctaagactttgggggctgtccagattatgaatgggctcttccacattgccctggggggtcttctgatgatcccagcagggatctatgcacccatctgtgtgactgtgtggtaccctctctggggaggcattatgtatattatttccggatcactcctggcagcaacggagaaaaactccaggaagtgtttggtcaaaggaaaaatgataatgaattcattgagcctctttgctgccatttctggaatgattctttcaatcatggacatacttaatattaaaatttcccattttttaaaaatggagagtctgaattttattagagctcacacaccatatattaacatatacaactgtgaaccagctaatccctctgagaaaaactccccatctacccaatactgttacagcatacaatctctgttcttgggcattttgtcagtgatgctgatctttgccttcttccaggaacttgtaatagctggcatcgttgagaatgaatggaaaagaacgtgctccagacccaaatctaacatagttctcctgtcagcagaagaaaaaaaagaacagactattgaaataaaagaagaagtggttgggctaactgaaacatcttcccaaccaaagaatgaagaagacattgaaattattccaatccaagaagaggaagaagaagaaacagagacgaactttccagaacctccccaagatcaggaatcctcaccaatagaaaatgacagctctccttaagtgatttcttctgttttctgtttccttttttaaacattagtgttcatagcttccaagagacatgctgactttcatttcttgaggtactctgcacatacgcaccacatctctatctggcctttgcatggagtgaccatagctccttctctcttacattgaatgtagagaatgtagccattgtagcagcttgtgttgtcacgcttcttcttttgagcaactttcttacactgaagaaaggcagaatgagtgcttcagaatgtgatttcctactaacctgttccttggataggctttttagtatagtatttttttttgtcattttctccatcaacaaccagggagactgcacctgatggaaaagatatatgactgcttcatgacattcctaaactatcttttttttattccacatctacgtttttggtggagtcccttttgcatcattgttttaaggatgataaaaaaaaataacaactagggacaatacagaacccattccatttatctttctacagggctgacattgtggcacattcttagagttaccacaccccatgagggaagctctaaatagccaacacccatctgttttttgtaaaaacagcatagcttatacatggacatgtctctgccttaacttttcctaactcccactctaggctattgtttgcatgtctacctacttttagccattatgcgagaaaagaaaaaaatgaccatagaaaatgccaccatgaggtgcccaaatttcaaataataattaacatttagttatatttataatttccagatgacaaagtatttcatcaaataacttcatttgatgttccatgatcaagaaagaatccctatctctattttacaagtaattcaaagaggccaaataacttgtaaacaagaaaaggtaacttgtcaacagtcataactagtaattatgagagccttgtttcataaccaggtcttcttactcaaatcctgtgatgtttgaaataaccaaattgtctctccaatgtctgcataaactgtgagagccaagtcaacagcttttatcaagaatttactctctgaccagcaataaacaagcactgagagacacagagagccagattcagattttacccatggggataaaaagactcagactttcaccacatttggaaaactacttgcatcataaatatataataactggtagtttatatgaagcagacactaagtgctatagacactctcagaatatcatacttggaaacaatgtaattaaaatgccgaatctgagtcaacagctgccctacttttcaattcagatatactagtaccttacctagaaataatgttaacctagggtgaagtcactataatctgtagtctattatttgggcatttgctacatgatgagtgctgccagattgtggcaggtaaagagacaatgtaatttgcactccctatgatatttctacatttttagcgaccactagtggaagacattccccaaaattagaaaaaaaggagatagaagatttctgtctatgtaaagttctcaaaatttgttctaaattaataaaactatctttgtgttcttttctgcaacagatgattccaacatgggtgtttgtctattcttctttactcttgaaacattagaccatgggaggctcttacagccttgagttgatatttatacaacccaaatctaggtttgaacggtgaggtgtcaggtcatcaaatattcatgtctatatagtcttacacaggttctcaaaaaaaatgttcatgggataggtcattgataatggattccttattctgagaactccagacgactgaaatatatgagagaaggaaaaggacatagtaggagcaggcctgagaaaaaaatgaaagtcagaaatctttaaaaaaatacaagatcttatttctatcttattttttctcctcttctgaaatatatatgaggattcctctccaaacccatggtttctctaagaattttgagtcatttgtatgacctcaaataattagttttagctgacctcacataactccttataataggagacatctttaatgtctgctattaaagaaggatgaaaattcctatgaccttctccccgattatccctttggcaatatagagtcaaataataacattgaccaatagtaaacatgctttgccaagaagtagaagatatattctctagccttagtttttcctcccaatttgcatttttgtaaaaataatgttgtatccacaaaggaaataaactttaaaaacccaagtgca

SEQ ID NO: 2411 - DNA, 3372 bp, Homo sapiens
  source 1..3372: mol_type = genomic DNA
tcagaactcagcagtaggccttgcctcagatccaaggtcactcggaagaggccatgtctaccctcaatgacactcatggaggaaatgctgagagaagcattcagatgcatgacacaaggtaagactgccaaaaatcttgttcttgctctcctcattttgttatttgttttatttttaggagttttgagagcaaaatgacaacacccagaaattcagtaaatgggactttcccggcagagccaatgaaaggccctattgctatgcaatctggtccaaaaccactcttcaggaggatgtcttcactggtgggccccacgcaaagcttcttcatgagggaatctaagactttgggggctgtccagattatgaatgggctcttccacattgccctggggggtcttctgatgatcccagcagggatctatgcacccatctgtgtgactgtgtggtaccctctctggggaggcattatgtatattatttccggatcactcctggcagcaacggagaaaaactccaggaagtgtttggtcaaaggaaaaatgataatgaattcattgagcctctttgctgccatttctggaatgattctttcaatcatggacatacttaatattaaaatttcccattttttaaaaatggagagtctgaattttattagagctcacacaccatatattaacatatacaactgtgaaccagctaatccctctgagaaaaactccccatctacccaatactgttacagcatacaatctctgttcttgggcattttgtcagtgatgctgatctttgccttcttccaggaacttgtaatagctggcatcgttgagaatgaatggaaaagaacgtgctccagacccaaatctaacatagttctcctgtcagcagaagaaaaaaaagaacagactattgaaataaaagaagaagtggttgggctaactgaaacatcttcccaaccaaagaatgaagaagacattgaaattattccaatccaagaagaggaagaagaagaaacagagacgaactttccagaacctccccaagatcaggaatcctcaccaatagaaaatgacagctctccttaagtgatttcttctgttttctgtttccttttttaaacattagtgttcatagcttccaagagacatgctgactttcatttcttgaggtactctgcacatacgcaccacatctctatctggcctttgcatggagtgaccatagctccttctctcttacattgaatgtagagaatgtagccattgtagcagcttgtgttgtcacgcttcttcttttgagcaactttcttacactgaagaaaggcagaatgagtgcttcagaatgtgatttcctactaacctgttccttggataggctttttagtatagtatttttttttgtcattttctccatcaacaaccagggagactgcacctgatggaaaagatatatgactgcttcatgacattcctaaactatcttttttttattccacatctacgtttttggtggagtcccttttgcatcattgttttaaggatgataaaaaaaaataacaactagggacaatacagaacccattccatttatctttctacagggctgacattgtggcacattcttagagttaccacaccccatgagggaagctctaaatagccaacacccatctgttttttgtaaaaacagcatagcttatacatggacatgtctctgccttaacttttcctaactcccactctaggctattgtttgcatgtctacctacttttagccattatgcgagaaaagaaaaaaatgaccatagaaaatgccaccatgaggtgcccaaatttcaaataataattaacatttagttatatttataatttccagatgacaaagtatttcatcaaataacttcatttgatgttccatgatcaagaaagaatccctatctctattttacaagtaattcaaagaggccaaataacttgtaaacaagaaaaggtaacttgtcaacagtcataactagtaattatgagagccttgtttcataaccaggtcttcttactcaaatcctgtgatgtttgaaataaccaaattgtctctccaatgtctgcataaactgtgagagccaagtcaacagcttttatcaagaatttactctctgaccagcaataaacaagcactgagagacacagagagccagattcagattttacccatggggataaaaagactcagactttcaccacatttggaaaactacttgcatcataaatatataataactggtagtttatatgaagcagacactaagtgctatagacactctcagaatatcatacttggaaacaatgtaattaaaatgccgaatctgagtcaacagctgccctacttttcaattcagatatactagtaccttacctagaaataatgttaacctagggtgaagtcactataatctgtagtctattatttgggcatttgctacatgatgagtgctgccagattgtggcaggtaaagagacaatgtaatttgcactccctatgatatttctacatttttagcgaccactagtggaagacattccccaaaattagaaaaaaaggagatagaagatttctgtctatgtaaagttctcaaaatttgttctaaattaataaaactatctttgtgttcttttctgcaacagatgattccaacatgggtgtttgtctattcttctttactcttgaaacattagaccatgggaggctcttacagccttgagttgatatttatacaacccaaatctaggtttgaacggtgaggtgtcaggtcatcaaatattcatgtctatatagtcttacacaggttctcaaaaaaaatgttcatgggataggtcattgataatggattccttattctgagaactccagacgactgaaatatatgagagaaggaaaaggacatagtaggagcaggcctgagaaaaaaatgaaagtcagaaatctttaaaaaaatacaagatcttatttctatcttattttttctcctcttctgaaatatatatgaggattcctctccaaacccatggtttctctaagaattttgagtcatttgtatgacctcaaataattagttttagctgacctcacataactccttataataggagacatctttaatgtctgctattaaagaaggatgaaaattcctatgaccttctccccgattatccctttggcaatatagagtcaaataataacattgaccaatagtaaacatgctttgccaagaagtagaagatatattctctagccttagtttttcctcccaatttgcatttttgtaaaaataatgttgtatccacaaaggaaataaactttaaaaacccaagtgca

SEQ ID NO: 2412 - DNA, 495 bp, Homo sapiens
  source 1..495: mol_type = genomic DNA
aaagtaattggagcgaagcccaaggtagcagaagctactgatttcctgtcacctgatgtctatcagcgatttcatcttcaggcctggactacaccactcaccctcccagtgtgcttgagaaacaaactgcacccactgaactccgcagctagcatccaaatcagcccttgagatttgaggccttggagactcagatcctgaacaagagagaacaaaatctctactttgatggaacttccattctgtggggaagagactgacaataagcaattaaataaataagaactcagcagtaggccttgcctcagatccaaggtcactcggaagaggccatgtctaccctcaatgacactcatggaggaaatgctgagagaagcattcagatgcatgacacaaggtaagactgccaaaaatcttgttcttgctctcctcattttgttatttgttttatttttaggagttttgagagcaaaatgacaacacccagaaattcag

SEQ ID NO: 2413 - DNA, 2560 bp, Homo sapiens
  source 1..2560: mol_type = genomic DNA
actcaccctcccagtgtgcttgagaaacaaactgcacccactgaactccgcagctagcatccaaatcagcccttgagatttgaggccttggagactcaggagttttgagagcaaaatgacaacacccagaaattcagtaaatgggactttcccggcagagccaatgaaaggccctattgctatgcaatctggtccaaaaccactcttcaggaggatgtcttcactggtgggccccacgcaaagcttcttcatgagggaatctaagactttgggggctgtccagattatgaatgggctcttccacattgccctggggggtcttctgatgatcccagcagggatctatgcacccatctgtgtgactgtgtggtaccctctctggggaggcattatgtatattatttccggatcactcctggcagcaacggagaaaaactccaggaagtgtttggtcaaaggaaaaatgataatgaattcattgagcctctttgctgccatttctggaatgattctttcaatcatggacatacttaatattaaaatttcccattttttaaaaatggagagtctgaattttattagagctcacacaccatatattaacatatacaactgtgaaccagctaatccctctgagaaaaactccccatctacccaatactgttacagcatacaatctctgttcttggaacttgtaatagctggcatcgttgagaatgaatggaaaagaacgtgctccagacccaaatctaacatagttctcctgtcagcagaagaaaaaaaagaacagactattgaaataaaagaagaagtggttgggctaactgaaacatcttcccaaccaaagaatgaagaagacattgaaattattccaatccaagaagaggaagaagaagaaacagagacgaactttccagaacctccccaagatcaggaatcctcaccaatagaaaatgacagctctccttaagtgatttcttctgttttctgtttccttttttaaacattagtgttcatagcttccaagagacatgctgactttcatttcttgaggtactctgcacatacgcaccacatctctatctggcctttgcatggagtgaccatagctccttctctcttacattgaatgtagagaatgtagccattgtagcagcttgtgttgtcacgcttcttcttttgagcaactttcttacactgaagaaaggcagaatgagtgcttcagaatgtgatttcctactaacctgttccttggataggctttttagtatagtatttttttttgtcattttctccatcaacaaccagggagactgcacctgatggaaaagatatatgactgcttcatgacattcctaaactatcttttttttattccacatctacgtttttggtggagtcccttttgcatcattgttttaaggatgataaaaaaaaataacaactagggacaatacagaacccattccatttatctttctacagggctgacattgtggcacattcttagagttaccacaccccatgagggaagctctaaatagccaacacccatctgttttttgtaaaaacagcatagcttatacatggacatgtctctgccttaacttttcctaactcccactctaggctattgtttgcatgtctacctacttttagccattatgcgagaaaagaaaaaaatgaccatagaaaatgccaccatgaggtgcccaaatttcaaataataattaacatttagttatatttataatttccagatgacaaagtatttcatcaaataacttcatttgatgttccatgatcaagaaagaatccctatctctattttacaagtaattcaaagaggccaaataacttgtaaacaagaaaaggtaacttgtcaacagtcataactagtaattatgagagccttgtttcataaccaggtcttcttactcaaatcctgtgatgtttgaaataaccaaattgtctctccaatgtctgcataaactgtgagagccaagtcaacagcttttatcaagaatttactctctgaccagcaataaacaagcactgagagacacagagagccagattcagattttacccatggggataaaaagactcagactttcaccacatttggaaaactacttgcatcataaatatataataactggtagtttatatgaagcagacactaagtgctatagacactctcagaatatcatacttggaaacaatgtaattaaaatgccgaatctgagtcaacagctgccctacttttcaattcagatatactagtaccttacctagaaataatgttaacctagggtgaagtcactataatctgtagtctattatttgggcatttgctacatgatgagtgctgccagattgtggcaggtaaagagacaatgtaatttgcactccctatgatatttctacatttttagcgaccactagtggaagacattccccaaaattagaaaaaaaggagatagaagatttctgtctatgtaaagttctcaaaatttgttctaaattaataaaactatctttgtgttcttttctgcaa

SEQ ID NO: 2414 - DNA, 558 bp, Homo sapiens
  source 1..558: mol_type = genomic DNA
cactcaccctcccagtgtgcttgagaaacaaactgcacccactgaactccgcagctagcatccaaatcagcccttgagatttgaggccttggagactcagagagaccacaagaggagcaagcaagagagctgggactaactctgtctgctacatattgccagaaattgggagactgaaggtgcaaagaagaaataatttcttggaagggctaacagcttggttggactgagatgggctgaaaagcacagagggaagggaaatcctgaacaagagagaacaaaatctctactttgatggaacttccattctgtggggaagagactgacaataagcaattaaataaataagaactcagcagtaggccttgcctcagatccaaggtcactcggaagaggccatgtctaccctcaatgacactcatggaggaaatgctgagagaagcattcagatgcatgacacaaggtaagactgccaaaaatcttgttcttgctctcctcattttgttatttgttttatttttaggagttttgagagcaaaatgacaacacccagaaatt

SEQ ID NO: 2415 - DNA, 3475 bp, Homo sapiens
  source 1..3475: mol_type = genomic DNA
actcaccctcccagtgtgcttgagaaacaaactgcacccactgaactccgcagctagcatccaaatcagcccttgagatttgaggccttggagactcagaactcagcagtaggccttgcctcagatccaaggtcactcggaagaggccatgtctaccctcaatgacactcatggaggaaatgctgagagaagcattcagatgcatgacacaaggtaagactgccaaaaatcttgttcttgctctcctcattttgttatttgttttatttttaggagttttgagagcaaaatgacaacacccagaaattcagtaaatgggactttcccggcagagccaatgaaaggccctattgctatgcaatctggtccaaaaccactcttcaggaggatgtcttcactggtgggccccacgcaaagcttcttcatgagggaatctaagactttgggggctgtccagattatgaatgggctcttccacattgccctggggggtcttctgatgatcccagcagggatctatgcacccatctgtgtgactgtgtggtaccctctctggggaggcattatgtatattatttccggatcactcctggcagcaacggagaaaaactccaggaagtgtttggtcaaaggaaaaatgataatgaattcattgagcctctttgctgccatttctggaatgattctttcaatcatggacatacttaatattaaaatttcccattttttaaaaatggagagtctgaattttattagagctcacacaccatatattaacatatacaactgtgaaccagctaatccctctgagaaaaactccccatctacccaatactgttacagcatacaatctctgttcttgggcattttgtcagtgatgctgatctttgccttcttccaggaacttgtaatagctggcatcgttgagaatgaatggaaaagaacgtgctccagacccaaatctaacatagttctcctgtcagcagaagaaaaaaaagaacagactattgaaataaaagaagaagtggttgggctaactgaaacatcttcccaaccaaagaatgaagaagacattgaaattattccaatccaagaagaggaagaagaagaaacagagacgaactttccagaacctccccaagatcaggaatcctcaccaatagaaaatgacagctctccttaagtgatttcttctgttttctgtttccttttttaaacattagtgttcatagcttccaagagacatgctgactttcatttcttgaggtactctgcacatacgcaccacatctctatctggcctttgcatggagtgaccatagctccttctctcttacattgaatgtagagaatgtagccattgtagcagcttgtgttgtcacgcttcttcttttgagcaactttcttacactgaagaaaggcagaatgagtgcttcagaatgtgatttcctactaacctgttccttggataggctttttagtatagtatttttttttgtcattttctccatcaacaaccagggagactgcacctgatggaaaagatatatgactgcttcatgacattcctaaactatcttttttttattccacatctacgtttttggtggagtcccttttgcatcattgttttaaggatgataaaaaaaaataacaactagggacaatacagaacccattccatttatctttctacagggctgacattgtggcacattcttagagttaccacaccccatgagggaagctctaaatagccaacacccatctgttttttgtaaaaacagcatagcttatacatggacatgtctctgccttaacttttcctaactcccactctaggctattgtttgcatgtctacctacttttagccattatgcgagaaaagaaaaaaatgaccatagaaaatgccaccatgaggtgcccaaatttcaaataataattaacatttagttatatttataatttccagatgacaaagtatttcatcaaataacttcatttgatgttccatgatcaagaaagaatccctatctctattttacaagtaattcaaagaggccaaataacttgtaaacaagaaaaggtaacttgtcaacagtcataactagtaattatgagagccttgtttcataaccaggtcttcttactcaaatcctgtgatgtttgaaataaccaaattgtctctccaatgtctgcataaactgtgagagccaagtcaacagcttttatcaagaatttactctctgaccagcaataaacaagcactgagagacacagagagccagattcagattttacccatggggataaaaagactcagactttcaccacatttggaaaactacttgcatcataaatatataataactggtagtttatatgaagcagacactaagtgctatagacactctcagaatatcatacttggaaacaatgtaattaaaatgccgaatctgagtcaacagctgccctacttttcaattcagatatactagtaccttacctagaaataatgttaacctagggtgaagtcactataatctgtagtctattatttgggcatttgctacatgatgagtgctgccagattgtggcaggtaaagagacaatgtaatttgcactccctatgatatttctacatttttagcgaccactagtggaagacattccccaaaattagaaaaaaaggagatagaagatttctgtctatgtaaagttctcaaaatttgttctaaattaataaaactatctttgtgttcttttctgcaacagatgattccaacatgggtgtttgtctattcttctttactcttgaaacattagaccatgggaggctcttacagccttgagttgatatttatacaacccaaatctaggtttgaacggtgaggtgtcaggtcatcaaatattcatgtctatatagtcttacacaggttctcaaaaaaaatgttcatgggataggtcattgataatggattccttattctgagaactccagacgactgaaatatatgagagaaggaaaaggacatagtaggagcaggcctgagaaaaaaatgaaagtcagaaatctttaaaaaaatacaagatcttatttctatcttattttttctcctcttctgaaatatatatgaggattcctctccaaacccatggtttctctaagaattttgagtcatttgtatgacctcaaataattagttttagctgacctcacataactccttataataggagacatctttaatgtctgctattaaagaaggatgaaaattcctatgaccttctccccgattatccctttggcaatatagagtcaaataataacattgaccaatagtaaacatgctttgccaagaagtagaagatatattctctagccttagtttttcctcccaatttgcatttttgtaaaaataatgttgtatccacaaaggaaataaactttaaaaacccaagtgcactcattga

SEQ ID NO: 2416 - DNA, 2635 bp, Homo sapiens
  source 1..2635: mol_type = genomic DNA
agcgcctgttggtaggaacctgcttggtcgcgtctgagggggcttgtaggtggctctggctgaaacaggcgcctgcgagagtctgtaggagggaaaccgccatggacgatcagggttgccctcggtgtaagaccaccaaatatcggaacccctccttgaagctgatggtgaatgtgtgcggacacactctctgtgaaagttgtgtagatttactgtttgtgagaggagctggaaactgccctgagtgtggtactccactcagaaagagcaacttcagggtacaactctttgaagatcccactgttgacaaggaggttgagatcaggaaaaaagtgctaaagatatacaataaaagggaagaagattttcctagtctaagagaatacaatgatttcttggaagaagtggaagaaattgttttcaacttgaccaacaatgtggatttggacaacaccaaaaagaaaatggagatataccaaaaggaaaacaaagatgttattcagaaaaataaattaaagctgactcgagaacaggaagaactggaagaagctttagaagtggaacgacaggaaaatgaacaaagaagattatttatacaaaaagaagaacaactgcagcagattctaaaaaggaagaataagcaggcttttttagatgagctggagagttctgatctccctgttgctctgcttttggctcagcataaagatagatctacccaattagaaatgcaacttgagaaacccaaacctgtaaaaccagtgacgttttccacaggcatcaaaatgggtcaacatatttcactggcacctattcacaagcttgaagaagctctgtatgaataccagccactgcagatagagacatatggaccacatgttcctgagcttgagatgctaggaagacttgggtatttaaaccatgtcagagctgcctcaccacaggaccttgctggaggctatacttcttctcttgcttgtcacagagcactacaggatgcattcagtgggcttttctggcagcccagttaaccatttataagatttggaccttggagctgaaccagggagctagcaaaagtaaagcagacttataaaattatagctatgtgcagctgcacaacacagtccttccactagcagctgtgttaaagtatttataaggagaaaatttcagaactaagttgagtaatataggggatatatatttgtgaaaaataatttttacttatatttttcagaggatttgacacgataagcctcatctgatggaagagaggaataaataattcacctatatgtgtttgaggttgtgacagacttataaaatctttttaaaaaataaagctataatttatattaagttctgtggtttttctcttattacagtgttttacttgaacacattttaaataccattttgattacaacatttactgttaatatccaagtctattatttcttctcataaaatgttcccctttttcctaatgtcttgttaatactagtccagacaagtggatatatttcctttgaccaagttatggcaagaaaaacctgacccatgataatgtcattccctcaatactaaggactcaatgcctgttttaagcagtggaaaatgaggcaaaccttgatcaaggtgttatagttcccagctgtgagccacactcaggataaaacaaaacccagcattaacctgctttagtgacacattcaaagaagttaataaaatttaatacttaaatgatacctttcacctccaatgtaagctcattttatgatgaatcctttggagactggagaaggtacattttaagtacagttccctatgtataaattgtatactgatacagtttttttgttgaaacttcaaaggcttttattaccagggttttgcttaaagagtttagatatgaataggatgatattgcagcatctcaaccttgtatgagtctgttacatagagcattggatatgggatatagtttcttaaggaaattaagggatttcctatcaaatctctattacaacagatgttagttttatgggtagaaacttaggtgaaacaagacttgtggttacattaggatggactatccatctgtaacaactccatcttattttactaagcagttattaattaattttagcaatacatcttcatctttattgtacttctatctttgttaaatgagaaaaccaaggcatcaaataattgagtagacaaagatcatattcacaagttagtaaaaagccagaattagaatgcaggttttttttttcaaagtccagttccatctacattctaccagactgcatatcctattcctgtatctattaggtattcccgaactgaggattagtgtttttaagtacagtctataaatctgttcaaagaatagttagaacattgaatgtagagttaaggctttgcagcagccaattgcaaaaataaggaatccagtcttttgaaaagaaacactactgcttgttctcataccttttataaatgtattttaaaaagaatgaactaattaataaaacatatcaaaggcttttaaggcttgttttgagcctgccttattgtggaaattgcatgcacctggtttggcaaataaattccaaaaccttta

SEQ ID NO: 2417 - DNA, 1220 bp, Homo sapiens
  source 1..1220: mol_type = genomic DNA
ggaacctgcttggtcgcgtctgagggggcttgtaggtggctctggctgaaacaggcgcctgcgagagtctgtaggagggaaaccgccatggacgatcagggttgccctcggtgtaagaccaccaaatatcggaacccctccttgaagctgatggtgaatgtgtgcggacacactctctgtgaaagttgtgtagatttactgtttgtgagaggagctggaaactgccctgagtgtggtactccactcagaaagagcaacttcagggtacaactctttgaagatcccactgttgacaaggaggttgagatcaggaaaaaagtgctaaagatatacaataaaagggaagaagattttcctagtctaagagaatacaatgatttcttggaagaagtggaagaaattgttttcaacttgaccaacaatgtggatttggacaacaccaaaaagaaaatggagatataccaaaaggaaaacaaagatgttattcagaaaaataaattaaagctgactcgagaacaggaagaactggaagaagctttagaagtggaacgacaggaaaatgaacaaagaagattatttatacaaaaagaagaacaactgcagcagattctaaaaaggaagaataagcaggcttttttagatgagctgggtcaacatatttcactggcacctattcacaagcttgaagaagctctgtatgaataccagccactgcagatagagacatatggaccacatgttcctgagcttgagatgctaggaagacttgggtatttaaaccatgtcagagctgcctcaccacaggaccttgctggaggctatacttcttctcttgcttgtcacagagcactacaggatgcattcagtgggcttttctggcagcccagttaaccatttataagatttggaccttggagctgaaccagggagctagcaaaagtaaagcagacttataaaattatagctatgtgcagctgcacaacacagtccttccactagcagctgtgttaaagtatttataaggagaaaatttcagaactaagttgagtaatataggggatatatatttgtgaaaaataatttttacttatatttttcagaggatttgacacgataagcctcatctgatggaagagaggaataaataattcacctatatgtgtttgaggttgtgacagacttataaaatctttttaaaaaataaagctataatttatatt

SEQ ID NO: 2418 - DNA, 680 bp, Homo sapiens
  source 1..680: mol_type = genomic DNA
actcgagaacaggaagaactggaagaagctttagaagtggaacgacaggaaaatgaacaaagaagattatttatacaaaaagaagaacaactgcagcagattctaaaaaggaagaataagcaggcttttttagatgagctggagagttctgatctccctgttgctctgcttttggctcagcataaagatagatctacccaattagaaatgcaacttgagaaacccaaacctgtaaaaccagtgacgttttccacaggcatcaaaatgggtcaacatatttcactggcacctattcacaagcttgaagaagctctgtatgaataccagccactgcagatagagacatatggaccacatgttcctgagcttgagatgctaggaagacttgggtatttaaaccatgtcagagctgcctcaccacaggaccttgctggaggctatacttcttctcttgcttgtcacagagcactacaggatgcattcagtgggcttttctggcagcccagttaaccatttataagatttggaccttggagctgaaccagggagctagcaaaaaggatttgacacgataagcctcatctgatggaagagaggaataaataattcacctatatgtgtttgaggttgtgacagacttataaaatctttttaaaaaataaagctataatttatattaa

SEQ ID NO: 2419 - DNA, 7556 bp, Homo sapiens
  source 1..7556: mol_type = genomic DNA
gcgcggaggcagggaaccggagccttggagcgacccaacccctcgtctcgctgccctcccgcgcctgcaacggtgcgcggagactccggcgaactcagacacccaacggcggagaacagaagcggcaggcggcggacgtggccgcgaagctgcgcgccgaacgcagcgcacccgctgccgagcagaggagccgcgcctttccccgaccctcggctccagcccccggcgcctgccgcctcgcagcccctctgcgtcctcggctcgggggccggcaccggcgatgccgagcggagcctccagtcctccgacccgctgaagaagcagcagccgctcgcccggagcctacggggattgtgcgagcggatcgtgctcggtggaggctcgggctgcggggcgcggggactccggggggcggggggagggaccgctctgtcggtgcccggcgccagccgcggctttgaagggtctccctcccctgcccttagcagctctgccacggactccgggaggctgcgggcggcgtcctgagggctccccagcagacccaatcggacttgagaaggtgatcgctctgctctcccaacccccttccctccccattccccccacttaactttttgtctccgttcatccgcggcttcgtcccctccccgcagacccacccgcggctgtgacaaccgcccggggcatgggccccccaacacggctcctagaggccccgcggcctcgcaagatgtgagaggccctccccgggcagaatcggagcttcaggagaggagctaataccccgccccccgtccctcacatcaggcggggtggaggtgcgcgctgagcccccgcggtgctgagcgtcccggagcgcccaatcctgggctggaacgagtagctggccggaggcgcgccgcggagagccggctgtcatgccctattgatccccctctgccccccgccaagtatgtttgggctggaccaattcgagccccaggtcaacagcaggaacgctggccagggcgagaggaactttaacgagaccggactgagcatgaacacccactttaaggccccggctttccacactggggggccccctggccctgtggatcctgctatgagcgcgctgggcgaacccccgatcttgggcatgaacatggagccctacggcttccacgcgcgcggccactcggagttgcacgcaggggggctgcaagcgcagcctgtgcacggcttctttggcggccagcagcctcaccacggccacccgggaagtcatcatccccaccagcatcacccccactttgggggcaacttcggtggcccggaccccggggcctcgtgcctgcacgggggtcgcctgctcggctacggcggcgcagccggaggcctgggcagccagccgcccttcgccgagggctatgagcacatggcggagagccaggggcctgagagcttcggcccgcagcgaccggggaacctcccggacttccacagttcaggtgcctccagccacgccgtgccggccccatgcctgccgctggaccagagccctaaccgagccgcctccttccacggcctgccgtcctccagcggctccgattcccacagtctggagccacggagggtgacgaaccaaggagccgtcgactcgctggaatacaattacccgggcgaggcgccctcgggacattttgacatgttttcgccctctgactccgaagggcagctgcctcattatgcagcgggtcgccaggttcctgggggcgctttcccgggcgcctcggccatgcccagagctgcgggcatggtgggcttgtccaaaatgcacgcccagccaccgcagcagcagccccagcagcagcagcagccccagcagcagcagcagcagcatggtgtgttctttgagaggttcagtggggccagaaagatgcctgtgggtctggagccctcagtgggctccaggcacccgttaatgcagcctccccagcaggccccgccaccccctcagcagcagcccccgcagcagccgccacagcagcagccgccgccgccacccgggcttctagtccgacaaaattcgtgcccgcctgcgctccctcggccccagcagggcgaggcgggcacgcccagcggcggcctgcaggacggaggccccatgctgcccagccagcacgcgcaattcgagtatcccatccaccggctggagaaccggagcatgcacccttattccgagcctgttttcagcatgcagcatcctcctccgcagcaggcgcccaaccagcggctgcagcatttcgacgcgcccccctacatgaacgtggccaagaggccgcgcttcgactttccgggcagcgcgggagtggaccgctgcgcttcgtggaacggcagcatgcacaacggcgctctggataatcacctctccccttccgcctacccaggcctacccggcgagttcacaccgcctgtgcccgacagcttcccttcggggccgcccctgcagcatccggccccggaccaccagtccctgcaacagcagcagcagcagcagcagcagcagcaacagcagcagcagcagcagcaacagcaacagcaacagcagcagcagcagcagcgccaaaacgcggccctcatgattaagcagatggcgtcgcggaatcagcagcagcggctgcgccagcccaacctggctcagctaggccaccccggggacgtgggccagggcggcctggtgcatggcggcccggtgggcggcttggcccagccgaactttgagcgcgaaggcggcagcacgggcgccgggcgtctgggcaccttcgagcagcaggcgccgcacttggcgcaagagagcgcgtggttctcaggtccgcatccgccgcccggagacctgctgccccgtaggatgggcggctcgggtctgcccgctgactgtggcccgcacgaccccagcctggcgccccctcctccgcctggtggctcgggggtgctgttccggggccctctgcaggagccgatgaggatgcccggagagggccacgtgcccgcgctgccttcaccgggcctgcagttcgggggcagtctgggaggcctgggtcagctgcagtcgcccggggcgggcgtggggctccccagcgctgcttcggagcgccggcccccgccgccggactttgctacgtctgcgctcgggggccagccgggctttccgtttggtgcagccggccggcagtccacgccgcacagcggtccaggcgtgaactcgccccccagcgcgggagggggcggtggcagctctggtggcggcggtggcgggggtgcctacccgccgcagcctgatttccagcccagccagcgcacctcggccagtaaattgggcgcgctctcgctgggctccttcaacaagcccagctccaaggacaacctgttcggccagagctgcctggctgcgctctccaccgcttgccagaacatgatcgccagcctcggggcccccaacctcaacgtgaccttcaacaagaagaacccgccagagggcaagaggaaactgagccagaacgagaccgacggcgcggcagtggccggcaacccgggctcggattacttcccaggagggactgctcctggggccccaggacccggaggcccgtccgggaccagtagcagcggctccaaagcctcggggccgcccaaccctccagcccagggggacggcaccagcctctcccccaactacaccctggaatccacgtcggggaatgacggcaagccggtctccgggggcggcggccggggacggggtcgcagaaaaagggacagtggtcacgtgagccctggcaccttctttgacaagtactcggcggctccggacagcgggggcgcacctggggtgagcccagggcagcagcaagcgtcaggcgcagccgtcgggggaagctccgcaggcgagacgcgcggggcaccgacgccccacgaaaaggcgctcacgtcgccatcctgggggaagggggctgagttgctcctgggggatcagccggacctcattgggtccctggacggcggggccaagtcggacagtagttcgccaaacgtgggtgagttcgcctcggacgaggtgagcacgagctacgccaatgaggacgaggtgtcgtccagctctgacaacccccaggcactagttaaagcgagcaggagtcccctggtgaccggctcgcccaaactccctccccgtggggtaggcgccggggaacacggaccgaaggcgcccccgcccgccctcggcctgggcatcatgtctaactctacctcgacccctgacagctacggcggcggtgggggcccgggccatccgggcactccgggcctggagcaggtccgcaccccgacgagcagcagcggcgccccgccacccgacgagatccaccccctggagatccttcaggcgcagatccagctacagaggcagcagttcagcatctccgaggaccagcctctggggctgaagggtggcaagaagggtgagtgcgccgtcggggcctcaggggcgcagaatggcgacagcgagctgggcagctgctgctccgaggcggtcaagagcgccatgagcaccattgacctggactcgctgatggcagagcacagcgctgcctggtacatgcccgctgacaaggccctggtggacagcgcggacgacgacaagacgttggcgccctgggagaaggccaaaccccagaaccccaacagcaaagaagcccacgacctccctgcaaacaaggcctcagcatcccagcctggcagccacttgcagtgcctgtctgtccactgcacagacgacgtgggtgacgccaaggctcgagcctccgtgcccacctggcggtccctgcattctgacatctccaacagatttgggacattcgtggctgccctaacttgaatgacaagaaagatcccctcctctaccaggcccttcctctccccctgtctgtttccttccccctcaaccttaccccacccctctgttaatttgaaagggccactattgctgagtggatgagttttttttttttctctaggttggtacctgcttagtggcatatggaccggaaagggttaatttaaagggggggaacctcaaaagtttttttaaaaaagaaacttgtctgccacagtatgttaccagtgttaacccttctgcagttagcaaacttttgcttaagcctttttcctctagatactccccatgtttcggtaatcttggcatacattttttagatgacctctttccttgttttgttttcatgctgctgtatgtccaagtattgttatttcataataagacaagagttgctttcttttttattctttttccttttcttaccccctccccttttattttctttttgctttgttcactgcttattaaaatggaaatcctggagaatagtagttctggaatattgccgggtgaaagtccaattgtcatcacaatgttatatattgacaccccagtgtcatcagtcaggcaggagccaaacaatgaatgcccctcttaggtattccgcctgggattttgttttgtctgttccctaagaaaatatattttcattcctgcaaacacagtgctcagccttcagttcccttccacttgagttctctcttctcctgctggaagccgcccctctctgcgatggacgtgaggacgtgtccagctctgctctgtgggaaggagttggaatgttcgacagcagtgttttctctccttttctgggcctcctcgcaaatgcccaggccctgcattttcacgctgtgctaagcagcctttggtctgcatgggggatggtgtgctcccagcctgcagtctttggagcaaggctgctgcccgtgccttgggtgctggagttggaggaggctgttctcagccctttcccttttctgaaagctgttcctggccgggcatcccagggaagaaggaggggactgcgtgtatctcctccacctctcccattccatccccagtccagcctgggcaaccccacccctgggagggatgaggcaccctcttgctcagcctgctcagccttctctgagcctttgcagggatctgcagactcctgagggctagaggacagagaaagagaatagaatgaaatgactttgattcctgcgccttttagttttgaactctggaattcctctgccccctccccaacatttttttggaatctcaccctgttgcaaaactagagccatgtcccaagcatctcacaaaggaataactgctctgagcagagatgagtggtggttggcaggggcaggcaactttgggtgctgctgatgcctgcaaaagccatttatggcttgtggtggggggcacatagattccccggtgggttagacaggaagtaactgatatcacttcacccaaatatataaccgtgatggttatctatttaatttcagtttttgttaacgagcgtgtcttactaaaacgctccactttgagctcccccaccccctccaggtcctcagagtttgcagatctgggctttctaaagcaagtgacctgaaggctctgggctcaccatacaacacccacgttgtttatttcaaagaacttttcagcgaagggagaggagctttcagaaaaacctcactctttcccctcccttctcccctctttccttctgccggtccttttggctggggtctgagtctgcggttctcgcctgggcagtcttgacgaggagcaaaccccgccttcagagggcagacaaagcaggtggcatgaattgatcagcgagaaaggtgtgagccgaggcagttcctgcgttctgctacaaaaggaatggaaagggaagggaatttccccccaccatgggctgtgggagagttgaccgtattctgggcaagactccatgacccctctgattctgcagtgtacagctgtttgagagcctcatcattttacttttgaaacaggaatgatttctccttaattgcttaaggccggggagcaaagtgtcttaacttctgtctttgactttcccagcgttgagtcatcaacactttgccaattagctcatggtcctggcaacctcagaaacccctgaagttttaaaaactttctcgctccccacgaccccagaatgaaacagctttaaaaatagccttaagcaaaaggatgttatttcattaaatttggtttaatggaaagaataaaagtaaatgaaaaacacaccctacacactagactccgaacactggtaatcagtactgcatagcaaactctttgggaaagaaaacgaaaatgttattgcacatgtaaaatatgaaaacttaactctgctgtgtgttaggcaatcctgtaatcttttttgactcttaaaagaaattcatttctgaaatgcttggttggaagactgtgacaatagctcatgaaattgagtgttatttttttctttcttttttaaaaaaatatgtaaagtgcagtcttctgtattcctgcatattgtatatacctgtatatgttttcctgagcagttaaataacaataaatatgacgttaatggtga

SEQ ID NO: 2420 - DNA, 4632 bp, Homo sapiens
  source 1..4632: mol_type = genomic DNA
gccctcgccgcccgcggcgccccgagcgctttgtgagcagatgcggagccgagtggagggcgcgagccagatgcggggcgacagctgacttgctgagaggaggcggggaggcgcggagcgcgcgtgtggtccttgcgccgctgacttctccactggttcctgggcaccgaaagataaacctctcataatgaaggcccccgctgtgcttgcacctggcatcctcgtgctcctgtttaccttggtgcagaggagcaatggggagtgtaaagaggcactagcaaagtccgagatgaatgtgaatatgaagtatcagcttcccaacttcaccgcggaaacacccatccagaatgtcattctacatgagcatcacattttccttggtgccactaactacatttatgttttaaatgaggaagaccttcagaaggttgctgagtacaagactgggcctgtgctggaacacccagattgtttcccatgtcaggactgcagcagcaaagccaatttatcaggaggtgtttggaaagataacatcaacatggctctagttgtcgacacctactatgatgatcaactcattagctgtggcagcgtcaacagagggacctgccagcgacatgtctttccccacaatcatactgctgacatacagtcggaggttcactgcatattctccccacagatagaagagcccagccagtgtcctgactgtgtggtgagcgccctgggagccaaagtcctttcatctgtaaaggaccggttcatcaacttctttgtaggcaataccataaattcttcttatttcccagatcatccattgcattcgatatcagtgagaaggctaaaggaaacgaaagatggttttatgtttttgacggaccagtcctacattgatgttttacctgagttcagagattcttaccccattaagtatgtccatgcctttgaaagcaacaattttatttacttcttgacggtccaaagggaaactctagatgctcagacttttcacacaagaataatcaggttctgttccataaactctggattgcattcctacatggaaatgcctctggagtgtattctcacagaaaagagaaaaaagagatccacaaagaaggaagtgtttaatatacttcaggctgcgtatgtcagcaagcctggggcccagcttgctagacaaataggagccagcctgaatgatgacattcttttcggggtgttcgcacaaagcaagccagattctgccgaaccaatggatcgatctgccatgtgtgcattccctatcaaatatgtcaacgacttcttcaacaagatcgtcaacaaaaacaatgtgagatgtctccagcatttttacggacccaatcatgagcactgctttaataggacacttctgagaaattcatcaggctgtgaagcgcgccgtgatgaatatcgaacagagtttaccacagctttgcagcgcgttgacttattcatgggtcaattcagcgaagtcctcttaacatctatatccaccttcattaaaggagacctcaccatagctaatcttgggacatcagagggtcgcttcatgcaggttgtggtttctcgatcaggaccatcaacccctcatgtgaattttctcctggactcccatccagtgtctccagaagtgattgtggagcatacattaaaccaaaatggctacacactggttatcactgggaagaagatcacgaagatcccattgaatggcttgggctgcagacatttccagtcctgcagtcaatgcctctctgccccaccctttgttcagtgtggctggtgccacgacaaatgtgtgcgatcggaggaatgcctgagcgggacatggactcaacagatctgtctgcctgcaatctacaaggttttcccaaatagtgcaccccttgaaggagggacaaggctgaccatatgtggctgggactttggatttcggaggaataataaatttgatttaaagaaaactagagttctccttggaaatgagagctgcaccttgactttaagtgagagcacgatgaatacattgaaatgcacagttggtcctgccatgaataagcatttcaatatgtccataattatttcaaatggccacgggacaacacaatacagtacattctcctatgtggatcctgtaataacaagtatttcgccgaaatacggtcctatggctggtggcactttacttactttaactggaaattacctaaacagtgggaattctagacacatttcaattggtggaaaaacatgtactttaaaaagtgtgtcaaacagtattcttgaatgttataccccagcccaaaccatttcaactgagtttgctgttaaattgaaaattgacttagccaaccgagagacaagcatcttcagttaccgtgaagatcccattgtctatgaaattcatccaaccaaatcttttattagtacttggtggaaagaacctctcaacattgtcagttttctattttgctttgccagtggtgggagcacaataacaggtgttgggaaaaacctgaattcagttagtgtcccgagaatggtcataaatgtgcatgaagcaggaaggaactttacagtggcatgtcaacatcgctctaattcagagataatctgttgtaccactccttccctgcaacagctgaatctgcaactccccctgaaaaccaaagcctttttcatgttagatgggatcctttccaaatactttgatctcatttatgtacataatcctgtgtttaagccttttgaaaagccagtgatgatctcaatgggcaatgaaaatgtactggaaattaagggaaatgatattgaccctgaagcagttaaaggtgaagtgttaaaagttggaaataagagctgtgagaatatacacttacattctgaagccgttttatgcacggtccccaatgacctgctgaaattgaacagcgagctaaatatagagtggaagcaagcaatttcttcaaccgtccttggaaaagtaatagttcaaccagatcagaatttcacaggattgattgctggtgttgtctcaatatcaacagcactgttattactacttgggtttttcctgtggctgaaaaagagaaagcaaattaaagatctgggcagtgaattagttcgctacgatgcaagagtacacactcctcatttggataggcttgtaagtgcccgaagtgtaagcccaactacagaaatggtttcaaatgaatctgtagactaccgagctacttttccagaagatcagtttcctaattcatctcagaacggttcatgccgacaagtgcagtatcctctgacagacatgtcccccatcctaactagtggggactctgatatatccagtccattactgcaaaatactgtccacattgacctcagtgctctaaatccagagctggtccaggcagtgcagcatgtagtgattgggcccagtagcctgattgtgcatttcaatgaagtcataggaagagggcattttggttgtgtatatcatgggactttgttggacaatgatggcaagaaaattcactgtgctgtgaaatccttgaacagaatcactgacataggagaagtttcccaatttctgaccgagggaatcatcatgaaagattttagtcatcccaatgtcctctcgctcctgggaatctgcctgcgaagtgaagggtctccgctggtggtcctaccatacatgaaacatggagatcttcgaaatttcattcgaaatgagactcataatccaactgtaaaagatcttattggctttggtcttcaagtagccaaaggcatgaaatatcttgcaagcaaaaagtttgtccacagagacttggctgcaagaaactgtatgctggatgaaaaattcacagtcaaggttgctgattttggtcttgccagagacatgtatgataaagaatactatagtgtacacaacaaaacaggtgcaaagctgccagtgaagtggatggctttggaaagtctgcaaactcaaaagtttaccaccaagtcagatgtgtggtcctttggcgtgctcctctgggagctgatgacaagaggagccccaccttatcctgacgtaaacacctttgatataactgtttacttgttgcaagggagaagactcctacaacccgaatactgcccagaccccttatatgaagtaatgctaaaatgctggcaccctaaagccgaaatgcgcccatccttttctgaactggtgtcccggatatcagcgatcttctctactttcattggggagcactatgtccatgtgaacgctacttatgtgaacgtaaaatgtgtcgctccgtatccttctctgttgtcatcagaagataacgctgatgatgaggtggacacacgaccagcctccttctgggagacatcatagtgctagtactatgtcaaagcaacagtccacactttgtccaatggttttttcactgcctgacctttaaaaggccatcgatattctttgctcttgccaaaattgcactattataggacttgtattgttatttaaattactggattctaaggaatttcttatctgacagagcatcagaaccagaggcttggtcccacaggccacggaccaatggcctgcag

SEQ ID NO: 2421 - DNA, 6635 bp, Homo sapiens
  source 1..6635: mol_type = genomic DNA
aggtgacccggaggccctcgccgcccgcggcgccccgagcgctttgtgagcagatgcggagccgagtggagggcgcgagccagatgcggggcgacagctgacttgctgagaggaggcggggaggcgcggagcgcgcgtgtggtccttgcgccgctgacttctccactggttcctgggcaccgaaagataaacctctcataatgaaggcccccgctgtgcttgcacctggcatcctcgtgctcctgtttaccttggtgcagaggagcaatggggagtgtaaagaggcactagcaaagtccgagatgaatgtgaatatgaagtatcagcttcccaacttcaccgcggaaacacccatccagaatgtcattctacatgagcatcacattttccttggtgccactaactacatttatgttttaaatgaggaagaccttcagaaggttgctgagtacaagactgggcctgtgctggaacacccagattgtttcccatgtcaggactgcagcagcaaagccaatttatcaggaggtgtttggaaagataacatcaacatggctctagttgtcgacacctactatgatgatcaactcattagctgtggcagcgtcaacagagggacctgccagcgacatgtctttccccacaatcatactgctgacatacagtcggaggttcactgcatattctccccacagatagaagagcccagccagtgtcctgactgtgtggtgagcgccctgggagccaaagtcctttcatctgtaaaggaccggttcatcaacttctttgtaggcaataccataaattcttcttatttcccagatcatccattgcattcgatatcagtgagaaggctaaaggaaacgaaagatggttttatgtttttgacggaccagtcctacattgatgttttacctgagttcagagattcttaccccattaagtatgtccatgcctttgaaagcaacaattttatttacttcttgacggtccaaagggaaactctagatgctcagacttttcacacaagaataatcaggttctgttccataaactctggattgcattcctacatggaaatgcctctggagtgtattctcacagaaaagagaaaaaagagatccacaaagaaggaagtgtttaatatacttcaggctgcgtatgtcagcaagcctggggcccagcttgctagacaaataggagccagcctgaatgatgacattcttttcggggtgttcgcacaaagcaagccagattctgccgaaccaatggatcgatctgccatgtgtgcattccctatcaaatatgtcaacgacttcttcaacaagatcgtcaacaaaaacaatgtgagatgtctccagcatttttacggacccaatcatgagcactgctttaataggacacttctgagaaattcatcaggctgtgaagcgcgccgtgatgaatatcgaacagagtttaccacagctttgcagcgcgttgacttattcatgggtcaattcagcgaagtcctcttaacatctatatccaccttcattaaaggagacctcaccatagctaatcttgggacatcagagggtcgcttcatgcaggttgtggtttctcgatcaggaccatcaacccctcatgtgaattttctcctggactcccatccagtgtctccagaagtgattgtggagcatacattaaaccaaaatggctacacactggttatcactgggaagaagatcacgaagatcccattgaatggcttgggctgcagacatttccagtcctgcagtcaatgcctctctgccccaccctttgttcagtgtggctggtgccacgacaaatgtgtgcgatcggaggaatgcctgagcgggacatggactcaacagatctgtctgcctgcaatctacaaggttttcccaaatagtgcaccccttgaaggagggacaaggctgaccatatgtggctgggactttggatttcggaggaataataaatttgatttaaagaaaactagagttctccttggaaatgagagctgcaccttgactttaagtgagagcacgatgaatacattgaaatgcacagttggtcctgccatgaataagcatttcaatatgtccataattatttcaaatggccacgggacaacacaatacagtacattctcctatgtggatcctgtaataacaagtatttcgccgaaatacggtcctatggctggtggcactttacttactttaactggaaattacctaaacagtgggaattctagacacatttcaattggtggaaaaacatgtactttaaaaagtgtgtcaaacagtattcttgaatgttataccccagcccaaaccatttcaactgagtttgctgttaaattgaaaattgacttagccaaccgagagacaagcatcttcagttaccgtgaagatcccattgtctatgaaattcatccaaccaaatcttttattagtggtgggagcacaataacaggtgttgggaaaaacctgaattcagttagtgtcccgagaatggtcataaatgtgcatgaagcaggaaggaactttacagtggcatgtcaacatcgctctaattcagagataatctgttgtaccactccttccctgcaacagctgaatctgcaactccccctgaaaaccaaagcctttttcatgttagatgggatcctttccaaatactttgatctcatttatgtacataatcctgtgtttaagccttttgaaaagccagtgatgatctcaatgggcaatgaaaatgtactggaaattaagggaaatgatattgaccctgaagcagttaaaggtgaagtgttaaaagttggaaataagagctgtgagaatatacacttacattctgaagccgttttatgcacggtccccaatgacctgctgaaattgaacagcgagctaaatatagagtggaagcaagcaatttcttcaaccgtccttggaaaagtaatagttcaaccagatcagaatttcacaggattgattgctggtgttgtctcaatatcaacagcactgttattactacttgggtttttcctgtggctgaaaaagagaaagcaaattaaagatctgggcagtgaattagttcgctacgatgcaagagtacacactcctcatttggataggcttgtaagtgcccgaagtgtaagcccaactacagaaatggtttcaaatgaatctgtagactaccgagctacttttccagaagatcagtttcctaattcatctcagaacggttcatgccgacaagtgcagtatcctctgacagacatgtcccccatcctaactagtggggactctgatatatccagtccattactgcaaaatactgtccacattgacctcagtgctctaaatccagagctggtccaggcagtgcagcatgtagtgattgggcccagtagcctgattgtgcatttcaatgaagtcataggaagagggcattttggttgtgtatatcatgggactttgttggacaatgatggcaagaaaattcactgtgctgtgaaatccttgaacagaatcactgacataggagaagtttcccaatttctgaccgagggaatcatcatgaaagattttagtcatcccaatgtcctctcgctcctgggaatctgcctgcgaagtgaagggtctccgctggtggtcctaccatacatgaaacatggagatcttcgaaatttcattcgaaatgagactcataatccaactgtaaaagatcttattggctttggtcttcaagtagccaaaggcatgaaatatcttgcaagcaaaaagtttgtccacagagacttggctgcaagaaactgtatgctggatgaaaaattcacagtcaaggttgctgattttggtcttgccagagacatgtatgataaagaatactatagtgtacacaacaaaacaggtgcaaagctgccagtgaagtggatggctttggaaagtctgcaaactcaaaagtttaccaccaagtcagatgtgtggtcctttggcgtgctcctctgggagctgatgacaagaggagccccaccttatcctgacgtaaacacctttgatataactgtttacttgttgcaagggagaagactcctacaacccgaatactgcccagaccccttatatgaagtaatgctaaaatgctggcaccctaaagccgaaatgcgcccatccttttctgaactggtgtcccggatatcagcgatcttctctactttcattggggagcactatgtccatgtgaacgctacttatgtgaacgtaaaatgtgtcgctccgtatccttctctgttgtcatcagaagataacgctgatgatgaggtggacacacgaccagcctccttctgggagacatcatagtgctagtactatgtcaaagcaacagtccacactttgtccaatggttttttcactgcctgacctttaaaaggccatcgatattctttgctcttgccaaaattgcactattataggacttgtattgttatttaaattactggattctaaggaatttcttatctgacagagcatcagaaccagaggcttggtcccacaggccacggaccaatggcctgcagccgtgacaacactcctgtcatattggagtccaaaacttgaattctgggttgaattttttaaaaatcaggtaccacttgatttcatatgggaaattgaagcaggaaatattgagggcttcttgatcacagaaaactcagaagagatagtaatgctcaggacaggagcggcagccccagaacaggccactcatttagaattctagtgtttcaaaacacttttgtgtgttgtatggtcaataacatttttcattactgatggtgtcattcacccattaggtaaacattcccttttaaatgtttgtttgttttttgagacaggatctcactctgttgccagggctgtagtgcagtggtgtgatcatagctcactgcaacctccacctcccaggctcaagcctcccgaatagctgggactacaggcgcacaccaccatccccggctaatttttgtattttttgtagagacggggttttgccatgttgccaaggctggtttcaaactcctggactcaagaaatccacccacctcagcctcccaaagtgctaggattacaggcatgagccactgcgcccagcccttataaatttttgtatagacattcctttggttggaagaatatttataggcaatacagtcaaagtttcaaaatagcatcacacaaaacatgtttataaatgaacaggatgtaatgtacatagatgacattaagaaaatttgtatgaaataatttagtcatcatgaaatatttagttgtcatataaaaacccactgtttgagaatgatgctactctgatctaatgaatgtgaacatgtagatgttttgtgtgtatttttttaaatgaaaactcaaaataagacaagtaatttgttgataaatatttttaaagataactcagcatgtttgtaaagcaggatacattttactaaaaggttcattggttccaatcacagctcataggtagagcaaagaaagggtggatggattgaaaagattagcctctgtctcggtggcaggttcccacctcgcaagcaattggaaacaaaacttttggggagttttattttgcattagggtgtgttttatgttaagcaaaacatactttagaaacaaatgaaaaaggcaattgaaaatcccagctatttcacctagatggaatagccaccctgagcagaactttgtgatgcttcattctgtggaattttgtgcttgctactgtatagtgcatgtggtgtaggttactctaactggttttgtcgacgtaaacatttaaagtgttatattttttataaaaatgtttatttttaatgatatgagaaaaattttgttaggccacaaaaacactgcactgtgaacattttagaaaaggtatgtcagactgggattaatgacagcatgattttcaatgactgtaaattgcgataaggaaatgtactgattgccaatacaccccaccctcattacatcatcaggacttgaagccaagggttaacccagcaagctacaaagagggtgtgtcacactgaaactcaatagttgagtttggctgttgttgcaggaaaatgattataactaaaagctctctgatagtgcagagacttaccagaagacacaaggaattgtactgaagagctattacaatccaaatattgccgtttcataaatgtaataagtaatactaattcacagagtattgtaaatggtggatgacaaaagaaaatctgctctgtggaaagaaagaactgtctctaccagggtcaagagcatgaacgcatcaatagaaagaactcggggaaacatcccatcaacaggactacacacttgtatatacattcttgagaacactgcaatgtgaaaatcacgtttgctatttataaacttgtccttagattaatgtgtctggacagattgtgggagtaagtgattcttctaagaattagatacttgtcactgcctatacctgcagctgaactgaatggtacttcgtatgttaatagttgttctgataaatcatgcaattaaagtaaagtgatgcaacatcttgta

SEQ ID NO: 2422 - DNA, 2295 bp, Homo sapiens
  source 1..2295: mol_type = genomic DNA
atgaaggcccccgctgtgcttgcacctggcatcctcgtgctcctgtttaccttggtgcagaggagcaatggggagtgtaaagaggcactagcaaagtccgagatgaatgtgaatatgaagtatcagcttcccaacttcaccgcggaaacacccatccagaatgtcattctacatgagcatcacattttccttggtgccactaactacatttatgttttaaatgaggaagaccttcagaaggttgctgagtacaagactgggcctgtgctggaacacccagattgtttcccatgtcaggactgcagcagcaaagccaatttatcaggaggtgtttggaaagataacatcaacatggctctagttgtcgacacctactatgatgatcaactcattagctgtggcagcgtcaacagagggacctgccagcgacatgtctttccccacaatcatactgctgacatacagtcggaggttcactgcatattctccccacagatagaagagcccagccagtgtcctgactgtgtggtgagcgccctgggagccaaagtcctttcatctgtaaaggaccggttcatcaacttctttgtaggcaataccataaattcttcttatttcccagatcatccattgcattcgatatcagtgagaaggctaaaggaaacgaaagatggttttatgtttttgacggaccagtcctacattgatgttttacctgagttcagagattcttaccccattaagtatgtccatgcctttgaaagcaacaattttatttacttcttgacggtccaaagggaaactctagatgctcagacttttcacacaagaataatcaggttctgttccataaactctggattgcattcctacatggaaatgcctctggagtgtattctcacagaaaagagaaaaaagagatccacaaagaaggaagtgtttaatatacttcaggctgcgtatgtcagcaagcctggggcccagcttgctagacaaataggagccagcctgaatgatgacattcttttcggggtgttcgcacaaagcaagccagattctgccgaaccaatggatcgatctgccatgtgtgcattccctatcaaatatgtcaacgacttcttcaacaagatcgtcaacaaaaacaatgtgagatgtctccagcatttttacggacccaatcatgagcactgctttaataggacacttctgagaaattcatcaggctgtgaagcgcgccgtgatgaatatcgaacagagtttaccacagctttgcagcgcgttgacttattcatgggtcaattcagcgaagtcctcttaacatctatatccaccttcattaaaggagacctcaccatagctaatcttgggacatcagagggtcgcttcatgcaggttgtggtttctcgatcaggaccatcaacccctcatgtgaattttctcctggactcccatccagtgtctccagaagtgattgtggagcatacattaaaccaaaatggctacacactggttatcactgggaagaagatcacgaagatcccattgaatggcttgggctgcagacatttccagtcctgcagtcaatgcctctctgccccaccctttgttcagtgtggctggtgccacgacaaatgtgtgcgatcggaggaatgcctgagcgggacatggactcaacagatctgtctgcctgcaatctacaaggttttcccaaatagtgcaccccttgaaggagggacaaggctgaccatatgtggctgggactttggatttcggaggaataataaatttgatttaaagaaaactagagttctccttggaaatgagagctgcaccttgactttaagtgagagcacgatgaatacattgaaatgcacagttggtcctgccatgaataagcatttcaatatgtccataattatttcaaatggccacgggacaacacaatacagtacattctcctatgtggatcctgtaataacaagtatttcgccgaaatacggtcctatggctggtggcactttacttactttaactggaaattacctaaacagtgggaattctagacacatttcaattggtggaaaaacatgtactttaaaaagtgtgtcaaacagtattcttgaatgttataccccagcccaaaccatttcaactgagtttgctgttaaattgaaaattgacttagccaaccgagagacaagcatcttcagttaccgtgaagatcccattgtctatgaaattcatccaaccaaatcttttattaggcatgtcaacatcgctctaattcagagataa

SEQ ID NO: 2423 - DNA, 1460 bp, Homo sapiens
  source 1..1460: mol_type = genomic DNA
gcttatatccttgggtgaaatgtgttgcatctacatatatatttacaaacacacctacgtacctatagtgggcattttggttgtgtatatcatgggactttgttggacaatgatggcaagaaaattcactgtgctgtgaaatccttgaacagaatcactgacataggagaagtttcccaatttctgaccgagggaatcatcatgaaagattttagtcatcccaatgtcctctcgctcctgggaatctgcctgcgaagtgaagggtctccgctggtggtcctaccatacatgaaacatggagatcttcgaaatttcattcgaaatgagactcataatccaactgtaaaagatcttattggctttggtcttcaagtagccaaaggcatgaaatatcttgcaagcaaaaagtttgtccacagagacttggctgcaagaaactgtatgctggatgaaaaattcacagtcaaggttgctgattttggtcttgccagagacatgtatgataaagaatactatagtgtacacaacaaaacaggtgcaaagctgccagtgaagtggatggctttggaaagtctgcaaactcaaaagtttaccaccaagtcagatgtgtggtcctttggcgtgctcctctgggagctgatgacaagaggagccccaccttatcctgacgtaaacacctttgatataactgtttacttgttgcaagggagaagactcctacaacccgaatactgcccagaccccttatatgaagtaatgctaaaatgctggcaccctaaagccgaaatgcgcccatccttttctgaactggtgtcccggatatcagcgatcttctctactttcattggggagcactatgtccatgtgaacgctacttatgtgaacgtaaaatgtgtcgctccgtatccttctctgttgtcatcagaagataacgctgatgatgaggtggacacacgaccagcctccttctgggagacatcatagtgctagtactatgtcaaagcaacagtccacactttgtccaatggttttttcactgcctgacctttaaaaggccatcgatattctttgctcttgccaaaattgcactattataggacttgtattgttatttaaattactggattctaaggaatttcttatctgacagagcatcagaaccagaggcttggtcccacaggccacggaccaatggcctgcagccgtgacaacactcctgtcatattggagtccaaaacttgaattctgggttgaattttttaaaaatcaggtaccacttgatttcatatgggaaattgaagcaggaaatattgagggcttcttgatcacagaaaactcagaagagatagtaatgctcaggacaggagcggcagccccagaacaggccactcatttagaattctagtgtttcaaaacacttttgtgtgttgtatggtcaataacatttttcattactgatg

SEQ ID NO: 2424 - DNA, 6177 bp, Homo sapiens
  source 1..6177: mol_type = genomic DNA
ggcccaagccgccattgttccgccgagggaggacagcggggcctggcgctggcgccgagacgccgcttagcggccgccactggagacactccctcccgcctcccgggtctcctggcggcggcggagtgaggctgacagcggggaacctgggagacccctccgccctccccgcggtggcagcggccgatccccggctccggcgcgagggacggccgcgatgcgctcggcctgaggttacccggcccggcccttcctcgcttccctcgactattccactgcgtctccgcgccccggcgtcatcctgcgagtccctctgacgggagggaagatggctgcacggagctggcaggacgagctggcccagcaggccgaggagggctcggcccggctgcgggaaatgctctcggtcggcctaggctttctgcgcaccgagctgggcctcgacctggggctggagccgaaacggtaccccggctgggtgatcctggtgggcactggcgcgctcgggctgctgctgctgtttctgctgggctacggctgggccgcggcttgcgccggcgcccgcaaaaagcggaggagcccgccccgcaagcgggaggaggcggcggccgtgccggccgcggcccccgacgacctggccttgctgaagaatctccggagcgaggaacagaagaagaagaaccggaagaaactgtccgagaagcccaaaccaaatgggcggactgttgaagtggctgagggtgaagctgttcgaacacctcaaagtgtaacagcaaagcagccaccagagattgacaagaaaaatgaaaagtcaaagaaaaataagaagaaatcaaagtcagatgctaaagcagtgcaaaacagttcacgccatgatggaaaggaagttgatgaaggagcctgggaaactaaaattagtcacagagagaaacgacagcagcgtaaacgtgataaggtgctgactgattctggttcattggattcaactatccctgggatagaaaataccatcacagttaccaccgagcaacttacaaccgcatcatttcctgttggttccaagaagaataaaggtgattctcatctaaatgttcaagttagcaactttaaatctggaaaaggagattctacacttcaggtttcttcaggattgaatgaaaacctcactgtcaatggaggaggctggaatgaaaagtctgtaaaactctcctcacagatcagtgcaggtgaggagaagtggaactccgtttcacctgcttctgcaggaaagaggaaaactgagccatctgcctggagtcaagacactggagatgctaatacaaatggaaaagactggggaaggagttggagtgaccgttcaatattttctggcattgggtctactgctgagccagtttctcagtctaccacttctgattatcagtgggatgttagccgtaatcaaccctatatcgatgatgaatggtctgggttaaatggtctgtcttctgctgatcccaactctgattggaatgcaccagcagaagagtggggcaattgggtagacgaagaaagagcttcacttctaaagtcccaggaaccaattcctgatgatcaaaaggtctcagatgatgataaagaaaagggagagggagctcttccaactgggaaatccaaaaagaaaaaaaagaaaaagaagaagcaaggtgaagataactctactgcacaggacacagaagaattagaaaaagagattagagaagaccttccagtgaatacctctaaaacccgtccaaaacaggaaaaagctttttccttgaagaccataagcactagtgatccagccgaagtactcgtcaaaaatagccagcctatcaagactcttccacctgctacttctaccgagccatctgtaatcttatcaaaaagtgattctgacaagagctcttcccaagtgccgccaatactacaagagacagataaatccaagtcaaataccaagcaaaatagtgtgcctccttcacagaccaagtctgaaactagctgggaatctcccaaacaaataaaaaagaagaaaaaagccagacgagaaacgtgaaattttttttcctgaattggacatgtgtttgcaaacacttgtcttgaagattatgctgtttatgcaataatttgtgaacatgtacagagttttatataaatttaaaccaatttttaaaacaaaactgcggacaccaccataaaaatggaatcaaaagaaagttaatttatgaaattaagaggtcagcagaatatactcagtgatggaagacacttgggaaagtctttttaatagaacaagaacgatcttaatttaagaatattatcctggtttaacaacagtgccctgtttacaacagattgtgccctatctcatctgcagccgaggaataaaggattctgattagaaagagggttgcctacagattagtaagcaattccttggatcttatgcacagaacttgtaccatttgaatctgttttatgcttaaatcaaagtgctttgatcaaatgcataacctgccatatctttacatatttgttggtagcaatttgtattaaagaaatcacaagtgcaaataaaaagtcatttatcatttgtttaactaaactgtcatggtttagtttacaatttttaaaaagttcttaaaatactgaaaatgcagttgacacttgtgtatggcttatgaagttatttttgatagtcttacattacttgaattgttcaaagtacagtatattttaaattaagaaaagtgaactatatgtatttgttttatacatttaaggcttagactcataaataatgctattgtttatgatttgaaaactttcaggcaaaatccaatttacatttttcccttccctagcaattacttttttccagcttcaactcttcttagttactaatactttgttgactttaaaaatgaaatcattcacaaacttttggtatatgatggagaatgaaaaactagagtcagacagctttaattgacattgtcaacacctccagttatcaggaatacatttttttactgccttaacctgtagtgcgtagaatatgcatcaatttcttgaaggagattcatgtttttataagaattttcatgtaattattgcaattgtggtcaaataaggaacgtttcctgcttgaaattatattgatttaaatgatgtgtgagatgtttcaccattttcaggcactgtgtaattctattgtaataaactggcaggtatctttgtaactataaatagtgcatgctcagccatgtacactgtaaatagcctttaccaaacgtgtttgacaaggaccataattaacatcacttagtgaattgtgataaagaaaaaaaagccatgatttattcgatgtgattggcttgtttttatgtggcgccaagaacgaacctgtttaacagctgtaaccaatggtactgatctatccatccaatgttgtcattatatttgactgtggttcaacagtattgcgttgtcagactaggaaagctaaacgaacaaaatggttttagttttgctgaagactggccttattaatggacagctttcctaacaagagattattaacttttatcaggtgttaacatctgtttcaggaacatggcagtatgtttacatgtcagaagttttgtttaattctatggtatttctaaattgacttgtttaaataaattcagcaaatggatagcattgttttttatttgcttcaatatgggggtagataatagctaaagagccaaggatgaatttcttcaaatgactttattctgttagctttacataggtgttggaggattcctaaggtgtcagcattttgtaaaggtaccacaaaggagaagttgatagggaatctaattttagaatgtgccaaatggtctgtgctcaacaatataattgaactctctcaactctacctcaccatttctttatctcaaaattctgttggctttgtcaaacgttggattttatttctgcagcctagtatctccccattctaccacctatgccagatgttaaagacagcagatgttttgaggagaatggcattgtggagatgcagagatgcgttgctaagttgaggtggatccagtatagagatacctctatttcttctttatggctcaagagctaggacttggattttgttttaagagatggcagctggccgggtgcagtggctcacgtctgtaatcccagcactttgggaggccgaggcaggtggatcacgaggtcaggagttcaagaccagcctggccaagagggtgaaaccccatctttactaaaaatacaaaaaaaaaaattagctgggtgtggtggtgggctcctgtaatcccagctactcaggaggctaaggcagagaatcatttgaacccaggagacggagtttgcaaagccaagatcgtgccactgcactccagcctgggcaacagaaggagactccgtctcaaaaaaaaaaaaaagatggcagctatataaatgataaaattaattacattctctttcacatgcatgaggtgcaaactctgtcacaaagtattttaattaccttttaccttgtttcatagatctttatgtgacataaaaacagtttctggcacggtggctcacgcctgtaatcctagcactttgggaggctgaggcaggtggatcacctgaggtcaggagtttgagaccagcctggccaatatggtgaaaccccatctctacaaaatttgcaaaaagtagatgggtgtggtagtgggcgcctgtaatcccagctactcaggaggttgaggcagagaatcgcttgaacccggggggtggaggttgcagtgagctgagatcgcaccactgcactccagcatgaaagagcgagactcaatctcaaaaaaaaaaaagtttctggcacctgaacaggaactggtttccatcatcaactcagaaagcactaaaatctaggtggtgattcagggaggagcaggggaagacagcctcctatggtggcatgaataagatgcttccagaactagtagggaaataactaacctcttcaggctttatcaggcctggaggggaaccttgctcatgttagcaagaaaggtatcctagagaagccactcaaaaggctccctaatccagcctgtctccacatacatactgaaaattcttccctactctgaggcagggtgtagtggtttaggggtttctccagactggaatcctacctatctgtaccgacaattgagcaaacaacagttgagagagtccaaaaaaaaaagtattaaaatgtgattgatgtaatttaccatgtttactttatgcatgcattttattggggaggggaggtcagaataattcacccaaatctagtggtcttatttcataggctaatctggtttatatttgcattaaagatactggagggcaatatttacagagtttagtttttcttaattaaaaacagtcctctattaatatagtgtgaaatatctttcaaaatttagagtttaggtttaagatgtctactagatatctttaagattttcctgtaaactcactgcacaaactggaattactttccaaaagacttagggaatgcaaatatgttactcataagatgcattgagtattgtaaataaaacaaaccatttttgatttgtttaaattgctcgttacagttctcttgtggggagggactttgtcagtcattttgcatcttaagctagactaaactttttgttgttgttttcctaaaaccataggtgcaagctttgccgctgggaagtcatattgaattaagcacttttgaaaatgtcactgtttgtgacacacaatgttctctacagaaaacttcttctatcttatgtcattttagcagtagatgtagctgcctgccaccaggtgcaatatgtcatttgcatcagccttttcagttaaggaaattaaaacttggcatgcattagttcatatgtatgaggttggctgtgtccccaaacagcaattgcttgtacaagatagaagtttgcttctcagctgggcatggtggctcatgcctgtaatccaagctctttgggaggccaacgcgggaggattgtttgagcccaggagtttgaaaccatcctgagcaatagagagacccccatctcgacaaaaaaaaaaaaa

SEQ ID NO: 2425 - DNA, 2876 bp, Homo sapiens
  source 1..2876: mol_type = genomic DNA
tcctcctcttcctctcccgcccgcgccgcggccctcccgtccctgcgcggcctcggcggcctcggcggcggcggcggcggcggcggcggcagcagcgcggcccctttaaacgcctgcggcgccccccgcccccgccatcgcgcctccattttcccggccgcccgcgccgagcgccgcgcccgccccgggcccctccgccgccgccggcccggacatggccgccaacatgtacagggtcggagactacgtctactttgagaactcctccagcaacccatacctgatccggagaatcgaggagctcaacaagacggccaatgggaacgtggaggccaaagtggtgtgcttctaccggaggcgggacatctccagcaccctcatcgccctggccgacaagcacgcaaccctgtcagtctgctataaggccggaccgggggcggacaacggcgaggaaggggaaatagaagaggaaatggagaacccggaaatggtggacctgcccgagaaactaaagcaccagctgcggcatcgggagctgttcctctcccggcagctggagtctctgcccgccacgcacatcaggggcaagtgcagcgtcaccctgctcaacgagaccgagtcgctcaagtcctacctggagcgggaggatttcttcttctattctctagtctacgacccacagcagaagaccctgctggcagataaaggagagattcgagtaggaaaccggtaccaggcagacatcaccgacttgttaaaagaaggcgaggaggatggccgagaccagtccaggttggagacccaggtgtgggaggcgcacaacccactcacagacaagcagatcgaccagttcctggtggtggcccgctctgtgggcaccttcgcacgggccctggactgcagcagctccgtccgacagcccagcctgcacatgagcgccgcagctgcctcccgagacatcaccctgttccacgccatggatactctccacaagaacatctacgacatctccaaggccatctcggcgctggtgccgcagggcgggcccgtgctctgcagggacgagatggaggagtggtctgcatcagaggccaaccttttcgaggaagccctggaaaaatatgggaaggatttcacggacattcagcaagattttctcccgtggaagtcgctgaccagcatcattgagtactactacatgtggaagaccaccgacagatacgtgcagcagaaacgcttgaaagcagctgaagctgagagcaagttaaagcaagtttatattcccaactataacaagccaaatccgaaccaaatcagcgtcaacaacgtcaaggccggtgtggtgaacggcacgggggcgccgggccagagccctggggctggccgggcctgcgagagctgttacaccacacagtcttaccagtggtattcttggggtccccctaacatgcagtgtcgtctctgcgcatcttgttggacatattggaagaaatatggtggcttgaaaatgccaacccggttagatggagagaggccaggaccaaaccgcagtaacatgagtccccacggcctcccagcccggagcagcgggagccccaagtttgccatgaagaccaggcaggctttctatctgcacacgacgaagctgacgcggatcgcccggcgcctgtgccgtgagatcctgcgcccgtggcacgctgcgcggcacccctacctgcccatcaacagcgcggccatcaaggccgagtgcacggcgcggctgcccgaagcctcccagagcccgctggtgctgaagcaggcggtacgcaagccgctggaagccgtgcttcggtatcttgagacccacccccgcccccccaagcctgaccccgtgaaaagcgtgtccagcgtgctcagcagcctgacgcccgccaaggtggcccccgtcatcaacaacggctcccccaccatcctgggcaagcgcagctacgagcagcacaacggggtggacggcaacatgaagaagcgcctcttgatgcccagtaggggtctggcaaaccacggacaggccaggcacatgggaccaagccggaacctcctgctcaacgggaagtcctaccccaccaaagtgcgcctgatccgggggggctccctgcccccagtcaagcggcggcggatgaactggatcgacgccccggatgacgtgttctacatggccacagaggagaccaggaagatccgcaagctgctctcatcctcggaaaccaagcgtgctgcccgccggccctacaagcccatcgccctgcgccagagccaggccctgccgccgcggccaccgccacctgcgcccgtcaacgacgagcccatcgtcatcgaggactaggggccgcccccacctgcggccgccccccgcccctcgcccgcccacacggccccttcccagccagcccgccgcccgcccctcagtttggtagtgccccacctcccgccctcacctgcagagaaacgcgctccttggcggacactgggggaggagaggaagaagcgcggctaacttattccgagaatgccgaggagttgtcgtttttagctttgtgtttactttttggctggagcggagatgaggggccaccccgtgcccctgtgctgcggggccttttgcccggaggccgggccctaaggttttgttgtgttctgttgaaggtgccattttaaattttatttttattactttttttgtagatgaacttgagctctgtaacttacacctggaatgttaggatcgtgcggccgcggccggccgagctgcctggcggggttggcccttgtcttttcaagtaattttcatattaaacaaaaacaaagaaaaaaaatcttataaaaaggaaaaaaaccaa

SEQ ID NO: 2426 - DNA, 2844 bp, Homo sapiens
  source 1..2844: mol_type = genomic DNA
gctcctcctcttcctctcccgcccgcgccgcggccctcccgtccctgcgcggcctcggcggcctcggcggcggcggcggcggcggcggcggcagcagcgcggcccctttaaacgcctgcggcgccccccgcccccgccatcgcgcctccattttcccggccgcccgcgccgagcgccgcgcccgccccgggcccctccgccgccgccggcccggacatggccgccaacatgtacagggtcggagactacgtctactttgagaactcctccagcaacccatacctgatccggagaatcgaggagctcaacaagacggccaatgggaacgtggaggccaaagtggtgtgcttctaccggaggcgggacatctccagcaccctcatcgccctggccgacaagcacgcaaccctgtcagtctgctataaggccggaccgggggcggacaacggcgaggaaggggaaatagaagaggaaatggagaacccggaaatggtggacctgcccgagaaactaaagcaccagctgcggcatcgggagctgttcctctcccggcagctggagtctctgcccgccacgcacatcaggggcaagtgcagcgtcaccctgctcaacgagaccgagtcgctcaagtcctacctggagcgggaggatttcttcttctattctctagtctacgacccacagcagaagaccctgctggcagataaaggagagattcgagtaggaaaccggtaccaggcagacatcaccgacttgttaaaagaaggcgaggaggatggccgagaccagtccaggttggagacccaggtgtgggaggcgcacaacccactcacagacaagcagatcgaccagttcctggtggtggcccgctctgtgggcaccttcgcacgggccctggactgcagcagctccgtccgacagcccagcctgcacatgagcgccgcagctgcctcccgagacatcaccctgttccacgccatggatactctccacaagaacatctacgacatctccaaggccatctcggcgctggtgccgcagggcgggcccgtgctctgcagggacgagatggaggagtggtctgcatcagaggccaaccttttcgaggaagccctggaaaaatatgggaaggatttcacggacattcagcaagattttctcccgtggaagtcgctgaccagcatcattgagtactactacatgtggaagaccaccgacagatacgtgcagcagaaacgcttgaaagcagctgaagctgagagcaagttaaagcaagtttatattcccaactataacaagccaaatccgaaccaaatcagcgtcaacaacgtcaaggccggtgtggtgaacggcacgggggcgccgggccagagccctggggctggccgggcctgcgagagctgttacaccacacagtcttaccagtggtattcttggggtccccctaacatgcagtgtcgtctctgcgcatcttgttggacatattggaagaaatatggtggcttgaaaatgccaacccggttagatggagagaggccaggaccaaaccgcagtaacatgagtccccacggcctcccagcccggagcagcgggagccccaagtttgccatgaagaccaggcaggctttctatctgcacacgacgaagctgacgcggatcgcccggcgcctgtgccgtgagatcctgcgcccgtggcacgctgcgcggcacccctacctgcccatcaacagcgcggccatcaaggccgagtgcacggcgcggctgcccgaagcctcccagagcccgctggtgctgaagcaggcggtacgcaagccgctggaagccgtgcttcggtatcttgagacccacccccgcccccccaagcctgaccccgtgaaaagcgtgtccagcgtgctcagcagcctgacgcccgccaaggtggcccccgtcatcaacaacggctcccccaccatcctgggcaagcgcagctacgagcagcacaacggggtggacggcaacatgaagaagcgcctcttgatgcccagtaggggcacgtcctcaggtctggcaaaccacggacaggccaggcacatgggaccaagccggaacctcctgctcaacgggaagtcctaccccaccaaagtgcgcctgatccgggggggctccctgcccccagtcaagcggcggcggatgaactggatcgacgccccggatgacgtgttctacatggccacagaggagaccaggaagatccgcaagctgctctcatcctcggaaaccaagcgtgctgcccgccggccctacaagcccatcgccctgcgccagagccaggccctgccgccgcggccaccgccacctgcgcccgtcaacgacgagcccatcgtcatcgaggactaggggccgcccccacctgcggccgccccccgcccctcgcccgcccacacggccccttcccagccagcccgccgcccgcccctcagtttggtagtgccccacctcccgccctcacctgcagagaaacgcgctccttggcggacactgggggaggagaggaagaagcgcggctaacttattccgagaatgccgaggagttgtcgtttttagctttgtgtttactttttggctggagcggagatgaggggccaccccgtgcccctgtgctgcggggccttttgcccggaggccgggccctaaggttttgttgtgttctgttgaaggtgccattttaaattttatttttattactttttttgtagatgaacttgagctctgtaacttacacctggaatgttaggatcgtgcggccgcggccggccgagctgcctggcggggttggcccttgtcttttcaagtaattttcatatt

SEQ ID NO: 2427 - DNA, 1673 bp, Homo sapiens
  source 1..1673: mol_type = genomic DNA
cgctgaccagcatcattgagtactactacatgtggaagaccaccgacagatacgtgcagcagaaacgcttgaaagcagctgaagctgagagcaagttaaagcaagtttatattcccaactataacaagccaaatccgaaccaaatcagcgtcaacaacgtcaaggccggtgtggtgaacggcacgggggcgccgggccagagccctggggctggccgggcctgcgagagctgttacaccacacagtcttaccagtggtattcttggggtccccctaacatgcagtgtcgtctctgcgcatcttgttggacatattggaagaaatatggtggcttgaaaatgccaacccggttagatggagagaggccaggaccaaaccgcagtaacatgagtccccacggcctcccagcccggagcagcgggagccccaagtttgccatgaagaccaggcaggctttctatctgcacacgacgaagctgacgcggatcgcccggcgcctgtgccgtgagatcctgcgcccgtggcacgctgcgcggcacccctacctgcccatcaacagcgcggccatcaaggccgagtgcacggcgcggctgcccgaagcctcccagagcccgctggtgctgaagcaggcggtacgcaagccgctggaagccgtgcttcggtatcttgagacccacccccgcccccccaagcctgaccccgtgaaaagcgtgtccagcgtgctcagcagcctgacgcccgccaaggtggcccccgtcatcaacaacggctcccccaccatcctgggcaagcgcagctacgagcagcacaacggggtggacggcaacatgaagaagcgcctcttgatgcccagtaggggcacttacctgggtctggcaaaccacggacaggccaggcacatgggaccaagccggaacctcctgctcaacgggaagtcctaccccaccaaagtgcgcctgatccgggggggctccctgcccccagtcaagcggcggcggatgaactggatcgacgccccggatgacgtgttctacatggccacagaggagaccaggaagatccgcaagctgctctcatcctcggaaaccaagcgtgctgcccgccggccctacaagcccatcgccctgcgccagagccaggccctgccgccgcggccaccgccacctgcgcccgtcaacgacgagcccatcgtcatcgaggactaggggccgcccccacctgcggccgccccccgcccctcgcccgcccacacggccccttcccagccagcccgccgcccgcccctcagtttggtagtgccccacctcccgccctcacctgcagagaaacgcgctccttggcggacactgggggaggagaggaagaagcgcggctaacttattccgagaatgccgaggagttgtcgtttttagctttgtgtttactttttggctggagcggagatgaggggccaccccgtgcccctgtgctgcggggccttttgcccggaggccgggccctaaggttttgttgtgttctgttgaaggtgccattttaaattttatttttattactttttttgtagatgaacttgagctctgtaacttacacctggaatgttaggatcgtgcggccgcggccggccgagctgcctggcggggttggcccttgtcttttcaagtaattttcatatt

SEQ ID NO: 2428 - DNA, 2144 bp, Homo sapiens
  source 1..2144: mol_type = genomic DNA
ccgccgccgccggcccggacatggccgccaacatgtacagggtcggagactacgtctactttgagaactcctccagcaacccatacctgatccggagaatcgaggagctcaacaagacggccaatgggaacgtggaggccaaagtggtgtgcttctaccggaggcgggacatctccagcaccctcatcgccctggccgacaagcacgcaaccctgtcagtctgctataaggccggaccgggggcggacaacggcgaggaaggggaaatagaagaggaaatggagaacccggaaatggtggacctgcccgagaaactaaagcaccagctgcggcatcgggagctgttcctctcccggcagctggagtctctgcccgccacgcacatcaggggcaagtgcagcgtcaccctgctcaacgagaccgagtcgctcaagtcctacctggagcgggaggatttcttcttctattctctagtctacgacccacagcagaagaccctgctggcagataaaggagagattcgagtaggaaaccggtaccaggcagacatcaccgacttgttaaaagaaggcgaggaggatggccgagaccagtccaggttggagacccaggtgtgggaggcgcacaacccactcacagacaagcagatcgaccagttcctggtggtggcccgctctgtgggcaccttcgcacgggccctggactgcagcagctccgtccgacagcccagcctgcacatgagcgccgcagctgcctcccgagacatcaccctgttccacgccatggatactctccacaagaacatctacgacatctccaaggccatctcggcgctggtgccgcagggcgggcccgtgctctgcagggacgagatggaggagtggtctgcatcagaggccaaccttttcgaggaagccctggaaaaatatgggaaggatttcacggacattcagcaagattttctcccgtggaagtcgctgaccagcatcattgagtactactacatgtggaagaccaccgacagatacgtgcagcagaaacgcttgaaagcagctgaagctgagagcaagttaaagcaagtttatattcccaactataacaagccaaatccgaaccaaatcagcgtcaacaacgtcaaggccggtgtggtgaacggcacgggggcgccgggccagagccctggggctggccgggcctgcgagagctgttacatgtcgtctctgcgcatcttgttggacatattggaagaaatatggtggcttgaaaatgccaacccggttagatggagagaggccaggaccaaaccgcagtaacatgagtccccacggcctcccagcccggagcagcgggagccccaagtttgccatgaagaccaggcaggctttctatctgcacacgacgaagctgacgcggatcgcccggcgcctgtgccgtgagatcctgcgcccgtggcacgctgcgcggcacccctacctgcccatcaacagcgcggccatcaaggccgagtgcacggcgcggctgcccgaagcctcccagagcccgctggtgctgaagcaggcggtacgcaagccgctggaagccgtgcttcggtatcttgagacccacccccgcccccccaagcctgaccccgtgaaaagcgtgtccagcgtgctcagcagcctgacgcccgccaaggtggcccccgtcatcaacaacggctcccccaccatcctgggcaagcgcagctacgagcagcacaacggggtggacggcaacatgaagaagcgcctcttgatgcccagtaggggtctggcaaaccacggacaggccaggcacatgggaccaagccggaacctcctgctcaacgggaagtcctaccccaccaaagtgcgcctgatccgggggggctccctgcccccagtcaagcggcggcggatgaactggatcgacgccccggatgacgtgttctacatggccacagaggagaccaggaagatccgcaagctgctctcatcctcggaaaccaagcgtgctgcccgccggccctacaagcccatcgccctgcgccagagccaggccctgccgccgcggccaccgccacctgcgcccgtcaacgacgagcccatcgtcatcgaggactaggggccgcccccacctgcggccgc

SEQ ID NO: 2429 - DNA, 4758 bp, Homo sapiens
  source 1..4758: mol_type = genomic DNA
ccccgggagcccagccagagcgagcgccggggccgggcgcgcaggagtgaaaaggaggcggcggccgcagctgcgagcaacagatccggacgccgcgagctgacccgctctgctgttgggcgatttttttttaattgcagaaaaatttattaaattggaaaatcttgcgtttttcaatggcgctggccccgggtcagcgggcgattttctctgcatcaagatgggctttgccgtttccgtagtgggcaccagtggtggcctgattgtcagtcttctcccggcatttttaaggccaggagccgagcgctgcttgtaggcgaataccctacagagcggtttggctttttaaattactgttattattttgggcagagaacagtcggtctggtgcaccccgtcctcgctgcagaagaggctgcgagtccgaggtgggtctctcggaaggtgaaattccttctggggtgagcgagccccggccccgcgcgcagtccagcggccccgcgtgtgtgccctcgccctgccggagccgggaaaatggaggctgtgattgagaaggaatgcagcgcgctcggaggcctcttccagaccatcatcagcgacatgaaggggagctatccagtttgggaagatttcataaacaaagcaggaaagctgcagtcccagcttcggacaacagtagtagcagcagctgccttcttggacgcctttcagaaagtggctgacatggccaccaacacacgtggtgggaccagggagattggatctgctctcaccaggatgtgcatgaggcacagaagcattgaagccaagctgaggcagttttcgagcgctttaattgattgtctgataaacccacttcaagaacagatggaagaatggaagaaagtggccaaccagctggataaagaccacgcaaaagaatataagaaagcccgccaagagataaaaaagaagtcctcggatacgctgaaactgcagaagaaagcaaaaaaagggagaggtgatatccagcctcagttggacagtgctctccaagatgtcaatgataagtatctcttattggaagaaacagaaaagcaggctgtccggaaggctttgattgaagaacgtggccgattctgtaccttcatctctatgctgcggccagtgattgaagaagaaatctcaatgctaggggaaataacccaccttcagaccatctcggaagatctaaaaagcctgaccatggaccctcacaaactgccctcctcaagtgaacaggtgattctggacttgaaaggttctgattacagctggtcgtatcagacgccaccctcttcccccagcaccaccatgtccagaaagtccagtgtctgcagcagcctgaacagtgtcaacagcagtgactcccggtccagcggctcccactcgcattcccccagctcacattaccgctaccgcagctccaacctggcccagcaggctcctgtgaggctgtccagcgtgtcctcccatgactcaggattcatatcccaggatgccttccagtccaagtcaccatcccccatgccgccagaggcccccaaccagcgccgcaaagagaagcgagaaccggaccccaacgggggaggacccactaccgccagcggcccacctgcagcagctgaggaggctcagagaccacggagcatgactgtatcggctgccaccaggcctggtgaggagatggaggcttgtgaggagctggccctggccctgtctcggggcctgcagctggacacccagaggagcagccgggactcgcttcagtgctccagcggctacagcacccagacaaccaccccctgctgctctgaggacaccatcccttcccaagtttcagattatgattatttctctgtaagtggtgaccaggaggcagatcagcaggagttcgacaagtcctccaccattccaagaaacagcgacatcagccagtcctaccgacggatgttccaagccaagcgtccagcctcaactgctggcctccccaccaccctgggacctgctatggtcactccaggggttgcaactatccgacggaccccttccaccaagccttctgtccgccggggaaccattggagctggtcccatccccatcaagacacccgtgatccctgtcaagaccccaaccgtcccagacctcccaggggtgttgccagcccctccagatgggccagaagagcggggggagcacagccctgagtcgccatctgtgggtgagggcccccaaggtgtcaccagcatgccctcctcaatgtggagcggccaagcttccgttaaccctccacttccaggcccgaagcccagtatccctgaggagcacagacaggcaattccagaaagtgaagctgaagaccaggaacgggaacccccaagtgccactgtctccccaggccagattccagagagtgaccctgcagacctgagcccaagggatactccacaaggagaagacatgctgaacgccatccgaaggggcgtgaaactgaagaagaccacgacaaacgatcgctcagcccctcgcttttcttaggttcacaagaaatgcgccggtggggaatgaactgtttcattaataaaacctaatttgtcttgatccattccactctataataaaacaaaagattttgtaggcaactcggaatatagctcttttgaaagtactcgacacctttagataagaattaaaaccaacctatgtaactgacataatcttgatcttttaatttgtaaatattgacaattttctttctgcacattttaatcttagtttcccttttgatttttctgaaggtgccaaattccatttaacttttttacaagtctttgtaaaattttaaatgcataaagggggttggggcaggggaaccacgaagtagttaattttagaaaaggatttactatacttcactcttctttttttttccccacaagcttttgtagatgcattgtagtagtctagcttagaagcaaatgcaagttattttaatgtacaaactaaatgggtaagaggtaaaatcttcatttaaatatactatgttctggatgaaaagagcaggagtaacaattgatgagcaatattcagagtgaagtaaatctggaaatggtagactgtgttgggattggggggagggccatgggaggggtacatcgtcaacatagccgatcctgttacatttaagagtagcctcgtaggttgaatttcttctggtagcttcatggtaaatgcatccgaataagccatactggattgcagtgtttgtttctgtagggtgtttaaggacttgacttcctttctcccatgattcctctggactgcacacagcacccacaaccagccccatgcatgctgctgcctctgggcagtcgtagaatctcccacttcagtttctcgttgattgtactcacctttatggaatccaaatacatccaaaagggtaaggcagttttaaaaatgtgaaaacatttaaaaatgataatagcagggaattcttagattatagtaaatgccttttacttaactgtgcccagcaggctgggtgcgttaaaaagcccaagtattttgaaaaaactcgaacagatttgacaagggtagccagcttggagtctagcaacttgccaatgtgtttaccaatctgggggcttgtttttcttttcttctttcaaataaatggcagttaactggctttacagtaaacattgaagagaggaggatttgtttattgtcactgggaatctgaccactatactgtcctttttttgtattctgggtaaatgttttttggaaaagatttgtcttttctaagtggaagttaaatttgttatactgcccatcccctaaagccaacagagatttgtagatttaaagggatcacatttgaagacaatagtgtttaagaaagcaagcaagtcccttagcagtcaggtcataacagggcacatttctgaccgaaccctctcaaggcagaggaggagtttggtgggtttcatacaccctgcagattcctgttggctctaaccctcaattacctaatcttatgctttaacacataactgcattggatgtgagagtaacgtaccgtatggtcattgttctatatattaacattgaacactgctgcgattgctcaaggacattttatgttacggctttaaagcaaaggcatgattattagaaactatttaagcttttttctttgaaaaacaagctccttttacagaatataaacaacagtagtgcctgtggtttagcccaccaatcttgatgactaaaagtagctgatgcattgtgcatatgatgcttgagatggtttttgcaaaagcagaaatcgctgcaaggtaatcacaatagataaaagtggtattttaaacctttgaaataaatggatgtaactgtaccttggtacagcttttcacttgtttagtttttaaacgttagtataatctgaataaataaaatgttgccaaattcaatgtagaaagaatgtgacaacacaccttgggtagttctgcttgtgtttttgcatattgtaaaagcagtgtcacagctaaaaagaaagaaatcgtttctaacagtaaattattgtgctttagttgctagtttgtactgagagttgacctctccctgtgcagttttttgttctaaacttgtataaataacaattgtgtaatgtgtctccctcctacattgtaacaattgcttcagcctacgttataaataaagaaccactagatt

SEQ ID NO: 2430 - DNA, 4458 bp, Homo sapiens
  source 1..4458: mol_type = genomic DNA
cccggccccgcgcgcagtccagcggccccgcgtgtgtgccctcgccctgccggagccgggaaaatggaggctgtgattgagaaggaatgcagcgcgctcggaggcctcttccagaccatcatcagcgacatgaaggggagctatccagtttgggaagatttcataaacaaagcaggaaagctgcagtcccagcttcggacaacagtagtagcagcagctgccttcttggacgcctttcagaaagtggctgacatggccaccaacacacgtggtgggaccagggagattggatctgctctcaccaggatgtgcatgaggcacagaagcattgaagccaagctgaggcagttttcgagcgctttaattgattgtctgataaacccacttcaagaacagatggaagaatggaagaaagtggccaaccagctggataaagaccacgcaaaagaatataagaaagcccgccaagagataaaaaagaagtcctcggatacgctgaaactgcagaagaaagcaaaaaaagggagaggtgatatccagcctcagttggacagtgctctccaagatgtcaatgataagtatctcttattggaagaaacagaaaagcaggctgtccggaaggctttgattgaagaacgtggccgattctgtaccttcatctctatgctgcggccagtgattgaagaagaaatctcaatgctaggggaaataacccaccttcagaccatctcggaagatctaaaaagcctgaccatggaccctcacaaactgccctcctcaagtgaacaggtgattctggacttgaaaggttctgattacagctggtcgtatcagacgccaccctcttcccccagcaccaccatgtccagaaagtccagtgtctgcagcagcctgaacagtgtcaacagcagtgactcccggtccagcggctcccactcgcattcccccagctcacattaccgctaccgcagctccaacctggcccagcaggctcctgtgaggctgtccagcgtgtcctcccatgactcaggattcatatcccaggatgccttccagtccaagtcaccatcccccatgccgccagaggcccccaaccagaactcgtccagctcggcctcctccgaagcctcggaaacctgccagtcagtgagcgagtgcagctcccccacctctgtcagctcgggctccaccatgggtgcctgggtgtccacagagaaggactgggctaagcctgggccctatgaccagcctctggtgaacaccctgcagcgccgcaaagagaagcgagaaccggaccccaacgggggaggacccactaccgccagcggcccacctgcagcagctgaggaggctcagagaccacggagcatgactgtatcggctgccaccaggcctggtgaggagatggaggcttgtgaggagctggccctggccctgtctcggggcctgcagctggacacccagaggagcagccgggactcgcttcagtgctccagcggctacagcacccagacaaccaccccctgctgctctgaggacaccatcccttcccaagtttcagattatgattatttctctgtaagtggtgaccaggaggcagatcagcaggagttcgacaagtcctccaccattccaagaaacagcgacatcagccagtcctaccgacggatgttccaagccaagcgtccagcctcaactgctggcctccccaccaccctgggacctgctatggtcactccaggggttgcaactatccgacggaccccttccaccaagccttctgtccgccggggaaccattggagctggtcccatccccatcaagacacccgtgatccctgtcaagaccccaaccgtcccagacctcccaggggtgttgccagcccctccagatgggccagaagagcggggggagcacagccctgagtcgccatctgtgggtgagggcccccaaggtgtcaccagcatgccctcctcaatgtggagcggccaagcttccgttaaccctccacttccaggcccgaagcccagtatccctgaggagcacagacaggcaattccagaaagtgaagctgaagaccaggaacgggaacccccaagtgccactgtctccccaggccagattccagagagtgaccctgcagacctgagcccaagggatactccacaaggagaagacatgctgaacgccatccgaaggggcgtgaaactgaagaagaccacgacaaacgatcgctcagcccctcgcttttcttaggttcacaagaaatgcgccggtggggaatgaactgtttcattaataaaacctaatttgtcttgatccattccactctataataaaacaaaagattttgtaggcaactcggaatatagctcttttgaaagtactcgacacctttagataagaattaaaaccaacctatgtaactgacataatcttgatcttttaatttgtaaatattgacaattttctttctgcacattttaatcttagtttcccttttgatttttctgaaggtgccaaattccatttaacttttttacaagtctttgtaaaattttaaatgcataaagggggttggggcaggggaaccacgaagtagttaattttagaaaaggatttactatacttcactcttctttttttttccccacaagcttttgtagatgcattgtagtagtctagcttagaagcaaatgcaagttattttaatgtacaaactaaatgggtaagaggtaaaatcttcatttaaatatactatgttctggatgaaaagagcaggagtaacaattgatgagcaatattcagagtgaagtaaatctggaaatggtagactgtgttgggattggggggagggccatgggaggggtacatcgtcaacatagccgatcctgttacatttaagagtagcctcgtaggttgaatttcttctggtagcttcatggtaaatgcatccgaataagccatactggattgcagtgtttgtttctgtagggtgtttaaggacttgacttcctttctcccatgattcctctggactgcacacagcacccacaaccagccccatgcatgctgctgcctctgggcagtcgtagaatctcccacttcagtttctcgttgattgtactcacctttatggaatccaaatacatccaaaagggtaaggcagttttaaaaatgtgaaaacatttaaaaatgataatagcagggaattcttagattatagtaaatgccttttacttaactgtgcccagcaggctgggtgcgttaaaaagcccaagtattttgaaaaaactcgaacagatttgacaagggtagccagcttggagtctagcaacttgccaatgtgtttaccaatctgggggcttgtttttcttttcttctttcaaataaatggcagttaactggctttacagtaaacattgaagagaggaggatttgtttattgtcactgggaatctgaccactatactgtcctttttttgtattctgggtaaatgttttttggaaaagatttgtcttttctaagtggaagttaaatttgttatactgcccatcccctaaagccaacagagatttgtagatttaaagggatcacatttgaagacaatagtgtttaagaaagcaagcaagtcccttagcagtcaggtcataacagggcacatttctgaccgaaccctctcaaggcagaggaggagtttggtgggtttcatacaccctgcagattcctgttggctctaaccctcaattacctaatcttatgctttaacacataactgcattggatgtgagagtaacgtaccgtatggtcattgttctatatattaacattgaacactgctgcgattgctcaaggacattttatgttacggctttaaagcaaaggcatgattattagaaactatttaagcttttttctttgaaaaacaagctccttttacagaatataaacaacagtagtgcctgtggtttagcccaccaatcttgatgactaaaagtagctgatgcattgtgcatatgatgcttgagatggtttttgcaaaagcagaaatcgctgcaaggtaatcacaatagataaaagtggtattttaaacctttgaaataaatggatgtaactgtaccttggtacagcttttcacttgtttagtttttaaacgttagtataatctgaataaataaaatgttgccaaattcaatgtagaaagaatgtgacaacacaccttgggtagttctgcttgtgtttttgcatattgtaaaagcagtgtcacagctaaaaagaaagaaatcgtttctaacagtaaattattgtgctttagttgctagtttgtactgagagttgacctctccctgtgcagttttttgttctaaacttgtataaataacaattgtgtaatgtgtctccctcctacattgtaacaattgcttcagcctacgttataaataaagaaccactagatt

SEQ ID NO: 2431 - DNA, 1822 bp, Homo sapiens
  source 1..1822: mol_type = genomic DNA
ctggtcgtatcagacgccaccctcttcccccagcaccaccatgtccagaaagtccagtgtctgcagcagcctgaacagtgtcaacagcagtgactcccggtccagcggctcccactcgcattcccccagctcacattaccgctaccgcagctccaacctggcccagcaggctcctgtgaggctgtccagcgtgtcctcccatgactcaggattcatatcccaggatgccttccagtccaagtcaccatcccccatgccgccagaggcccccaaccagaactcgtccagctcggcctcctccgaagcctcggaaacctgccagtcagtgagcgagtgcagctcccccacctctgtcagctcgggctccaccatgggtgcctgggtgtccacagagaagttgtctaacgggttttctcactatagtttatcaagtgagtcccacgtggggcccacgggtgcaggccttttccctcattgcctgcctgcctcccgcctgctccctcgggtcacctctgtccaccttccagactacgctcattattacaccattgggcccggcatgttcccgtcatctcagatccctagctggaaggactgggctaagcctgggccctatgaccagcctctggtgaacaccctgcagcgccgcaaagagaagcgagaaccggaccccaacgggggaggacccactaccgccagcggcccacctgcagcagctgaggaggctcagagaccacggagcatgactgtatcggctgccaccaggcctggtgaggagatggaggcttgtgaggagctggccctggccctgtctcggggcctgcagctggacacccagaggagcagccgggactcgcttcagtgctccagcggctacagcacccagacaaccaccccctgctgctctgaggacaccatcccttcccaagtttcagattatgattatttctctgtaagtggtgaccaggaggcagatcagcaggagttcgacaagtcctccaccattccaagaaacagcgacatcagccagtcctaccgacggatgttccaagccaagcgtccagcctcaactgctggcctccccaccaccctgggacctgctatggtcactccaggggttgcaactatccgacggaccccttccaccaagccttctgtccgccggggaaccattggagctggtcccatccccatcaagacacccgtgatccctgtcaagaccccaaccgtcccagacctcccaggggtgttgccagcccctccagatgggccagaagagcggggggagcacagccctgagtcgccatctgtgggtgagggcccccaaggtgtcaccagcatgccctcctcaatgtggagcggccaagcttccgttaaccctccacttccaggcccgaagcccagtatccctgaggagcacagacaggcaattccagaaagtgaagctgaagaccaggaacgggaacccccaagtgccactgtctccccaggccagattccagagagtgaccctgcagacctgagcccaagggatactccacaaggagaagacatgctgaacgccatccgaaggggcgtgaaactgaagaagaccacgacaaacgatcgctcagcccctcgcttttcttaggttcacaagaaatgcgccggtggggaatgaactgtttcattaataaaacctaatttgtcttgatccattccactctataataaaacaaaagattttgtaggcaactcggaatatagctcttttgaaagtactcgacacctttagataagaattaaaaccaacctatgtaactgacataatcttgatctttta

SEQ ID NO: 2432 - DNA, 4944 bp, Homo sapiens
  source 1..4944: mol_type = genomic DNA
gcggccgcagctgcgagcaacagatccggacgccgcgagctgacccgctctgctgttgggcgatttttttttaattgcagaaaaatttattaaattggaaaatcttgcgtttttcaatggcgctggccccgggtcagcgggcgattttctctgcatcaagatgggctttgccgtttccgtagtgggcaccagtggtggcctgattgtcagtcttctcccggcatttttaaggccaggagccgagcgctgcttgtaggcgaataccctacagagcggtttggctttttaaattactgttattattttgggcagagaacagtcggtctggtgcaccccgtcctcgctgcagaagaggctgcgagtccgaggtgggtctctcggaaggtgaaattccttctggggtgagcgagccccggccccgcgcgcagtccagcggccccgcgtgtgtgccctcgccctgccggagccgggaaaatggaggctgtgattgagaaggaatgcagcgcgctcggaggcctcttccagaccatcatcagcgacatgaaggggagctatccagtttgggaagatttcataaacaaagcaggaaagctgcagtcccagcttcggacaacagtagtagcagcagctgccttcttggacgcctttcagaaagtggctgacatggccaccaacacacgtggtgggaccagggagattggatctgctctcaccaggatgtgcatgaggcacagaagcattgaagccaagctgaggcagttttcgagcgctttaattgattgtctgataaacccacttcaagaacagatggaagaatggaagaaagtggccaaccagctggataaagaccacgcaaaagaatataagaaagcccgccaagagataaaaaagaagtcctcggatacgctgaaactgcagaagaaagcaaaaaaagggagaggtgatatccagcctcagttggacagtgctctccaagatgtcaatgataagtatctcttattggaagaaacagaaaagcaggctgtccggaaggctttgattgaagaacgtggccgattctgtaccttcatctctatgctgcggccagtgattgaagaagaaatctcaatgctaggggaaataacccaccttcagaccatctcggaagatctaaaaagcctgaccatggaccctcacaaactgccctcctcaagtgaacaggtgattctggacttgaaaggttctgattacagctggtcgtatcagacgccaccctcttcccccagcaccaccatgtccagaaagtccagtgtctgcagcagcctgaacagtgtcaacagcagtgactcccggtccagcggctcccactcgcattcccccagctcacattaccgctaccgcagctccaacctggcccagcaggctcctgtgaggctgtccagcgtgtcctcccatgactcaggattcatatcccaggatgccttccagtccaagtcaccatcccccatgccgccagaggcccccaaccagttgtctaacgggttttctcactatagtttatcaagtgagtcccacgtggggcccacgggtgcaggccttttccctcattgcctgcctgcctcccgcctgctccctcgggtcacctctgtccaccttccagactacgctcattattacaccattgggcccggcatgttcccgtcatctcagatccctagctggaaggactgggctaagcctgggccctatgaccagcctctggtgaacaccctgcagcgccgcaaagagaagcgagaaccggaccccaacgggggaggacccactaccgccagcggcccacctgcagcagctgaggaggctcagagaccacggagcatgactgtatcggctgccaccaggcctggtgaggagatggaggcttgtgaggagctggccctggccctgtctcggggcctgcagctggacacccagaggagcagccgggactcgcttcagtgctccagcggctacagcacccagacaaccaccccctgctgctctgaggacaccatcccttcccaagtttcagattatgattatttctctgtaagtggtgaccaggaggcagatcagcaggagttcgacaagtcctccaccattccaagaaacagcgacatcagccagtcctaccgacggatgttccaagccaagcgtccagcctcaactgctggcctccccaccaccctgggacctgctatggtcactccaggggttgcaactatccgacggaccccttccaccaagccttctgtccgccggggaaccattggagctggtcccatccccatcaagacacccgtgatccctgtcaagaccccaaccgtcccagacctcccaggggtgttgccagcccctccagatgggccagaagagcggggggagcacagccctgagtcgccatctgtgggtgagggcccccaaggtgtcaccagcatgccctcctcaatgtggagcggccaagcttccgttaaccctccacttccaggcccgaagcccagtatccctgaggagcacagacaggcaattccagaaagtgaagctgaagaccaggaacgggaacccccaagtgccactgtctccccaggccagattccagagagtgaccctgcagacctgagcccaagggatactccacaaggagaagacatgctgaacgccatccgaaggggcgtgaaactgaagaagaccacgacaaacgatcgctcagcccctcgcttttcttaggttcacaagaaatgcgccggtggggaatgaactgtttcattaataaaacctaatttgtcttgatccattccactctataataaaacaaaagattttgtaggcaactcggaatatagctcttttgaaagtactcgacacctttagataagaattaaaaccaacctatgtaactgacataatcttgatcttttaatttgtaaatattgacaattttctttctgcacattttaatcttagtttcccttttgatttttctgaaggtgccaaattccatttaacttttttacaagtctttgtaaaattttaaatgcataaagggggttggggcaggggaaccacgaagtagttaattttagaaaaggatttactatacttcactcttctttttttttccccacaagcttttgtagatgcattgtagtagtctagcttagaagcaaatgcaagttattttaatgtacaaactaaatgggtaagaggtaaaatcttcatttaaatatactatgttctggatgaaaagagcaggagtaacaattgatgagcaatattcagagtgaagtaaatctggaaatggtagactgtgttgggattggggggagggccatgggaggggtacatcgtcaacatagccgatcctgttacatttaagagtagcctcgtaggttgaatttcttctggtagcttcatggtaaatgcatccgaataagccatactggattgcagtgtttgtttctgtagggtgtttaaggacttgacttcctttctcccatgattcctctggactgcacacagcacccacaaccagccccatgcatgctgctgcctctgggcagtcgtagaatctcccacttcagtttctcgttgattgtactcacctttatggaatccaaatacatccaaaagggtaaggcagttttaaaaatgtgaaaacatttaaaaatgataatagcagggaattcttagattatagtaaatgccttttacttaactgtgcccagcaggctgggtgcgttaaaaagcccaagtattttgaaaaaactcgaacagatttgacaagggtagccagcttggagtctagcaacttgccaatgtgtttaccaatctgggggcttgtttttcttttcttctttcaaataaatggcagttaactggctttacagtaaacattgaagagaggaggatttgtttattgtcactgggaatctgaccactatactgtcctttttttgtattctgggtaaatgttttttggaaaagatttgtcttttctaagtggaagttaaatttgttatactgcccatcccctaaagccaacagagatttgtagatttaaagggatcacatttgaagacaatagtgtttaagaaagcaagcaagtcccttagcagtcaggtcataacagggcacatttctgaccgaaccctctcaaggcagaggaggagtttggtgggtttcatacaccctgcagattcctgttggctctaaccctcaattacctaatcttatgctttaacacataactgcattggatgtgagagtaacgtaccgtatggtcattgttctatatattaacattgaacactgctgcgattgctcaaggacattttatgttacggctttaaagcaaaggcatgattattagaaactatttaagcttttttctttgaaaaacaagctccttttacagaatataaacaacagtagtgcctgtggtttagcccaccaatcttgatgactaaaagtagctgatgcattgtgcatatgatgcttgagatggtttttgcaaaagcagaaatcgctgcaaggtaatcacaatagataaaagtggtattttaaacctttgaaataaatggatgtaactgtaccttggtacagcttttcacttgtttagtttttaaacgttagtataatctgaataaataaaatgttgccaaattcaatgtagaaagaatgtgacaacacaccttgggtagttctgcttgtgtttttgcatattgtaaaagcagtgtcacagctaaaaagaaagaaatcgtttctaacagtaaattattgtgctttagttgctagtttgtactgagagttgacctctccctgtgcagttttttgttctaaacttgtataaataacaattgtgtaatgtgtctccctcctacattgtaacaattgcttcagcctacgttataaataaagaaccactagatt

SEQ ID NO: 2433 - DNA, 3601 bp, Homo sapiens
  source 1..3601: mol_type = genomic DNA
gcagtcgggtctggccccagtcgactccagccaggcggggctccaagccgagactcctgcacgcccggcccgaagctagcccgacaccctcagctgagtcctccgccgtcccagcattccctgcgtccctaccatcgagagcagcttccggcgtggctggtgtaggcgggtggagaaggatcggggccctcgccgctctgtctcattccctcgcgctctctcgggcaacatggcgggtgtggaggaggtagcggcctccgggagccacctgaatggcgacctggatccagacgacagggaagaaggagctgcctctacggctgaggaagcagccaagaaaaaaagacgaaagaagaagaagagcaaagggccttctgcagcaggggaacaggaacctgataaagaatcaggagcctcagtggatgaagtagcaagacagttggaaagatcagcattggaagataaagaaagagatgaagatgatgaagatggagatggcgatggagatggagcaactggaaagaagaagaaaaagaagaagaagaagagaggaccaaaagttcaaacagaccctccctcagttccaatatgtgacctgtatcctaatggtgtatttcccaaaggacaagaatgcgaatacccacccacacaagatgggcgaacagctgcttggagaactacaagtgaagaaaagaaagcattagatcaggcaagtgaagagatttggaatgattttcgagaagctgcagaagcacatcgacaagttagaaaatacgtaatgagctggatcaagcctgggatgacaatgatagaaatctgtgaaaagttggaagactgttcacgcaagttaataaaagagaatggattaaatgcaggcctggcatttcctactggatgttctctcaataattgtgctgcccattatactcccaatgccggtgacacaacagtattacagtatgatgacatctgtaaaatagactttggaacacatataagtggtaggattattgactgtgcttttactgtcacttttaatcccaaatatgatacgttattaaaagctgtaaaagatgctactaacactggaataaagtgtgctggaattgatgttcgtctgtgtgatgttggtgaggccatccaagaagttatggagtcctatgaagttgaaatagatgggaagacatatcaagtgaaaccaatccgtaatctaaatggacattcaattgggcaatatagaatacatgctggaaaaacagtgccgattgtgaaaggaggggaggcaacaagaatggaggaaggagaagtatatgcaattgaaacctttggtagtacaggaaaaggtgttgttcatgatgatatggaatgttcacattacatgaaaaattttgatgttggacatgtgccaataaggcttccaagaacaaaacacttgttaaatgtcatcaatgaaaactttggaacccttgccttctgccgcagatggctggatcgcttgggagaaagtaaatacttgatggctctgaagaatctgtgtgacttgggcattgtagatccatatccaccattatgtgacattaaaggatcatatacagcgcaatttgaacataccatcctgttgcgtccaacatgtaaagaagttgtcagcagaggagatgactattaaacttagtccaaagccacctcaacacctttattttctgagctttgttggaaaacatgataccagaattaatttgccacatgttgtctgttttaacagtggacccatgtaatacttttatccatgtttaaaaaagaaggaatttggacaaaggcaaaccgtctaatgtaattaaccaacgaaaaagctttccggacttttaaatgctaactgtttttccccttcctgtctaggaaaatgctataaagctcaaattagttaggaatgacttatacgttttgttttgaatacctaagagatactttttggatatttatattgccatattcttacttgaatgctttgaatgactacatccagttctgcacctataccctctggtgttgctttttaaccttcctggaatccattttctaaaaaataaagacattttcagatctgagagctacatctcaatgtctgtggttataattctggacaggataaatagctaaacttaatgtaggcaaatgcagagacatttatctgaaatgtagacctctacactgagacttttctggcatagtggctaaaacaagatctacacatgcataaaaagggacaatcaccttttcttcataaatatacagctttaggaatatttcaccattctttgtaggacatagtagtccttgtctttttttctcctgacattggaaagatgtgctaattgaaacttgacttagtaggaacattgtgccaactcaaaaccttgatttagtaaaaatctcaatgtttagatcctttgtccagtggtggtgtttatcagggaatgtattcagcttgctcagaaaaccaaaagggtattaaagccacaaaagcaaagaagaaaaaaaaaaacttcccatgtttggatcttgttctagttagaaaaattaagttgaaattcttggactttttcattcatgaggcaaatgctgtaataccttcccctttgacaggtttggattcttaacattactagtggtatttcaggaagtgacgttacagttactttccttatagcggctaagtgtattaagttgaatgtaacgatggtaatattaatttgtttgaactgaggcccactactgattctttgacaaattgaattcttatatttaaataattttatgggaatgttccatcataatttctaaatcatttatatatcaaggtagccttaatttgtatatgtttcagtacaatgagattttattgcctctgggatgctgtttagtttgtattttgttgaacgtttttatcctaggaagagaaacctatgacttgtgtacctagatcatctgttacattaaaaagctgctctttcagcattagagctataaatgaatgttaccttgtcgggaaacaatctaggttttagctgtatgagctatgtttattatggtgctaatgttcagtagccacatttgactaatgtctccattctctgtgatgctgtggctagcagcagagctcgccagttcatgcctggacatactgtcagggctgggccctccagctagctcctttggggttgagtccgtatctttttgatgtggaagtataaagcaagtatcttgatttctaaacccagcaattttagaattgacctttatgagtgaagacttttggagcttttaaagaccttggcagtcatgatctcaaaccaattaggagctccaagctcccttcccaggtaactgttgggagcaatggcatcactgtatgcccttgtaatggctggaagggacatgatcttgtaagtaggaaagctgtaactaaaaattgtattgtttgcttattagccatgtatctcttaaaattttgttatgtttacaacgatgtaccttattggcaacaagttattagtttgatgtttaacaatagtgcctttagtaaattattttacaactaaaa

SEQ ID NO: 2434 - DNA, 2470 bp, Homo sapiens
  source 1..2470: mol_type = genomic DNA
ggcggctgtagccgagggggcggccggaaagcagcggcggcgtctggggcgctttcgcaacattcagacctcggttgcagcccggtgccgtgagctgaagaggtttcacatcttactccgccccacaccctgggcgttgcggcgctgggctcgttgctgcagccggaccctgctcgatgggcacgactgggctggagagtctgagtctgggggaccgcggagctgcccccaccgtcacctctagtgagcgcctagtcccagacccgccgaatgacctccgcaaagaagatgttgctatggaattggaaagagtgggagaagatgaggaacaaatgatgataaaaagaagcagtgaatgtaatcccttgctacaagaacccatcgcttctgctcagtttggtgctactgcaggaacagaatgccgtaagtctgtcccatgtggatgggaaagagttgtgaagcaaaggttatttgggaagacagcaggaagatttgatgtgtactttatcagcccacaaggactgaagttcagatccaaaagttcacttgctaattatcttcacaaaaatggagagacttctcttaagccagaagattttgattttactgtactttctaaaaggggtatcaagtcaagatataaagactgcagcatggcagccctgacatcccatctacaaaaccaaagtaacaattcaaactggaacctcaggacccgaagcaagtgcaaaaaggatgtgtttatgccgccaagtagtagttcagagttgcaggagagcagaggactctctaactttacttccactcatttgcttttgaaagaagatgagggtgttgatgatgttaacttcagaaaggttagaaagcccaaaggaaaggtgactattttgaaaggaatcccaattaagaaaactaaaaaaggatgtaggaagagctgttcaggttttgttcaaagtgatagcaaaagagaatctgtgtgtaataaagcagatgctgaaagtgaacctgttgcacaaaaaagtcagcttgatagaactgtctgcatttctgatgctggagcatgtggtgagaccctcagtgtgaccagtgaagaaaacagccttgtaaaaaaaaaagaaagatcattgagttcaggatcaaatttttgttctgaacaaaaaacttctggcatcataaacaaattttgttcagccaaagactcagaacacaacgagaagtatgaggatacctttttagaatctgaagaaatcggaacaaaagtagaagttgtggaaaggaaagaacatttgcatactgacattttaaaacgtggctctgaaatggacaacaactgctcaccaaccaggaaagacttcactggtgagaaaatatttcaagaagataccatcccacgaacacagatagaaagaaggaaaacaagcctgtatttttccagcaaatataacaaagaagctcttagccccccacgacgtaaagcctttaagaaatggacacctcctcggtcaccttttaatctcgttcaagaaacactttttcatgatccatggaagcttctcatcgctactatatttctcaatcggacctcaggcaaaatggcaatacctgtgctttggaagtttctggagaagtatccttcagctgaggtagcaagaaccgcagactggagagatgtgtcagaacttcttaaacctcttggtctctacgatcttcgggcaaaaaccattgtcaagttctcagatgaatacctgacaaagcagtggaagtatccaattgagcttcatgggattggtaaatatggcaacgactcttaccgaattttttgtgtcaatgagtggaagcaggtgcaccctgaagaccacaaattaaataaatatcatgactggctttgggaaaatcatgaaaaattaagtctatcttaaactctgcagctttcaagctcatctgttatgcatagctttgcacttcaaaaaagcttaattaagtacaaccaaccacctttccagccatagagattttaattagcccaactagaagcctagtgtgtgtgctttcttaatgtgtgtgccaatggtggatctttgctactgaatgtgtttgaacatgttttgagatttttttaaaataaattattatttgacaacaatccaaaaaaaatacggcttttccaatgatgaaatataatcagaagatgaaaaatagttctaaactatcaataatacaaagcaaatttctatcagccttgctaaagctaggggcccactaaatatttttatcggctaggcgtggtggtgcatgcctgtaatctcggaaggctgaggcaggaggatcatttgagctcatgagggcccaggaggtcaaggcttcagtgagccatgatcatgccactgcactccagtctggatgacagagagagaccctgtctcaaaaaatatatatttaaaaaataaaaataaaagctgaccccaaagac

SEQ ID NO: 2435 - DNA, 804 bp, Homo sapiens
  source 1..804: mol_type = genomic DNA
atgggcacgactgggctggagagtctgagtctgggggaccgcggagctgcccccaccgtcacctctagtgagcgcctagtcccagacccgccgaatgacctccgcaaagaagatgttgctatggaattggaaagagtgggagaagatgaggaacaaatgatgataaaaagaagcagtgaatgtaatcccttgctacaagaacccatcgcttctgctcagtttggtgctactgcaggaacagaatgccaagataccatcccacgaacacagatagaaagaaggaaaacaagcctgtatttttccagcaaatataacaaagaagctcttagccccccacgacgtaaagcctttaagaaatggacacctcctcggtcaccttttaatctcgttcaagaaacactttttcatgatccatggaagcttctcatcgctactatatttctcaatcggacctcaggcaaaatggcaatacctgtgctttggaagtttctggagaagtatccttcagctgaggtagcaagaaccgcagactggagagatgtgtcagaacttcttaaacctcttggtctctacgatcttcgggcaaaaaccattgtcaagttctcagatgaatacctgacaaagcagtggaagtatccaattgagcttcatgggattggtaaatatggcaacgactcttaccgaattttttgtgtcaatgagtggaagcaggtgcaccctgaagaccacaaattaaataaatatcatgactggctttgggaaaatcatgaaaaattaagtctatcttaaactctgcagctttca

SEQ ID NO: 2436 - DNA, 2478 bp, Homo sapiens
  source 1..2478: mol_type = genomic DNA
gattggtggagcgtggaaatggcggctgtagccgagggggcggccggaaagcagcggcggcgtctggggcgctttcgcaacattcagacctcggttgcagcccggtgccgtgagctgaagaggtttcacatcttactccgccccacaccctgggcgttgcggcgctgggctcgttgctgcagccggaccctgctcgatgggcacgactgggctggagagtctgagtctgggggaccgcggagctgcccccaccgtcacctctagtgagcgcctagtcccagacccgccgaatgacctccgcaaagaagatgttgctatggaattggaaagagtgggagaagatgaggaacaaatgatgataaaaagaagcagtgaatgtaatcccttgctacaagaacccatcgcttctgctcagtttggtgctactgcaggaacagaatgccgtaagtctgtcccatgtggatgggaaagagttgtgaagcaaaggttatttgggaagacagcaggaagatttgatgtgtactttatcagcccacaaggactgaagttcagatccaaaagttcacttgctaattatcttcacaaaaatggagagacttctcttaagccagaagattttgattttactgtactttctaaaaggggtatcaagtcaagatataaagactgcagcatggcagccctgacatcccatctacaaaaccaaagtaacaattcaaactggaacctcaggacccgaagcaagtgcaaaaaggatgtgtttatgccgccaagtagtagttcagagttgcaggagagcagaggactctctaactttacttccactcatttgcttttgaaagaagatgagggtgttgatgatgttaacttcagaaaggttagaaagcccaaaggaaaggtgactattttgaaaggaatcccaattaagaaaactaaaaaaggatgtaggaagagctgttcaggttttgttcaaagtgatagcaaaagagaatctgtgtgtaataaagcagatgctgaaagtgaacctgttgcacaaaaaagtcagcttgatagaactgtctgcatttctgatgctggagcatgtggtgagaccctcagtgtgaccagtgaagaaaacagccttgtaaaaaaaaaagaaagatcattgagttcaggatcaaatttttgttctgaacaaaaaacttctggcatcataaacaaattttgttcagccaaagactcagaacacaacgagaagtatgaggatacctttttagaatctgaagaaatcggaacaaaagtagaagttgtggaaaggaaagaacatttgcatactgacattttaaaacgtggctctgaaatggacaacaactgctcaccaaccaggaaagacttcactgaagataccatcccacgaacacagatagaaagaaggaaaacaagcctgtatttttccagcaaatataacaaagaagctcttagccccccacgacgtaaagcctttaagaaatggacacctcctcggtcaccttttaatctcgttcaagaaacactttttcatgatccatggaagcttctcatcgctactatatttctcaatcggacctcaggcaaaatggcaatacctgtgctttggaagtttctggagaagtatccttcagctgaggtagcaagaaccgcagactggagagatgtgtcagaacttcttaaacctcttggtctctacgatcttcgggcaaaaaccattgtcaagttctcagatgaatacctgacaaagcagtggaagtatccaattgagcttcatgggattggtaaatatggcaacgactcttaccgaattttttgtgtcaatgagtggaagcaggtgcaccctgaagaccacaaattaaataaatatcatgactggctttgggaaaatcatgaaaaattaagtctatcttaaactctgcagctttcaagctcatctgttatgcatagctttgcacttcaaaaaagcttaattaagtacaaccaaccacctttccagccatagagattttaattagcccaactagaagcctagtgtgtgtgctttcttaatgtgtgtgccaatggtggatctttgctactgaatgtgtttgaacatgttttgagatttttttaaaataaattattatttgacaacaatccaaaaaaaatacggcttttccaatgatgaaatataatcagaagatgaaaaatagttctaaactatcaataatacaaagcaaatttctatcagccttgctaaagctaggggcccactaaatatttttatcggctaggcgtggtggtgcatgcctgtaatctcggaaggctgaggcaggaggatcatttgagctcatgagggcccaggaggtcaaggcttcagtgagccatgatcatgccactgcactccagtctggatgacagagagagaccctgtctcaaaaaatatatatttaaaaaataaaaataaaagctgaccccaaagacaaataa

SEQ ID NO: 2437 - DNA, 1135 bp, Homo sapiens
  source 1..1135: mol_type = genomic DNA
ctccaaataaccaccctcctcttcaggacacctcaaagatgtccaacgccagctgaaaaggggggtaaaaatgcaggttccatttgacagtgtgacgtatctgaaatcagaaaggacttgtcaactctgggaacacaactcaagttttcccaggatgctttgcagggggaagctggactgtcagtgacccagaaagggtgagggatagagtgagaaaggactggagaagctaaaacagcagcatgataagcacaaagtcctgtgaggaagctcattctgaaaacgcttgtttcattccaaactcttttcagatggaaataaaaggaaacatgggtgggatttactggagctggcctggattctccctcagattccaggaggggttatgagaaaagaccccagacttaggcacgtgaagcagggtagacgcttcgagagccctggctgcggtccccaggccccacccgctgccacctgcgggcccagattggcccggccccacccccggcaacgcctctctcagtcccttagcaaccgccccctccccaggccgactccgccggcttcttaccagctcctcgggggtgcgggtctcacgctcaccgcagcagcagcaccacctgcagcagcagcacagagaccccctgcaccccgccatcttcctcctttactgccactctggacccctctaccaaccccctcccagccaggatctgcgcctcacgtgactggccccgggacggtcacgtggccctctcgagctctgggactgagaccaggagtggctgcagacgggtggggcgaggactcgcgtcacatgacgataaaggcacggcctccaacgagacctgtgggcacggccatgttgggggcggggcttccggtcacccgcgccggtggtttccgccctgtaggcccgcctctccagcaacctgacacctgcgccgcgccccttcactgcgttccccgcccctgcagcggccacagtggtgcggccggcggccgagcgttctgagtcacccgggactggaggtaggaacccagccatggtgaacgaagccagaggaaacagcagcctcaacccctgcttggagggcagtgccagcagtggcagtgagagctccaaagatagttc

SEQ ID NO: 2438 - DNA, 7021 bp, Homo sapiens
  source 1..7021: mol_type = genomic DNA
atggaccatcgaaaagccagggtcctcccagctgggcactactgcccctcgctaggaatatgggcctcgcaggtcggcagcgtgaggtcctctgtgccaccttccatcagtaggaacccagccatggtgaacgaagccagaggaaacagcagcctcaacccctgcttggagggcagtgccagcagtggcagtgagagctccaaagatagttcgagatgttccaccccgggcctggaccccgagcggcatgagagactccgggagaagatgaggcggcgattggaatctggtgacaagtggttctccctggaattcttccctcctcgaactgctgagggagctgtcaatctcatctcaaggtttgaccggatggcagcaggtggccccctctacatagacgtgacctggcacccagcaggtgaccctggctcagacaaggagacctcctccatgatgatcgccagcaccgccgtgaactactgtggcctggagaccatcctgcacatgacctgctgccgtcagcgcctggaggagatcacgggccatctgcacaaagctaagcagctgggcctgaagaacatcatggcgctgcggggagacccaataggtgaccagtgggaagaggaggagggaggcttcaactacgcagtggacctggtgaagcacatccgaagtgagtttggtgactactttgacatctgtgtggcaggttaccccaaaggccaccccgaagcagggagctttgaggctgacctgaagcacttgaaggagaaggtgtctgcgggagccgatttcatcatcacgcagcttttctttgaggctgacacattcttccgctttgtgaaggcatgcaccgacatgggcatcacttgccccatcgtccccgggatctttcccatccagggctaccactcccttcggcagcttgtgaagctgtccaagctggaggtgccacaggagatcaaggacgtgattgagccaatcaaagacaacgatgctgccatccgcaactatggcatcgagctggccgtgagcctgtgccaggagcttctggccagtggcttggtgccaggcctccacttctacaccctcaaccgcgagatggctaccacagaggtgctgaagcgcctggggatgtggactgaggaccccaggcgtcccctaccctgggctctcagcgcccaccccaagcgccgagaggaagatgtacgtcccatcttctgggcctccagaccaaagagttacatctaccgtacccaggagtgggacgagttccctaacggccgctggggcaattcctcttcccctgcctttggggagctgaaggactactacctcttctacctgaagagcaagtcccccaaggaggagctgctgaagatgtggggggaggagctgaccagtgaagaaagtgtctttgaagtcttcgttctttacctctcgggagaaccaaaccggaatggtcacaaagtgacttgcctgccctggaacgatgagcccctggcggctgagaccagcctgctgaaggaggagctgctgcgggtgaaccgccagggcatcctcaccatcaactcacagcccaacatcaacgggaagccgtcctccgaccccatcgtgggctggggccccagcgggggctatgtcttccagaaggcctacttagagtttttcacttcccgcgagacagcggaagcacttctgcaagtgctgaagaagtacgagctccgggttaattaccaccttgtcaatgtgaagggtgaaaacatcaccaatgcccctgaactgcagccgaatgctgtcacttggggcatcttccctgggcgagagatcatccagcccaccgtagtggatcccgtcagcttcatgttctggaaggacgaggcctttgccctgtggattgagcggtggggaaagctgtatgaggaggagtccccgtcccgcaccatcatccagtacatccacgacaactacttcctggtcaacctggtggacaatgacttcccactggacaactgcctctggcaggtggtggaagacacattggagcttctcaacaggcccacccagaatgcgagagaaacggaggctccatgaccctgcgtcctgacgccctgcgttggagccactcctgtcccgccttcctcctccacagtgctgcttctcttgggaactccactctccttcgtgtctctcccaccccggcctccactcccccacctgacaatggcagctagactggagtgaggcttccaggctcttcctggacctgagtcggccccacatgggaacctagtactctctgctctagccaggagtctgtgctcttttggtggggagcacttgcgtcctgcagaggaccacagtgggtggcacctcctgagaaggcgaggagagtggttgttgccaactaagccctcgaaccaaggcagcctccagagccagcctgggactcccagtgaacttacacttggagcccgtgcagtacaggcaaaacacgcaagggcatcaggcactggtggcatcgtagaagagatgtggcaaagtgctgtacccttccacctcctagaggtgggcagctgggccccacctacttgtgactgaaggggcacaccactgccctgcctgcccacttagccgtccatggcaccagccccctggatgggcattgggctgacacctaccatgctgctttttggcacagttgtctattctgagccttgagagaaaaagtgccccttaagggttgaaggcagtctgaacccttgtgcttggtggggctcgtggccttccccttttgcctggctgtggaggcctgatgctgccccgttccctgtcagaggctaagatgagatttgccagcacaggggccccagatctgcctgggcctgtgcagcagcccagcttcctggtgtatttttcaggtaggcccttgtcctgccagctgccttcctcatcccctcgtcctgtcccagaggttatctgcctggcctggctccccacgagtcacctgcaagccccagggcctgggggcagtgactggcaggtgcagatgggctgtttcgtgtagtggaagagcagcctgatggccaagggggtggacgcaattgtgggatgtcctctttactcccttcctggcctcactggctggggcagaggggcagccgctaggagagactgaaagcagcagctaggactgaggagtgggttttattgtccttcagagctcttcaagctgtcccctctgtcatcactccctggatgtgtggggcatggttccttccctgggaaggctaagttcagttctgttttttattctatgagaacaagtcacagctgcagctgggccccatgctctgccccaagcccccaaccccgcggtgctctggcggcttcctgtccactctcggggcccttggggcctggcttgctccagggtcttgggctactggcagctcctctccttgggctcctggctgccaggcgttggtgccacttcttaaaggcctggaaccagggaggagaggaaatgctattgttgtgggctttctccggggtctgtgctgtgcctgctagagcaacccctgtacccagctccttttgtccccagggcccctccctctgccccaagcagccagccagtcttgcctaggccaaatgcacaagctcagaatagatctgatggtgagctgggaagctgtactcagagcagagcaaatgagggagggggcgctcaggacccaggccctccatgggctagtgtgagtggcagccatgcctcatgccacaccttcttcgcaaactgatggaccgggtgggcctggcctgagctggggccacaaatcaaagcaagggctccagcatccagcctgtgtgttctgtaatggaactgaccccctcccctgaaaacgaaggggccccggggctggcaagcagggaaagctccacggtgcgtggctgtggcacagacttctggaaggctggctgagtggaatgcagggaagagggcagtacctgggaaaggacccacccatcttcctgctgctgtaactgctgagccactcgcagtcgcaggatccgctgccaccacgtctgccaggcccatctcaggtgccactccctgagctttggggacagttggcagagaaggcctcttgtgctcacgctcccccgcagtccccagcccttctgcctttctcccccgacactgctgcaccagagtgaaagggctatggcaagggggtgtcatctgaggagtattaagaatgcagattcctgggcctgtcccccaaggttttggagtcagtaggtccaagggccatacttttgagaggggtttgggttaagtatgaggtgaaatgggagatggtcagtgtggagaggggtgcacccactcaccagggtccgcaccagctgctctgccccttgggcatccacccagtgctgccatgccactgccaggcacctggcctgctgggaaccccgcagcccgtgaagcagtgcctcgaggcaccggcgctgcaggtacttcctcctgatggccaagagcatcgtgacccttcagggccagaaggagggcagagccatgggcctgggcctgcttttccaggatcctgcaggaacgagcactggccagagagggcccagctgtagccatggctcaggcaagcccctcagcccttgcccccatccctcggacccaccaaactgcacacacagctcctcttaccgtagcctccgtttatgggccttgctttgggctttgcaggctctgggctcagggctggagtgcgctcttggtccctggtccctcgtccacaggggcaggcctgggacccagctactctgtccaggccactgtggccagagctggaaggcagggcagagggaatgttccctgcaccctggaaaggggagttgagtcacaagaggttaaggtgggtccaggaaggcagctgctcttagtgcccgcctaggagttgagtacagtgaggagggtggaggaaggtgctgagcttagccttgtgccctgcccccatctccccaggcctccagcctctcccggctgcctgccgcccaaagagaaatcacaggggcggggcaggaatgcaaagtgttttctcagaacagctgaaacattccgaagagggaatggatggggagaatggtcaatacacataagaccgtgtcccaaggagctgatttccaggcccctgaggactggagaccgcttcacccctgcacttcagacaccgtttgtcccccggggcaaggtctccttactctgagcccaggccgttccccttggcttcctccgtccacccaggctgcactgcagtgatggcgcgggaggcaccagctctgtggcctgtgtccagcagctgcgggtctgaaggaatagccagagaggagcacctgaaccccatgggcttggacttcctggggccccgctgggatttcttcgctgctctagctggcaggacacatcccggcctcttccacccattcccccatgtggctgaagacattccaacaatggggtgggcccataatagttagccctcagtcagttcccggagcacagccctgggagggggctatttctctccccactgaaaacatttcaaagctgagttacttgtctgaggcctcatccctcggaagccgtctgactccagagtctgagcccccggctagtaccctatagagagggggctctccaaaggggctgctggggcatgtgtgcctgtggcagaaaagaggagaccctggaattcagcaccctgggtgccattcccagcgtttagtttctagaggcctcagtttctccatcagcttatgggatccttgtctttactgacaagaatggaatagaaatgtaaaagtactctgaaaagcaattgccctgtaacttatctagaaagaaaagaccctgagactccagaatctgctgttgccatagccccatatgtgtgaattctgcaactagccaaggctagttcctttcaattccatttaaaaaacaaaaaccagcaggtgtggtggctcatggcgtaatgggcctgcccaatgctttgggaggccaaggcaggtagatcgcttgagcccaggagtttgagacaagccctggcaacatagtgagatcccatttctacaaaaaaaaaaaaaaaaaaattagccgggtgtggtggcacacgcctgtagtctcagctactcaggtggctgaggtgggaggatcgtttgagccctggaggttgaggctgcagtgagctgtgatcgcaccactgcactctggcctgggcgacagagtgagacactgtctgagaacaaaaaacgactgaaaaaaaaaatcaccttagctttttctcttagaatcttctctaaaacgtattctttgtggcattctgaaataggattcatgatgatgcctgttgatcttagggacactacctcacctgccagtatctttggggctgtgtccttcaaggacatgtccccagactgctgtgcagtgtcattttttgtgtttggtttggtggtggcttcttcccccttgctaggctatcaacctcttatcaccacttgttggtgtcagaactaactgcttctggtctggagagggactgaccgatgcctttgggtagagagaattatgaaagaaattttggtatttttctactttatattttctgaggtttctgtaataagcatatttcacttttccaataagaaaaaaaaaaacttggcctggcgcggtggctcacacctgtaatcccagcactttgggaagtcgaggtgggaggatcacttgagttcaggagttcgagaccagcttgggcaatatggtgaaaccccgtctctactaaaaatacaaaaattagccaggcgtggtggcgtgcacttgtagtcccagctactcaggaagctgaggcgggagaatcacttgaacccgggaggcagaggttgcagtgagctgagatcactcctctgcttcagcctgggcaattgagccagactctgtctc

SEQ ID NO: 2439 - DNA, 5532 bp, Homo sapiens
  source 1..5532: mol_type = genomic DNA
gtccgccgggacctttctgggagtcgtaggcttaatgaccctatgccctctgttggcctgtctgtgccctggtggctctgattacttgtttctgttttttgtttttgtttttttttttgagatggagttttgcttttgtcgcccaggctggagtgctatggcacaatcttggttcactgcaacctctgccttccgggttcaagcgattctcctgcctcagcctccagagtagctgggattacaggcgcccgccaccaaacctggctaatttttatatttttagtagagtcgggatttcaccatgttggccaggctggtctcaaactcctggcctcaggtgatccacccacctcggcctcccaaagtgctgggattacaggtgtgttttttgtttttttaagagatggagtctcgctatgttgcccaggctggccttgaactcctgggctcaggcaatccttctgcctcagccttcccagtagctgggtcactgtgatgatttgaattgaattctgtgatgtgtaagaagagcagcctgcaaggcaagcacagatggggcagcttttgttctgagaaattcgtgcccttactgaacttgggtctggctatttttggaacatggccagcatcaagttctaacccacaacacggtctttttggagtagcatgaattcaggagaaatctggctgcatagtcaagccctcaccccttccatcctgtgcacgaactgtttcaagtaacagatgttccaggcagagccagccagagtgagctgttccttctctggagggtgatctggtatccctgaacgcctgttggcctcatctccaccaacccctgcagtctctgcccctgagtccccctccttccatccgcctccccttactagagcctcagccctccctcctcgcctggaagccttgcccccgcccccttgtgctggctggagctcaagcctcttcctttgtcgcagctccgcccagttgaacacacccgctggggaaggtgcctctgttccctccccacgcactctgggcctgagctgacagagatggaccatcgaaaagccagggtcctcccagctgggcactactgcccctcgctaggaatatgggcctcgcaggtcggcagcgtgaggtcctctgtgccaccttccatcagtaggaacccagccatggtgaacgaagccagaggaaacagcagcctcaacccctgcttggagggcagtgccagcagtggcagtgagagctccaaagatagttcgagatgttccaccccgggcctggaccccgagcggcatgagagactccgggagaagatgaggcggcgattggaatctggtgacaagtggttctccctggaattcttccctcctcgaactgctgagggagctgtcaatctcatctcaaggtttgaccggatggcagcaggtggccccctctacatagacgtgacctggcacccagcaggtgaccctggctcagacaaggagacctcctccatgatgatcgccagcaccgccgtgaactactgtggcctggagaccatcctgcacatgacctgctgccgtcagcgcctggaggagatcacgggccatctgcacaaagctaagcagctgggcctgaagaacatcatggcgctgcggggagacccaataggtgaccagtgggaagaggaggagggaggcttcaactacgcagtggacctggtgaagcacatccgaagtgagtttggtgactactttgacatctgtgtggcaggttaccccaaaggccaccccgaagcagggagctttgaggctgacctgaagcacttgaaggagaaggtgtctgcgggagccgatttcatcatcacgcagcttttctttgaggctgacacattcttccgctttgtgaaggcatgcaccgacatgggcatcacttgccccatcgtccccgggatctttcccatccagggctaccactcccttcggcagcttgtgaagctgtccaagctggaggtgccacaggagatcaaggacgtgattgagccaatcaaagacaacgatgctgccatccgcaactatggcatcgagctggccgtgagcctgtgccaggagcttctggccagtggcttggtgccaggcctccacttctacaccctcaaccgcgagatggctaccacagaggtgctgaagcgcctggggatgtggactgaggaccccaggcgtcccctaccctgggctctcagcgcccaccccaagcgccgagaggaagatgtacgtcccatcttctgggcctccagaccaaagagttacatctaccgtacccaggagtgggacgagttccctaacggccgctggggcaattcctcttcccctgcctttggggagctgaaggactactacctcttctacctgaagagcaagtcccccaaggaggagctgctgaagatgtggggggaggagctgaccagtgaagaaagtgtctttgaagtcttcgttctttacctctcgggagaaccaaaccggaatggtcacaaagtgacttgcctgccctggaacgatgagcccctggcggctgagaccagcctgctgaaggaggagctgctgcgggtgaaccgccagggcatcctcaccatcaactcacagcccaacatcaacgggaagccgtcctccgaccccatcgtgggctggggccccagcgggggctatgtcttccagaaggcctacttagagtttttcacttcccgcgagacagcggaagcacttctgcaagtgctgaagaagtacgagctccgggttaattaccaccttgtcaatgtgaagggtgaaaacatcaccaatgcccctgaactgcagccgaatgctgtcacttggggcatcttccctgggcgagagatcatccagcccaccgtagtggatcccgtcagcttcatgttctggaaggacgaggcctttgccctgtggattgagcggtggggaaagctgtatgaggaggagtccccgtcccgcaccatcatccagtacatccacgacaactacttcctggtcaacctggtggacaatgacttcccactggacaactgcctctggcaggtggtggaagacacattggagcttctcaacaggcccacccagaatgcgagagaaacggaggctccatgaccctgcgtcctgacgccctgcgttggagccactcctgtcccgccttcctcctccacagtgctgcttctcttgggaactccactctccttcgtgtctctcccaccccggcctccactcccccacctgacaatggcagctagactggagtgaggcttccaggctcttcctggacctgagtcggccccacatgggaacctagtactctctgctctagccaggagtctgtgctcttttggtggggagcacttgcgtcctgcagaggaccacagtgggtggcacctcctgagaaggcgaggagagtggttgttgccaactaagccctcgaaccaaggcagcctccagagccagcctgggactcccagtgaacttacacttggagcccgtgcagtacaggcaaaacacgcaagggcatcaggcactggtggcatcgtagaagagatgtggcaaagtgctgtacccttccacctcctagaggtgggcagctgggccccacctacttgtgactgaaggggcacaccactgccctgcctgcccacttagccgtccatggcaccagccccctggatgggcattgggctgacacctaccatgctgctttttggcacagttgtctattctgagccttgagagaaaaagtgccccttaagggttgaaggcagtctgaacccttgtgcttggtggggctcgtggccttccccttttgcctggctgtggaggcctgatgctgccccgttccctgtcagaggctaagatgagatttgccagcacaggggccccagatctgcctgggcctgtgcagcagcccagcttcctggtgtatttttcaggtaggcccttgtcctgccagctgccttcctcatcccctcgtcctgtcccagaggttatctgcctggcctggctccccacgagtcacctgcaagccccagggcctgggggcagtgactggcaggtgcagatgggctgtttcgtgtagtggaagagcagcctgatggccaagggggtggacgcaattgtgggatgtcctctttactcccttcctggcctcactggctggggcagaggggcagccgctaggagagactgaaagcagcagctaggactgaggagtgggttttattgtccttcagagctcttcaagctgtcccctctgtcatcactccctggatgtgtggggcatggttccttccctgggaaggctaagttcagttctgttttttattctatgagaacaagtcacagctgcagctgggccccatgctctgccccaagcccccaaccccgcggtgctctggcggcttcctgtccactctcggggcccttggggcctggcttgctccagggtcttgggctactggcagctcctctccttgggctcctggctgccaggcgttggtgccacttcttaaaggcctggaaccagggaggagaggaaatgctattgttgtgggctttctccggggtctgtgctgtgcctgctagagcaacccctgtacccagctccttttgtccccagggcccctccctctgccccaagcagccagccagtcttgcctaggccaaatgcacaagctcagaatagatctgatggtgagctgggaagctgtactcagagcagagcaaatgagggagggggcgctcaggacccaggccctccatgggctagtgtgagtggcagccatgcctcatgccacaccttcttcgcaaactgatggaccgggtgggcctggcctgagctggggccacaaatcaaagcaagggctccagcatccagcctgtgtgttctgtaatggaactgaccccctcccctgaaaacgaaggggccccggggctggcaagcagggaaagctccacggtgcgtggctgtggcacagacttctggaaggctggctgagtggaatgcagggaagagggcagtacctgggaaaggacccacccatcttcctgctgctgtaactgctgagccactcgcagtcgcaggatccgctgccaccacgtctgccaggcccatctcaggtgccactccctgagctttggggacagttggcagagaaggcctcttgtgctcacgctcccccgcagtccccagcccttctgcctttctcccccgacactgctgcaccagagtgaaagggctatggcaagggggtgtcatctgaggagtattaagaatgcagattcctgggcctgtcccccaaggttttggagtcagtaggtccaagggccatacttttgagaggggtttgggttaagtatgaggtgaaatgggagatggtcagtgtggagaggggtgcacccactcaccagggtccgcaccagctgctctgccccttgggcatccacccagtgctgccatgccactgccaggcacctggcctgctgggaaccc

SEQ ID NO: 2440 - DNA, 6232 bp, Homo sapiens
  source 1..6232: mol_type = genomic DNA
atgttgggggcggggcttccggtcacccgcgccggtggtttccgccctgtaggcccgcctctccagcaacctgacacctgcgccgcgccccttcactgcgttccccgcccctgcagcggccacagtggtgcggccggcggccgagcgttctgagtcacccgggactggaggtaggaacccagccatggtgaacgaagccagaggaaacagcagcctcaacccctgcttggagggcagtgccagcagtggcagtgagagctccaaagatagttcgagatgttccaccccgggcctggaccccgagcggcatgagagactccgggagaagatgaggcggcgattggaatctggtgacaagtggttctccctggaattcttccctcctcgaactgctgagggagctgtcaatctcatctcaaggtttgaccggatggcagcaggtggccccctctacatagacgtgacctggcacccagcaggtgaccctggctcagacaaggagacctcctccatgatgatcgccagcaccgccgtgaactactgtggcctggagaccatcctgcacatgacctgctgccgtcagcgcctggaggagatcacgggccatctgcacaaagctaagcagctgggcctgaagaacatcatggcgctgcggggagacccaataggtgaccagtgggaagaggaggagggaggcttcaactacgcagtggacctggtgaagcacatccgaagtgagtttggtgactactttgacatctgtgtggcaggttaccccaaaggccaccccgaagcagggagctttgaggctgacctgaagcacttgaaggagaaggtgtctgcgggagccgatttcatcatcacgcagcttttctttgaggctgacacattcttccgctttgtgaaggcatgcaccgacatgggcatcacttgccccatcgtccccgggatctttcccatccagggctaccactcccttcggcagcttgtgaagctgtccaagctggaggtgccacaggagatcaaggacgtgattgagccaatcaaagacaacgatgctgccatccgcaactatggcatcgagctggccgtgagcctgtgccaggagcttctggccagtggcttggtgccaggcctccacttctacaccctcaaccgcgagatggctaccacagaggtgctgaagcgcctggggatgtggactgaggaccccaggcgtcccctaccctgggctctcagcgcccaccccaagcgccgagaggaagatgtacgtcccatcttctgggcctccagaccaaagagttacatctaccgtacccaggagtgggacgagttccctaacggccgctggggcaattcctcttcccctgcctttggggagctgaaggactactacctcttctacctgaagagcaagtcccccaaggaggagctgctgaagatgtggggggaggagctgaccagtgaagaaagtgtctttgaagtcttcgttctttacctctcgggagaaccaaaccggaatggtcacaaagtgacttgcctgccctggaacgatgagcccctggcggctgagaccagcctgctgaaggaggagctgctgcgggtgaaccgccagggcatcctcaccatcaactcacagcccaacatcaacgggaagccgtcctccgaccccatcgtgggctggggccccagcgggggctatgtcttccagaaggcctacttagagtttttcacttcccgcgagacagcggaagcacttctgcaagtgctgaagaagtacgagctccgggttaattaccaccttgtcaatgtgaagggtgaaaacatcaccaatgcccctgaactgcagccgaatgctgtcacttggggcatcttccctgggcgagagatcatccagcccaccgtagtggatcccgtcagcttcatgttctggaaggacgaggcctttgccctgtggattgagcggtggggaaagctgtatgaggaggagtccccgtcccgcaccatcatccagtacatccacgacaactacttcctggtcaacctggtggacaatgacttcccactggacaactgcctctggcaggtggtggaagacacattggagcttctcaacaggcccacccagaatgcgagagaaacggaggctccatgaccctgcgtcctgacgccctgcgttggagccactcctgtcccgccttcctcctccacagtgctgcttctcttgggaactccactctccttcgtgtctctcccaccccggcctccactcccccacctgacaatggcagctagactggagtgaggcttccaggctcttcctggacctgagtcggccccacatgggaacctagtactctctgctctagccaggagtctgtgctcttttggtggggagcacttgcgtcctgcagaggaccacagtgggtggcacctcctgagaaggcgaggagagtggttgttgccaactaagccctcgaaccaaggcagcctccagagccagcctgggactcccagtgaacttacacttggagcccgtgcagtacaggcaaaacacgcaagggcatcaggcactggtggcatcgtagaagagatgtggcaaagtgctgtacccttccacctcctagaggtgggcagctgggccccacctacttgtgactgaaggggcacaccactgccctgcctgcccacttagccgtccatggcaccagccccctggatgggcattgggctgacacctaccatgctgctttttggcacagttgtctattctgagccttgagagaaaaagtgccccttaagggttgaaggcagtctgaacccttgtgcttggtggggctcgtggccttccccttttgcctggctgtggaggcctgatgctgccccgttccctgtcagaggctaagatgagatttgccagcacaggggccccagatctgcctgggcctgtgcagcagcccagcttcctggtgtatttttcaggtaggcccttgtcctgccagctgccttcctcatcccctcgtcctgtcccagaggttatctgcctggcctggctccccacgagtcacctgcaagccccagggcctgggggcagtgactggcaggtgcagatgggctgtttcgtgtagtggaagagcagcctgatggccaagggggtggacgcaattgtgggatgtcctctttactcccttcctggcctcactggctggggcagaggggcagccgctaggagagactgaaagcagcagctaggactgaggagtgggttttattgtccttcagagctcttcaagctgtcccctctgtcatcactccctggatgtgtggggcatggttccttccctgggaaggctaagttcagttctgttttttattctatgagaacaagtcacagctgcagctgggccccatgctctgccccaagcccccaaccccgcggtgctctggcggcttcctgtccactctcggggcccttggggcctggcttgctccagggtcttgggctactggcagctcctctccttgggctcctggctgccaggcgttggtgccacttcttaaaggcctggaaccagggaggagaggaaatgctattgttgtgggctttctccggggtctgtgctgtgcctgctagagcaacccctgtacccagctccttttgtccccagggcccctccctctgccccaagcagccagccagtcttgcctaggccaaatgcacaagctcagaatagatctgatggtgagctgggaagctgtactcagagcagagcaaatgagggagggggcgctcaggacccaggccctccatgggctagtgtgagtggcagccatgcctcatgccacaccttcttcgcaaactgatggaccgggtgggcctggcctgagctggggccacaaatcaaagcaagggctccagcatccagcctgtgtgttctgtaatggaactgaccccctcccctgaaaacgaaggggccccggggctggcaagcagggaaagctccacggtgcgtggctgtggcacagacttctggaaggctggctgagtggaatgcagggaagagggcagtacctgggaaaggacccacccatcttcctgctgctgtaactgctgagccactcgcagtcgcaggatccgctgccaccacgtctgccaggcccatctcaggtgccactccctgagctttggggacagttggcagagaaggcctcttgtgctcacgctcccccgcagtccccagcccttctgcctttctcccccgacactgctgcaccagagtgaaagggctatggcaagggggtgtcatctgaggagtattaagaatgcagattcctgggcctgtcccccaaggttttggagtcagtaggtccaagggccatacttttgagaggggtttgggttaagtatgaggtgaaatgggagatggtcagtgtggagaggggtgcacccactcaccagggtccgcaccagctgctctgccccttgggcatccacccagtgctgccatgccactgccaggcacctggcctgctgggaaccccgcagcccgtgaagcagtgcctcgaggcaccggcgctgcaggtacttcctcctgatggccaagagcatcgtgacccttcagggccagaaggagggcagagccatgggcctgggcctgcttttccaggatcctgcaggaacgagcactggccagagagggcccagctgtagccatggctcaggcaagcccctcagcccttgcccccatccctcggacccaccaaactgcacacacagctcctcttaccgtagcctccgtttatgggccttgctttgggctttgcaggctctgggctcagggctggagtgcgctcttggtccctggtccctcgtccacaggggcaggcctgggacccagctactctgtccaggccactgtggccagagctggaaggcagggcagagggaatgttccctgcaccctggaaaggggagttgagtcacaagaggttaaggtgggtccaggaaggcagctgctcttagtgcccgcctaggagttgagtacagtgaggagggtggaggaaggtgctgagcttagccttgtgccctgcccccatctccccaggcctccagcctctcccggctgcctgccgcccaaagagaaatcacaggggcggggcaggaatgcaaagtgttttctcagaacagctgaaacattccgaagagggaatggatggggagaatggtcaatacacataagaccgtgtcccaaggagctgatttccaggcccctgaggactggagaccgcttcacccctgcacttcagacaccgtttgtcccccggggcaaggtctccttactctgagcccaggccgttccccttggcttcctccgtccacccaggctgcactgcagtgatggcgcgggaggcaccagctctgtggcctgtgtccagcagctgcgggtctgaaggaatagccagagaggagcacctgaaccccatgggcttggacttcctggggccccgctgggatttcttcgctgctctagctggcaggacacatcccggcctcttccacccattcccccatgtggctgaagacattccaacaatggggtgggcccataatagttagccctcagtcagttcccggagcacagccctgggagggggctatttctctccccactgaaaacatttcaaagctgagttacttgtctgaggcctcatccctcggaagccgtctgactccagagtctgagcccccggctagtaccctatagagagggggctctccaaaggggctgctggggcatgtgtgcctgtggcagaaaagaggagaccctggaattcagcaccctgggtgccattcccagcgtttagtttctagaggcctcagtttctccatcagcttatgggatccttgtctttactgacaagaatggaatagaaatgtaaaagtactctgaaaagcaattgccctgtaacttatctagaaagaaaagaccctgagactccagaatctgctgttgccatagccccatatgtgtgaattctgcaactagccaaggctagttcctttcaattccatttaaaaaacaaaaaccagcaggtgtggtggctcatggcgtaatgggcctgcccaatgctttgggaggccaaggcaggtagatcgcttgagcccaggagtttgagacaagccctggcaacatagtgagatcccatttctacaaaaaaaaaaaaaaaaaaa

SEQ ID NO: 2441 - DNA, 7057 bp, Homo sapiens
  source 1..7057: mol_type = genomic DNA
gccttcttcctgtgtggaaatacagcgcctccggcttgaacctgccactcaggtgtcttgatgtgtcgggggtgtggctgcctgccccctgatgctccctgccccaccctgtgcagtaggaacccagccatggtgaacgaagccagaggaaacagcagcctcaacccctgcttggagggcagtgccagcagtggcagtgagagctccaaagatagttcgagatgttccaccccgggcctggaccccgagcggcatgagagactccgggagaagatgaggcggcgattggaatctggtgacaagtggttctccctggaattcttccctcctcgaactgctgagggagctgtcaatctcatctcaaggtttgaccggatggcagcaggtggccccctctacatagacgtgacctggcacccagcaggtgaccctggctcagacaaggagacctcctccatgatgatcgccagcaccgccgtgaactactgtggcctggagaccatcctgcacatgacctgctgccgtcagcgcctggaggagatcacgggccatctgcacaaagctaagcagctgggcctgaagaacatcatggcgctgcggggagacccaataggtgaccagtgggaagaggaggagggaggcttcaactacgcagtggacctggtgaagcacatccgaagtgagtttggtgactactttgacatctgtgtggcaggttaccccaaaggccaccccgaagcagggagctttgaggctgacctgaagcacttgaaggagaaggtgtctgcgggagccgatttcatcatcacgcagcttttctttgaggctgacacattcttccgctttgtgaaggcatgcaccgacatgggcatcacttgccccatcgtccccgggatctttcccatccagggctaccactcccttcggcagcttgtgaagctgtccaagctggaggtgccacaggagatcaaggacgtgattgagccaatcaaagacaacgatgctgccatccgcaactatggcatcgagctggccgtgagcctgtgccaggagcttctggccagtggcttggtgccaggcctccacttctacaccctcaaccgcgagatggctaccacagaggtgctgaagcgcctggggatgtggactgaggaccccaggcgtcccctaccctgggctctcagcgcccaccccaagcgccgagaggaagatgtacgtcccatcttctgggcctccagaccaaagagttacatctaccgtacccaggagtgggacgagttccctaacggccgctggggcaattcctcttcccctgcctttggggagctgaaggactactacctcttctacctgaagagcaagtcccccaaggaggagctgctgaagatgtggggggaggagctgaccagtgaagaaagtgtctttgaagtcttcgttctttacctctcgggagaaccaaaccggaatggtcacaaagtgacttgcctgccctggaacgatgagcccctggcggctgagaccagcctgctgaaggaggagctgctgcgggtgaaccgccagggcatcctcaccatcaactcacagcccaacatcaacgggaagccgtcctccgaccccatcgtgggctggggccccagcgggggctatgtcttccagaaggcctacttagagtttttcacttcccgcgagacagcggaagcacttctgcaagtgctgaagaagtacgagctccgggttaattaccaccttgtcaatgtgaagggtgaaaacatcaccaatgcccctgaactgcagccgaatgctgtcacttggggcatcttccctgggcgagagatcatccagcccaccgtagtggatcccgtcagcttcatgttctggaaggacgaggcctttgccctgtggattgagcggtggggaaagctgtatgaggaggagtccccgtcccgcaccatcatccagtacatccacgacaactacttcctggtcaacctggtggacaatgacttcccactggacaactgcctctggcaggtggtggaagacacattggagcttctcaacaggcccacccagaatgcgagagaaacggaggctccatgaccctgcgtcctgacgccctgcgttggagccactcctgtcccgccttcctcctccacagtgctgcttctcttgggaactccactctccttcgtgtctctcccaccccggcctccactcccccacctgacaatggcagctagactggagtgaggcttccaggctcttcctggacctgagtcggccccacatgggaacctagtactctctgctctagccaggagtctgtgctcttttggtggggagcacttgcgtcctgcagaggaccacagtgggtggcacctcctgagaaggcgaggagagtggttgttgccaactaagccctcgaaccaaggcagcctccagagccagcctgggactcccagtgaacttacacttggagcccgtgcagtacaggcaaaacacgcaagggcatcaggcactggtggcatcgtagaagagatgtggcaaagtgctgtacccttccacctcctagaggtgggcagctgggccccacctacttgtgactgaaggggcacaccactgccctgcctgcccacttagccgtccatggcaccagccccctggatgggcattgggctgacacctaccatgctgctttttggcacagttgtctattctgagccttgagagaaaaagtgccccttaagggttgaaggcagtctgaacccttgtgcttggtggggctcgtggccttccccttttgcctggctgtggaggcctgatgctgccccgttccctgtcagaggctaagatgagatttgccagcacaggggccccagatctgcctgggcctgtgcagcagcccagcttcctggtgtatttttcaggtaggcccttgtcctgccagctgccttcctcatcccctcgtcctgtcccagaggttatctgcctggcctggctccccacgagtcacctgcaagccccagggcctgggggcagtgactggcaggtgcagatgggctgtttcgtgtagtggaagagcagcctgatggccaagggggtggacgcaattgtgggatgtcctctttactcccttcctggcctcactggctggggcagaggggcagccgctaggagagactgaaagcagcagctaggactgaggagtgggttttattgtccttcagagctcttcaagctgtcccctctgtcatcactccctggatgtgtggggcatggttccttccctgggaaggctaagttcagttctgttttttattctatgagaacaagtcacagctgcagctgggccccatgctctgccccaagcccccaaccccgcggtgctctggcggcttcctgtccactctcggggcccttggggcctggcttgctccagggtcttgggctactggcagctcctctccttgggctcctggctgccaggcgttggtgccacttcttaaaggcctggaaccagggaggagaggaaatgctattgttgtgggctttctccggggtctgtgctgtgcctgctagagcaacccctgtacccagctccttttgtccccagggcccctccctctgccccaagcagccagccagtcttgcctaggccaaatgcacaagctcagaatagatctgatggtgagctgggaagctgtactcagagcagagcaaatgagggagggggcgctcaggacccaggccctccatgggctagtgtgagtggcagccatgcctcatgccacaccttcttcgcaaactgatggaccgggtgggcctggcctgagctggggccacaaatcaaagcaagggctccagcatccagcctgtgtgttctgtaatggaactgaccccctcccctgaaaacgaaggggccccggggctggcaagcagggaaagctccacggtgcgtggctgtggcacagacttctggaaggctggctgagtggaatgcagggaagagggcagtacctgggaaaggacccacccatcttcctgctgctgtaactgctgagccactcgcagtcgcaggatccgctgccaccacgtctgccaggcccatctcaggtgccactccctgagctttggggacagttggcagagaaggcctcttgtgctcacgctcccccgcagtccccagcccttctgcctttctcccccgacactgctgcaccagagtgaaagggctatggcaagggggtgtcatctgaggagtattaagaatgcagattcctgggcctgtcccccaaggttttggagtcagtaggtccaagggccatacttttgagaggggtttgggttaagtatgaggtgaaatgggagatggtcagtgtggagaggggtgcacccactcaccagggtccgcaccagctgctctgccccttgggcatccacccagtgctgccatgccactgccaggcacctggcctgctgggaaccccgcagcccgtgaagcagtgcctcgaggcaccggcgctgcaggtacttcctcctgatggccaagagcatcgtgacccttcagggccagaaggagggcagagccatgggcctgggcctgcttttccaggatcctgcaggaacgagcactggccagagagggcccagctgtagccatggctcaggcaagcccctcagcccttgcccccatccctcggacccaccaaactgcacacacagctcctcttaccgtagcctccgtttatgggccttgctttgggctttgcaggctctgggctcagggctggagtgcgctcttggtccctggtccctcgtccacaggggcaggcctgggacccagctactctgtccaggccactgtggccagagctggaaggcagggcagagggaatgttccctgcaccctggaaaggggagttgagtcacaagaggttaaggtgggtccaggaaggcagctgctcttagtgcccgcctaggagttgagtacagtgaggagggtggaggaaggtgctgagcttagccttgtgccctgcccccatctccccaggcctccagcctctcccggctgcctgccgcccaaagagaaatcacaggggcggggcaggaatgcaaagtgttttctcagaacagctgaaacattccgaagagggaatggatggggagaatggtcaatacacataagaccgtgtcccaaggagctgatttccaggcccctgaggactggagaccgcttcacccctgcacttcagacaccgtttgtcccccggggcaaggtctccttactctgagcccaggccgttccccttggcttcctccgtccacccaggctgcactgcagtgatggcgcgggaggcaccagctctgtggcctgtgtccagcagctgcgggtctgaaggaatagccagagaggagcacctgaaccccatgggcttggacttcctggggccccgctgggatttcttcgctgctctagctggcaggacacatcccggcctcttccacccattcccccatgtggctgaagacattccaacaatggggtgggcccataatagttagccctcagtcagttcccggagcacagccctgggagggggctatttctctccccactgaaaacatttcaaagctgagttacttgtctgaggcctcatccctcggaagccgtctgactccagagtctgagcccccggctagtaccctatagagagggggctctccaaaggggctgctggggcatgtgtgcctgtggcagaaaagaggagaccctggaattcagcaccctgggtgccattcccagcgtttagtttctagaggcctcagtttctccatcagcttatgggatccttgtctttactgacaagaatggaatagaaatgtaaaagtactctgaaaagcaattgccctgtaacttatctagaaagaaaagaccctgagactccagaatctgctgttgccatagccccatatgtgtgaattctgcaactagccaaggctagttcctttcaattccatttaaaaaacaaaaaccagcaggtgtggtggctcatggcgtaatgggcctgcccaatgctttgggaggccaaggcaggtagatcgcttgagcccaggagtttgagacaagccctggcaacatagtgagatcccatttctacaaaaaaaaaaaaaaaaaaattagccgggtgtggtggcacacgcctgtagtctcagctactcaggtggctgaggtgggaggatcgtttgagccctggaggttgaggctgcagtgagctgtgatcgcaccactgcactctggcctgggcgacagagtgagacactgtctgagaacaaaaaacgactgaaaaaaaaaatcaccttagctttttctcttagaatcttctctaaaacgtattctttgtggcattctgaaataggattcatgatgatgcctgttgatcttagggacactacctcacctgccagtatctttggggctgtgtccttcaaggacatgtccccagactgctgtgcagtgtcattttttgtgtttggtttggtggtggcttcttcccccttgctaggctatcaacctcttatcaccacttgttggtgtcagaactaactgcttctggtctggagagggactgaccgatgcctttgggtagagagaattatgaaagaaattttggtatttttctactttatattttctgaggtttctgtaataagcatatttcacttttccaataagaaaaaaaaaaacttggcctggcgcggtggctcacacctgtaatcccagcactttgggaagtcgaggtgggaggatcacttgagttcaggagttcgagaccagcttgggcaatatggtgaaaccccgtctctactaaaaatacaaaaattagccaggcgtggtggcgtgcacttgtagtcccagctactcaggaagctgaggcgggagaatcacttgaacccgggaggcagaggttgcagtgagctgagatcactcctctgcttcagcctgggcaattgagccagactctgtctcaaaaataaacaaaaaaacttgacaaaaaaa

SEQ ID NO: 2442 - DNA, 398 bp, Homo sapiens
  source 1..398: mol_type = genomic DNA
ctcagtgaatgttggctatcaccgtgtgccaaactctggggataccccaggcaggacaccggtcctgtctcagggaactggggaaagagaaaggagacaggccttttcacccacagttacaacccagggtgctatgggagtccagctgataacggataaatcgtgggagttggcttacaaatatggcacatgcgtggcatatactaggaatgcaataagtctttgaaaatcagagggtttacaggtggttcagcttcctcctactctaggttctgttccagcaagcaattaacgagtaggaacccagccatggtgaacgaagccagaggaaacagcagcctcaacccctgcttggagggcagtgccagcagtggcagtgagagctccaaagatagttc

SEQ ID NO: 2443 - DNA, 1034 bp, Homo sapiens
  source 1..1034: mol_type = genomic DNA
cagtggtgcggccggcggccgagcgttctgagtcacccgggactggagggtgagtgacggcgaggccggggtcgccgggagggagatcctggagccggcaaacaacctcccgggggcaaggacgtgcttgtgggcggggagcgctggaggccggcctgcctctcttcttggggggggctgccgcctcccttgcgcacccttcgcgggattagtgtaactcccaatggctaccacttccagcgaccgccaaccctcaagcgaagactgactttggctccctgcctggacggaggggcccctgagccaggggtgacgatcccgcccctctgaccggcccaggcccgtgtcctcgcccccatcggtgactcagtgacctggtgactggattctcggccacctgggcgccgagacggcttccggctcctgccttttaaacctgcctccccggcgatcacctggagaagagcgctgggcccggggcactgcggtccctggcgcccactgcgtcccgctgcgcacgggggtccgccgggacctttctgggagtcgtaggcttagtatcccagtgcttggcgcagactagttgttcataggaacccagccatggtgaacgaagccagaggaaacagcagcctcaacccctgcttggagggcagtgccagcagtggcagtgagagctccaaagatagttcgagatgttccaccccgggcctggaccccgagcggcatgagagactccgggagaagatgaggcggcgattggaatctggtgacaagtggttctccctggaattcttccctcctcgaactgctgagggagctgtcaatctcatctcaaggtttgaccggatggcagcaggtggccccctctacatagacgtgacctggcacccagcaggtgaccctggctcagacaaggagacctcctccatgatgatcgccagcaccgccgtgaactactgtggcctggagaccatcctgcacatgacctgctgccgtcagcgcctggaggagatcacgggccatctgcacaa

SEQ ID NO: 2444 - DNA, 1539 bp, Homo sapiens
  source 1..1539: mol_type = genomic DNA
gtccgccgggacctttctgggagtcgtaggcttaatgaccctatgccctctgttggcctgtctgtgccctggtggctctgattacttgtttctgttttttgtttttgtttttttttttgagatggagttttgcttttgtcgcccaggctggagtgctatggcacaatcttggttcactgcaacctctgccttccgggttcaagcgattctcctgcctcagcctccagagtagctgggattacaggcgcccgccaccaaacctggctaatttttatatttttagtagagtcgggatttcaccatgttggccaggctggtctcaaactcctggcctcaggtgatccacccacctcggcctcccaaagtgctgggattacaggtgtgttttttgtttttttaagagatggagtctcgctatgttgcccaggctggccttgaactcctgggctcaggcaatccttctgcctcagccttcccagtagctgggtcactgtgatgatttgaattgaattctgtgatgtgtaagaagagcagcctgcaaggcaagcacagatggggcagcttttgttctgagaaattcgtgcccttactgaacttgggtctggctatttttggaacatggccagcatcaagttctaacccacaacacggtctttttggagtagcatgaattcaggagaaatctggctgcatagtcaagccctcaccccttccatcctgtgcacgaactgtttcaagtaacagatgttccaggcagagccagccagagtgagctgttccttctctggagggtgatctggtatccctgaacgcctgttggcctcatctccaccaacccctgcagtctctgcccctgagtccccctccttccatccgcctccccttactagagcctcagccctccctcctcgcctggaagccttgcccccgcccccttgtgctggctggagctcaagcctcttcctttgtcgcagctccgcccagttgaacacacccgctggggaaggtgcctctgttccctccccacgcactctgggcctgagctgacagagatggaccatcgaaaagccagggtcctcccagctgggcactactgcccctcgctaggaatatgggcctcgcaggtcggcagcgtgaggtcctctgtgccaccttccatcaggtagctgtcaccgaggagcatgttgcagtgccgggtgggggctgccttgcatgcaaggagcctggcagcagcggagggcaaggctttgagtgaggcggcccggacagccatagctgaggagcatggagccactgggagggggcagtgtcaccttttttggccttcttcctgtgtggaaatacagcgcctccggcttgaacctgccactcaggtgtcttgatgtgtcgggggtgtggctgcctgccccctgatgctccctgccccaccctgtgcagtaggaacccagccatggtgaacgaagccagaggaaacagcagcctcaacccctgcttggagggcagtgccagcagtggcagtgagagctccaaagatagttc

SEQ ID NO: 2445 - DNA, 870 bp, Homo sapiens
  source 1..870: mol_type = genomic DNA
gtccgccgggacctttctgggagtcgtaggcttaatgaccctatgccctctgttggcctgtctgtgccctggtggctctgattacttgtttctgttttttgtttttgtttttttttttgagatggagttttgcttttgtcgcccaggctggagtgctatggcacaatcttggttcactgcaacctctgccttccgggttcaagcgattctcctgcctcagcctccagagtagctgggattacaggcgcccgccaccaaacctggctaatttttatatttttagtagagtcgggatttcaccatgttggccaggctggtctcaaactcctggcctcaggtgatccacccacctcggcctcccaaagtgctgggattacaggtgtgttttttgtttttttaagagatggagtctcgctatgttgcccaggctggccttgaactcctgggctcaggcaatccttctgcctcagccttcccagtagctgggtcactgtgatgatttgaattgaattctgtgatgtgtaagaagagcagcctgcaaggcaagcacagatggggcagcttttgttctgagaaattcgtgcccttactgaacttgggtctggctatttttggaacatggccagcatcaagttctaacccacaacacggtctttttggagtagcatgaattcaggagaaatctggctgcatagtcaagccctcaccccttccatcctgtgcacgaactgtttcaagtaacagatgttccaggcagagccagccagataggaacccagccatggtgaacgaagccagaggaaacagcagcctcaacccctgcttggagggcagtgccagcagtggcagtgagagctccaaagatagttc

SEQ ID NO: 2446 - DNA, 3158 bp, Homo sapiens
  source 1..3158: mol_type = genomic DNA
gcatgcccagtgcccgcgcgcgccgccaggctcgcaagcaccgcgtaggccagctggccggatcccgccgtctgtcatggcggcccccatcctgaaagatgtagtggcctatgttgaagtgtggtcatccaatggaacagaaaattattcaaagacatttacaacacagcttgtggatatgggggcaaaggtttcaaaaacttttaacaaacaagtaactcacgttatcttcaaagatggctaccagagcacttgggacaaagctcagaagagaggcgtaaagctcgtttcggtgctctgggtggaaaaatgcaggacagctggagcacacattgatgaatcattgttccctgcagctaatatgaatgaacacttatcaagcctaattaaaaaaaaacgtaaatgtatgcagcccaaagattttaattttaaaacaccagaaaatgataagagatttcagaagaaatttgagaaaatggctaaagagctacaaaggcaaaaaacaaatctagatgatgatgtacctattctcttatttgaatctaatggttcattaatatatactcccacaattgaaattaatagtaggcaccacagcgcaatggagaagagattacaagagatgaaggagaaaagggaaaatctttcccccacctcttcccaaatgattcagcagtctcatgataatccaagtaactctctgtgtgaagcacctttgaacatttcacgtgatactttgtgttcagatgaatactttgctggtggcttacactcatcttttgatgatctttgtggaaactcaggatgtggaaatcaggaaaggaagttggaaggatccattaatgacattaaaagtgatgtgtgtatttcttcacttgtattgaaagcaaataatattcattcatcaccatctttcactcacctcgataaatcaagtcctcagaaatttctgagtaatctttcaaaggaagaaataaacttgcaaagaaatattgcaggtaaagtagtcacccctgaccaaaagcaggctgcaggtatgtctcaggagacgtttgaagagaagtatcgtttgtctcctaccttatcttcaacaaaaggccaccttttgatacattcaagacccaggagttcctcagtaaagagaaaaagagtatcacatggctcccattcacctccgaaggaaaaatgcaagagaaagaggagcaccaggagatctatcatgccgaggctgcagctgtgcaggtcggaagacaggctgcagcacgtggcgggacctgccctggaggctcttagctgtggggagtcttcatatgatgactatttttcacctgataatcttaaggaaaggtattcagagaatcttcctcctgaatctcagctgccatcaagccctgctcagttgagctgcagaagtctttctaagaaggagagaacaagcatatttgaaatgtctgatttttcctgcgttggcaaaaaaaccagaacagttgacattaccaatttcacagcaaaaaccatctccagtcctcggaaaactggaaatggtgaaggccgtgcaacttcgagttgcgtgacttctgcccctgaagaagccctaaggtgttgtagacaggctgggaaagaagacgcatgcccagagggaaatggcttttcttacaccattgaggaccctgctcttccaaaaggacatgatgatgatttaactcctttggaaggaagccttgaagaaatgaaagaagcggttggtctgaaaagcacacagaacaaaggtaccacttccaaaatatcaaactcctctgaaggcgaagcccagagtgaacatgagccatgttttatagttgactgtaacatggagacgtctacagaagagaaggaaaacttacccggaggatacagtggaagtgttaaaaatagaccaacaaggcatgatgttttagatgactcatgtgacggctttaaggacctcatcaaacctcatgaggaattgaagaaaagtgggagaggcaaaaagccaacaagaacattagtcatgacaagcatgccatctgaaaagcagaatgtcgtcatccaggttgtggataaattgaaaggcttttcaattgcaccagacgtctgtgagaccacgactcacgtgctttccgggaagccacttcgcaccctgaatgtgctgctgggaattgcgcgtggctgctgggttctctcttatgattgggtgctatggtctttagaattgggtcactggatttctgaggagccgttcgaactgtctcaccacttccctgcagctcccctgtgccgaagcgagtgccacttgtctgcagggccgtaccgcggaaccctctttgccgaccagccagcgatgtttgtctcgcctgccagcagccccccagtggccaagctctgtgaactagtccacctgtgcggaggccgggtcagccaagtcccccgccaggccagcatcgtcatcgggccctacagcggaaagaagaaagccacagtcaagtatctgtctgagaaatgggtcttagattccatcacccagcacaaggtctgtgcccctgaaaactacctattgtcacaatgacagtgacctcactggcctgtggtgactgcacacagctcgcaaaactgtctttggatgttcaaatgagaaacaaaactgtgaagagaaggaactggcgtatacaagatgacttctgatatcatgtttgccatgtgttgtggttcttaagaactcataggtgactttctgatgactgaatgtctgtttcagagacgcttcgggcctttttatttttattttattttttattttttgagacggagtcctgccctgtttcccaggctggagtgcaatggcacaatctcggctcactgcaacctccacctcccaggttcaagcgattctgctgcctcagcctcctgagtagctgggattacagatgtgtgccaccatgcctggctaatttttgtagttttagtagagacagggtttcgccatgttggccaggctggtctcaaacgcctgagctcaggtgatctgtcaggcctcttctatagaattccagtctttgtgtcttagtcatgatcataattgaaaggtcacagaacctttgtcattagagcacagtactgccaaataaagaatggaaattcaa

SEQ ID NO: 2447 - DNA, 2917 bp, Homo sapiens
  source 1..2917: mol_type = genomic DNA
gcccagtgcccgcgcgcgccgccaggctcgcaagcaccgcgtaggccagctggccggatcccgccgtctgtcatggcggcccccatcctgaaagatgtagtggcctatgttgaagtgtggtcatccaatggaacagaaaattattcaaagacatttacaacacagcttgtggatatgggggcaaaggtttcaaaaacttttaacaaacaagtaactcacgttatcttcaaagatggctaccagagcacttgggacaaagctcagaagagaggcgtaaagctcgtttcggtgctctgggtggaaaaatgcaggacagctggagcacacattgatgaatcattgttccctgcagctaatatgaatgaacacttatcaagcctaattaaaaaaaaacgtaaatgtatgcagcccaaagattttaattttaaaacaccagaaaatgataagagatttcagaagaaatttgagaaaatggctaaagagctacaaaggcaaaaaacaaatctagatgatgatgtacctattctcttatttgaatctaatggttcattaatatatactcccacaattgaaattaatagtaggcaccacagcgcaatggagaagagattacaagagatgaaggagaaaagggaaaatctttcccccacctcttcccaaatgattcagcagtctcatgataatccaagtaactctctgtgtgaagcacctttgaacatttcacgtgatactttgtgttcagatgaatactttgctggtggcttacactcatcttttgatgatctttgtggaaactcaggatgtggaaatcaggaaaggaagttggaaggatccattaatgacattaaaagtgatgtgtgtatttcttcacttgtattgaaagcaaataatattcattcatcaccatctttcactcacctcgataaatcaagtcctcagaaatttctgagtaatctttcaaaggaagaaataaacttgcaaagaaatattgcaggtaaagtagtcacccctgaccaaaagcaggctgcaggtatgtctcaggagacgtttgaagagaagtatcgtttgtctcctaccttatcttcaacaaaaggccaccttttgatacattcaagacccaggagttcctcagtaaagagaaaaagagtatcacatggctcccattcacctccgaaggaaaaatgcaagagaaagaggagcaccaggagatctatcatgccgaggctgcagctgtgcaggtcggaagacaggctgcagcacgtggcgggacctgccctggaggctcttagctgtggggagtcttcatatgatgactatttttcacctgataatcttaaggaaaggtattcagagaatcttcctcctgaatctcagctgccatcaagccctgctcagttgagctgcagaagtctttctaagaaggagagaacaagcatatttgaaatgtctgatttttcctgcgttggcaaaaaaaccagaacagttgacattaccaatttcacagcaaaaaccatctccagtcctcggaaaactggaaatggtgaaggccgtgcaacttcgagttgcgtgacttctgcccctgaagaagccctaaggtgttgtagacaggctgggaaagaagacgcatgcccagagggaaatggcttttcttacaccattgaggaccctgctcttccaaaaggacatgatgatgatttaactcctttggaaggaagccttgaagaaatgaaagaagcggttggtctgaaaagcacacagaacaaaggtaccacttccaaaatatcaaactcctctgaaggcgaagcccagagtgaacatgagccatgttttatagttgactgtaacatggagacgtctacagaagagaaggaaaacttacccggaggatacagtggaagtatgtgaatctccttttccaagtcaccttcgctaaataaacatgtaacagtgcatccatattttaaatttatcacaactttttcataacttatttccccatttactcctctttttacttaaagaatgtgcatttgatcattccaatgataaactctttaggaatagatgacttgctgtcttgtggaacttctagacttattggttaagtctgttaggaatctatttctccaagacttttccttcttataggtcaaaaggataagtagtccatagtatgaataactgaggggagtgaagtctttttccttattccattggagtcttggcgctgcagcgtgtgtaaagatgtatacgatagagagttttttaaaacctaggttcttaatagtgaggctatttaaagaaagaaattaaggtagattaagccatcgattgtatcatagagaaagtgtgaaaaactacttttagaaatctgttgtcaatattgatttttgaagaaactttggtcagtgttaactatgaagaaacatttaaacatttttgatcatttgtaacaagccttgtttaacttgtacttattttgcttgaagcatcacttgaaaaggtttactcctattcataatttaattgtaattataataaaccatatcattttattaaaagtcaaaacaataaaaaattttgcacttcacagttataagcacaaataggttccagcaaccaaaattgaagaaatcttgaactttgaccgtctttacctaaagattaggttaaaatttgagtgagaacgcattctctctgcatgatttctctgctctacaaatgttttaactgcctctttgaaggtggagaagtcatggtagcgtttgaaatcatcacagacatgttacataccttttccttgagtatacgctccccaaaattgtttcacaaaaagaatgaaaataattttatgtttttggcctgctatttatatcttggctttctgaacatatattaaatttgacaagaaactgta

SEQ ID NO: 2448 - DNA, 2049 bp, Homo sapiens
  source 1..2049: mol_type = genomic DNA
agctggccggatcccgccgtctgtcatggcggcccccatcctgaaagatgtagtggcctatgttgaagtgtggtcatccaatggaacagaaaattattcaaagacatttacaacacagcttgtggatatgggggcaaaggtttcaaaaacttttaacaaacaagtaactcacgttatcttcaaagatggctaccagagcacttgggacaaagctcagaagagaggcgtaaagctcgtttcggtgctctgggtggaaaaatgcaggacagctggagcacacattgatgaatcattgttccctgcagctaatatgaatgaacacttatcaagcctaattaaaaaaaaacgtaaatgtatgcagcccaaagattttaattttaaaacaccagaaaatgataagagatttcagaagaaatttgagaaaatggctaaagagctacaaaggcaaaaaacaaatctagcttcccaaatgattcagcagtctcatgataatccaagtaactctctgtgtgaagcacctttgaacatttcacgtgatactttgtgttcagatgaatactttgctggtggcttacactcatcttttgatgatctttgtggaaactcaggatgtggaaatcaggaaaggaagttggaaggatccattaatgacattaaaagtgatgtgtgtatttcttcacttgtattgaaagcaaataatattcattcatcaccatctttcactcacctcgataaatcaagtcctcagaaatttctgagtaatctttcaaaggaagaaataaacttgcaaagaaatattgcaggtaaagtagtcacccctgaccaaaagcaggctgcaggtatgtctcaggagacgtttgaagagaagtatcgtttgtctcctaccttatcttcaacaaaaggccaccttttgatacattcaagacccaggagttcctcagtaaagagaaaaagagtatcacatggctcccattcacctccgaaggaaaaatgcaagagaaagaggagcaccaggagatctatcatgccgaggctgcagctgtgcaggtcggaagacaggctgcagcacgtggcgggacctgccctggaggctcttagctgtggggagtcttcatatgatgactatttttcacctgataatcttaaggaaaggtattcagagaatcttcctcctgaatctcagctgccatcaagccctgctcagttgagctgcagaagtctttctaagaaggagagaacaagcatatttgaaatgtctgatttttcctgcgttggcaaaaaaaccagaacagttgacattaccaatttcacagcaaaaaccatctccagtcctcggaaaactggaaatggtgaaggccgtgcaacttcgagttgcgtgacttctgcccctgaagaagccctaaggtgttgtagacaggctgggaaagaagacgcatgcccagagggaaatggcttttcttacaccattgaggaccctgctcttccaaaaggacatgatgatgatttaactcctttggaaggaagccttgaagaaatgaaagaagcggttggtctgaaaagcacacagaacaaaggtaccacttccaaaatatcaaactcctctgaaggcgaagcccagagtgaacatgagccatgttttatagttgactgtaacatggagacgtctacagaagagaaggaaaacttacccggaggatacagtggaagtatgtgaatctccttttccaagtcaccttcgctaaataaacatgtaacagtgcatccatattttaaatttatcacaactttttcataacttatttccccatttactcctctttttacttaaagaatgtgcatttgatcattccaatgataaactctttaggaatagatgacttgctgtcttgtggaacttctagacttattggttaagtctgttaggaatctatttctccaagacttttccttcttataggtcaaaaggataagtagtccatagtatgaataactgaggggagtgaagtctttttccttattccattggagtcttggcgctgcagcgtgtgt

SEQ ID NO: 2449 - DNA, 382 bp, Homo sapiens
  source 1..382: mol_type = genomic DNA
gtacctgtctataaggagtcctgcttatcacaatgaatgttctcctgggcagcgttgtgatctttgccaccttcgtgactttatgcaatgcatcatgctatttcatacctaatgagggagttccaggagattcaaccaggatgtttctacacctgtgggttatgacaaagacaactgccaaagaatcttcaagaaggaggactgcaagtatatcgtggtggagaagaaggacccaaaaaagacctgttctgtcagtgaatggataatctaatgtgcttctagtaggcacagggctcccaggccaggcctcattctcctctggcctctaatagtcaatgattgtgtagccatgcctatcagtaaaaagatttttgagcaaaca

SEQ ID NO: 2450 - DNA, 549 bp, Homo sapiens
  source 1..549: mol_type = genomic DNA
tcgaatgcgtggttgccctctccagtataaaagtttgatgcagctttgcctggatgtacctgtctataaggagtcctgcttatcacaatgaatgttctcctgggcagcgttgtgatctttgccaccttcgtgactttatgcaatgcatcatgctatttcatacctaatgagggagttccaggagattcaaccaggaaatgcatggatctcaaaggaaacaaacacccaataaactcggagtggcagactgacaactgtgagacatgcacttgctacgaaacagaaatttcatgttgcacccttgtttctacacctgtgggttatgacaaagacaactgccaaagaatcttcaagaaggaggactgcaagtatatcgtggtggagaagaaggacccaaaaaagacctgttctgtcagtgaatggataatctaatgtgcttctagtaggcacagggctcccaggccaggcctcattctcctctggcctctaatagtcaatgattgtgtagccatgcctatcagtaaaaagatttttgagcaaacacttgaa

SEQ ID NO: 2451 - DNA, 6160 bp, Homo sapiens
  source 1..6160: mol_type = genomic DNA
gtggcgcctcgctactttctgcagcttgtttgcactttttcacgctctagaaaaatctcatcttaattaagggaacaacaaatcatttaatcttcagagcatcttagactgaaaacctttcaactgtgctgaaaaacctagaagacagaccattttgcccaccctctcatttaaaaggaattgaagaagaaataaaatggcagaggtttaaggttactattcaggatgactgatgataattcagatgataaaatagaagatgaattgcaaaccttctttaccagtgataaagatggaaatacacatgcatacaacccgaaatcaccacctacacaaaactcttcagccagcagtgtgaactggaattctgccaacccagatgacatggtggttgattatgaaactgaccctgctgtagttactggtgaaaatatttctttaagccttcagggtgttgaagtatttggtcatgaaaagtcttctagtgatttcattagtaagcaggtgttagatatgcataaagattctatttgtcagtgtcctgcacttgtaggtactgagaagcccaaatatctgcaacacagttgtcattccctagaagcagttgagggccagagtgttgagccatctttgccttttgtgtggaagcctaatgacaatttgaactgtgcaggctactgtgatgccttggagctaaaccaaacatttgacatgacagtggataaagttaactgcacctttatatcacatcatgccatcggaaagagtcagtccttccatactgctggaagcctgccaccaactggtaggagaagtggaagtacatcttctttatcctattccacttggacatcttcccattctgataagacgcatgcaagagaaactacttatgatagagaaagctttgaaaaccctcaagtcacaccatcagaagcccaagacatgacttacacagcattttctgatgtggtgatgcaaagtgaggtttttgtttcagatattggaaatcagtgtgcatgttcttcaggaaaggtcaccagtgagtacacagatggatcacaacaaagactagttggagaaaaggagacacaagcactaacaccagtttctgatggcatggaagtccccaatgattctgcattacaagagttcttttgtttatcccatgatgaatccaatagcgaaccacattcacagagctcatacaggcacaaggaaatgggccaaaatctgagagagacagtgtcctattgtcttattgatgatgaatgccctttaatggtgccagcttttgataagagcgaagctcaagtgctgaacccagagcataaagtcactgagactgaagacacacaaatggtctccaaaggaaaggatttgggaacccaaaatcatacctcagaattgattctaagtagcccgccaggacaaaaggtgggctcgtcatttggactgacttgggatgcaaatgatatggtcattagcacagacaaaacgatgtgcatgtcaacaccagtcctagaacccacaaaagtaaccttttctgtttcaccgattgaagcgacggagaaatgtaagaaagtggagaagggtaatcgagggcttaaaaacataccagactcgaaggaggcacctgtgaacctgtgtaaacccagtttaggaaaatcaacaatcaaaacgaataccccaataggctgcaaagttagaaaaactgaaattataagttacccaagaccaaacttcaagaatgtcaaagcaaaagttatgtctagagcagtgttgcagcccaaagatgctgctttatcaaaggtcacgcccagacctcagcagaccagtgcctcatcaccctcatcagtgaattcaagacaacaaacagtcttgagcagaacaccgagatctgacttgaatgcagacaaaaaagcagaaattctaattaacaagacacataagcagcagtttaataaactcattactagccaggctgtgcatgttacaactcattctaaaaatgcttcacacagggttccaagaacaacatctgccgtgaaatcgaatcaggaagatgttgacaaagccagttcttctaactcagcatgcgagaccgggtccgtttctgcgttgtttcagaagatcaaaggcatactccctgttaaaatggaaagtgcagaatgtttggaaatgacctatgttcccaacattgataggattagccctgaaaagaagggtgaaaaagaaaatgggacatctatggaaaaacaagagctgaaacaagagattatgaatgagacttttgaatatggttctctgtttttgggctctgcttcaaaaacaacgaccacctcaggtaggaatatatccaagcctgactcctgcggtttgaggcaaatagctgctccaaaagccaaagtggggccccctgtttcctgtttgaggcggaacagtgacaatagaaatcccagtgctgatcgagccgtatctcctcagaggatcaggcgtgtgtccagttctggaaagcctacatccttgaaaactgcacagtcgtcatgggtgaatttgcctagaccacttcctaaatccaaagcatctttgaaaagtcctgcgctgcggaggacaggaagcaccccctcaatagccagcacccacagtgagctgagcacttacagcaacaattctggtaatgccgctgtcatcaaatatgaggagaaacctccaaaaccagcatttcagaatggttcctcaggatccttttatttgaagcctttggtatccagggctcatgttcacttgatgaaaactcctccaaaaggtccttcgagaaaaaatttatttacagctcttaatgcagttgaaaagagcaggcaaaagaatcctcgaagcttatgtatccagccacagacagctcccgatgcgctgccccctgagaaaacacttgaattgacgcaatataaaacaaaatgtgaaaaccaaagtggatttatcctgcagctcaagcagcttcttgcctgtggtaataccaagtttgaggcattgacagttgtgattcagcacctgctgtctgagcgggaggaagcactgaaacaacacaaaaccctatctcaagaacttgttaacctccggggagagctagtcactgcttcaaccacctgtgagaaattagaaaaagccaggaatgagttacaaacagtgtatgaagcattcgtccagcagcaccaggctgaaaaaacagaacgagagaatcggcttaaagagttttacaccagggagtatgaaaagcttcgggacacttacattgaagaagcagagaagtacaaaatgcaattgcaagagcagtttgacaacttaaatgctgcgcatgaaacctctaagttggaaattgaagctagccactcagagaaacttgaattgctaaagaaggcctatgaagcctccctttcagaaattaagaaaggccatgaaatagaaaagaaatcgcttgaagatttactttctgagaagcaggaatcgctagagaagcaaatcaatgatctgaagagtgaaaatgatgctttaaatgaaaaattgaaatcagaagaacaaaaaagaagagcaagagaaaaagcaaatttgaaaaatcctcagatcatgtatctagaacaggagttagaaagcctgaaagctgtgttagagatcaagaatgagaaactgcatcaacaggacatcaagttaatgaaaatggagaaactggtggacaacaacacagcattggttgacaaattgaagcgtttccagcaggagaatgaagaattgaaagctcggatggacaagcacatggcaatctcaaggcagctttccacggagcaggctgttctgcaagagtcgctggagaaggagtcgaaagtcaacaagcgactctctatggaaaacgaggagcttctgtggaaactgcacaatggggacctgtgtagccccaagagatcccccacatcctccgccatccctttgcagtcaccaaggaattcgggctccttccctagccccagcatttcacccagatgacacctccccaaagtccacagactctctgaaagcattttgatgcaggtctgcaggactgaccccaaggaggaacgtgggcacaagaggtatatcagcacacgtgtgatcaccgtagggtaactggagcgtcaccaccggcggaatcgcagcttctgagactggaactctggaggaagacttttgcctccgtccaaaagattcctccaaaaaaagatttaaaaaaagatttcggcatcgacacggacgttgttgcacaaagcacttaaagaacgagagcatcttgttcattgcctttttcacctaagcatagggggaaaaactctcagggccctattaagatttataacctttgtaatgttcttcaccacagacaccttcttgtgagttttcagtctgactgtgggggtggggggtgtgaatgaaatggatgtcacagagtgtcatgtgtctgatgcagcctcctctgctgtgtattaaatgtcaaaatctgaatatatctggatatgtactaatcaaataataatcaatcaatcagcatatacatttcagccaaagccatagaagaaaaagcaatagttgcttgaattatgatcatctaccaccaactctgctcagccctgtaacagggtagggagagggtataacaggaagagctttgacttgtccctgtctatacattctctgtatcttttgggggtaacttcttggcagtttttcagtgttcagccatgtcagttgaaactagatttttctgtagattttttacttacccatgtgagcctaacactatcctgtaattcattttctcaggctatgtgtaaatgtagaaccctaatttttctataaaaaaacaaactaactaactaactgtgtaaagaaagaaaaagggaagtaccaatgggtttttccaccttatttttacctttgatctacccttgcagatttaacctgtcttcttccctcccattattctcattttccttttacctttctccaccatccagagccacaaaagcaaaccttctacctcctacctacttttctctgggacaaggataaaggaatatgattttccagagccccagagccagctcatcttccaggtgctgaaaccactttccaaataaactaaagcctggatttgatattacaaattttgggaaatcttagaataaagaacgagaacaaggaagtcattggctagtataattaagaaaggtaggattcagtgcttaccgatgatgcagtacttgatagaagaaaacagtctgggaggatagcgctcatttttcagttaccctttaaggagtccctttgtctttgggaaagtagcagaatggtccgcttctttcccatgagtggaaaatgtggcttgtccaactctcctccaggttgcatttcagtttctttccaaaacttattacctcccctaatcctgagactttggaaaaggtggaaggaagaactgttgctttatctccccctccctgcatgtgtcaacattgtgatgtcagtatttactaatctacattcagtggctgtacaaataacagctgtagtaagaagagattcaggatgctagaggtgaatatttgggtcatttacatgtacactacatagcaagttgatactcatgttgcatgttcttttaaattagtgattttgtgtcttaagtctttaacttccaatacttcatcatgtatgtaaccttccatgtttgcttctgataaatggaaatgtaggttcactgccacttcatgagatatctctgctcacgcttccaagttgttctcaatgacattagccaaagttgggtttgccattcatcccctaggcatggtaaatcttgtgttgttccctgctgtcctccgtattacgtgaccggcaaataaatctcatagcagttaatataaaacatctttggaggatgggagagaacaggagggaagatgggaaacaaaatagagaattcttaagattttgtttaaaccaaatgtttcatgtagaatgcaaaatgttggcacgtcaaaaatatgaatgtgtagacaactgtagttgtgctcagtttgtagtgatgggaagtgtattttactctgatcaaataaataatgctggaatactc

SEQ ID NO: 2452 - DNA, 3731 bp, Homo sapiens
  source 1..3731: mol_type = genomic DNA
acagtgtgatgtggttcagaggcagcttctagacctgcaggagggagattgtattcagaggaagagcatcattttggcaacatctgaaagtgaaaacggaagccagaaacacttggccagccctgggggatttttttcttctatgcctctctggtggaatgacatttgctgtgtaggcatctttcctctgactgtatttcttggccttgaagagtactgagtttaaaaagacagtatgtgacagtccatggaaattgcctcttctgtgaaatctcgccacctgctccgaagacatgttgttgtctcccaaattctccttatccaccattcacatacgactgacggccaaaggattgcttcgaaaccttcgacttccttcagggtttaggagaagcactgttgttttccacacagttgaaaagagcaggcaaaagaatcctcgaagcttatgtatccagccacagacagctcccgatgcgctgccccctgagaaaacacttgaattgacgcaatataaaacaaaatgtgaaaaccaaagtggatttatcctgcagctcaagcagcttcttgcctgtggtaataccaagtttgaggcattgacagttgtgattcagcacctgctgtctgagcgggaggaagcactgaaacaacacaaaaccctatctcaagaacttgttaacctccggggagagctagtcactgcttcaaccacctgtgagaaattagaaaaagccaggaatgagttacaaacagtgtatgaagcattcgtccagcagcaccaggctgaaaaaacagaacgagagaatcggcttaaagagttttacaccagggagtatgaaaagcttcgggacacttacattgaagaagcagagaagtacaaaatgcaattgcaagagcagtttgacaacttaaatgctgcgcatgaaacctctaagttggaaattgaagctagccactcagagaaacttgaattgctaaagaaggcctatgaagcctccctttcagaaattaagaaaggccatgaaatagaaaagaaatcgcttgaagatttactttctgagaagcaggaatcgctagagaagcaaatcaatgatctgaagagtgaaaatgatgctttaaatgaaaaattgaaatcagaagaacaaaaaagaagagcaagagaaaaagcaaatttgaaaaatcctcagatcatgtatctagaacaggagttagaaagcctgaaagctgtgttagagatcaagaatgagaaactgcatcaacaggacatcaagttaatgaaaatggagaaactggtggacaacaacacagcattggttgacaaattgaagcgtttccagcaggagaatgaagaattgaaagctcggatggacaagcacatggcaatctcaaggcagctttccacggagcaggctgttctgcaagagtcgctggagaaggagtcgaaagtcaacaagcgactctctatggaaaacgaggagcttctgtggaaactgcacaatggggacctgtgtagccccaagagatcccccacatcctccgccatccctttgcagtcaccaaggaattcgggctccttccctagccccagcatttcacccagatgacacctccccaaagtccacagactctctgaaagcattttgatgcaggtctgcaggactgaccccaaggaggaacgtgggcacaagaggtatatcagcacacgtgtgatcaccgtagggtaactggagcgtcaccaccggcggaatcgcagcttctgagactggaactctggaggaagacttttgcctccgtccaaaagattcctccaaaaaaagatttaaaaaaagatttcggcatcgacacggacgttgttgcacaaagcacttaaagaacgagagcatcttgttcattgcctttttcacctaagcatagggggaaaaactctcagggccctattaagatttataacctttgtaatgttcttcaccacagacaccttcttgtgagttttcagtctgactgtgggggtggggggtgtgaatgaaatggatgtcacagagtgtcatgtgtctgatgcagcctcctctgctgtgtattaaatgtcaaaatctgaatatatctggatatgtactaatcaaataataatcaatcaatcagcatatacatttcagccaaagccatagaagaaaaagcaatagttgcttgaattatgatcatctaccaccaactctgctcagccctgtaacagggtagggagagggtataacaggaagagctttgacttgtccctgtctatacattctctgtatcttttgggggtaacttcttggcagtttttcagtgttcagccatgtcagttgaaactagatttttctgtagattttttacttacccatgtgagcctaacactatcctgtaattcattttctcaggctatgtgtaaatgtagaaccctaatttttctataaaaaaacaaactaactaactaactgtgtaaagaaagaaaaagggaagtaccaatgggtttttccaccttatttttacctttgatctacccttgcagatttaacctgtcttcttccctcccattattctcattttccttttacctttctccaccatccagagccacaaaagcaaaccttctacctcctacctacttttctctgggacaaggataaaggaatatgattttccagagccccagagccagctcatcttccaggtgctgaaaccactttccaaataaactaaagcctggatttgatattacaaattttgggaaatcttagaataaagaacgagaacaaggaagtcattggctagtataattaagaaaggtaggattcagtgcttaccgatgatgcagtacttgatagaagaaaacagtctgggaggatagcgctcatttttcagttaccctttaaggagtccctttgtctttgggaaagtagcagaatggtccgcttctttcccatgagtggaaaatgtggcttgtccaactctcctccaggttgcatttcagtttctttccaaaacttattacctcccctaatcctgagactttggaaaaggtggaaggaagaactgttgctttatctccccctccctgcatgtgtcaacattgtgatgtcagtatttactaatctacattcagtggctgtacaaataacagctgtagtaagaagagattcaggatgctagaggtgaatatttgggtcatttacatgtacactacatagcaagttgatactcatgttgcatgttcttttaaattagtgattttgtgtcttaagtctttaacttccaatacttcatcatgtatgtaaccttccatgtttgcttctgataaatggaaatgtaggttcactgccacttcatgagatatctctgctcacgcttccaagttgttctcaatgacattagccaaagttgggtttgccattcatcccctaggcatggtaaatcttgtgttgttccctgctgtcctccgtattacgtgaccggcaaataaatctcatagcagttaatataaaacatctttggaggatgggagagaacaggagggaagatgggaaacaaaatagagaattcttaagattttgtttaaaccaaatgtttcatgtagaatgcaaaatgttggcacgtcaaaaatatgaatgtgtagacaactgtagttgtgctcagtttgtagtgatgggaagtgtattttactctgatcaaataaataatgctggaatactcaagaa

SEQ ID NO: 2453 - DNA, 3996 bp, Homo sapiens
  source 1..3996: mol_type = genomic DNA
agtactgtgtctgatgctcctaaggaggctgtaaagtgcttttgtccattcctttttgtcttttaacaaaggggtttaccatacacccacagagcctgtctagtggcgatgtgttcctgttgcggattaagcattcaaatcagtgagtctctttcttagtttgatttgctagctggtttaatctgttttgtgtagtgccttggagcttacgcatttttttttttttccctccattcgaattcactaagagcaagcatgagggatatgagagtgaacatggctgcagtttttcctgcttaagcttgctttgatccttttaaatgactgtaccaggaggatttcgcagttgtacagaaactgatatttcttcaaaaatctttatcaattctacactcaccccaccggctggttcagagaggcactatgatgctaccttattgacactgctggtcgtgggatcgtacagcctttgtataattcctttgttagccacgtttactgggaaaaaaactggtaatgccgctgtcatcaaatatgaggagaaacctccaaaaccagcatttcagaatggttcctcaggatccttttatttgaagcctttggtatccagggctcatgttcacttgatgaaaactcctccaaaaggtccttcgagaaaaaatttatttacagctcttaatgcagttgaaaagagcaggcaaaagaatcctcgaagcttatgtatccagccacagacagctcccgatgcgctgccccctgagaaaacacttgaattgacgcaatataaaacaaaatgtgaaaaccaaagtggatttatcctgcagctcaagcagcttcttgcctgtggtaataccaagtttgaggcattgacagttgtgattcagcacctgctgtctgagcgggaggaagcactgaaacaacacaaaaccctatctcaagaacttgttaacctccggggagagctagtcactgcttcaaccacctgtgagaaattagaaaaagccaggaatgagttacaaacagtgtatgaagcattcgtccagcagcaccaggctgaaaaaacagaacgagagaatcggcttaaagagttttacaccagggagtatgaaaagcttcgggacacttacattgaagaagcagagaagtacaaaatgcaattgcaagagcagtttgacaacttaaatgctgcgcatgaaacctctaagttggaaattgaagctagccactcagagaaacttgaattgctaaagaaggcctatgaagcctccctttcagaaattaagaaaggccatgaaatagaaaagaaatcgcttgaagatttactttctgagaagcaggaatcgctagagaagcaaatcaatgatctgaagagtgaaaatgatgctttaaatgaaaaattgaaatcagaagaacaaaaaagaagagcaagagaaaaagcaaatttgaaaaatcctcagatcatgtatctagaacaggagttagaaagcctgaaagctgtgttagagatcaagaatgagaaactgcatcaacaggacatcaagttaatgaaaatggagaaactggtggacaacaacacagcattggttgacaaattgaagcgtttccagcaggagaatgaagaattgaaagctcggatggacaagcacatggcaatctcaaggcagctttccacggagcaggctgttctgcaagagtcgctggagaaggagtcgaaagtcaacaagcgactctctatggaaaacgaggagcttctgtggaaactgcacaatggggacctgtgtagccccaagagatcccccacatcctccgccatccctttgcagtcaccaaggaattcgggctccttccctagccccagcatttcacccagatgacacctccccaaagtccacagactctctgaaagcattttgatgcaggtctgcaggactgaccccaaggaggaacgtgggcacaagaggtatatcagcacacgtgtgatcaccgtagggtaactggagcgtcaccaccggcggaatcgcagcttctgagactggaactctggaggaagacttttgcctccgtccaaaagattcctccaaaaaaagatttaaaaaaagatttcggcatcgacacggacgttgttgcacaaagcacttaaagaacgagagcatcttgttcattgcctttttcacctaagcatagggggaaaaactctcagggccctattaagatttataacctttgtaatgttcttcaccacagacaccttcttgtgagttttcagtctgactgtgggggtggggggtgtgaatgaaatggatgtcacagagtgtcatgtgtctgatgcagcctcctctgctgtgtattaaatgtcaaaatctgaatatatctggatatgtactaatcaaataataatcaatcaatcagcatatacatttcagccaaagccatagaagaaaaagcaatagttgcttgaattatgatcatctaccaccaactctgctcagccctgtaacagggtagggagagggtataacaggaagagctttgacttgtccctgtctatacattctctgtatcttttgggggtaacttcttggcagtttttcagtgttcagccatgtcagttgaaactagatttttctgtagattttttacttacccatgtgagcctaacactatcctgtaattcattttctcaggctatgtgtaaatgtagaaccctaatttttctataaaaaaacaaactaactaactaactgtgtaaagaaagaaaaagggaagtaccaatgggtttttccaccttatttttacctttgatctacccttgcagatttaacctgtcttcttccctcccattattctcattttccttttacctttctccaccatccagagccacaaaagcaaaccttctacctcctacctacttttctctgggacaaggataaaggaatatgattttccagagccccagagccagctcatcttccaggtgctgaaaccactttccaaataaactaaagcctggatttgatattacaaattttgggaaatcttagaataaagaacgagaacaaggaagtcattggctagtataattaagaaaggtaggattcagtgcttaccgatgatgcagtacttgatagaagaaaacagtctgggaggatagcgctcatttttcagttaccctttaaggagtccctttgtctttgggaaagtagcagaatggtccgcttctttcccatgagtggaaaatgtggcttgtccaactctcctccaggttgcatttcagtttctttccaaaacttattacctcccctaatcctgagactttggaaaaggtggaaggaagaactgttgctttatctccccctccctgcatgtgtcaacattgtgatgtcagtatttactaatctacattcagtggctgtacaaataacagctgtagtaagaagagattcaggatgctagaggtgaatatttgggtcatttacatgtacactacatagcaagttgatactcatgttgcatgttcttttaaattagtgattttgtgtcttaagtctttaacttccaatacttcatcatgtatgtaaccttccatgtttgcttctgataaatggaaatgtaggttcactgccacttcatgagatatctctgctcacgcttccaagttgttctcaatgacattagccaaagttgggtttgccattcatcccctaggcatggtaaatcttgtgttgttccctgctgtcctccgtattacgtgaccggcaaataaatctcatagcagttaatataaaacatctttggaggatgggagagaacaggagggaagatgggaaacaaaatagagaattcttaagattttgtttaaaccaaatgtttcatgtagaatgcaaaatgttggcacgtcaaaaatatgaatgtgtagacaactgtagttgtgctcagtttgtagtgatgggaagtgtattttactctgatcaaataaataatgctggaatactc

SEQ ID NO: 2454 - DNA, 2787 bp, Homo sapiens
  source 1..2787: mol_type = genomic DNA
aaagggggcggcagcgccggcggagcggaggcgggtctcacgtgggccagcgcagagcctgcggaagggacggatgcggatctcgtcgctgtcaccttgaaagtgaccgaggggcttgactgtggactccttacgccgcccacccgggcccggcggtcccagccttctcgcagggccccttctcagcagaagcaagcggggccgagaaagcgggtggaatagggttgctgcaggtcccaaagacccctcgtggcgcctcgctactttctgcagcttgtttgcactttttcacgctctagaaaaatctcatcttaattaagggaacaacaaatcatttaatcttcagagcatcttagactgaaaacctttcaactgtgctgaaaaacctagaagacagaccattttgcccaccctctcatttaaaaggaattgaagaagaaataaaatggcagaggtttaaggttactattcaggatgactgatgataattcagatgataaaatagaagatgaattgcaaaccttctttaccagtgataaagatggaaatacacatgcatacaacccgaaatcaccacctacacaaaactcttcagccagcagtgtgaactggaattctgccaacccagatgacatggtggttgattatgaaactgaccctgctgtagttactggtgaaaatatttctttaagccttcagggtgttgaagtatttggtcatgaaaagtcttctagtgatttcattagtaagcaggtgttagatatgcataaagattctatttgtcagtgtcctgcacttgtaggtactgagaagcccaaatatctgcaacacagttgtcattccctagaagcagttgagggccagagtgttgagccatctttgccttttgtgtggaagcctaatgacaatttgaactgtgcaggctactgtgatgccttggagctaaaccaaacatttgacatgacagtggataaagttaactgcacctttatatcacatcatgccatcggaaagagtcagtccttccatactgctggaagcctgccaccaactggtaggagaagtggaagtacatcttctttatcctattccacttggacatcttcccattctgataagacgcatgcaagagaaactacttatgatagagaaagctttgaaaaccctcaagtcacaccatcagaagcccaagacatgacttacacagcattttctgatgtggtgatgcaaagtgaggtttttgtttcagatattggaaatcagtgtgcatgttcttcaggaaaggtcaccagtgagtacacagatggatcacaacaaagactagttggagaaaaggagacacaagcactaacaccagtttctgatggcatggaagtccccaatgattctgcattacaagagttcttttgtttatcccatgatgaatccaatagcgaaccacattcacagagctcatacaggcacaaggaaatgggccaaaatctgagagagacagtgtcctattgtcttattgatgatgaatgccctttaatggtgccagcttttgataagagcgaagctcaagtgctgaacccagagcataaagtcactgagactgaagacacacaaatggtctccaaaggaaaggatttgggaacccaaaatcatacctcagaattgattctaagtagcccgccaggacaaaaggtgggctcgtcatttggactgacttgggatgcaaatgatatggtcattagcacagacaaaacgatgtgcatgtcaacaccagtcctagaacccacaaaagtaaccttttctgtttcaccgattgaagcgacggagaaatgtaagaaagtggagaagggtaatcgagggcttaaaaacataccagactcgaaggaggcacctgtgaacctgtgtaaacccagtttaggaaaatcaacaatcaaaacgaataccccaataggctgcaaagttagaaaaactgaaattataagttacccaagaccaaacttcaagaatgtcaaagcaaaagttatgtctagagcagtgttgcagcccaaagatgctgctttatcaaaggtcacgcccagacctcagcagaccagtgcctcatcaccctcatcagtgaattcaagacaacaaacagtcttgagcagaacaccgagatctgacttgaatgcagacaaaaaagcagaaattctaattaacaagacacataagcagcagtttaataaactcattactagccaggctgtgcatgttacaactcattctaaaaatgcttcacacagggttccaagaacaacatctgccgtgaaatcgaatcaggaagatgttgacaaagccagttcttctaactcagcatgcgagaccgggtccgtttctgcgttgtttcagaagatcaaaggcatactccctgttaaaatggaaagtgcagaatgtttggaaatgacctatgttcccaacattgataggattagccctgaaaagaagggtgaaaaagaaaatgggacatctatggaaaaacaagagctgaaacaagagattatgaatgagacttttgaatatggttctctgtttttgggctctgcttcaaaaacaacgaccacctcaggtaggaatatatccaagcctgactcctgcggtttgaggcaaatagctgctccaaaagccaaagtggggccccctgtttcctgtttgaggcggaacagtgacaatagaaatcccagtgctgatcgagccgtatctcctcagaggatcaggcgtgtgtccagttctgttttgccaaaagctgctttctcatga

SEQ ID NO: 2455 - DNA, 6256 bp, Homo sapiens
  source 1..6256: mol_type = genomic DNA
aaagggggcggcagcgccggcggagcggaggcgggtctcacgtgggccagcgcagagcctgcggaagggacggatgcggatctcgtcgctgtcaccttgaaagtgaccgaggggcttgactgtggactccttacgccgcccacccgggcccggcggtcccagccttctcgcagggccccttctcagcagaagcaagcggggccgagaaagcgggtggaatagggttgctgcaggtcccaaagacccctcgtggcgcctcgctactttctgcagcttgtttgcactttttcacgctctagaaaaatctcatcttaattaagggaacaacaaatcatttaatcttcagagcatcttagactgaaaacctttcaactgtgctgaaaaacctagaagacagaccattttgcccaccctctcatttaaaaggaattgaagaagaaataaaatggcagaggtttaaggttactattcaggatgactgatgataattcagatgataaaatagaagatgaattgcaaaccttctttaccagtgataaagatggaaatacacatgcatacaacccgaaatcaccacctacacaaaactcttcagccagcagtgtgaactggaattctgccaacccagatgacatggtggttgattatgaaactgaccctgctgtagttactggtgaaaatatttctttaagccttcagggtgttgaagtatttggtcatgaaaagtcttctagtgatttcattagtaagcaggtgttagatatgcataaagattctatttgtcagtgtcctgcacttgtaggtactgagaagcccaaatatctgcaacacagttgtcattccctagaagcagttgagggccagagtgttgagccatctttgccttttgtgtggaagcctaatgacaatttgaactgtgcaggctactgtgatgccttggagctaaaccaaacatttgacatgacagtggataaagttaactgcacctttatatcacatcatgccatcggaaagagtcagtccttccatactgctggaagcctgccaccaactggtaggagaagtggaagtacatcttctttatcctattccacttggacatcttcccattctgataagacgcatgcaagagaaactacttatgatagagaaagctttgaaaaccctcaagtcacaccatcagaagcccaagacatgacttacacagcattttctgatgtggtgatgcaaagtgaggtttttgtttcagatattggaaatcagtgtgcatgttcttcaggaaaggtcaccagtgagtacacagatggatcacaacaaagactagttggagaaaaggagacacaagcactaacaccagtttctgatggcatggaagtccccaatgattctgcattacaagagttcttttgtttatcccatgatgaatccaatagcgaaccacattcacagagctcatacaggcacaaggaaatgggccaaaatctgagagagacagtgtcctattgtcttattgatgatgaatgccctttaatggtgccagcttttgataagagcgaagctcaagtgctgaacccagagcataaagtcactgagactgaagacacacaaatggtctccaaaggaaaggatttgggaacccaaaatcatacctcagaattgattctaagtagcccgccaggacaaaaggtgggctcgtcatttggactgacttgggatgcaaatgatatggtcattagcacagacaaaacgatgtgcatgtcaacaccagtcctagaacccacaaaagtaaccttttctgtttcaccgattgaagcgacggagaaatgtaagaaagtggagaagggtaatcgagggcttaaaaacataccagactcgaaggaggcacctgtgaacctgtgtaaacccagtttaggaaaatcaacaatcaaaacgaataccccaataggctgcaaagttagaaaaactgaaattataagttacccaagaccaaacttcaagaatgtcaaagcaaaagttatgtctagagcagtgttgcagcccaaagatgctgctttatcaaaggtcacgcccagacctcagcagaccagtgcctcatcaccctcatcagtgaattcaagacaacaaacagtcttgagcagaacaccgagatctgacttgaatgcagacaaaaaagcagaaattctaattaacaagacacataagcagcagtttaataaactcattactagccaggctgtgcatgttacaactcattctaaaaatgcttcacacagggttccaagaacaacatctgccgtgaaatcgaatcaggaagatgttgacaaagccagttcttctaactcagcatgcgagaccgggtccgtttctgcgttgtttcagaagatcaaaggcatactccctgttaaaatggaaagtgcagaatgtttggaaatgacctatgttcccaacattgataggattagccctgaaaagaagggtgaaaaagaaaatgggacatctatggaaaaacaagagctgaaacaagagattatgaatgagacttttgaatatggttctctgtttttgggctctgcttcaaaaacaacgaccacctcaggtaggaatatatccaagcctgactcctgcggtttgaggcaaatagctgctccaaaagccaaagtggggccccctgtttcctgtttgaggcggaacagtgacaatagaaatcccagtgctgatcgagccgtatctcctcagaggatcaggcgtgtgtccagttctgctggtaatgccgctgtcatcaaatatgaggagaaacctccaaaaccagcatttcagaatggttcctcaggatccttttatttgaagcctttggtatccagggctcatgttcacttgatgaaaactcctccaaaaggtccttcgagaaaaaatttatttacagctcttaatgcagttgaaaagagcaggcaaaagaatcctcgaagcttatgtatccagccacagacagctcccgatgcgctgccccctgagaaaacacttgaattgacgcaatataaaacaaaatgtgaaaaccaaagtggatttatcctgcagctcaagcagcttcttgcctgtggtaataccaagtttgaggcattgacagttgtgattcagcacctgctgtctgagcgggaggaagcactgaaacaacacaaaaccctatctcaagaacttgttaacctccggggagagctagtcactgcttcaaccacctgtgagaaattagaaaaagccaggaatgagttacaaacagtgtatgaagcattcgtccagcagcaccaggctgaaaaaacagaacgagagaatcggcttaaagagttttacaccagggagtatgaaaagcttcgggacacttacattgaagaagcagagaagtacaaaatgcaattgcaagagcagtttgacaacttaaatgctgcgcatgaaacctctaagttggaaattgaagctagccactcagagaaacttgaattgctaaagaaggcctatgaagcctccctttcagaaattaagaaaggccatgaaatagaaaagaaatcgcttgaagatttactttctgagaagcaggaatcgctagagaagcaaatcaatgatctgaagagtgaaaatgatgctttaaatgaaaaattgaaatcagaagaacaaaaaagaagagcaagagaaaaagcaaatttgaaaaatcctcagatcatgtatctagaacaggagttagaaagcctgaaagctgtgttagagatcaagaatgagaaactgcatcaacaggacatcaagttaatgaaaatggagaaactggtggacaacaacacagcattggttgacaaattgaagcgtttccagcaggagaatgaagaattgaaagctcggatggacaagcacatggcaatctcaaggcagctttccacggagcaggctgttctgcaagagtcgctggagaaggagtcgaaagtcaacaagcgactctctatggaaaacgaggagcttctgtggaaactgcacaatggggacctgtgtagccccaagagatcccccacatcctccgccatccctttgcagtcaccaaggaattcgggctccttccctagccccagcatttcacccagatgacacctccccaaagtccacagactctctgaaagcattttgatgcaggtctgcaggactgaccccaaggaggaacgtgggcacaagaggtatatcagcacacgtgtgatcaccgtagggtaactggagcgtcaccaccggcggaatcgcagcttctgagactggaactctggaggaagacttttgcctccgtccaaaagattcctccaaaaaaagatttaaaaaaagatttcggcatcgacacggacgttgttgcacaaagcacttaaagaacgagagcatcttgttcattgcctttttcacctaagcatagggggaaaaactctcagggccctattaagatttataacctttgtaatgttcttcaccacagacaccttcttgtgagttttcagtctgactgtgggggtggggggtgtgaatgaaatggatgtcacagagtgtcatgtgtctgatgcagcctcctctgctgtgtattaaatgtcaaaatctgaatatatctggatatgtactaatcaaataataatcaatcaatcagcatatacatttcagccaaagccatagaagaaaaagcaatagttgcttgaattatgatcatctaccaccaactctgctcagccctgtaacagggtagggagagggtataacaggaagagctttgacttgtccctgtctatacattctctgtatcttttgggggtaacttcttggcagtttttcagtgttcagccatgtcagttgaaactagatttttctgtagattttttacttacccatgtgagcctaacactatcctgtaattcattttctcaggctatgtgtaaatgtagaaccctaatttttctataaaaaaacaaactaactaactaactgtgtaaagaaagaaaaagggaagtaccaatgggtttttccaccttatttttacctttgatctacccttgcagatttaacctgtcttcttccctcccattattctcattttccttttacctttctccaccatccagagccacaaaagcaaaccttctacctcctacctacttttctctgggacaaggataaaggaatatgattttccagagccccagagccagctcatcttccaggtgctgaaaccactttccaaataaactaaagcctggatttgatattacaaattttgggaaatcttagaataaagaacgagaacaaggaagtcattggctagtataattaagaaaggtaggattcagtgcttaccgatgatgcagtacttgatagaagaaaacagtctgggaggatagcgctcatttttcagttaccctttaaggagtccctttgtctttgggaaagtagcagaatggtccgcttctttcccatgagtggaaaatgtggcttgtccaactctcctccaggttgcatttcagtttctttccaaaacttattacctcccctaatcctgagactttggaaaaggtggaaggaagaactgttgctttatctccccctccctgcatgtgtcaacattgtgatgtcagtatttactaatctacattcagtggctgtacaaataacagctgtagtaagaagagattcaggatgctagaggtgaatatttgggtcatttacatgtacactacatagcaagttgatactcatgttgcatgttcttttaaattagtgattttgtgtcttaagtctttaacttccaatacttcatcatgtatgtaaccttccatgtttgcttctgataaatggaaatgtaggttcactgccacttcatgagatatctctgctcacgcttccaagttgttctcaatgacattagccaaagttgggtttgccattcatcccctaggcatggtaaatcttgtgttgttccctgctgtcctccgtattacgtgaccggcaaataaatctcatagcagttaatataaaacatctttggaggatgggagagaacaggagggaagatgggaaacaaaatagagaattcttaagattttgtttaaaccaaatgtttcatgtagaatgcaaaatgttggcacgtcaaaaatatgaatgtgtagacaactgtagttgtgctcagtttgtagtgatgggaagtgtattttactctgatcaaataaataatgctggaatactcaagaattgc

SEQ ID NO: 2456 - DNA, 3160 bp, Homo sapiens
  source 1..3160: mol_type = genomic DNA
atgggctgccccagcagcaaactgtgcctctattctccatgtgcagcaacaaggcgggaggaagcactgaaacaacacaaaaccctatctcaagaacttgttaacctccggggagagctagtcactgcttcaaccacctgtgagaaattagaaaaagccaggaatgagttacaaacagtgtatgaagcattcgtccagcagcaccaggctgaaaaaacagaacgagagaatcggcttaaagagttttacaccagggagtatgaaaagcttcgggacacttacattgaagaagcagagaagtacaaaatgcaattgcaagagcagtttgacaacttaaatgctgcgcatgaaacctctaagttggaaattgaagctagccactcagagaaacttgaattgctaaagaaggcctatgaagcctccctttcagaaattaagaaaggccatgaaatagaaaagaaatcgcttgaagatttactttctgagaagcaggaatcgctagagaagcaaatcaatgatctgaagagtgaaaatgatgctttaaatgaaaaattgaaatcagaagaacaaaaaagaagagcaagagaaaaagcaaatttgaaaaatcctcagatcatgtatctagaacaggagttagaaagcctgaaagctgtgttagagatcaagaatgagaaactgcatcaacaggacatcaagttaatgaaaatggagaaactggtggacaacaacacagcattggttgacaaattgaagcgtttccagcaggagaatgaagaattgaaagctcggatggacaagcacatggcaatctcaaggcagctttccacggagcaggctgttctgcaagagtcgctggagaaggagtcgaaagtcaacaagcgactctctatggaaaacgaggagcttctgtggaaactgcacaatggggacctgtgtagccccaagagatcccccacatcctccgccatccctttgcagtcaccaaggaattcgggctccttccctagccccagcatttcacccagatgacacctccccaaagtccacagactctctgaaagcattttgatgcaggtctgcaggactgaccccaaggaggaacgtgggcacaagaggtatatcagcacacgtgtgatcaccgtagggtaactggagcgtcaccaccggcggaatcgcagcttctgagactggaactctggaggaagacttttgcctccgtccaaaagattcctccaaaaaaagatttaaaaaaagatttcggcatcgacacggacgttgttgcacaaagcacttaaagaacgagagcatcttgttcattgcctttttcacctaagcatagggggaaaaactctcagggccctattaagatttataacctttgtaatgttcttcaccacagacaccttcttgtgagttttcagtctgactgtgggggtggggggtgtgaatgaaatggatgtcacagagtgtcatgtgtctgatgcagcctcctctgctgtgtattaaatgtcaaaatctgaatatatctggatatgtactaatcaaataataatcaatcaatcagcatatacatttcagccaaagccatagaagaaaaagcaatagttgcttgaattatgatcatctaccaccaactctgctcagccctgtaacagggtagggagagggtataacaggaagagctttgacttgtccctgtctatacattctctgtatcttttgggggtaacttcttggcagtttttcagtgttcagccatgtcagttgaaactagatttttctgtagattttttacttacccatgtgagcctaacactatcctgtaattcattttctcaggctatgtgtaaatgtagaaccctaatttttctataaaaaaacaaactaactaactaactgtgtaaagaaagaaaaagggaagtaccaatgggtttttccaccttatttttacctttgatctacccttgcagatttaacctgtcttcttccctcccattattctcattttccttttacctttctccaccatccagagccacaaaagcaaaccttctacctcctacctacttttctctgggacaaggataaaggaatatgattttccagagccccagagccagctcatcttccaggtgctgaaaccactttccaaataaactaaagcctggatttgatattacaaattttgggaaatcttagaataaagaacgagaacaaggaagtcattggctagtataattaagaaaggtaggattcagtgcttaccgatgatgcagtacttgatagaagaaaacagtctgggaggatagcgctcatttttcagttaccctttaaggagtccctttgtctttgggaaagtagcagaatggtccgcttctttcccatgagtggaaaatgtggcttgtccaactctcctccaggttgcatttcagtttctttccaaaacttattacctcccctaatcctgagactttggaaaaggtggaaggaagaactgttgctttatctccccctccctgcatgtgtcaacattgtgatgtcagtatttactaatctacattcagtggctgtacaaataacagctgtagtaagaagagattcaggatgctagaggtgaatatttgggtcatttacatgtacactacatagcaagttgatactcatgttgcatgttcttttaaattagtgattttgtgtcttaagtctttaacttccaatacttcatcatgtatgtaaccttccatgtttgcttctgataaatggaaatgtaggttcactgccacttcatgagatatctctgctcacgcttccaagttgttctcaatgacattagccaaagttgggtttgccattcatcccctaggcatggtaaatcttgtgttgttccctgctgtcctccgtattacgtgaccggcaaataaatctcatagcagttaatataaaacatctttggaggatgggagagaacaggagggaagatgggaaacaaaatagagaattcttaagattttgtttaaaccaaatgtttcatgtagaatgcaaaatgttggcacgtcaaaaatatgaatgtgtagacaactgtagttgtgctcagtttgtagtgatgggaagtgtattttactctgatcaaataaataatgctggaatactcaagaattgc

SEQ ID NO: 2457 - DNA, 4089 bp, Homo sapiens
  source 1..4089: mol_type = genomic DNA
aaacattttatttcttccagggaacaacaaatcatttaatcttcagagcatcttagactgaaaacctttcaactgtgctgaaaaacctagaagacagaccattttgcccaccctctcatttaaaaggaattgaagaagaaataaaatggcagaggtttaaggttactattcaggatgactgatgataattcagatgataaaatagaagatgaattgcaaaccttctttaccagtgataaagatggaaatacacatgcatacaacccgaaatcaccacctacacaaaactcttcagccagcagtgtgaactggaattctgccaacccagatgacatggtggttgattatgaaactgaccctgctgtagttactggtgaaaatatttctttaagccttcagggtgttgaagtatttggtcatgaaaagtcttctagtgatttcattagtaagcaggtgttagatatgcataaagattctatttgtcagtgtcctgcacttgtaggtactgagaagcccaaatatctgcaacacagttgtcattccctagaagcagttgagggccagagtgttgagccatctttgccttttgtgtggaagcctaatgacaatttgaactgtgcaggctactgtgatgccttggagctaaaccaaacatttgacatgacagtggataaagttaactgcacctttatatcacatcatgccatcggaaagagtcagtccttccatactgctggaagcctgccaccaactggtaggagaagtggaagtacatcttctttatcctattccacttggacatcttcccattctgataagacgcatgcaagagaaactacttatgatagagaaagctttgaaaaccctcaagtcacaccatcagaagcccaagacatgacttacacagcattttctgatgtggtgatgcaaagtgaggtttttgtttcagatattggaaatcagtgtgcatgttcttcaggaaaggtcaccagtgagtacacagatggatcacaacaaagactagttggagaaaaggagacacaagcactaacaccagtttctgatggcatggaagtccccaatgattctgcattacaagagttcttttgtttatcccatgatgaatccaatagcgaaccacattcacagagctcatacaggcacaaggaaatgggccaaaatctgagagagacagtgtcctattgtcttattgatgatgaatgccctttaatggtgccagcttttgataagagcgaagctcaagtgctgaacccagagcataaagtcactgagactgaagacacacaaatggtctccaaaggaaaggatttgggaacccaaaatcatacctcagaattgattctaagtagcccgccaggacaaaaggtgggctcgtcatttggactgacttgggatgcaaatgatatggtcattagcacagacaaaacgatgtgcatgtcaacaccagtcctagaacccacaaaagtaaccttttctgtttcaccgattgaagcgacggagaaatgtaagaaagtggagaagggtaatcgagggcttaaaaacataccagactcgaaggaggcacctgtgaacctgtgtaaacccagtttaggaaaatcaacaatcaaaacgaataccccaataggctgcaaagttagaaaaactgaaattataagttacccaagaccaaacttcaagaatgtcaaagcaaaagttatgtctagagcagtgttgcagcccaaagatgctgctttatcaaaggtcacgcccagacctcagcagaccagtgcctcatcaccctcatcagtgaattcaagacaacaaacagtcttgagcagaacaccgagatctgacttgaatgcagacaaaaaagcagaaattctaattaacaagacacataagcagcagtttaataaactcattactagccaggctgtgcatgttacaactcattctaaaaatgcttcacacagggttccaagaacaacatctgccgtgaaatcgaatcaggaagatgttgacaaagccagttcttctaactcagcatgcgagaccgggtccgtttctgcgttgtttcagaagatcaaaggcatactccctgttaaaatggaaagtgcagaatgtttggaaatgacctatgttcccaacattgataggattagccctgaaaagaagggtgaaaaagaaaatgggacatctatggaaaaacaagagctgaaacaagagattatgaatgagacttttgaatatggttctctgtttttgggctctgcttcaaaaacaacgaccacctcaggtaggaatatatccaagcctgactcctgcggtttgaggcaaatagctgctccaaaagccaaagtggggccccctgtttcctgtttgaggcggaacagtgacaatagaaatcccagtgctgatcgagccgtatctcctcagaggatcaggcgtgtgtccagttctgctggtaatgccgctgtcatcaaatatgaggagaaacctccaaaaccagcatttcagaatggttcctcaggatccttttatttgaagcctttggtatccagggctcatgttcacttgatgaaaactcctccaaaaggtccttcgagaaaaaatttatttacagctcttaatgcagttgaaaagagcaggcaaaagaatcctcgaagcttatgtatccagccacagacagctcccgatgcgctgccccctgagaaaacacttgaattgacgcaatataaaacaaaatgtgaaaaccaaagtggatttatcctgcagctcaagcagcttcttgcctgtggtaataccaagtttgaggcattgacagttgtgattcagcacctgctgtctgagcgggaggaagcactgaaacaacacaaaaccctatctcaagaacttgttaacctccggggagagctagtcactgcttcaaccacctgtgagaaattagaaaaagccaggaatgagttacaaacagtgtatgaagcattcgtccagcagcaccaggctgaaaaaacagaacgagagaatcggcttaaagagttttacaccagggagtatgaaaagcttcgggacacttacattgaagaagcagagaagtacaaaatgcaattgcaagagcagtttgacaacttaaatgctgcgcatgaaacctctaagttggaaattgaagctagccactcagagaaacttgaattgctaaagaaggcctatgaagcctccctttcagaaattaagaaaggccatgaaatagaaaagaaatcgcttgaagatttactttctgagaagcaggaatcgctagagaagcaaatcaatgatctgaagagtgaaaatgatgctttaaatgaaaaattgaaatcagaagaacaaaaaagaagagcaagagaaaaagcaaatttgaaaaatcctcagatcatgtatctagaacaggagttagaaagcctgaaagctgtgttagagatcaagaatgagaaactgcatcaacaggacatcaagttaatgaaaatggagaaactggtggacaacaacacagcattggttgacaaattgaagcgtttccagcaggagaatgaagaattgaaagctcggatggacaagcacatggcaatctcaaggcagctttccacggagcaggctgttctgcaagagtcgctggagaaggagtcgaaagtcaacaagcgactctctatggaaaacgaggagcttctgtggaaactgcacaatggggacctgtgtagccccaagagatcccccacatcctccgccatccctttgcagtcaccaaggaattcgggctccttccctagccccagcatttcacccagatgacacctccccaaagtccacagactctctgaaagcattttgatgcaggtctgcaggactgaccccaaggaggaacgtgggcacaagaggtatatcagcacacgtgtgatcaccgtagggtaactggagcgtcaccaccggcggaatcgcagcttctgagactggaactctggaggaagacttttgcctccgtccaaaagattcctccaaaaaaagatttaaaaaaagatttcggcatcgacacggacgttgttgcacaaagcactt

SEQ ID NO: 2458 - DNA, 3650 bp, Homo sapiens
  source 1..3650: mol_type = genomic DNA
tatgagagtaagtagctgcataccctggcacttcaggaatactgggatatgtgacttgcaattaaacaggattgttaccagctttactgttggaattttgaaggtgtggcacaaaatcaggcttgcatgtaagagggaactctgaatttgaaaagctggtaatgccgctgtcatcaaatatgaggagaaacctccaaaaccagcatttcagaatggttcctcaggatccttttatttgaagcctttggtatccagggctcatgttcacttgatgaaaactcctccaaaaggtccttcgagaaaaaatttatttacagctcttaatgcagttgaaaagagcaggcaaaagaatcctcgaagcttatgtatccagccacagacagctcccgatgcgctgccccctgagaaaacacttgaattgacgcaatataaaacaaaatgtgaaaaccaaagtggatttatcctgcagctcaagcagcttcttgcctgtggtaataccaagtttgaggcattgacagttgtgattcagcacctgctgtctgagcgggaggaagcactgaaacaacacaaaaccctatctcaagaacttgttaacctccggggagagctagtcactgcttcaaccacctgtgagaaattagaaaaagccaggaatgagttacaaacagtgtatgaagcattcgtccagcagcaccaggctgaaaaaacagaacgagagaatcggcttaaagagttttacaccagggagtatgaaaagcttcgggacacttacattgaagaagcagagaagtacaaaatgcaattgcaagagcagtttgacaacttaaatgctgcgcatgaaacctctaagttggaaattgaagctagccactcagagaaacttgaattgctaaagaaggcctatgaagcctccctttcagaaattaagaaaggccatgaaatagaaaagaaatcgcttgaagatttactttctgagaagcaggaatcgctagagaagcaaatcaatgatctgaagagtgaaaatgatgctttaaatgaaaaattgaaatcagaagaacaaaaaagaagagcaagagaaaaagcaaatttgaaaaatcctcagatcatgtatctagaacaggagttagaaagcctgaaagctgtgttagagatcaagaatgagaaactgcatcaacaggacatcaagttaatgaaaatggagaaactggtggacaacaacacagcattggttgacaaattgaagcgtttccagcaggagaatgaagaattgaaagctcggatggacaagcacatggcaatctcaaggcagctttccacggagcaggctgttctgcaagagtcgctggagaaggagtcgaaagtcaacaagcgactctctatggaaaacgaggagcttctgtggaaactgcacaatggggacctgtgtagccccaagagatcccccacatcctccgccatccctttgcagtcaccaaggaattcgggctccttccctagccccagcatttcacccagatgacacctccccaaagtccacagactctctgaaagcattttgatgcaggtctgcaggactgaccccaaggaggaacgtgggcacaagaggtatatcagcacacgtgtgatcaccgtagggtaactggagcgtcaccaccggcggaatcgcagcttctgagactggaactctggaggaagacttttgcctccgtccaaaagattcctccaaaaaaagatttaaaaaaagatttcggcatcgacacggacgttgttgcacaaagcacttaaagaacgagagcatcttgttcattgcctttttcacctaagcatagggggaaaaactctcagggccctattaagatttataacctttgtaatgttcttcaccacagacaccttcttgtgagttttcagtctgactgtgggggtggggggtgtgaatgaaatggatgtcacagagtgtcatgtgtctgatgcagcctcctctgctgtgtattaaatgtcaaaatctgaatatatctggatatgtactaatcaaataataatcaatcaatcagcatatacatttcagccaaagccatagaagaaaaagcaatagttgcttgaattatgatcatctaccaccaactctgctcagccctgtaacagggtagggagagggtataacaggaagagctttgacttgtccctgtctatacattctctgtatcttttgggggtaacttcttggcagtttttcagtgttcagccatgtcagttgaaactagatttttctgtagattttttacttacccatgtgagcctaacactatcctgtaattcattttctcaggctatgtgtaaatgtagaaccctaatttttctataaaaaaacaaactaactaactaactgtgtaaagaaagaaaaagggaagtaccaatgggtttttccaccttatttttacctttgatctacccttgcagatttaacctgtcttcttccctcccattattctcattttccttttacctttctccaccatccagagccacaaaagcaaaccttctacctcctacctacttttctctgggacaaggataaaggaatatgattttccagagccccagagccagctcatcttccaggtgctgaaaccactttccaaataaactaaagcctggatttgatattacaaattttgggaaatcttagaataaagaacgagaacaaggaagtcattggctagtataattaagaaaggtaggattcagtgcttaccgatgatgcagtacttgatagaagaaaacagtctgggaggatagcgctcatttttcagttaccctttaaggagtccctttgtctttgggaaagtagcagaatggtccgcttctttcccatgagtggaaaatgtggcttgtccaactctcctccaggttgcatttcagtttctttccaaaacttattacctcccctaatcctgagactttggaaaaggtggaaggaagaactgttgctttatctccccctccctgcatgtgtcaacattgtgatgtcagtatttactaatctacattcagtggctgtacaaataacagctgtagtaagaagagattcaggatgctagaggtgaatatttgggtcatttacatgtacactacatagcaagttgatactcatgttgcatgttcttttaaattagtgattttgtgtcttaagtctttaacttccaatacttcatcatgtatgtaaccttccatgtttgcttctgataaatggaaatgtaggttcactgccacttcatgagatatctctgctcacgcttccaagttgttctcaatgacattagccaaagttgggtttgccattcatcccctaggcatggtaaatcttgtgttgttccctgctgtcctccgtattacgtgaccggcaaataaatctcatagcagttaatataaaacatctttggaggatgggagagaacaggagggaagatgggaaacaaaatagagaattcttaagattttgtttaaaccaaatgtttcatgtagaatgcaaaatgttggcacgtcaaaaatatgaatgtgtagacaactgtagttgtgctcagtttgtagtgatgggaagtgtattttactctgatcaaataaataatgctggaatactcaagaattgc

SEQ ID NO: 2459 - DNA, 12034 bp, Homo sapiens
  source 1..12034: mol_type = genomic DNA
gtgaggatgtgccgggtggtcctttcctcctcctcttcctcctcctcccggctccctgcctagtctccatataaaagcggcgccgcctccccgccctctctcactccccgctcctctccgccgcgcactctccgcggcgctgggagagggcggagggggaggcggcgcgcggcgccagaggaggggggacgcagggggcggagcggagacagtaccttcggagataatcctttctcctgccgcagtggagaggagcggccggagcgagacacttcgccgaggcacagcagccggcaggatggcgaccgtggtggtggaagccaccgagccggagccgtccggcagcatcgccaacccggcggcgtccacctcgcctagcctgtcgcaccgcttccttgacagcaagttctacttgctggtggtcgtcggcgagatcgtgaccgaggagcacctgcggcgtgccatcggcaacatcgagctcggaatccgatcatgggacacaaacctgattgaatgcaacttggaccaagaactcaaactttttgtatctcgacactctgcaagattctctcctgaagtcccaggacaaaagatccttcatcaccgaagtgacgttttagaaacagtggtcctgatcaacccttctgatgaagcagtcagcaccgaggtgcgcttaatgatcactgatgctgcccgacacaagctgctcgtgctgaccgggcagtgctttgaaaataccggagagctcattctccagtccggctctttctccttccagaacttcatagagattttcaccgatcaagagatcggggagttactaagcaccacccatcctgccaacaaagccagcttaaccctgttctgtcctgaagaaggggactggaagaactccaatcttgacagacacaatctccaagacttcatcaatattaaactcaattcagcttctatcttgccagaaatggaaggactttctgagtttaccgagtatctctcagaatcagtggaagtcccatctccctttgacatcttggaacctcccacatcgggtggatttctgaagctctccaagccctgctgttatatttttccaggagggaggggcgattctgccttgtttgcagtgaatggtttcaatatgctcatcaatggcggatcagagagaaaatcctgcttctggaagctcatccgacacttagaccgagtggactccatcctgctcacccacattggggatgacaatttgcctggaataaacagcatgttacagcggaaaattgcagagctcgaggaagaacagtcccagggctccaccacaaatagtgactggatgaaaaacctcatctcccctgacttaggagttgtatttctcaatgtacctgaaaatctcaaaaatccagagccaaacatcaagatgaagagaagcatagaagaagcctgcttcactctccagtacctaaacaaattgtccatgaaaccagaacctctgtttagaagtgtaggcaatactattgatcctgtcattcttttccaaaaaatgggagtaggtaaacttgagatgtatgtgcttaatccagtcaagagcagcaaggaaatgcagtattttatgcagcagtggactggtaccaacaaagacaaggctgaattcattctgcctaatggtcaagaagtagatctcccgatttcctacttaacttcagtctcatctttgattgtgtggcatccagcaaaccctgcggagaaaatcatccgagtcctgtttcctgggaacagcacccagtacaacatcctggaagggttggaaaagctcaaacatctagactttctgaagcagccactggccacccaaaaggatctcactggccaggtgcccactcctgtggtgaaacaaacaaaactgaaacagagggctgatagccgagaaagtctgaagccagccgcaaaaccacttcctagcaaatccgtgcgcaaggagtcaaaagaagaaacccctgaggtcacaaaagtgaatcacgtggaaaagccacccaaagttgaaagcaaagaaaaggtaatggtgaaaaaagacaagccaataaaaacagagaccaaaccttcagtgactgaaaaggaggttcccagcaaagaagagccatctccagtgaaagccgaggtggctgagaagcaagccacagatgtcaaacccaaagctgccaaggagaagacggtgaaaaaggaaacaaaggtaaagcctgaagacaagaaagaggagaaagaaaagccaaagaaagaagtggctaaaaaggaggacaaaacacctatcaagaaggaggaaaaaccaaaaaaggaagaggtgaaaaaagaagtcaaaaaagagatcaagaaagaagagaaaaaagaacccaagaaagaggttaagaaagaaacaccgccaaaggaagtcaagaaggaagttaagaaggaagagaagaaggaagtgaaaaaggaagaaaaggaacccaaaaaagaaattaagaagctccctaaagacgcaaagaaatcatctactcctctgtctgaagcaaaaaaaccagctgctttaaaaccaaaagtacccaagaaggaagagtctgtcaagaaagattctgttgctgccggaaagccaaaggagaaggggaaaataaaagtcattaagaaggaaggcaaggccgcagaggctgtcgctgcagctgtcggcactggagccaccacagcagctgtcatggcggcagctggaatagcagccattggccctgccaaagaactcgaagctgagaggtcccttatgtcatctcctgaggatctaaccaaggactttgaagagttaaaggctgaagaggtcgatgtaacaaaggacatcaagcctcagctggagctaatcgaagacgaagagaaactgaaggaaactgagccagtcgaagcctacgtcatccagaaggagagagaagtcaccaaaggtcctgccgagtcccctgatgagggaatcactaccactgaaggggagggcgaatgtgaacagacacctgaggagctggagcccgtcgagaagcagggagtagacgacattgaaaaatttgaagatgaaggagccggttttgaagaatcttcagagactggagactatgaagagaaggcagaaactgaggaggctgaggagccagaagaggatggggaggaacacgtatgtgtgagcgcctccaagcacagccccactgaggatgaggaaagtgccaaggcggaggctgatgcatacatcagggagaagagggagtctgtggccagtggggatgaccgagccgaagaagacatggatgaggccattgagaaaggagaggctgaacaatctgaagaggaggctgatgaggaggacaaagctgaagatgccagagaggaggaatatgagccggaaaaaatggaagctgaagactatgtgatggctgtggtcgacaaggctgcagaggctggtggtgccgaggagcagtatggattcctcaccacaccaaccaagcaactaggagcccagtctcctggccgagaacctgcatcttcaattcatgatgagactttacctggaggctcagagagcgaggccaccgcttctgatgaggagaatcgagaagaccagcctgaggaattcactgccacctctggctacactcagtctactattgagatatccagtgagcccacccccatggatgagatgtctacccctcgagacgtgatgagtgatgagaccaacaatgaagagacggagtccccttctcaggaattcgtaaatatcaccaaatatgaatcttcattgtattctcaggaatactctaaacctgctgatgttacaccgctcaacggattttctgaaggatcaaaaacagatgccactgatggcaaggattacaatgcttcagcctctaccatatcaccaccctcttccatggaggaagacaaattcagcagatctgctttacgtgatgcttactgctctgaagtgaaagccagcaccactttggacatcaaagatagcatctcagctgtttcaagtgaaaaggtcagcccatcgaagagcccgtccctgagtccatctccaccatcacccttagaaaagacccccctgggtgaacgtagtgtgaacttctctctgacgcccaatgagattaaagtctctgcagaggcagaagtagccccggtgtctcctgaggtgacccaagaagtagttgaagaacattgtgctagtcctgaggacaagactctggaagtggtgtcaccatctcagtccgtgactggcagtgctggtcacacaccttactatcaatctcctactgacgagaaatccagtcatctccctacagaagtcattgaaaaaccaccagcagttccagtgagttttgaattcagtgatgccaaagatgagaatgaaagggcttcagtaagccccatggatgagcccgtgcctgactcagagtctcctattgaaaaagttttgtctcctttacgcagcccgcccctcattggatccgagtctgcttatgaaagttttctaagtgctgatgacaaggcttctggcagaggtgccgaaagtccttttgaagaaaagagtggaaaacaaggctctccagaccaagtaagtccagtttctgaaatgacttctactagtctttaccaagacaaacaggaagggaaaagcacagactttgcaccaataaaagaagactttggccaagaaaagaaaactgatgatgttgaagccatgagttctcaaccagcactggctctggatgaaaggaaattaggagatgtttctcccacacaaatagatgtcagtcagtttggatcttttaaagaagacactaagatgtccatttctgaaggtactgtctcagacaagtcagctactcctgttgatgagggcgtagcagaagacacgtactctcatatggagggtgtggcctcagtgtccacagcctcagtggctacgagctcatttccagagccaacaacagatgatgtgtctccatctctgcatgctgaggttggctccccacattccacagaagtagatgactccctttcagtgtctgttgtgcaaacacctaccacattccaggaaacagaaatgtctccatctaaagaagaatgcccaagaccgatgtcaatttctccaccagatttctcccctaaaactgcaaagtccaggacacccgttcaagatcacagatctgaacagtcctcaatgtctattgaatttggccaagaatctcctgagcaatcccttgctatggacttcagtcgacagtctccagatcaccctacagtgggtgcaggcgtgcttcacatcactgaaaatgggccaactgaagtggactacagtccttctgacatgcaggactccagtttatcacataagataccacctatggaggagccgtcctacacccaagataatgatctttctgagctcatctcagtatctcaggtagaggcctccccgtccacctcttctgctcataccccttctcagatcgcttctcctctccaagaagatactctatccgatgttgctcctcccagagatatgtccttatatgcctcactcacctctgaaaaagtgcaaagtctggaaggagagaagctctctccaaaatctgatatctctccactcaccccacgagagtcctctcctttatattcacctactttttcagattctacctctgcagtcaaagagaaaacagcaacttgccacagttcctcttctccaccaatagatgcagcatccgcagagccctatggcttccgtgcctcagtgttattcgatacaatgcaacaccatctagccttgaatagagatttgtccacacctggcctggagaaggacagtggagggaagacacctggtgactttagctatgcctatcaaaagcctgaggaaacaaccaggtccccagatgaagaagattatgactatgagtcttatgagaagaccacccggacctcagatgtgggtggctattactatgagaagatagagagaaccacaaaatctccaagtgacagtggctactcctatgagaccattgggaaaactaccaagacccctgaagatggtgactattcctatgaaattattgagaagaccacacggacccctgaagagggtgggtactcatatgacataagtgaaaagaccaccagcccccccgaagtgagtggttacagctatgaaaagactgagaggtctagaaggcttctggatgacatcagcaatggctatgatgactctgaggatggtggccacacacttggggaccccagctactcttatgaaaccactgagaaaattaccagtttccctgagtctgaaggttattcctatgagacatctacaaagacaacacgaacccctgatacttccacatactgttacgagactgcagagaaaatcactagaacccctcaggcatccacatattcctacgagacttcagacctatgctacactgcagaaaagaagtccccctcagaagcccgtcaggatgtcgatttatgcctcgtgtcctcttgtgaatacaagcaccccaagacagagctttcaccctctttcattaatcccaatcctcttgagtggtttgccagtgaagaacccactgaagaatctgaaaagcccctcactcaatcagggggagccccaccgcctccaggaggaaagcaacagggccgacagtgtgatgaaacccctcccacctcagtcagcgagtcagccccatcccagaccgactctgatgttcccccggagactgaagagtgcccctccatcacggccgatgccaatatcgactctgaagacgagtcggaaaccatccccacagacaaaactgtcacgtacaaacacatggacccacctccagctcccgtgcaagaccgcagcccttcgccacgccaccctgatgtgtccatggtggacccagaggccttggccattgagcagaacctgggcaaagctctaaagaaagatctgaaagagaagaccaaaaccaaaaagccaggtacaaagaccaagtcatcttcacctgtcaaaaagagtgatgggaagtctaagcccttggcagcttcaccaaaaccagcgggcttgaaagaatcctcggataaagtgtccagggtggcttctcctaagaagaaagaatctgtggaaaaggcagcaaaacccaccaccactcctgaggtcaaagctgcacgtggggaagagaaagacaaggagaccaagaatgctgccaatgcctctgcatccaagtcggccaagaccgccactgcaggaccaggaactaccaagacgaccaagtcatctgctgtgcccccaggcctccctgtgtatttggacctgtgctacattcctaaccacagcaatagtaagaatgttgatgtggaatttttcaagagagtgcggtcttcctactacgtggtgagtgggaatgaccctgctgctgaggagcccagccgggctgtcctggacgctttgttggaaggaaaggctcagtggggcagcaacatgcaggtgacactgatcccaactcatgactcagaagtgatgagggaatggtaccaggagacccatgagaaacagcaagatctcaacatcatggttttagcaagcagcagcacagtggttatgcaagatgaatccttccctgcatgcaagattgaactgtaaaaaccaaggccagccacaccacaggatctgaactttgtttccagaaattcttcaatttgaaatcaccttttctaaaaagtcaattcatctagttaagtcgctgaacaattacctgccaaatgctatactgtgtcatggtgatgcaagtcactaaatttctcagtttttgctgattgctaagggaaataacagtatttccacaatagggttcaaattcctgcaaaattacctaccccagttcatctctgctgaacatttggaaaccatgcactagccaacccaactgacttctgctaggtagaggcatttgtcttagagagagagagagcgcgggagagagtgagagagagtgagagcacaaagataacgcaggagagagagagagaaagaatgagaaagaaaaggaatgcaagagaaggagatgtaatgacagagagttctggtgagatacccagagagaaaaagagagagcagggtggggtaaggaggagaaaataaaccaacaattaggtctgcattttctcaggcagtaggcattctttagtctacataggcaaagttttccatttttgtcagtctgagtcatcaaaaagagtcttaattttctaaaacaagttggctagaagaaagtaaaaagaacaacacttgttatgagggcatgtgatattttcacatcttaattaagctccttcagtttgaaggctgcacactgacataatgtagtgagtgtagactggccatgcaagtggtttgggccccattcagaactctcagactctaaacacacaagtagattgatctaaggcatgctcccagcatttgtccacccacttagtccactctgagtcgattaacctgcatgcagcaacacccaagtccaccccaattaactgaagcaaataccaaagcagttgggagtacatatggtagacaatttgccttaggaagtgacttgaatgtacaaagatacttgatgcacttattttttaatgtgagacagcaagtttataaaacatccatataggattatagatacttaaaggaacacgtgggtgagcgtgtgtgggggtactagaagctgatctgattggtccaacagtttgatgctgagtcatgcgtgttgaatcccacttcagtgcacctgtggcctctcagtcaaacaagttgtgcctttcacagcttctttactactgcaagttcaagactgaaatggcttctatgatcagaactgggaaaacagtgaatcttatggtggaagaggttctcagcaagtgtacagtatttaccttcctttgtcttacattggctttttaaattttccattaatttcaacataattatgggaacaagtgtacagaagaattttttttttaagatatgtgagaacttttcatagatgaactttttaacaaatgttttcatttacaggaaattgcaaagaaaattctcaagtgatagtctttttttttaagtgtttcgtaagacaaaaattgaataatgttttttgaagttctggcaagattgaagtctgatattgcagtaatgatatttattaaaaacccataactaccaggaataatgatacctcccaccccttgattcccataacataaaagtgctacttgagagtgggggagaatggcatggtaggctacttttcagggccttgacaagtacatcacccagtggtatcctacatacttctttcaagatcttcaaccatgaggtaaaagagccaagttcaaagaaccctagcacaaatttgctttgggattttcttttctggaaaaaaaaaataaaagaaatagtacattgaaaacaaatgaattctcaactcctacggttcatgtagagtttagagaaaatttccatcattgtcatcattgaactgtgaacctgggaagccagatcatgattaacactgacatcaagtttcaagttgcagatcaatgcacccagtgttcagatgaggcaaacttctccgtgacaactgtgctgtgctctgtcacattacatttcctgcagactctaagatctacggagtagagaacaatgacctcattttattttctatgttagttatttatttcaaaattaacattttagttgatttttgtctgataagtctatgttttgcactgctaactatgatgagggtttaaaaaaatgcttcttcagggtcctttcactgaggacctatgcagtctacttaatgctgtgaattacatttttcaaatgtttaattttttaaagaaaattaatattctatttttgttaggcttctctagaaatgcagcttttatttattaccccatttctttcaagtccttggaaaataacatattaagggtacaagaaattaacacatgatggaaaagtcattgtgacgccaatgaatttcattgagtataaactcatctacttcaaatttattttataacacaacctaagatactcaagataattatttaatggttagctcttaagttgaattggtctacataatgcgtgggaagaaaaccagatttttagccttcttgccaaatccagacctctggttgatttttctttgacagaagatgcaagttattttccaatttcacaattaaatgtatttaacctgaacattattttgctttaaaaactataaacattgtaggagaattatagccagtcttcagttataaccactccaccctcctcactttctctctctctctctctttttttttttttttttttttgctatgggatttaatgggaaaaatatgtaaaaactgtcactagtcagctggctctttttcctatgaaatctatcagtacctttctccatccgttgttctcaatatgaccacagagcctgagtataccaagaaaaccaatattcgcattacaggttgctcctgtccttccagacacctttcctgcctgtgtgactaacctaattttgctagttccataaatacacgattagtttagtaacagccatcacaatgtaccatgtacattcatggtgagagctaaagatcgacacagacttctaggagctttgttcatactgattacttaatccaattgtatagattgaatatttgagtggaaggaatttacactctgtttaaatgatgggattctatcgagatagcactcatgatcatgacctttttggtagtattcttaaacaaaattctacagagactaaatgttagcgatgatcctccattttcaattttaaccaattctgtcccctttctcaaaaccctgagccctgtgcatgctttctcagtcttgtggtgggactggatacaatgactaacttcccctcctcccctctttaaacaccattttccatggagttcaaaaaaattttttttcttaacgttacatatcatagtgaatggtttccccagtgtatatgaatgttttaagtgtctccaatagcttatgcagtctaggagctttccaatactcatttaattaagatttaatcatttgctaatggaaatcttaccacctttcattttccctctgttaccaaatttcagctcttaggagctgctctacaattctgaatttgcttttcttgcctctctttagtcacctgtcacaggaggttcctgctcagtaatgatattgtgagttaggataataactttttttttttgtgcttcagatttagaagaaaagatcctgtttccatttgaaaggaactgtaagcttttatcttttaaccaactgaacaatacaccaaaagcagcctagggatgagcatttctttgaaagcaattaggttattcacctggtattaaaactatttactgttaaaaaatctgtgacttcatgaagttgatttttaaaggcagcatcaaaaactgaaaaggaagggaaaaaataggcagcttctctgcacttgtttggagctccccaaaacaggagccatggagaagtggcatcaagaccgggctgccctttcgagaacaccctgtggcagttcagagacacgcttttcctacactgcatgcagcccctctttccagcactggaaagaagtggtcttgagcccagctgagaagcacttcacactcctctctcttgttctgaatggtgtttgtgtcagtctgcagctgtgtatggtattatgtcttataatcctgcatcacttctatcctatccagtcatatctaatgtagaaaattagtttccagtgaaagtaatatgtagtgcttttatgatatttgtgtgcaatatcccctcttccattgaggatatttgatgtaaaggaaaaaaaaaaactcagttccacaataaaatacaaaagtggcaaaagtt

SEQ ID NO: 2460 - DNA, 982 bp, Homo sapiens
  source 1..982: mol_type = genomic DNA
gtgctcccggaaaggcactgggcgaccgcacccgtggctttctctgggcgaccgggtcccagactccccccagcacagcagagcgcttccctgcccacccgcggaaaccgccccaggtgggccgcgccccctccccagcagccagcagggcgccagggctgagccggccgtggaggggagcgggtcccgcgggttatacaggcgccggggctccgcggcaggatgcagcaccgaggcttcctcctcctcaccctcctcgccctgctggcgctcacctccgcggtcgccaaaaagaaagataaggtgaagaagggcggcccggggagcgagtgcgctgagtgggcctgggggccctgcacccccagcagcaaggattgcggcgtgggtttccgcgagggcacctgcggggcccagacccagcgcatccggtgcagggtgccctgcaactggaagaaggagtttggagccgactgcaagtacaagtttgagaactggggtgcgtgtgatgggggcacaggcaccaaagtccgccaaggcaccctgaagaaggcgcgctacaatgctcagtgccaggagaccatccgcgtcaccaagccctgcacccccaagaccaaagcaaaggccaaagccaagaaagggaagggaaaggactagacgccaagcctggatgccaaggagcccctggtgtcacatggggcctggcccacgccctccctctcccaggcccgagatgtgacccaccagtgccttctgtctgctcgttagctttaatcaatcatgccctgccttgtccctctcactccccagccccacccctaagtgcccaaagtggggagggacaagggattctgggaagcttgagcctcccccaaagcaatgtgagtcccagagcccgcttttgttcttccccacaattccattactaagaaacacatcaaataaactgactttttccccccaataaaagctcttcttttttaat

SEQ ID NO: 2461 - DNA, 894 bp, Homo sapiens
  source 1..894: mol_type = genomic DNA
gagcgagtgagcgcgcggcggcccctggtccgcccggccgcggccgatctaggggctgggggctggaggcgggggtgggggtctgagctgcgtcctgggctcgaggcgtcccccggggagtcgcctcttagcggatgcagcaccgaggcttcctcctcctcaccctcctcgccctgctggcgctcacctccgcggtcgccaaaaagaaagataaggtgaagaagggcggcccggggagcgagtgcgctgagtgggcctgggggccctgcacccccagcagcaaggattgcggcgtgggtttccgcgagggcacctgcggggcccagacccagcgcatccggtgcagggtgccctgcaactggaagaaggagtttggagccgactgcaagtacaagtttgagaactggggtgcgtgtgatgggggcacaggcaccaaagtccgccaaggcaccctgaagaaggcgcgctacaatgctcagtgccaggagaccatccgcgtcaccaagccctgcacccccaagaccaaagcaaaggccaaagccaagaaagggaagggaaaggactagacgccaagcctggatgccaaggagcccctggtgtcacatggggcctggcccacgccctccctctcccaggcccgagatgtgacccaccagtgccttctgtctgctcgttagctttaatcaatcatgccctgccttgtccctctcactccccagccccacccctaagtgcccaaagtggggagggacaagggattctgggaagcttgagcctcccccaaagcaatgtgagtcccagagcccgcttttgttcttccccacaattccattactaagaaacacatcaaataaactgactttttccccccaataaaagctcttcttttttaat

SEQ ID NO: 2462 - DNA, 828 bp, Homo sapiens
  source 1..828: mol_type = genomic DNA
ttctggagacaaaaggggccgcggcggccggagcgggacgggcccggcgcgggagggagcgaagcagcgcgggcagcgagcgagatgcagcaccgaggcttcctcctcctcaccctcctcgccctgctggcgctcacctccgcggtcgccaaaaagaaagataaggtgaagaagggcggcccggggagcgagtgcgctgagtgggcctgggggccctgcacccccagcagcaaggattgcggcgtgggtttccgcgagggcacctgcggggcccagacccagcgcatccggtgcagggtgccctgcaactggaagaaggagtttggagccgactgcaagtacaagtttgagaactggggtgcgtgtgatgggggcacaggcaccaaagtccgccaaggcaccctgaagaaggcgcgctacaatgctcagtgccaggagaccatccgcgtcaccaagccctgcacccccaagaccaaagcaaaggccaaagccaagaaagggaagggaaaggactagacgccaagcctggatgccaaggagcccctggtgtcacatggggcctggcccacgccctccctctcccaggcccgagatgtgacccaccagtgccttctgtctgctcgttagctttaatcaatcatgccctgccttgtccctctcactccccagccccacccctaagtgcccaaagtggggagggacaagggattctgggaagcttgagcctcccccaaagcaatgtgagtcccagagcccgcttttgttcttccccacaattccattactaagaaacacatcaaataaactgactttttccccccaataaaa

SEQ ID NO: 2463 - DNA, 606 bp, Homo sapiens
  source 1..606: mol_type = genomic DNA
agaccggttctggagacaaaaggggccgcggcggccggagcgggacgggcccggcgcgggagggagcgaagcagcgcgggcagcgagcgagatgcagcaccgaggcttcctcctcctcaccctcctcgccctgctggcgctcacctccgcggtcgccaaaaagaaagaagaaggcgcgctacaatgctcagtgccaggagaccatccgcgtcaccaagccctgcacccccaagaccaaagcaaaggccaaagccaagaaagggaagggaaaggactagacgccaagcctggatgccaaggagcccctggtgtcacatggggcctggcccacgccctccctctcccaggcccgagatgtgacccaccagtgccttctgtctgctcgttagctttaatcaatcatgccctgccttgtccctctcactccccagccccacccctaagtgcccaaagtggggagggacaagggattctgggaagcttgagcctcccccaaagcaatgtgagtcccagagcccgcttttgttcttccccacaattccattactaagaaacacatcaaataaactgactttttccccccaataaaagctcttcttttttaat

SEQ ID NO: 2464 - DNA, 1166 bp, Homo sapiens
  source 1..1166: mol_type = genomic DNA
cggcttcccgcttcccgcggagaacaacaatgaaagtgaaagaggggtggggcgggggcgagcccgggttctgtggcccatttgccctgtggccttgagcaagcccctcccccaggcctcgggggctctcccggtttgggggaaccgggcgaggcaatgccacaggcccagggttagagggggtgggcacttgcagctgccgatgtggctggatctggaacttctcagacggctcctgtcagcgccaagtttcaccaaatccaggcctgcgggctcctcccccaggacccccactcgcagtccctcaagcctgtgctcccggaaaggcactgggcgaccgcacccgtggctttctctgggcgaccgggtcccagactccccccagcacagcagagcgcttccctgcccacccgcggaaaccgccccaggatgcagcaccgaggcttcctcctcctcaccctcctcgccctgctggcgctcacctccgcggtcgccaaaaagaaagataaggtgaagaagggcggcccggggagcgagtgcgctgagtgggcctgggggccctgcacccccagcagcaaggattgcggcgtgggtttccgcgagggcacctgcggggcccagacccagcgcatccggtgcagggtgccctgcaactggaagaaggagtttggagccgactgcaagtacaagtttgagaactggggtgcgtgtgatgggggcacaggcaccaaagtccgccaaggcaccctgaagaaggcgcgctacaatgctcagtgccaggagaccatccgcgtcaccaagccctgcacccccaagaccaaagcaaaggccaaagccaagaaagggaagggaaaggactagacgccaagcctggatgccaaggagcccctggtgtcacatggggcctggcccacgccctccctctcccaggcccgagatgtgacccaccagtgccttctgtctgctcgttagctttaatcaatcatgccctgccttgtccctctcactccccagccccacccctaagtgcccaaagtggggagggacaagggattctgggaagcttgagcctcccccaaagcaatgtgagtcccagagcccgcttttgttcttccccacaattccattactaagaaacacatcaaataaactgactttttcccccc

SEQ ID NO: 2465 - DNA, 981 bp, Homo sapiens
  source 1..981: mol_type = genomic DNA
gtgctcccggaaaggcactgggcgaccgcacccgtggctttctctgggcgaccgggtcccagactccccccagcacagcagagcgcttccctgcccacccgcggaaaccgccccaggtgggccgcgccccctccccagcagccagcagggcgccagggctgagccggccgtggaggggagcgggtcccgcgggttatacaggcgccggggctccgcggatgcagcaccgaggcttcctcctcctcaccctcctcgccctgctggcgctcacctccgcggtcgccaaaaagaaagataaggtgaagaagggcggcccggggagcgagtgcgctgagtgggcctgggggccctgcacccccagcagcaaggattgcggcgtgggtttccgcgagggcacctgcggggcccagacccagcgcatccggtgcagggtgccctgcaactggaagaaggagtttggagccgactgcaagtacaagtttgagaactggggtgcgtgtgatgggggcacaggcaccaaagtccgccaaggcaccctgaagaaggcgcgctacaatgctcagtgccaggagaccatccgcgtcaccaagccctgcacccccaagaccaaagcaaaggccaaagccaagaaagggaagggaaaggactagacgccaagcctggatgccaaggagcccctggtgtcacatggggcctggcccacgccctccctctcccaggcccgagatgtgacccaccagtgccttctgtctgctcgttagctttaatcaatcatgccctgccttgtccctctcactccccagccccacccctaagtgcccaaagtggggagggacaagggattctgggaagcttgagcctcccccaaagcaatgtgagtcccagagcccgcttttgttcttccccacaattccattactaagaaacacatcaaataaactgactttttccccccaataaaagctcttcttttttaatata

SEQ ID NO: 2466 - DNA, 1026 bp, Homo sapiens
  source 1..1026: mol_type = genomic DNA
gagcgagtgagcgcgcggcggcccctggtccgcccggccgcggccgatctaggggctgggggctggaggcgggggtgggggtctgagctgcgtcctgggctcgaggcgtcccccggggagtcgcctcttagcggtgcgtccgggctagcggcgaggggccgccccaagtcttcccaccgccgccaccttagcagcccgacttggggcctggaaagtggagcacgcggaggtgggagggccctgcacgcggcccccggtggggaaggggacgggccagggattcagactcgggctctcccctcaggatgcagcaccgaggcttcctcctcctcaccctcctcgccctgctggcgctcacctccgcggtcgccaaaaagaaagataaggtgaagaagggcggcccggggagcgagtgcgctgagtgggcctgggggccctgcacccccagcagcaaggattgcggcgtgggtttccgcgagggcacctgcggggcccagacccagcgcatccggtgcagggtgccctgcaactggaagaaggagtttggagccgactgcaagtacaagtttgagaactggggtgcgtgtgatgggggcacaggcaccaaagtccgccaaggcaccctgaagaaggcgcgctacaatgctcagtgccaggagaccatccgcgtcaccaagccctgcacccccaagaccaaagcaaaggccaaagccaagaaagggaagggaaaggactagacgccaagcctggatgccaaggagcccctggtgtcacatggggcctggcccacgccctccctctcccaggcccgagatgtgacccaccagtgccttctgtctgctcgttagctttaatcaatcatgccctgccttgtccctctcactccccagccccacccctaagtgcccaaagtggggagggacaagggattctgggaagcttgagcctcccccaaagcaatgtgagtcccagagcccgcttttgttcttccccacaattccattactaagaaacacatcaaataaa

SEQ ID NO: 2467 - DNA, 540 bp, Homo sapiens
  source 1..540: mol_type = genomic DNA
ggtgggcacttgcagctgccgatgtggctggatctggaacttctcagacggctcctgtcagcgccaagtttcaccaaatccaggcctgcgggctcctcccccaggacccccactcgcagtccctcaagcctgtgctcccggaaaggcactgggcgaccgcacccgtggctttctctgggcgaccgggtcccagactccccccagcacagcagagcgcttccctgcccacccgcggaaaccgccccaggtgggccgcgccccctccccagcagccagcagggcgccagggctgagccggccgtggaggggagcgggtcccgcgggttatacaggcgccggggctccgcggcaggcaagagaagctgaggcctgagaacggcccgggccttggcgatgcagcaccgaggcttcctcctcctcaccctcctcgccctgctggcgctcacctccgcggtcgccaaaaagaaagataaggtgaagaagggcggcccggggagcgagtgcgctgagtgggcctgggggccctgcacccccagcagc

SEQ ID NO: 2468 - DNA, 477 bp, Homo sapiens
  source 1..477: mol_type = genomic DNA
agccagcagggcgccagggctgagccggccgtggaggggagcgggtcccgcgggttatacaggcgccggggctccgcggcaggatgcagcaccgaggcttcctcctcctcaccctcctcgccctgctggcgctcacctccgcggtcgccaaaaagaaagataaggtgaagaagggcggcccggggagcgagtgcgctgagtgggcctgggggccctgcacccccagcagcaaggattgcggcgtgggtttccgcgagggcacctgcggggcccagacccagcgcatccggtgcagggtgccctgcaactggaagaaggagtttggagccgactgcaagtacaagtttgagaactggggtgcgtgtgatgggggcacaggcaccaaagtccgccaaggcaccctgaagaaggcgcgctacaatgctcagtgccaggagaccatccgcgtcaccaagccctgcacccccaagaccaaag

SEQ ID NO: 2469 - DNA, 686 bp, Homo sapiens
  source 1..686: mol_type = genomic DNA
agaccggttctggagacaaaaggggccgcggcggccggagcgggacgggcccggcgcgggagggagcgaagcagcgcgggcagcgagcgagatgcagcaccgaggcttcctcctcctcaccctcctcgccctgctggcgctcacctccgcggtcgccaaaaagaaagccgactgcaagtacaagtttgagaactggggtgcgtgtgatgggggcacaggcaccaaagtccgccaaggcaccctgaagaaggcgcgctacaatgctcagtgccaggagaccatccgcgtcaccaagccctgcacccccaagaccaaagcaaaggccaaagccaagaaagggaagggaaaggactagacgccaagcctggatgccaaggagcccctggtgtcacatggggcctggcccacgccctccctctcccaggcccgagatgtgacccaccagtgccttctgtctgctcgttagctttaatcaatcatgccctgccttgtccctctcactccccagccccacccctaagtgcccaaagtggggagggacaagggattctgggaagcttgagcctcccccaaagcaatgtgagtcccagagcccgcttttgttcttccccacaattccattactaagaaacacatcaaataaactgactttttccccccaataaaagctcttcttttttaatata

SEQ ID NO: 2470 - DNA, 3619 bp, Homo sapiens
  source 1..3619: mol_type = genomic DNA
ggcgagcgcacgcgcacagcgccgggccgcacacctccgggctctgggcggagcgcctcgggcgttgtaggcgggaccggaccctctggcccgcccctccgtgtcccttctggtcgccagtggacgccgacgtcatgacgtcgcgttccgtagggctcttcccgggctttggtgggtcacgtgaaccacttttcgcgcgaaacctggttgttgctgtagtggcggagaggatcgtggtactgctatggcggaatcatcggaatccttcaccatggcatccagcccggcccagcgtcggcgaggcaatgatcctctcacctccagccctggccgaagctcccggcgtactgatgccctcacctccagccctggccgtgaccttccaccatttgaggatgagtccgaggggctcctaggcacagaggggcccctggaggaagaagaggatggagaggagctcattggagatggcatggaaagggactaccgcgccatcccagagctggacgcctatgaggccgagggactggctctggatgatgaggacgtagaggagctgacggccagtcagagggaggcagcagagcgggccatgcggcagcgtgaccgggaggctggccggggcctgggccgcatgcgccgtgggctcctgtatgacagcgatgaggaggacgaggagcgccctgcccgcaagcgccgccaggtggagcgggccacggaggacggcgaggaggacgaggagatgatcgagagcatcgagaacctggaggatctcaaaggccactctgtgcgcgagtgggtgagcatggcgggcccccggctggagatccaccaccgcttcaagaacttcctgcgcactcacgtcgacagccacggccacaacgtcttcaaggagcgcatcagcgacatgtgcaaagagaaccgtgagagcctggtggtgaactatgaggacttggcagccagggagcacgtgctggcctacttcctgcctgaggcaccggcggagctgctgcagatctttgatgaggctgccctggaggtggtactggccatgtaccccaagtacgaccgcatcaccaaccacatccatgtccgcatctcccacctgcctctggtggaggagctgcgctcgctgaggcagctgcatctgaaccagctgatccgcaccagtggggtggtgaccagctgcactggcgtcctgccccagctcagcatggtcaagtacaactgcaacaagtgcaatttcgtcctgggtcctttctgccagtcccagaaccaggaggtgaaaccaggctcctgtcctgagtgccagtcggccggcccctttgaggtcaacatggaggagaccatctatcagaactaccagcgtatccgaatccaggagagtccaggcaaagtggcggctggccggctgccccgctccaaggacgccattctcctcgcagatctggtggacagctgcaagccaggagacgagatagagctgactggcatctatcacaacaactatgatggctccctcaacactgccaatggcttccctgtctttgccactgtcatcctagccaaccacgtggccaagaaggacaacaaggttgctgtaggggaactgaccgatgaagatgtgaagatgatcactagcctctccaaggatcagcagatcggagagaagatctttgccagcattgctccttccatctatggtcatgaagacatcaagagaggcctggctctggccctgttcggaggggagcccaaaaacccaggtggcaagcacaaggtacgtggtgatatcaacgtgctcttgtgcggagaccctggcacagcgaagtcgcagtttctcaagtatattgagaaagtgtccagccgagccatcttcaccactggccagggggcgtcggctgtgggcctcacggcgtatgtccagcggcaccctgtcagcagggagtggaccttggaggctggggccctggttctggctgaccgaggagtgtgtctcattgatgaatttgacaagatgaatgaccaggacagaaccagcatccatgaggccatggagcaacagagcatctccatctcgaaggctggcatcgtcacctccctgcaggctcgctgcacggtcattgctgccgccaaccccataggagggcgctacgacccctcgctgactttctctgagaacgtggacctcacagagcccatcatctcacgctttgacatcctgtgtgtggtgagggacaccgtggacccagtccaggacgagatgctggcccgcttcgtggtgggcagccacgtcagacaccaccccagcaacaaggaggaggaggggctggccaatggcagcgctgctgagcccgccatgcccaacacgtatggcgtggagcccctgccccaggaggtcctgaagaagtacatcatctacgccaaggagagggtccacccgaagctcaaccagatggaccaggacaaggtggccaagatgtacagtgacctgaggaaagaatctatggcgacaggcagcatccccattacggtgcggcacatcgagtccatgatccgcatggcggaggcccacgcgcgcatccatctgcgggactatgtgatcgaagacgacgtcaacatggccatccgcgtgatgctggagagcttcatagacacacagaagttcagcgtcatgcgcagcatgcgcaagacttttgcccgctacctttcattccggcgtgacaacaatgagctgttgctcttcatactgaagcagttagtggcagagcaggtgacatatcagcgcaaccgctttggggcccagcaggacactattgaggtccctgagaaggacttggtggataaggctcgtcagatcaacatccacaacctctctgcattttatgacagtgagctcttcaggatgaacaagttcagccacgacctgaaaaggaaaatgatcctgcagcagttctgaggccctatgccatccataaggattccttgggattctggtttggggtggtcagtgccctctgtgctttatggacacaaaaccagagcacttgatgaactcggggtactagggtcagggcttatagcaggatgtctggctgcacctggcatgactgtttgtttctccaagcctgctttgtgcttctcacctttgggtgggatgccttgccagtgtgtcttacttggttgctgaacatcttgccacctccgagtgctttgtctccactcagtaccttggatcagagctgctgagttcaggatgcctgcgtgtggtttaggtgttagccttcttacatggatgtcaggagagctgctgccctcttggcgtgagttgcgtattcaggctgcttttgctgcctttggccagagagctggttgaagatgtttgtaatcgttttcagtctcctgcaggtttctgtgcccctgtggtggaagagggcacgacagtgccagcgcagcgttctgggctcctcagtcgcaggggtgggatgtgagtcatgcggattatccactcgccacagttatcagctgccattgctccctgtctgtttccccactctcttatttgtgcattcggtttggtttctgtagttttaatttttaataaagttgaataaaatat

SEQ ID NO: 2471 - DNA, 3144 bp, Homo sapiens
  source 1..3144: mol_type = genomic DNA
acttttcgcgcgaaacctggttgttgctgtagtggcggagaggatcgtggtactgctatggcggaatcatcggaatccttcaccatggcatccagcccggcccagcgtcggcgaggcaatgatcctctcacctccagccctggctggggcctgggccgcatgcgccgtgggctcctgtatgacagcgatgaggaggacgaggagcgccctgcccgcaagcgccgccaggtggagcgggccacggaggacggcgaggaggacgaggagatgatcgagagcatcgagaacctggaggatctcaaaggccactctgtgcgcgagtgggtgagcatggcgggcccccggctggagatccaccaccgcttcaagaacttcctgcgcactcacgtcgacagccacggccacaacgtcttcaaggagcgcatcagcgacatgtgcaaagagaaccgtgagagcctggtggtgaactatgaggacttggcagccagggagcacgtgctggcctacttcctgcctgaggcaccggcggagctgctgcagatctttgatgaggctgccctggaggtggtactggccatgtaccccaagtacgaccgcatcaccaaccacatccatgtccgcatctcccacctgcctctggtggaggagctgcgctcgctgaggcagctgcatctgaaccagctgatccgcaccagtggggtggtgaccagctgcactggcgtcctgccccagctcagcatggtcaagtacaactgcaacaagtgcaatttcgtcctgggtcctttctgccagtcccagaaccaggaggtgaaaccaggctcctgtcctgagtgccagtcggccggcccctttgaggtcaacatggaggagaccatctatcagaactaccagcgtatccgaatccaggagagtccaggcaaagtggcggctggccggctgccccgctccaaggacgccattctcctcgcagatctggtggacagctgcaagccaggagacgagatagagctgactggcatctatcacaacaactatgatggctccctcaacactgccaatggcttccctgtctttgccactgtcatcctagccaaccacgtggccaagaaggacaacaaggttgctgtaggggaactgaccgatgaagatgtgaagatgatcactagcctctccaaggatcagcagatcggagagaagatctttgccagcattgctccttccatctatggtcatgaagacatcaagagaggcctggctctggccctgttcggaggggagcccaaaaacccaggtggcaagcacaaggtacgtggtgatatcaacgtgctcttgtgcggagaccctggcacagcgaagtcgcagtttctcaagtatattgagaaagtgtccagccgagccatcttcaccactggccagggggcgtcggctgtgggcctcacggcgtatgtccagcggcaccctgtcagcagggagtggaccttggaggctggggccctggttctggctgaccgaggagtgtgtctcattgatgaatttgacaagatgaatgaccaggacagaaccagcatccatgaggccatggagcaacagagcatctccatctcgaaggctggcatcgtcacctccctgcaggctcgctgcacggtcattgctgccgccaaccccataggagggcgctacgacccctcgctgactttctctgagaacgtggacctcacagagcccatcatctcacgctttgacatcctgtgtgtggtgagggacaccgtggacccagtccaggacgagatgctggcccgcttcgtggtgggcagccacgtcagacaccaccccagcaacaaggaggaggaggggctggccaatggcagcgctgctgagcccgccatgcccaacacgtatggcgtggagcccctgccccaggaggtcctgaagaagtacatcatctacgccaaggagagggtccacccgaagctcaaccagatggaccaggacaaggtggccaagatgtacagtgacctgaggaaagaatctatggcgacaggcagcatccccattacggtgcggcacatcgagtccatgatccgcatggcggaggcccacgcgcgcatccatctgcgggactatgtgatcgaagacgacgtcaacatggccatccgcgtgatgctggagagcttcatagacacacagaagttcagcgtcatgcgcagcatgcgcaagacttttgcccgctacctttcattccggcgtgacaacaatgagctgttgctcttcatactgaagcagttagtggcagagcaggtgacatatcagcgcaaccgctttggggcccagcaggacactattgaggtccctgagaaggacttggtggataaggctcgtcagatcaacatccacaacctctctgcattttatgacagtgagctcttcaggatgaacaagttcagccacgacctgaaaaggaaaatgatcctgcagcagttctgaggccctatgccatccataaggattccttgggattctggtttggggtggtcagtgccctctgtgctttatggacacaaaaccagagcacttgatgaactcggggtactagggtcagggcttatagcaggatgtctggctgcacctggcatgactgtttgtttctccaagcctgctttgtgcttctcacctttgggtgggatgccttgccagtgtgtcttacttggttgctgaacatcttgccacctccgagtgctttgtctccactcagtaccttggatcagagctgctgagttcaggatgcctgcgtgtggtttaggtgttagccttcttacatggatgtcaggagagctgctgccctcttggcgtgagttgcgtattcaggctgcttttgctgcctttggccagagagctggttgaagatgtttgtaatcgttttcagtctcctgcaggtttctgtgcccctgtggtggaagagggcacgacagtgccagcgcagcgttctgggctcctcagtcgcaggggtgggatgtgagtcatgcggattatccactcgccacagttatcagctgccattgctccctgtctgtttccccactctcttatttgtgcattcggtttggtttctgtagttttaatttttaataaagttgaataaaatat

SEQ ID NO: 2472 - DNA, 3237 bp, Homo sapiens
  source 1..3237: mol_type = genomic DNA
gttgttgctgtagtggcggagaggatcgtggtactgctatggcggaatcatcggaatccttcaccatggcatccagcccggcccagcgtcggcgaggcaatgatcctctcacctccagccctggccgaagctcccggcgtactgatgccctcacctccagccctggccgtgaccttccaccatttgaggatgagtccgaggggctcctaggcacagaggggcccctggaggaagaagaggatggagaggagctcattggagatggcatggaaagggactaccgcgccatcccagagctggacgcctatgaggccgagggactggctctggatgatgaggacgtagaggagctgacggccagtcagagggaggcaggccgtgggctcctgtatgacagcgatgaggaggacgaggagcgccctgcccgcaagcgccgccaggtggagcgggccacggaggacggcgaggaggacgaggagatgatcgagagcatcgagaacctggaggatctcaaaggccactctgtgcgcgagtgggtgagcatggcgggcccccggctggagatccaccaccgcttcaagaacttcctgcgcactcacgtcgacagccacggccacaacgtcttcaaggagcgcatcagcgacatgtgcaaagagaaccgtgagagcctggtggtgaactatgaggacttggcagccagggagcacgtgctggcctacttcctgcctgaggcaccggcggagctgctgcagatctttgatgaggctgccctggaggtggtactggccatgtaccccaagtacgaccgcatcaccaaccacatccatgtccgcatctcccacctgcctctggtggaggagctgcgctcgctgaggcagctgcatctgaaccagctgatccgcaccagtggggtggtgaccagctgcactggcgtcctgccccagctcagcatggtcaagtacaactgcaacaagtgcaatttcgtcctgggtcctttctgccagtcccagaaccaggaggtgaaaccaggctcctgtcctgagtgccagtcggccggcccctttgaggtcaacatggaggagaccatctatcagaactaccagcgtatccgaatccaggagagtccaggcaaagtggcggctggccggctgccccgctccaaggacgccattctcctcgcagatctggtggacagctgcaagccaggagacgagatagagctgactggcatctatcacaacaactatgatggctccctcaacactgccaatggcttccctgtctttgccactgtcatcctagccaaccacgtggccaagaaggacaacaaggttgctgtaggggaactgaccgatgaagatgtgaagatgatcactagcctctccaaggatcagcagatcggagagaaggaaagctccagaaatgcatccctggcagaggctggtattggtgccattccttcccagctcttggccatcgaacctagtctgcgaagatctggggttcccataggagaggtgggtgtttctcagcgtcaggaagccaggagcttcagttcagccaacacacattggttcctggaagacctcctagggccaagttgtagggatacaatgatctttgccagcattgctccttccatctatggtcatgaagacatcaagagaggcctggctctggccctgttcggaggggagcccaaaaacccaggtggcaagcacaaggtacgtggtgatatcaacgtgctcttgtgcggagaccctggcacagcgaagtcgcagtttctcaagtatattgagaaagtgtccagccgagccatcttcaccactggccagggggcgtcggctgtgggcctcacggcgtatgtccagcggcaccctgtcagcagggagtggaccttggaggctggggccctggttctggctgaccgaggagtgtgtctcattgatgaatttgacaagatgaatgaccaggacagaaccagcatccatgaggccatggagcaacagagcatctccatctcgaaggctggcatcgtcacctccctgcaggctcgctgcacggtcattgctgccgccaaccccataggagggcgctacgacccctcgctgactttctctgagaacgtggacctcacagagcccatcatctcacgctttgacatcctgtgtgtggtgagggacaccgtggacccagtccaggacgagatgctggcccgcttcgtggtgggcagccacgtcagacaccaccccagcaacaaggaggaggaggggctggccaatggcagcgctgctgagcccgccatgcccaacacgtatggcgtggagcccctgccccaggaggtcctgaagaagtacatcatctacgccaaggagagggtccacccgaagctcaaccagatggaccaggacaaggtggccaagatgtacagtgacctgaggaaagaatctatggcgacaggcagcatccccattacggtgcggcacatcgagtccatgatccgcatggcggaggcccacgcgcgcatccatctgcgggactatgtgatcgaagacgacgtcaacatggccatccgcgtgatgctggagagcttcatagacacacagaagttcagcgtcatgcgcagcatgcgcaagacttttgcccgctacctttcattccggcgtgacaacaatgagctgttgctcttcatactgaagcagttagtggcagagcaggtgacatatcagcgcaaccgctttggggcccagcaggacactattgaggtccctgagaaggacttggtggataaggctcgtcagatcaacatccacaacctctctgcattttatgacagtgagctcttcaggatgaacaagttcagccacgacctgaaaaggaaaatgatcctgcagcagttctgaggccctatgccatccataaggattccttgggattctggtttggggtggtcagtgccctctgtgctttatggacacaaaaccagagcacttgatgaactcggggtactagggtcagggcttatagcaggatgtctggctgcacctggcatgactgtttgtttctccaagcctgctttgtgcttctcacctttgggtgggatgccttgccagtgtgtcttacttggttgctgaacatcttgccacctccgagtgctttgtctccactcagtaccttggatcagagctgctgagttcaggatgcctgcgtgtggtttaggtgttagccttcttacat

SEQ ID NO: 2473 - DNA, 3116 bp, Homo sapiens
  source 1..3116: mol_type = genomic DNA
ctcgaggtaacctttggtggcgggaagagttcggaagttttcgcgccggggtggagtcatcctgggaacctccacgcgactttggtggaggtagttctttggcagcgggcatggcgggtaccgtggtgctggacgatgtggagctgcgggaggctcagagagattacctggacttcctggacgacgaggaagaccagggaatttatcagagcaaagttcgggagctgatcagtgacaaccaataccggctgattgtcaatgtgaatgacctgcgcaggaaaaacgagaagagggctaaccggcttctgaacaatgcctttgaggagctggttgccttccagcgggccttaaaggattttgtggcctccattgatgctacctatgccaagcagtatgaggagttctacgtaggactggaaggcagctttggctccaagcacgtctccccgcggactcttacctcctgcttcctcagctgtgtggtctgtgtggagggcattgtcactaaatgttctctagttcgtcccaaagtcgtccgcagtgtccactactgtcctgctactaagaagaccatagagcgacgttattctgatctcaccaccctggtggcctttccctccagctctgtctatcctaccaaggatgaggagaacaatccccttgagacagaatatggcctttctgtctacaaggatcaccagaccatcaccatccaggagatgccggagaaggccccagccggccagctcccccgctctgtggacgtcattctggatgatgacttggtggataaagcgaagcctggtgaccgggttcaggtggtgggaacctaccgttgccttcctggaaagaagggaggctacacctctgggaccttcaggactgtcctgattgcctgtaatgttaagcagatgagcaaggatgctcagccctctttctctgctgaggatatagccaagatcaagaagttcagtaaaacccgatccaaggatatctttgaccagctggccaagtcattggccccaagtatccatgggcatgactatgtcaagaaagcaatcctctgcttgctcttgggaggggtggaacgagacctagaaaatggcagccacatccgtggggacatcaatattcttctaataggagacccatccgttgccaagtctcagcttctgcggtatgtgctttgcactgcaccccgagctatccccaccactggccggggctcctctggagtgggtctgacggctgctgtcaccacagaccaggaaacaggagagcgccgtctggaagcaggggccatggtcctggctgaccgaggcgtggtttgcattgatgaatttgacaaaatgtctgacatggatcgcacagccatccatgaagtgatggagcagggtcgagtgaccattgccaaggctggcatccatgctcggctgaatgcccgctgcagtgttttggcagctgccaaccctgtctacggcaggtatgaccagtataagactccaatggagaacattgggctacaggactcactgctgtcacgatttgacttgctcttcatcatgctggatcagatggatcctgagcaggatcgggagatctcagaccatgtccttcggatgcaccgttacagagcacctggggagcaggatggcgatgctatgcccttgggtagtgctgtggatatcctggccacagatgatcccaactttagccaggaagatcagcaggacacccagatttatgagaagcatgacaaccttctacatgggaccaagaagaaaaaggagaagatggtgagtgcagcattcatgaagaagtacatccatgtggccaaaatcatcaagcctgtcctgacacaggagtcggccacctacattgcagaagagtattcacgcctgcgcagccaggatagcatgagctcagacaccgccaggacatctccagttacagcccgaacactggaaactctgattcgactggccacagcccatgcgaaggcccgcatgagcaagactgtggacctgcaggatgcagaggaagctgtggagttggtccagtatgcttactttaagaaggttctggagaaggagaagaaacgtaagaagcgaagtgaggatgaatcagagacagaagatgaagaggagaaaagccaagaggaccaggagcagaagaggaagagaaggaagactcgccagccagatgccaaagatggggattcatacgacccctatgacttcagtgacacagaggaggaaatgcctcaagtacacactccaaagacggcagactcacaggagaccaaggaatcccagaaagtggagttgagtgaatccaggttgaaggcattcaaggtggccctcttggatgtgttccgggaagctcatgcgcagtcaatcggcatgaatcgcctcacagaatccatcaaccgggacagcgaagagcccttctcttcagttgagatccaggctgctctgagcaagatgcaggatgacaatcaggtcatggtgtctgagggcatcatcttcctcatctgaggaggcctcgtctctgaacttgggttgtgccgagagagtttgttctgtgtttcccaccctctccctgacccaagtctttgcctctactcccttaacagtgttgaattcaactgaaggcgaggaatgttggtgatgaagctgagttcaggactcggtggaccctttgggaatgggtcatgaaagctgccatggggtgaggaaagaggagacagtgggagaggacaatgactattgcatcttcattgcaaaagcactggctcatccgccctacttcccatcccacacaaacccaattgtaaataacatatgacttctgagtacttttgggggcacaactgttttctgtttgctgtttttttgttttgttttttttctccagagcactttggtctagactaggctttgggtggttccaattggtggagagaagctctgaggcacgtcatgcaggtcaagaaagctttctttgcagtagcaccagttaaggtgaatatgtattgtatcacaaaacaaacccaatatccagatgaatatccgagatgttgaataaacttagccatttcgtacacatggtcttaa

SEQ ID NO: 2474 - DNA, 3262 bp, Homo sapiens
  source 1..3262: mol_type = genomic DNA
ctcgaggtaacctttggtggcgggaagagttcggaagttttcgcgccggggtggagtcatcctgggaacctccacgcgactttggtggaggtagttctttggcagcgggcatggcgggtaccgtggtgctggacgatgtggagctgcgggaggctcagagagattacctggacttcctggacgacgaggaagaccagggaatttatcagagcaaagttcgggagctgatcagtgacaaccaataccggctgattgtcaatgtgaatgacctgcgcaggaaaaacgagaagagggctaaccggcttctgaacaatgcctttgaggagctggttgccttccagcgggccttaaaggattttgtggcctccattgatgctacctatgccaagcagtatgaggagttctacgtaggactggaaggcagctttggctccaagcacgtctccccgcggactcttacctcctgcttcctcagctgtgtggtctgtgtggagggcattgtcactaaatgttctctagttcgtcccaaagtcgtccgcagtgtccactactgtcctgctactaagaagaccatagagcgacgttattctgatctcaccaccctggtggcctttccctccagctctgtctatcctaccaaggatgaggagaacaatccccttgagacagaatatggcctttctgtctacaaggatcaccagaccatcaccatccaggagatgccggagaaggccccagccggccagctcccccgctctgtggacgtcattctggatgatgacttggtggataaagcgaagcctggtgaccgggttcaggtggtgggaacctaccgttgccttcctggaaagaagggaggctacacctctgggaccttcaggactgtcctgattgcctgtaatgttaagcagatgagcaaggatgctcagccctctttctctgctgaggatatagccaagatcaagaagttcagtaaaacccgatccaaggatatctttgaccagctggccaagtcattggccccaagtatccatgggcatgactatgtcaagaaagcaatcctctgcttgctcttgggaggggtggaacgagacctagaaaatggcagccacatccgtggggacatcaatattcttctaataggagacccatccgttgccaagtctcagcttctgcggtatgtgctttgcactgcaccccgagctatccccaccactggccggggctcctctggagtgggtctgacggctgctgtcaccacagaccaggaaacaggagagcgccgtctggaagcaggggccatggtcctggctgaccgaggcgtggtttgcattgatgaatttgacaaaatgtctgacatggatcgcacagccatccatgaagtgatggagcagggtcgagtgaccattgccaaggctggcatccatgctcggctgaatgcccgctgcagtgttttggcagctgccaaccctgtctacggcaggtatgaccagtataagactccaatggagaacattgggctacaggactcactgctgtcacgatttgacttgctcttcatcatgctggatcagatggatcctgagcaggatcgggagatctcagaccatgtccttcggatgcaccgttacagagcacctggggagcaggatggcgatgctatgcccttgggtagtgctgtggatatcctggccacagatgatcccaactttagccaggaagatcagcaggacacccagatttatgagaagcatgacaaccttctacatgggaccaagaagaaaaaggagaagatggtgagtgcagcattcatgaagaagtacatccatgtggccaaaatcatcaagcctgtcctgacacaggagtcggccacctacattgcagaagagtattcacgcctgcgcagccaggatagcatgagctcagacaccgccaggacatctccagttacagcccgaacactggaaactctgattcgactggccacagcccatgcgaaggcccgcatgagcaagactgtggacctgcaggatgcagaggaagctgtggagttggtccagtatgcttactttaagaaggttctggagaaggagaagaaacgtaagaagcgaagtgaggatgaatcagagacagaagatgaagaggagaaaagccaagaggaccaggagcagaagaggaagagaaggaagactcgccagccagatgccaaagatggggattcatacgacccctatgacttcagtgacacagaggaggaaatgcctcaagtacacactccaaagacggcagactcacaggagaccaaggaatcccagaaagtggagttgagtgaatccagagacgggatctcaccatgttgcccaggctggtcttggactcctggcctcaagcagtccttctacctgagcctcccaaaaggctgggattacaggcataagccactgtgcttgtttgatctcattctttttaatgactgcagggtttccatggttgaaggcattcaaggtggccctcttggatgtgttccgggaagctcatgcgcagtcaatcggcatgaatcgcctcacagaatccatcaaccgggacagcgaagagcccttctcttcagttgagatccaggctgctctgagcaagatgcaggatgacaatcaggtcatggtgtctgagggcatcatcttcctcatctgaggaggcctcgtctctgaacttgggttgtgccgagagagtttgttctgtgtttcccaccctctccctgacccaagtctttgcctctactcccttaacagtgttgaattcaactgaaggcgaggaatgttggtgatgaagctgagttcaggactcggtggaccctttgggaatgggtcatgaaagctgccatggggtgaggaaagaggagacagtgggagaggacaatgactattgcatcttcattgcaaaagcactggctcatccgccctacttcccatcccacacaaacccaattgtaaataacatatgacttctgagtacttttgggggcacaactgttttctgtttgctgtttttttgttttgttttttttctccagagcactttggtctagactaggctttgggtggttccaattggtggagagaagctctgaggcacgtcatgcaggtcaagaaagctttctttgcagtagcaccagttaaggtgaatatgtattgtatcacaaaacaaacccaatatccagatgaatatccgagatgttgaataaacttagccatttcgtacacatggt

SEQ ID NO: 2475 - DNA, 2720 bp, Homo sapiens
  source 1..2720: mol_type = genomic DNA
gactttggtggaggtagttctttggcagcgggcatggcgggtaccgtggtgctggacgatgtggagctgcgggaggctcagagagattacctggacttcctggacgacgaggcttctgaacaatgcctttgaggagctggttgccttccagcgggccttaaaggattttgtggcctccattgatgctacctatgccaagcagtatgaggagttctacgtaggactggaaggcagctttggctccaagcacgtctccccgcggactcttacctcctgcttcctcagctgtgtggtctgtgtggagggcattgtcactaaatgttctctagttcgtcccaaagtcgtccgcagtgtccactactgtcctgctactaagaagaccatagagcgacgttattctgatctcaccaccctggtggcctttccctccagctctgtctatcctaccaaggatgaggagaacaatccccttgagacagaatatggcctttctgtctacaaggatcaccagaccatcaccatccaggagatgccggagaaggccccagccggccagctcccccgctctgtggacgtcattctggatgatgacttggtggataaagcgaagcctggtgaccgggttcaggtggtgggaacctaccgttgccttcctggaaagaagggaggctacacctctgggaccttcaggactgtcctgattgcctgtaatgttaagcagatgagcaaggatgctcagccctctttctctgctgaggatatagccaagatcaagaagttcagtaaaacccgatccaaggatatctttgaccagctggccaagtcattggccccaagtatccatgggcatgactatgtcaagaaagcaatcctctgcttgctcttgggaggggtggaacgagacctagaaaatggcagccacatccgtggggacatcaatattcttctaataggagacccatccgttgccaagtctcagcttctgcggtatgtgctttgcactgcaccccgagctatccccaccactggccggggctcctctggagtgggtctgacggctgctgtcaccacagaccaggaaacaggagagcgccgtctggaagcaggggccatggtcctggctgaccgaggcgtggtttgcattgatgaatttgacaaaatgtctgacatggatcgcacagccatccatgaagtgatggagcagggtcgagtgaccattgccaaggctggcatccatgctcggctgaatgcccgctgcagtgttttggcagctgccaaccctgtctacggcaggtatgaccagtataagactccaatggagaacattgggctacaggactcactgctgtcacgatttgacttgctcttcatcatgctggatcagatggatcctgagcaggatcgggagatctcagaccatgtccttcggatgcaccgttacagagcacctggggagcaggatggcgatgctatgcccttgggtagtgctgtggatatcctggccacagatgatcccaactttagccaggaagatcagcaggacacccagatttatgagaagcatgacaaccttctacatgggaccaagaagaaaaaggagaagatggtgagtgcagcattcatgaagaagtacatccatgtggccaaaatcatcaagcctgtcctgacacaggagtcggccacctacattgcagaagagtattcacgcctgcgcagccaggatagcatgagctcagacaccgccaggacatctccagttacagcccgaacactggaaactctgattcgactggccacagcccatgcgaaggcccgcatgagcaagactgtggacctgcaggatgcagaggaagctgtggagttggtccagtatgcttactttaagaaggttctggagaaggagaagaaacgtaagaagcgaagtgaggatgaatcagagacagaagatgaagaggagaaaagccaagaggaccaggagcagaagaggaagagaaggaagactcgccagccagatgccaaagatggggattcatacgacccctatgacttcagtgacacagaggaggaaatgcctcaagtacacactccaaagacggcagactcacaggagaccaaggaatcccagaaagtggagttgagtgaatccaggttgaaggcattcaaggtggccctcttggatgtgttccgggaagctcatgcgcagtcaatcggcatgaatcgcctcacagaatccatcaaccgggacagcgaagagcccttctcttcagttgagatccaggctgctctgagcaagatgcaggatgacaatcaggtcatggtgtctgagggcatcatcttcctcatctgaggaggcctcgtctctgaacttgggttgtgccgagagagtttgttctgtgtttcccaccctctccctgacccaagtctttgcctctactcccttaacagtgttgaattcaactgaaggcgaggaatgttggtgatgaagctgagttcaggactcggtggaccctttgggaatgggtcatgaaagctgccatggggtgaggaaagaggagacagtgggagaggacaatgactattgcatcttcattgcaaaagcactggctcatccgccctacttcccatcccacacaaacccaattgtaaataacatatgacttctgagtacttttgggggcacaactgttttctgtttgctgtttttttgttttgtttttttt

SEQ ID NO: 2476 - DNA, 1030 bp, Homo sapiens
  source 1..1030: mol_type = genomic DNA
cgttacagagcacctggggagcaggatggcgatgctatgcccttgggtagtgctgtggatatcctggccacagatgatcccaactttagccaggaagatcagcaggacacccagatttatgagaagcatgacaaccttctacatgggaccaagaagaaaaaggagaagatggtgagtgcagcattcatgaagaagtacatccatgtggccaaaatcatcaagcctgtcctgacacaggagtcggccacctacattgcagaagagtattcacgcctgcgcagccaggatagcatgagctcagacaccgccaggacatctccagttacagcccgaacactggaaactctgattcgactggccacagcccatgcgaaggcccgcatgagcaagactgtggacctgcaggatgcagaggaagctgtggagttggtccagtatgcttactttaagaaggttctggagaaggagaagaaacgtaagaagcgaagtgaggatgaatcagagacagaagatgaagaggagaaaagccaagaggaccaggagcagaagaggaagagaaggaagactcgccagccagatgccaaagatggggattcatacgacccctatgacttcagtgacacagaggaggaaatgcctcaagtacacactccaaagacggcagactcacaggagaccaaggaatcccagaaagtggagttgagtgaatccagagacgggatctcaccatgttgcccaggctggtcttggactcctggcctcaagcagtccttctacctgagcctcccaaaaggctgggattacaggcataagccactgtgcttgtttgatctcattctttttaatgactgcagggtttccatggttgaaggcattcaaggtggccctcttggatgtgttccgggaagctcatgcgcagtcaatcggcatgaatcgcctcacagaatccatcaaccgggacagcgaagagcccttctcttcagttgagatccaggctgctctgagcaagatgcaggatgacaatcaggtc

SEQ ID NO: 2477 - DNA, 3169 bp, Homo sapiens
  source 1..3169: mol_type = genomic DNA
agagaactcagccaatcataatgcttatatgctcccaaggtccccgcctcttcctcgaggtaacctttggtggcgggaagagttcggaagttttcgcgccggggtggagtcatcctgggaacctccacgcgactttggtggaggtagttctttggcagcgggcatggcgggtaccgtggtgctggacgatgtggagctgcgggaggctcagagagattacctggacttcctggacgacgaggaagaccagggaatttatcagagcaaagttcgggagctgatcagtgacaaccaataccggctgattgtcaatgtgaatgacctgcgcaggaaaaacgagaagagggctaaccggcttctgaacaatgcctttgaggagctggttgccttccagcgggccttaaaggattttgtggcctccattgatgctacctatgccaagcagtatgaggagttctacgtaggactggaaggcagctttggctccaagcacgtctccccgcggactcttacctcctgcttcctcagctgtgtggtctgtgtggagggcattgtcactaaatgttctctagttcgtcccaaagtcgtccgcagtgtccactactgtcctgctactaagaagaccatagagcgacgttattctgatctcaccaccctggtggcctttccctccagctctgtctatcctaccaaggatgaggagaacaatccccttgagacagaatatggcctttctgtctacaaggatcaccagaccatcaccatccaggagatgccggagaaggccccagccggccagctcccccgctctgtggacgtcattctggatgatgacttggtggataaagcgaagcctggtgaccgggttcaggtggtgggaacctaccgttgccttcctggaaagaagggaggctacacctctgggaccttcaggactgtcctgattgcctgtaatgttaagcagatgagcaaggatgctcagccctctttctctgctgaggatatagccaagatcaagaagttcagtaaaacccgatccaaggatatctttgaccagctggccaagtcattggccccaagtatccatgggcatgactatgtcaagaaagcaatcctctgcttgctcttgggaggggtggaacgagacctagaaaatggcagccacatccgtggggacatcaatattcttctaataggagacccatccgttgccaagtctcagcttctgcggtatgtgctttgcactgcaccccgagctatccccaccactggccggggctcctctggagtgggtctgacggctgctgtcaccacagaccaggaaacaggagagcgccgtctggaagcaggggccatggtcctggctgaccgaggcgtggtttgcattgatgaatttgacaaaatgtctgacatggatcgcacagccatccatgaagtgatggagcagggtcgagtgaccattgccaaggctggcatccatgctcggctgaatgcccgctgcagtgttttggcagctgccaaccctgtctacggcaggtatgaccagtataagactccaatggagaacattgggctacaggactcactgctgtcacgatttgacttgctcttcatcatgctggatcagatggatcctgagcaggatcgggagatctcagaccatgtccttcggatgcaccgttacagagcacctggggagcaggatggcgatgctatgcccttgggtagtgctgtggatatcctggccacagatgatcccaactttagccaggaagatcagcaggacacccagatttatgagaagcatgacaaccttctacatgggaccaagaagaaaaaggagaagatggtgagtgcagcattcatgaagaagtacatccatgtggccaaaatcatcaagcctgtcctgacacaggagtcggccacctacattgcagaagagtattcacgcctgcgcagccaggatagcatgagctcagacaccgccaggacatctccagttacagcccgaacactggaaactctgattcgactggccacagcccatgcgaaggcccgcatgagcaagactgtggacctgcaggatgcagaggaagctgtggagttggtccagtatgcttactttaagaaggttctggagaaggagaagaaacgtaagaagcgaagtgaggatgaatcagagacagaagatgaagaggagaaaagccaagaggaccaggagcagaagaggaagagaaggaagactcgccagccagatgccaaagatggggattcatacgacccctatgacttcagtgacacagaggaggaaatgcctcaagtacacactccaaagacggcagactcacaggagaccaaggaatcccagaaagtggagttgagtgaatccaggttgaaggcattcaaggtggccctcttggatgtgttccgggaagctcatgcgcagtcaatcggcatgaatcgcctcacagaatccatcaaccgggacagcgaagagcccttctcttcagttgagatccaggctgctctgagcaagatgcaggatgacaatcaggtcatggtgtctgagggcatcatcttcctcatctgaggaggcctcgtctctgaacttgggttgtgccgagagagtttgttctgtgtttcccaccctctccctgacccaagtctttgcctctactcccttaacagtgttgaattcaactgaaggcgaggaatgttggtgatgaagctgagttcaggactcggtggaccctttgggaatgggtcatgaaagctgccatggggtgaggaaagaggagacagtgggagaggacaatgactattgcatcttcattgcaaaagcactggctcatccgccctacttcccatcccacacaaacccaattgtaaataacatatgacttctgagtacttttgggggcacaactgttttctgtttgctgtttttttgttttgttttttttctccagagcactttggtctagactaggctttgggtggttccaattggtggagagaagctctgaggcacgtcatgcaggtcaagaaagctttctttgcagtagcaccagttaaggtgaatatgtattgtatcacaaaacaaacccaatatccagatgaatatccgagatgttgaataaacttagccatttcgtacacatggtcttaa

SEQ ID NO: 2478 - DNA, 4183 bp, Homo sapiens
  source 1..4183: mol_type = genomic DNA
gtctcgcggtttgggagcgctactcgccaggtggactcggagtccgcgagcgtcgtcggcaagcggccgcctttccacggtaaccgcgcgccggcggggagggcgtggcgcggagccgacgggaacgtccgcgctgcggagcagggcagggaagccgggaggcgggcccggcccgagcttgtccttgtcgcgcaggtactccgagcactatgtcgtccccggcgtcgaccccgagccgccgcggcagccggcgtggaagggccacccccgcccagacgcctcggagtgaggatgccaggtcatctccctctcagagacgtagaggcgaggattccacctccacgggggagttgcagccgatgccaacctcgcctggagtggacctgcagagccctgctgcgcaggacgtgctgttttccagccctccccaaatgcattcttcagctatccctcttgactttgatgttagttcaccactgacatacggcactcccagctctcgggtagagggaaccccaagaagtggtgttaggggcacacctgtgagacagaggcctgacctgggctctgcacagaagggcctgcaagtggatctgcagtctgacggggcagcagcagaagatatagtggcaagtgagcagtctctaggccaaaaacttgtgatctggggaacagatgtaaatgtggcagcatgcaaagaaaactttcagagatttcttcagcgttttattgaccctctggctaaagaagaagaaaatgttggcatagatattactgaacctctatacatgcaacgacttggggagattaatgttattggtgagccatttttaaatgtgaactgtgaacacatcaaatcatttgacaaaaatttgtacagacaactcatctcttacccacaggaagttattccaacttttgacatggctgtcaatgaaatcttctttgaccgttaccctgactcaatcttagaacatcagattcaagtaagaccattcaacgcattgaagactaagaatatgagaaacctgaatccagaagacattgaccagctcatcaccatcagcggcatggtgatcaggacatcccagctgattcccgagatgcaggaggccttcttccagtgccaagtgtgtgcccacacgacccgggtggagatggaccgcggccgcattgcagagcccagtgtgtgcgggcgctgccacaccacccacagcatggcactcatccacaaccgctccctcttctctgacaagcagatgatcaagcttcaggagtctccggaagacatgcctgcagggcagacaccacacacagttatcctgtttgctcacaatgatctcgttgacaaggtccagcctggggacagagtgaatgttacaggcatctatcgagctgtgcctattcgagtcaatccaagagtgagtaatgtgaagtctgtctacaaaacccacattgatgtcattcattatcggaaaacggatgcaaaacgtctgcatggccttgatgaagaagcagaacagaaacttttttcagagaaacgtgtggaattgcttaaggaactttccaggaaaccagacatttatgagaggcttgcttcagccttggctccaagcatttatgaacatgaagatataaagaagggaattttgcttcagctctttggcgggacaaggaaggattttagtcacactggaaggggcaaatttcgggctgagatcaacatcttgctgtgtggcgaccctggtaccagcaagtcccagctgctgcagtacgtgtacaacctcgtccccaggggccagtacacgtctgggaagggctccagtgcagttggcctcactgcgtacgtaatgaaagaccctgagacaaggcagctggtcctgcagacaggtgctcttgtcctgagtgacaacggcatctgctgtatcgatgagttcgacaagatgaatgaaagtacaagatcggtattgcatgaagtcatggaacagcagactctgtccattgcaaaggctgggatcatctgtcagctcaatgcgcgcacctctgtcctggcagcagcaaatcccattgagtctcagtggaatcctaaaaaaacaaccattgaaaacatccagctgcctcatactttattatcaaggtttgatttgatcttcctcttgctggaccctcaggacgaagcctatgacaggcgtctggctcaccacctggtcgcactgtactaccagagcgaggagcaggcagaggaggagctcctggacatggcggtgctaaaggactacattgcctacgcgcacagcaccatcatgccgcggctaagtgaggaagccagccaggctctcatcgaggcttatgtagacatgaggaagattggcagtagccggggaatggtttctgcataccctcgacagctagagtcattaatccgcttagcagaagcccatgctaaagtaagattgtctaacaaagttgaagccattgatgtggaagaggccaaacgcctccatcgggaagctctgaagcagtctgcaactgatccccggactggcatcgtggacatatctattcttactacggggatgagtgccacctctcgtaaacggaaagaagaattagctgaagcattgaaaaagcttattttatctaagggcaaaacaccagctctaaaataccagcaactttttgaagatattcggggacaatctgacatagcaattactaaagatatgtttgaagaagcactgcgtgccctggcagatgatgatttcctgacagtgactgggaagaccgtgcgcttgctctgaagccttgtgagcaaggaaggctccctgcatgtcctgcttgctgcacgccacatgggtgtggtctgcatctcagttggccgccatcagtgtaaatagagcttaaagtcatggtttggctgcataaaaattttctaacttgggttcaatatttgtagtgaagtatctgttttcatttttttcacgttataaataaaaatactatgctggccgggcgcggtggctcacacctgtaatcccagcactttgggaggccaatgtgggtggatcatgaggtcaggagttcaagaccagcctagccaagatggtgaaaccccgtctctagtaaagataacaaaaaattagctgggcttgatggcatgcgcctgtaatcccagctactcgggaggttgaggcaggagaatcgcttaaacccaggcggcagaggttgcagtgagccaagatcgcgccactgcactccagcctcagcaatagagtgagactgtctcaaaaaaaaaaaaaaaaaaaaaacctgccaattttcaaacataccgtagagattattttcaggtgccattttatagtatagcagcagggcttttactctgtgtatgcacagatgcagtctggggcatggtttgtgtgctggactttctcatggccatcatcagtatgcttatggatttgatgacaggcatagcctgggcatatcacctcattggtaaagggctagagcctttcttttttatggcacttctttttttgagatagggtcttactctgtcaccctggctagagtacactggtacaatcacggctcaatgtaggcttaacctcctgggctcaggtgtatgtcactatgcccggctactttttgtattttttggtagagacggcttcgccacgttgcccaggctgcaagcgatatgcctaggctcaagcgatctgcccacctcaacttccggaagtgctgagattacaggtgtgagccactgcacccagcctttgttttattttttattttttgagaggtatgattctttctagagattttttctcatggctactattagatcaggaatgggtgattggagattattagattctaggttaacttctaccactttaccctaatacataaaactttttcctaaataaatgatggaaggaataatacttggttacctggcattatttttcagtaagaaaaaagctttactaaccactacatttatggaaatttgtaggggtaagtattttataggtcataaaaaacaccataatataacgaatctcattttctttaaatgtgaattaaatcctaacagtcatctttataaaatgaccataggctaaaatcttacgtgtaagtactactacaataaataatttctgaaacctttaaa

SEQ ID NO: 2479 - DNA, 3111 bp, Homo sapiens
  source 1..3111: mol_type = genomic DNA
actcgccaggtggactcggagtccgcgagcgtcgtcggcaagcggccgcctttccacggtactccgagcactatgtcgtccccggcgtcgaccccgagccgccgcggcagccggcgtggaagggccacccccgcccagacgcctcggagtgaggatgccaggtcatctccctctcagagacgtagaggcgaggattccacctccacgggggagttgcagccgatgccaacctcgcctggagtggacctgcagagccctgctgcgcaggacgtgctgttttccagccctccccaaatgcattcttcagctatccctcttgactttgatgttagagggaaccccaagaagtggtgttaggggcacacctgtgagacagaggcctgacctgggctctgcacagaagggcctgcaagtggatctgcagtctgacggggcagcagcagaagatatagtggcaagtgagcagtctctaggccaaaaacttgtgatctggggaacagatgtaaatgtggcagcatgcaaagaaaactttcagagatttcttcagcgttttattgaccctctggctaaagaagaagaaaatgttggcatagatattactgaacctctatacatgcaacgacttggggagattaatgttattggtgagccatttttaaatgtgaactgtgaacacatcaaatcatttgacaaaaatttgtacagacaactcatctcttacccacaggaagttattccaacttttgacatggctgtcaatgaaatcttctttgaccgttaccctgactcaatcttagaacatcagattcaagtaagaccattcaacgcattgaagactaagaatatgagaaacctgaatccagaagacattgaccagctcatcaccatcagcggcatggtgatcaggacatcccagctgattcccgagatgcaggaggccttcttccagtgccaagtgtgtgcccacacgacccgggtggagatggaccgcggccgcattgcagagcccagtgtgtgcgggcgctgccacaccacccacagcatggcactcatccacaaccgctccctcttctctgacaagcagatgatcaagcttcaggagtctccggaagacatgcctgcagggcagacaccacacacagttatcctgtttgctcacaatgatctcgttgacaaggtccagcctggggacagagtgaatgttacaggcatctatcgagctgtgcctattcgagtcaatccaagagtgagtaatgtgaagtctgtctacaaaacccacattgatgtcattcattatcggaaaacggatgcaaaacgtctgcatggccttgatgaagaagcagaacagaaacttttttcagagaaacgtgtggaattgcttaaggaactttccaggaaaccagacatttatgagaggcttgcttcagccttggctccaagcatttatgaacatgaagatataaagaagggaattttgcttcagctctttggcgggacaaggaaggattttagtcacactggaaggggcaaatttcgggctgagatcaacatcttgctgtgtggcgaccctggtaccagcaagtcccagctgctgcagtacgtgtacaacctcgtccccaggggccagtacacgtctgggaagggctccagtgcagttggcctcactgcgtacgtaatgaaagaccctgagacaaggcagctggtcctgcagacaggtgctcttgtcctgagtgacaacggcatctgctgtatcgatgagttcgacaagatgaatgaaagtacaagatcggtattgcatgaagtcatggaacagcagactctgtccattgcaaaggctgggatcatctgtcagctcaatgcgcgcacctctgtcctggcagcagcaaatcccattgagtctcagtggaatcctaaaaaaacaaccattgaaaacatccagctgcctcatactttattatcaaggtttgatttgatcttcctcttgctggaccctcaggacgaagcctatgacaggcgtctggctcaccacctggtcgcactgtactaccagagcgaggagcaggcagaggaggagctcctggacatggcggtgctaaaggactacattgcctacgcgcacagcaccatcatgccgcggctaagtgaggaagccagccaggctctcatcgaggcttatgtagacatgaggaagattggcagtagccggggaatggtttctgcataccctcgacagctagagtcattaatccgcttagcagaagcccatgctaaagtaagattgtctaacaaagttgaagccattgatgtggaagaggccaaacgcctccatcgggaagctctgaagcagtctgcaactgatccccggactggcatcgtggacatatctattcttactacggggatgagtgccacctctcgtaaacggaaagaagaattagctgaagcattgaaaaagcttattttatctaagggcaaaacaccagctctaaaataccagcaactttttgaagatattcggggacaatctgacatagcaattactaaagatatgtttgaagaagcactgcgtgccctggcagatgatgatttcctgacagtgactgggaagaccgtgcgcttgctctgaagccttgtgagcaaggaaggctccctgcatgtcctgcttgctgcacgccacatgggtgtggtctgcatctcagttggccgccatcagtgtaaatagagcttaaagtcatggtttggctgcataaaaattttctaacttgggttcaatatttgtagtgaagtatctgttttcatttttttcacgttataaataaaaatactatgctggccgggcgcggtggctcacacctgtaatcccagcactttgggaggccaatgtgggtggatcatgaggtcaggagttcaagaccagcctagccaagatggtgaaaccccgtctctagtaaagataacaaaaaattagctgggcttgatggcatgcgcctgtaatcccagctactcgggaggttgaggcaggagaatcgcttaaacccaggcggcagaggttgcagtgagccaagatcgcgccactgcactccagcctcagcaatagagtgagactgtctc

SEQ ID NO: 2480 - DNA, 4105 bp, Homo sapiens
  source 1..4105: mol_type = genomic DNA
aggggcggagacgaccttgccgccggcgggaactctgggtctcgcggtttgggagcgctactcgccaggtggactcggagtccgcgagcgtcgtcggcaagcggccgcctttccacggtactccgagcactatgtcgtccccggcgtcgaccccgagccgccgcggcagccggcgtggaagggccacccccgcccagacgcctcggagtgaggatgccaggtcatctccctctcagagacgtagaggcgaggattccacctccacgggggagttgcagccgatgccaacctcgcctggagtggacctgcagagccctgctgcgcaggacgtgctgttttccagccctccccaaatgcattcttcagctatccctcttgactttgatgttagttcaccactgacatacggcactcccagctctcgggtagagggaaccccaagaagtggtgttaggggcacacctgtgagacagaggcctgacctgggctctgcacagaagggcctgcaagtggatctgcagtctgacggggcagcagcagaagatatagtggcaagtgagcagtctctaggccaaaaacttgtgatctggggaacagatgtaaatgtggcagcatgcaaagaaaactttcagagatttcttcagcgttttattgaccctctggctaaagaagaagaaaatgttggcatagatattactgaacctctatacatgcaacgacttggggagattaatgttattggtgagccatttttaaatgtgaactgtgaacacatcaaatcatttgacaaaaatttgtacagacaactcatctcttacccacaggaagttattccaacttttgacatggctgtcaatgaaatcttctttgaccgttaccctgactcaatcttagaacatcagattcaagtaagaccattcaacgcattgaagactaagaatatgagaaacctgaatccagaagacattgaccagctcatcaccatcagcggcatggtgatcaggacatcccagctgattcccgagatgcaggaggccttcttccagtgccaagtgtgtgcccacacgacccgggtggagatggaccgcggccgcattgcagagcccagtgtgtgcgggcgctgccacaccacccacagcatggcactcatccacaaccgctccctcttctctgacaagcagatgatcaagcttcaggagtctccggaagacatgcctgcagggcagacaccacacacagttatcctgtttgctcacaatgatctcgttgacaaggtccagcctggggacagagtgaatgttacaggcatctatcgagctgtgcctattcgagtcaatccaagagtgagtaatgtgaagtctgtctacaaaacccacattgatgtcattcattatcggaaaacggatgcaaaacgtctgcatggccttgatgaagaagcagaacagaaacttttttcagagaaacgtgtggaattgcttaaggaactttccaggaaaccagacatttatgagaggcttgcttcagccttggctccaagcatttatgaacatgaagatataaagaagggaattttgcttcagctctttggcgggacaaggaaggattttagtcacactggaaggggcaaatttcgggctgagatcaacatcttgctgtgtggcgaccctggtaccagcaagtcccagctgctgcagtacgtgtacaacctcgtccccaggggccagtacacgtctgggaagggctccagtgcagttggcctcactgcgtacgtaatgaaagaccctgagacaaggcagctggtcctgcagacaggtgctcttgtcctgagtgacaacggcatctgctgtatcgatgagttcgacaagatgaatgaaagtacaagatcggtattgcatgaagtcatggaacagcagactctgtccattgcaaaggctgggatcatctgtcagctcaatgcgcgcacctctgtcctggcagcagcaaatcccattgagtctcagtggaatcctaaaaaaacaaccattgaaaacatccagctgcctcatactttattatcaaggtttgatttgatcttcctcttgctggaccctcaggacgaagcctatgacaggcgtctggctcaccacctggtcgcactgtactaccagagcgaggagcaggcagaggaggagctcctggacatggcggtgctaaaggactacattgcctacgcgcacagcaccatcatgccgcggctaagtgaggaagccagccaggctctcatcgaggcttatgtagacatgaggaagattggcagtagccggggaatggtttctgcataccctcgacagctagagtcattaatccgcttagcagaagcccatgctaaagtaagattgtctaacaaagttgaagccattgatgtggaagaggccaaacgcctccatcgggaagctctgaagcagtctgcaactgatccccggactggcatcgtggacatatctattcttactacggggatgagtgccacctctcgtaaacggaaagaagaattagctgaagcattgaaaaagcttattttatctaagggcaaaacaccagctctaaaataccagcaactttttgaagatattcggggacaatctgacatagcaattactaaagatatgtttgaagaagcactgcgtgccctggcagatgatgatttcctgacagtgactgggaagaccgtgcgcttgctctgaagccttgtgagcaaggaaggctccctgcatgtcctgcttgctgcacgccacatgggtgtggtctgcatctcagttggccgccatcagtgtaaatagagcttaaagtcatggtttggctgcataaaaattttctaacttgggttcaatatttgtagtgaagtatctgttttcatttttttcacgttataaataaaaatactatgctggccgggcgcggtggctcacacctgtaatcccagcactttgggaggccaatgtgggtggatcatgaggtcaggagttcaagaccagcctagccaagatggtgaaaccccgtctctagtaaagataacaaaaaattagctgggcttgatggcatgcgcctgtaatcccagctactcgggaggttgaggcaggagaatcgcttaaacccaggcggcagaggttgcagtgagccaagatcgcgccactgcactccagcctcagcaatagagtgagactgtctcaaaaaaaaaaaaaaaaaaaaaacctgccaattttcaaacataccgtagagattattttcaggtgccattttatagtatagcagcagggcttttactctgtgtatgcacagatgcagtctggggcatggtttgtgtgctggactttctcatggccatcatcagtatgcttatggatttgatgacaggcatagcctgggcatatcacctcattggtaaagggctagagcctttcttttttatggcacttctttttttgagatagggtcttactctgtcaccctggctagagtacactggtacaatcacggctcaatgtaggcttaacctcctgggctcaggtgtatgtcactatgcccggctactttttgtattttttggtagagacggcttcgccacgttgcccaggctgcaagcgatatgcctaggctcaagcgatctgcccacctcaacttccggaagtgctgagattacaggtgtgagccactgcacccagcctttgttttattttttattttttgagaggtatgattctttctagagattttttctcatggctactattagatcaggaatgggtgattggagattattagattctaggttaacttctaccactttaccctaatacataaaactttttcctaaataaatgatggaaggaataatacttggttacctggcattatttttcagtaagaaaaaagctttactaaccactacatttatggaaatttgtaggggtaagtattttataggtcataaaaaacaccataatataacgaatctcattttctttaaatgtgaattaaatcctaacagtcatctttataaaatgaccataggctaaaatcttacgtgtaagtactactacaataaataatttctgaaacctttaaa

SEQ ID NO: 2481 - DNA, 2606 bp, Homo sapiens
  source 1..2606: mol_type = genomic DNA
aatcgctggccgcgaggctccggcgaaccaatgggagcgcagcggctgcggcgtccgaacaccgcctcttgtttttcccgcgaaactcggcggctgagcgtggaggttcttgtctcccctggtttgtgaagtgcggaaaaccagaggcgcagtcatgtcgggattcgacgatcctggcattttctacagcgacagcttcgggggcgacgcccaggccgacgaggggcaggcccgcaaatcgcagctgcagaggcgcttcaaggagttcctgcggcagtaccgagtgggcaccgaccgcacgggcttcaccttcaaatacagggatgaactcaagcggcattacaacctgggggagtactggattgaggtggagatggaggatctggccagctttgatgaggacctggccgactacttgtacaagcagccagccgagcacctgcagctgctggaggaagctgccaaggaggtagctgatgaggtgacccggccccggccttctggggaggaggtgctccaggacatccaggtcatgctcaagtcggacgccagcccttccagcattcgtagcctgaagtcggacatgatgtcacacctggtgaagatccctggcatcatcatcgcggcctctgcggtccgtgccaaggccacccgcatctctatccagtgccgcagctgccgcaacaccctcaccaacattgccatgcgccctggcctcgagggctatgccctgcccaggaagtgcaacacagatcaggctgggcgccccaaatgcccattggacccgtacttcatcatgcccgacaaatgcaaatgcgtggacttccagaccctgaagctgcaggagctgcctgatgcagtcccccacggggagatgcccagacacatgcagctctactgcgacaggtacctgtgtgacaaggtcgtccctgggaacagggttaccatcatgggcatctactccatcaagaagtttggcctgactaccagcaggggccgtgacagggtgggcgtgggcatccgaagctcctacatccgtgtcctgggcatccaggtggacacagatggctctggccgcagctttgctggggccgtgagcccccaggaggaggaggagttccgtcgcctggctgccctcccaaatgtctatgaggtcatctccaagagcatcgccccctccatctttgggggcacagacatgaagaaggccattgcctgcctgctctttgggggctcccgaaagaggctccctgatggacttactcgccgaggagacatcaacctgctgatgctaggggaccctgggacagccaagtcccagcttctgaagtttgtggagaagtgttctcccattggggtatacacgtctgggaaaggcagcagcgcagctggactgacagcctcggtgatgagggacccttcgtcccggaatttcatcatggagggcggagccatggtcctggccgatggtggggtcgtctgtattgacgagtttgacaagatgcgagaagatgaccgtgtggcaatccacgaagccatggagcagcagaccatctctatcgccaaggctgggatcaccaccaccctgaactcccgctgctccgtcctggctgctgccaactcagtgttcggccgctgggatgagacgaagggggaggacaacattgacttcatgcccaccatcttgtcgcgcttcgacatgatcttcatcgtcaaggatgagcacaatgaggagagggatgtgatgctggccaagcatgtcatcactctgcacgtgagcgcactgacacagacacaggctgtggagggcgagattgacctggccaagctgaagaagtttattgcctactgccgagtgaagtgtggcccccggctgtcagcagaggctgcagagaaactgaagaaccgctacatcatcatgcggagcggggcccgtcagcacgagagggacagtgaccgccgctccagcatccccatcactgtgcggcagctggaggccattgtgcgcatcgcggaagccctcagcaagatgaagctgcagcccttcgccacagaggcagatgtggaggaggccctgcggctcttccaagtgtccacgttggatgctgccttgtccggtaccctgtcaggggtggagggcttcaccagccaggaggaccaggagatgctgagccgcatcgagaagcagctcaagcgccgctttgccattggctcccaggtgtctgagcacagcatcatcaaggacttcaccaagcagaaatacccggagcacgccatccacaaggtgctgcagctcatgctgcggcgcggcgagatccagcatcgcatgcagcgcaaggttctctaccgcctcaagtgagtcgcgccgcctcactggactcatggactcgcccacgcctcgcccctcctgccgctgcctgccattgacaatgttgctgggacctctgcctccccactgcagccctcgaacttcccaggcaccctcctttctgccccagaggaaggagctgtagtgtcctgctgcctctgggcgcccgcctctagcgcggttctgggaagtgtgcttttggcatccgttaataataaagccacggtgtgttcaggta

SEQ ID NO: 2482 - DNA, 2402 bp, Homo sapiens
  source 1..2402: mol_type = genomic DNA
ttcccgcgaaactcggcggctgagcgtggaggttcttgtctcccctggtttgtgaagtgcggaaaaccagaggcgcagtcatgtcgggattcgacgatcctggcattttctacagcgacagcttcgggggcgacgcccaggccgacgaggggcaggcccgcaaatcgcagctgcagaggcgcttcaaggagttcctgcggcagtaccgagtgggcaccgaccgcacgggcttcaccttcaaatacagggatgaactcaagcggcattacaacctgggggagtactggattgaggtggagatggaggatctggccagctttgatgaggacctggccgactacttgtacaagcagccagccgagcacctgcagctgtcggacatgatgtcacacctggtgaagatccctggcatcatcatcgcggcctctgcggtccgtgccaaggccacccgcatctctatccagtgccgcagctgccgcaacaccctcaccaacattgccatgcgccctggcctcgagggctatgccctgcccaggaagtgcaacacagatcaggctgggcgccccaaatgcccattggacccgtacttcatcatgcccgacaaatgcaaatgcgtggacttccagaccctgaagctgcaggagctgcctgatgcagtcccccacggggagatgcccagacacatgcagctctactgcgacaggtacctgtgtgacaaggtcgtccctgggaacagggttaccatcatgggcatctactccatcaagaagtttggcctgactaccagcaggggccgtgacagggtgggcgtgggcatccgaagctcctacatccgtgtcctgggcatccaggtggacacagatggctctggccgcagctttgctggggccgtgagcccccaggaggaggaggagttccgtcgcctggctgccctcccaaatgtctatgaggtcatctccaagagcatcgccccctccatctttgggggcacagacatgaagaaggccattgcctgcctgctctttgggggctcccgaaagaggctccctgatggacttactcgccgaggagacatcaacctgctgatgctaggggaccctgggacagccaagtcccagcttctgaagtttgtggagaagtgttctcccattggggtatacacgtctgggaaaggcagcagcgcagctggactgacagcctcggtgatgagggacccttcgtcccggaatttcatcatggagggcggagccatggtcctggccgatggtggggtcgtctgtattgacgagtttgacaagatgcgagaagatgaccgtgtggcaatccacgaagccatggagcagcagaccatctctatcgccaaggctgggatcaccaccaccctgaactcccgctgctccgtcctggctgctgccaactcagtgttcggccgctgggatgagacgaagggggaggacaacattgacttcatgcccaccatcttgtcgcgcttcgacatgatcttcatcgtcaaggatgagcacaatgaggagagggatgtgatgctggccaagcatgtcatcactctgcacgtgagcgcactgacacagacacaggctgtggagggcgagattgacctggccaagctgaagaagtttattgcctactgccgagtgaagtgtggcccccggctgtcagcagaggctgcagagaaactgaagaaccgctacatcatcatgcggagcggggcccgtcagcacgagagggacagtgaccgccgctccagcatccccatcactgtgcggcagctggaggccattgtgcgcatcgcggaagccctcagcaagatgaagctgcagcccttcgccacagaggcagatgtggaggaggccctgcggctcttccaagtgtccacgttggatgctgccttgtccggtaccctgtcaggggtggagggcttcaccagccaggaggaccaggagatgctgagccgcatcgagaagcagctcaagcgccgctttgccattggctcccaggtgtctgagcacagcatcatcaaggacttcaccaagcagaaatacccggagcacgccatccacaaggtgctgcagctcatgctgcggcgcggcgagatccagcatcgcatgcagcgcaaggttctctaccgcctcaagtgagtcgcgccgcctcactggactcatggactcgcccacgcctcgcccctcctgccgctgcctgccattgacaatgttgctgggacctctgcctccccactgcagccctcgaacttcccaggcaccctcctttctgccccagaggaaggagctgtagtgtcctgctgcctctgggcgcccgcctctagcgcggttctgggaagtgtgcttttggcatccgttaataataaagccacggtgtgttcaggt

SEQ ID NO: 2483 - DNA, 739 bp, Homo sapiens
  source 1..739: mol_type = genomic DNA
tcttgtctcccctggtttgtgaagtgcggaaaaccagaggcgcagtcatgtcgggattcgacgatcctggcattttctacagcgacagcttcgggggcgacgcccaggccgacgaggggcaggcccgcaaatcgcagctgcagaggcgcttcaaggagttcctgcggcagtaccgagtgggcaccgaccgcacgggcttcaccttcaaatacagtcttgcaccttcattgattgagcacctgctgcctgccagatactgttctgggtgctgggctgcagcactgaagctggacctggctcctgcttctagggatgaactcaagcggcattacaacctgggggagtactggattgaggtggagatggaggatctggccagctttgatgaggacctggccgactacttgtacaagcagccagccgagcacctgcagctgctggaggaagctgccaaggaggtagctgatgaggtgacccggccccggccttctggggaggaggtgctccaggacatccaggtcatgctcaagtcggacgccagcccttccagcattcgtagcctgaagtcggacatgatgtcacacctggtgaagatccctggcatcatcatcgcggcctctgcggtccgtgccaaggccacccgcatctctatccagtgccgcagctgccgcaacaccctcaccaacattgccatgcgccctggcctcgagggctatgccctgcccaggaagtgcaacac

SEQ ID NO: 2484 - DNA, 1369 bp, Homo sapiens
  source 1..1369: mol_type = genomic DNA
gcgaaactcggcggctgagcgtggaggttcttgtctcccctggtttgtgaagtgcggaaaaccagaggcgcagtcatgtcgggattcgacgatcctggcattttctacagcgacagcttcgggggcgacgcccaggccgacgaggggcaggcccgcaaatcgcagctgcagaggcgcttcaaggagttcctgcggcagtaccgagtgggcaccgaccgcacgggcttcaccttcaaatacagggatgaactcaagcggcattacaacctgggggagtactggattgaggtggagatggaggacccggccccggccttctggggaggaggtgctccaggacatccaggtcatgctcaagtcggacgccagcccttccagcattcgtagcctgaagtcggacatgatgtcacacctggtgaagatccctggcatcatcatcgcggcctctgcggtccgtgccaaggccacccgcatctctatccagtgccgcagctgccgcaacaccctcaccaacattgccatgcgccctggcctcgagggctatgccctgcccaggaagtgcaacacagatcaggctgggcgccccaaatgcccattggacccgtacttcatcatgcccgacaaatgcaaatgcgtggacttccagaccctgaagctgcaggagctgcctgatgcagtcccccacggggagatgcccagacacatgcagctctactgcgacaggtacctgtgtgacaaggtcgtccctgggaacagggttaccatcatgggcatctactccatcaagaagtttggcctgactaccagcaggggccgtgacagggtgggcgtgggcatccgaagctcctacatccgtgtcctgggcatccaggtggacacagatggctctggccgcagctttgctggggccgtgagcccccaggaggaggaggagttccgtcgcctggctgccctcccaaatgtctatgaggtcatctccaagagcatcgccccctccatctttgggggcacagacatgaagaaggccattgcctgcctgctctttgggggctcccgaaagaggctccctgatggacttactcgccgaggagacatcaacctgctgatgctaggggaccctgggacagccaagtcccagcttctgaagtttgtggagaagtgttctcccattggggtatacacgtctgggaaaggcagcagcgcagctggactgacagcctcggtgatgagggacccttcgtcccggaatttcatcatggagggcggagccatggtcctggccgatggtggggtcgtctgtattgacgagtttgacaagcatcgagaagcagctcaagcgccgctttgccattggctcccaggtgtctga

SEQ ID NO: 2485 - DNA, 2631 bp, Homo sapiens
  source 1..2631: mol_type = genomic DNA
gtagacgtcctaccccgtgatattaaagcaagatggccgcgccctgcagattgtctcttgttgcgtaagtttttttgaccgtcactcgtgtcagcttcaaagtcagatagatttttctcccagcatgttctacttccgaggctgtggccgttgggtcgcggtttccttcaccaagcagcaatttccgttggcacggttgagcagtgacagcgcggcgccccggactccgcacttcgacgtgatagtcattggtggaggacatgccgggactgaggcagccaccgccgccgctcggtgcggctctcggactctgctcctcactcaccgcgtggacacgatcggtcagatgtcatgtaatccttcctttggtggcatcggaaagggacatttaatgagggaagtagatgccttggatggcctgtgttctcgcatctgtgaccagtctggtgtacattataaagtattaaaccggcgtaagggaccagctgtgtggggtctgagagctcagattgataggaaactctataaacagaacatgcagaaagaaatcttgaatacaccactgcttactgttcaggagggagctgtagaagatcttattcttacagaaccagagcctgaacacactgggaaatgccgtgtcagtggggttgttttgccagaagatcagctgccatgttacttgactcacaccaaccctagagtggatgagattgtccttaagaaccttcaccttaatagtcatgttaaagaaacgacaagaggacctcgatactgtccctccattgaatcaaaagttttgcgttttccaaaccgtctacatcaggtttggttggaacctgaaggaatggattctgaccttatctacccacaggggttatctatgacgctaccagctgagttacaagagaaaatgatcacatgcatcagaggcttggagaaagctaaagtgattcagccaggctacggtgttcagtatgattacttagatccccgtcagatcaccccttccttggagactcatttggttcaacgactcttctttgctggacagatcaatggcaccactggttatgaggaagctgcagctcaaggtgtgatagccggaatcaacgccagtcttcgggtcagtcgcaagcctccctttgtggttagccgaacagaaggttacataggagtcttgattgatgacctcactactctgggcaccagtgaaccataccgcatgtttaccagccgagtagagttccgtttgtcactgcgccctgataatgctgacagccggctcacactgcgagggtataaagacgctggctgtgtgtcccaacaacgatatgaaagagcttgttggatgaagtcttctttagaagaaggcatttctgtgttgaaatctattgagtttttgagctctaaatggaaaaaattaatcccagaggcttctataagtactagtagaagtctgcctgtcagagctctcgatgttctgaagtatgaggaagttgacatggattcattagccaaggctgttccagagcccttgaagaagtatactaaatgtagagagctggctgaaagactgaaaatagaagccacttatgaatcagtgttgttccatcaactacaagaaataaagggagttcagcaagatgaagctctccaactgccaaaagacctagattatttgactatcagggatgtgtctttgtcccatgaagttcgagagaaactacattttagtcgtccacagacgatcggggctgctagtcgcatacccggagtaacacctgccgccatcatcaatctgctgagatttgtgaagaccactcaacgaagacagtcggctatgaatgaatcatccaagactgatcaatacttatgtgatgcagacagacttcaagagagagagttatagctttcaattcataaaagatttttaaagagcatataaataatttgatcaatacaacagtatagataaaagaattatttagcacatgttaaaatagctttattaggttactatgggtttgccattaatttctgagtgggacagaaattataattgtgctttttcgtgtatatgaaaaaactagtcgtaaacaatttgtactctttctttaaggagctgtaatacaaataactttgtgcagtgttcatcaaagagagagacagtgaacctaaaactgaacctggaataaaactcaacatgcagatttgcctactcatagggactttgcctattaagtctaccaaattaaaagtcttatcattcagcgtgttttgagagttaataatcttttgcttggttatactaggctaggaagcaatatcaaagcccttaaattctcaagactaaagacttgagattatataaaattatccagaatcattcagctaatactattggaatatagtatgtagggtgaaagttgacagaaatctgtacttcttcaggaaatcctcactggtaattgttttgaacattaatgaaagccctataaaatagaaagattggaaatcaccattgtttcctattatccacagtgtggatggatacttatttggtgacctagttatgggagaattgagtaacgttagttattttatatcataccataaaaatattttctt

SEQ ID NO: 2486 - DNA, 2961 bp, Homo sapiens
  source 1..2961: mol_type = genomic DNA
ggccgcgccctgcagattgtctcttgttgcgtaagtttttttgaccgtcactcgtgtcagcttcaaagtcagatagatttttctcccagcatgttctacttccgaggctgtggccgttgggtcgcggtttccttcaccaagcagcaatttccgttggcacggttgagcagtgacagcgcggcgccccggactccgcacttcgacgtgatagtcattggtggaggacatgccgggactgaggcagccaccgccgccgctcggtgcggctctcggactctgctcctcactcaccgcgtggacacgatcggtcagatgtcatgtaatccttcctttggtggcatcggaaagggacatttaatgagggaagtagatgccttggatggcctgtgttctcgcatctgtgaccagtctggtgtacattataaagtattaaaccggcgtaagggaccagctgtgtggggtctgagagctcagattgataggaaactctataaacagaacatgcagaaagaaatcttgaatacaccactgcttactgttcaggagggagctgtagaagatcttattcttacagaaccagagcctgaacacactgggaaatgccgtgtcagtggggttgttttggtggatggaagcacagtatatgcagagagtgtgattctgactactgggacatttctgagaggcatgattgtaattggattggagacgcatccagcaggacgtttaggggatcagccttctataggattggctcagacactggagaagttagggtttgtggtgggaaggttgaagactgggactccaccccgaattgccaaagagtccattaatttcagtattctaaacaagcatataccggacaatccatccataccattcagctttaccaatgagacagtatggattaagccagaagatcagctgccatgttacttgactcacaccaaccctagagtggatgagattgtccttaagaaccttcaccttaatagtcatgttaaagaaacgacaagaggacctcgatactgtccctccattgaatcaaaagttttgcgttttccaaaccgtctacatcaggtttggttggaacctgaaggaatggattctgaccttatctacccacaggggttatctatgacgctaccagctgagttacaagagaaaatgatcacatgcatcagaggcttggagaaagctaaagtgattcagccagacggagttttgctcttgttgcccaggatggagtgcaatggtgcgatctcggctcaccacaacctccccctgccaggctacggtgttcagtatgattacttagatccccgtcagatcaccccttccttggagactcatttggttcaacgactcttctttgctggacagatcaatggcaccactggttatgaggaagctgcagctcaaggtgtgatagccggaatcaacgccagtcttcgggtcagtcgcaagcctccctttgtggttagccgaacagaaggttacataggagtcttgattgatgacctcactactctgggcaccagtgaaccataccgcatgtttaccagccgagtagagttccgtttgtcactgcgccctgataatgctgacagccggctcacactgcgagggtataaagacgctggctgtgtgtcccaacaacgatatgaaagagcttgttggatgaagtcttctttagaagaaggcatttctgtgttgaaatctattgagtttttgagctctaaatggaaaaaattaatcccagaggcttctataagtactagtagaagtctgcctgtcagagctctcgatgttctgaagtatgaggaagttgacatggattcattagccaaggctgttccagagcccttgaagaagtatactaaatgtagagagctggctgaaagactgaaaatagaagccacttatgaatcagtgttgttccatcaactacaagaaataaagggagttcagcaagatgaagctctccaactgccaaaagacctagattatttgactatcagggatgtgtctttgtcccatgaagttcgagagaaactacattttagtcgtccacagacgatcggggctgctagtcgcatacccggagtaacacctgccgccatcatcaatctgctgagatttgtgaagaccactcaacgaagacagtcggctatgaatgaatcatccaagactgatcaatacttatgtgatgcagacagacttcaagagagagagttatagctttcaattcataaaagatttttaaagagcatataaataatttgatcaatacaacagtatagataaaagaattatttagcacatgttaaaatagctttattaggttactatgggtttgccattaatttctgagtgggacagaaattataattgtgctttttcgtgtatatgaaaaaactagtcgtaaacaatttgtactctttctttaaggagctgtaatacaaataactttgtgcagtgttcatcaaagagagagacagtgaacctaaaactgaacctggaataaaactcaacatgcagatttgcctactcatagggactttgcctattaagtctaccaaattaaaagtcttatcattcagcgtgttttgagagttaataatcttttgcttggttatactaggctaggaagcaatatcaaagcccttaaattctcaagactaaagacttgagattatataaaattatccagaatcattcagctaatactattggaatatagtatgtagggtgaaagttgacagaaatctgtacttcttcaggaaatcctcactggtaattgttttgaacattaatgaaagccctataaaatagaaagattggaaatcaccattgtttcctattatccacagtgtggatggatacttatttggtgacctagttatgggagaattgagtaacgttagttattttatatcataccataaaaatattttc

SEQ ID NO: 2487 - DNA, 2174 bp, Homo sapiens
  source 1..2174: mol_type = genomic DNA
cgtgatattaaagcaagatggccgcgccctgcagattgtctcttgttgcgtcagatgtcatgtaatccttcctttggtggcatcggaaagggacatttaatgagggaagtagatgccttggatggcctgtgttctcgcatctgtgaccagtctggtgtacattataaagtattaaaccggcgtaagggaccagctgtgtggggtctgagagctcagattgataggaaactctataaacagaacatgcagaaagaaatcttgaatacaccactgcttactgttcaggagggagctgtagaagatcttattcttacagaaccagagcctgaacacactgggaaatgccgtgtcagtggggttgttttggtggatggaagcacagtatatgcagagagtgtgattctgactactgggacatttctgagaggcatgattgtaattggattggagacgcatccagcaggacgtttaggggatcagccttctataggattggctcagacactggagaagttagggtttgtggtgggaaggttgaagactgggactccaccccgaattgccaaagagtccattaatttcagtattctaaacaagcatataccggacaatccatccataccattcagctttaccaatgagacagtatggattaagccagaagatcagctgccatgttacttgactcacaccaaccctagagtggatgagattgtccttaagaaccttcaccttaatagtcatgttaaagaaacgacaagaggacctcgatactgtccctccattgaatcaaaagttttgcgttttccaaaccgtctacatcaggtttggttggaacctgaaggaatggattctgaccttatctacccacaggggttatctatgacgctaccagctgagttacaagagaaaatgatcacatgcatcagaggcttggagaaagctaaagtgattcagccagacggagttttgctcttgttgcccaggatggagtgcaatggtgcgatctcggctcaccacaacctccccctgccaggctacggtgttcagtatgattacttagatccccgtcagatcaccccttccttggagactcatttggttcaacgactcttctttgctggacagatcaatggcaccactggttatgaggaagctgcagctcaaggtgtgatagccggaatcaacgccagtcttcgggtcagtcgcaagcctccctttgtggttagccgaacagaaggttacataggagtcttgattgatgacctcactactctgggcaccagtgaaccataccgcatgtttaccagccgagtagagttccgtttgtcactgcgccctgataatgctgacagccggctcacactgcgagggtataaagacgctggctgtgtgtcccaacaacgatatgaaagagcttgttggatgaagtcttctttagaagaaggcatttctgtgttgaaatctattgagtttttgagctctaaatggaaaaaattaatcccagaggcttctataagtactagtagaagtctgcctgtcagagctctcgatgttctgaagtatgaggaagttgacatggattcattagccaaggctgttccagagcccttgaagaagtatactaaatgtagagagctggctgaaagactgaaaatagaagccacttatgaatcagtgttgttccatcaactacaagaaataaagggagttcagcaagatgaagctctccaactgccaaaagacctagattatttgactatcagggatgtgtctttgtcccatgaagttcgagagaaactacattttagtcgtccacagacgatcggggctgctagtcgcatacccggagtaacacctgccgccatcatcaatctgctgagatttgtgaagaccactcaacgaagacagtcggctatgaatgaatcatccaagactgatcaatacttatgtgatgcagacagacttcaagagagagagttatagctttcaattcataaaagatttttaaagagcatataaataatttgatcaatacaacagtatagataaaagaattatttagcacatgttaaaatagctttattaggttactatgggtttgccattaatttctgagtgggacagaaattataattgtgctttttcgtgtatatgaaaaaactagtcgtaaa

SEQ ID NO: 2488 - DNA, 2837 bp, Homo sapiens
  source 1..2837: mol_type = genomic DNA
taaataaataaataaataaaaataaaaaataataataataaaaaaagcccgcacgaactaggaaagaaaatacacaaccggccctccgtgcgatcacccatctccctcaccaggaaagtagctccaaaccgccaatcagcggcgacgctggacgtagacgtcctaccccgtgatattaaagcaagatggccgcgccctgcagattgtctcttgttgcgtaagtttttttgaccgtcactcgtgtcagcttcaaagtcagatagatttttctcccagcatgttctacttccgaggctgtggccgttgggtcgcggtttccttcaccaagcagcaatttccgttggcacggttgagcagtgacagcgcggcgccccggactccgcacttcgacgtgatagtcattggtggaggacatgccgggactgaggcagccaccgccgccgctcggtgcggctctcggactctgctcctcactcaccgcgtggacacgatcggtcagatgtcatgtaatccttcctttggtggcatcggaaagggacatttaatgagggaagtagatgccttggatggcctgtgttctcgcatctgtgaccagtctggtgtacattataaagtattaaaccggcgtaagggaccagctgtgtggggtctgagagctcagattgataggaaactctataaacagaacatgcagaaagaaatcttgaatacaccactgcttactgttcaggagggagctgtagaagatcttattcttacagaaccagagcctgaacacactgggaaatgccgtgtcagtggggttgttttggtggatggaagcacagtatatgcagagagtgtgattctgactactgggacatttctgagaggcatgattgtaattggattggagacgcatccagcaggacgtttaggggatcagccttctataggattggctcagacactggagaagttagggtttgtggtgggaaggttgaagactgggactccaccccgaattgccaaagagtccattaatttcagtattctaaacaagcatataccggacaatccatccataccattcagctttaccaatgagacagtatggattaagccagaagatcagctgccatgttacttgactcacaccaaccctagagtggatgagattgtccttaagaaccttcaccttaatagtcatgttaaagaaacgacaagaggacctcgatactgtccctccattgaatcaaaagttttgcgttttccaaaccgtctacatcaggtttggttggaacctgaaggaatggattctgaccttatctacccacaggggttatctatgacgctaccagctgagttacaagagaaaatgatcacatgcatcagaggcttggagaaagctaaagtgattcagccaggctacggtgttcagtatgattacttagatccccgtcagatcaccccttccttggagactcatttggttcaacgactcttctttgctggacagatcaatggcaccactggttatgaggaagctgcagctcaaacagagtgttgctctgttgccaggctggagtgcagtgatatgatctcccagcttcaagcgatcctcctgcctcagccctccctagtagctgggactgcaggcatgcaccacaacacccagggtgtgatagccggaatcaacgccagtcttcgggtcagtcgcaagcctccctttgtggttagccgaacagaaggttacataggagtcttgattgatgacctcactactctgggcaccagtgaaccataccgcatgtttaccagccgagtagagttccgtttgtcactgcgccctgataatgctgacagccggctcacactgcgagggtataaagacgctggctgtgtgtcccaacaacgatatgaaagagcttgttggatgaagtcttctttagaagaaggcatttctgtgttgaaatctattgagtttttgagctctaaatggaaaaaattaatcccagaggcttctataagtactagtagaagtctgcctgtcagagctctcgatgttctgaagtatgaggaagttgacatggattcattagccaaggctgttccagagcccttgaagaagtatactaaatgtagagagctggctgaaagactgaaaatagaagccacttatgaatcagtgttgttccatcaactacaagaaataaagggagttcagcaagatgaagctctccaactgccaaaagacctagattatttgactatcagggatgtgtctttgtcccatgaagttcgagagaaactacattttagtcgtccacagacgatcggggctgctagtcgcatacccggagtaacacctgccgccatcatcaatctgctgagatttgtgaagaccactcaacgaagacagtcggctatgaatgaatcatccaagactgatcaatacttatgtgatgcagacagacttcaagagagagagttatagctttcaattcataaaagatttttaaagagcatataaataatttgatcaatacaacagtatagataaaagaattatttagcacatgttaaaatagctttattaggttactatgggtttgccattaatttctgagtgggacagaaattataattgtgctttttcgtgtatatgaaaaaactagtcgtaaacaatttgtactctttctttaaggagctgtaatacaaataactttgtgcagtgttcatcaaagagagagacagtgaacctaaaactgaacctggaataaaactcaacatgcagatttgcctactcatagggactttgcctattaagtctaccaaattaaaagtcttatcattca

SEQ ID NO: 2489 - DNA, 10857 bp, Homo sapiens
  source 1..10857: mol_type = genomic DNA
taaataaataaataaataaaaataaaaaataataataataaaaaaagcccgcacgaactaggaaagaaaatacacaaccggccctccgtgcgatcacccatctccctcaccaggaaagtagctccaaaccgccaatcagcggcgacgctggacgtagacgtcctaccccgtgatattaaagcaagatggccgcgccctgcagattgtctcttgttgcgtaagtttttttgaccgtcactcgtgtcagcttcaaagtcagatagatttttctcccagcatgttctacttccgaggctgtggccgttgggtcgcggtttccttcaccaagcagcaatttccgttggcacggttgagcagtgacagcgcggcgccccggactccgcacttcgacgtgatagtcattggtggaggacatgccgggactgaggcagccaccgccgccgctcggtgcggctctcggactctgctcctcactcaccgcgtggacacgatcggtcagatgtcatgtaatccttcctttggtggcatcggaaagggacatttaatgagggaagtagatgccttggatggcctgtgttctcgcatctgtgaccagtctggtgtacattataaagtattaaaccggcgtaagggaccagctgtgtggggtctgagagctcagattgataggaaactctataaacagaacatgcagaaagaaatcttgaatacaccactgcttactgttcaggagggagctgtagaagatcttattcttacagaaccagagcctgaacacactgggaaatgccgtgtcagtggggttgttttggtggatggaagcacagtatatgcagagagtgtgattctgactactgggacatttctgagaggcatgattgtaattggattggagacgcatccagcaggacgtttaggggatcagccttctataggattggctcagacactggagaagttagggtttgtggtgggaaggttgaagactgggactccaccccgaattgccaaagagtccattaatttcagtattctaaacaagcatataccggacaatccatccataccattcagctttaccaatgagacagtatggattaagccagaagatcagctgccatgttacttgactcacaccaaccctagagtggatgagattgtccttaagaaccttcaccttaatagtcatgttaaagaaacgacaagaggacctcgatactgtccctccattgaatcaaaagttttgcgttttccaaaccgtctacatcaggtttggttggaacctgaaggaatggattctgaccttatctacccacaggggttatctatgacgctaccagctgagttacaagagaaaatgatcacatgcatcagaggcttggagaaagctaaagtgattcagccaggctacggtgttcagtatgattacttagatccccgtcagatcaccccttccttggagactcatttggttcaacgactcttctttgctggacagatcaatggcaccactggttatgaggaagctgcagctcaaggtgtgatagccggaatcaacgccagtcttcgggtcagtcgcaagcctccctttgtggttagccgaacagaaggttacataggagtcttgattgatgacctcactactctgggcaccagtgaaccataccgcatgtttaccagccgagtagagttccgtttgtcactgcgccctgataatgctgacagccggctcacactgcgagggtataaagacgctggctgtgtgtcccaacaacgatatgaaagagcttgttggatgaagtcttctttagaagaaggcatttctgtgttgaaatctattgagtttttgagctctaaatggaaaaaattaatcccagaggcttctataagtactagtagaagtctgcctgtcagagctctcgatgttctgaagtatgaggaagttgacatggattcattagccaaggctgttccagagcccttgaagaagtatactaaatgtagagagctggctgaaagactgaaaatagaagccacttatgaatcagtgttgttccatcaactacaagaaataaagggagttcagcaagatgaagctctccaactgccaaaagacctagattatttgactatcagggatgtgtctttgtcccatgaagttcgagagaaactacattttagtcgtccacagacgatcggggctgctagtcgcatacccggagtaacacctgccgccatcatcaatctgctgagatttgtgaagaccactcaacgaagacagtcggctatgaatgaatcatccaagactgatcaatacttatgtgatgcagacagacttcaagagagagagttatagctttcaattcataaaagatttttaaagagcatataaataatttgatcaatacaacagtatagataaaagaattatttagcacatgttaaaatagctttattaggttactatgggtttgccattaatttctgagtgggacagaaattataattgtgctttttcgtgtatatgaaaaaactagtcgtaaacaatttgtactctttctttaaggagctgtaatacaaataactttgtgcagtgttcatcaaagagagagacagtgaacctaaaactgaacctggaataaaactcaacatgcagatttgcctactcatagggactttgcctattaagtctaccaaattaaaagtcttatcattcagcgtgttttgagagttaataatcttttgcttggttatactaggctaggaagcaatatcaaagcccttaaattctcaagactaaagacttgagattatataaaattatccagaatcattcagctaatactattggaatatagtatgtagggtgaaagttgacagaaatctgtacttcttcaggaaatcctcactggtaattgttttgaacattaatgaaagccctataaaatagaaagattggaaatcaccattgtttcctattatccacagtgtggatggatacttatttggtgacctagttatgggagaattgagtaacgttagttattttatatcataccataaaaatattttcttaagaaattgtcatggccatcatttcttaataatgaagacaggtccatagtaactggtgagtggtgtttccctgtttttaagtcagaatgacagaaaaaacagaatagtggtagtacccctcttcctctccagtacttcaatggtatgtcttcacaggggttagagtgggataatcagctgggccttttgactcagatacctcagatacctcaaccattctaaatagactaagggatgaatacagccaaatgggccagacagccctgcttgtctctggaattccaacccagatctctggtgtcagcctagggagaagctcccgtgtcaccttcgggccaaagcaggtactcaggagagttctaagggccccaaagtcactttggctacagatgtgtatgttaagcctgattatgggtgtgaggcaaccaagtatcttgttactataattgcatatggccacttggaggtagcttagttttcttgggtttattttatctaattttagtctttccagaaagcagtaagattagtagcaagtaaaaagtatttgtagtgctggataatttaggaatgatgaatattttttaatacttgattcagtgatttcaaaaggtcgtaacttttagtcatagctactcctgggcaaaattcttcttacagagacaatattaattacaataccacattgtgtatatattttgaaaagaggctggttgcagcagctcacgcctgtaatcccagcactttgggaggctgaggcgggtggataacctgaagtcaggagttcaagaccagcctggccaacatggcaaaaccccatctccactaaaaataccaaaattagccaggcgtggtggagcaagcctgtagtcccagctactcaggaggctgaggcaggagaatcgcttgaacccaggaggcagaggttgcagtgagctgagattgtgccactgcactccagcctgggcgacagagtgagactgtttcaaaaaaaagaaaaagaaaagaaggtattttgtgtttttgtgctacccgttcagcaaaataatgaaattcattgtttctaaacttttttttctgattaaatacaagagtaaaaaaagtgaatggagtgccttttgaatagaatataacaaaaatttatcttaaagaaacgggaagtaacctggcacagtggctcacgcctgtaatcccagcactttgggaggctgaggcaggtggatcacgaggtcaggagatcgagaccatcctgcccaacatggtgaaaccccatctctactaaaaatacaaaaattagctaggtgtgttggcacgtgcctgtagtcccaactactcaggaggctgaggcaagagaatcacttgaactcaggaggcagaggttgcagtgagccaagatcatgccactgcactccagcctggcaacagagtgagactctgtctcaaaaaaaaaaaaagaaacaggaagttcaaatattttgggaggttcttgacagctacaatttggggctagtgacactatacacatataaagaaactttaaagtttcttagtaatgaaggtttgtaatgctattccattacaatagtaactgtctcactgaaaaatgtttcatggaaaatacatattttagattctatgatttgctttaggatgtgaacttctttattttttagagacagggtctcactctgttgcccaggctgtagtgcagtggtacaatcatagctcactgcagccttgatctcctgggctcaagtgatccttatgcctcagcctcccaagtggctgggactacaggcacatgccaccatgcctggctaagttttaaaaaaattttttgtaggaatgaagtctcactatgttgcccaggctggtcttgaacttctggcctcaaatgatcctcttgccttggcctcccaaagtgctcagattacaggcatgagccaccacacgtggcctgaaacctctttaaatccacaatgtttgtatgttaacttaaacaaaattacatcacttaatatgtcaaaacagcctaccctctggtgctgctatgcagaagtactacagaatatgatgccctaggaagaaatcagctaaaaatgtaaccttactcaatgtagttacttcatagaaatcccatcactgacaataatcagctgccaacgaaagctggccatacttgtgacttcctctattcaccacagaccagactgcctaccagttgaaaaagccaggtattttttcaattcaattcaacaggaacaccaaaaaataagaaatgactaagaaacactaagcatttgtaaaattactgggggaggaaggatgaagatacgaacctatgctaaattaaacgattatggccttgaaaatgaagttcctttatagccaagagcttaaattttgttactgatggttttaaaagtattttgtcattttttagtttcaacctagattggaatagccatggcttttctacttcagaaatttcaactcctagaagaatgccctgtccagaagaagtggtcaggagtatcaggaaagccaccagcagagactaggggtttattctgatctggaagagccacttaacactggaatgcacacagtgaaaattaattgttcctcttacactccctctccacaatacttctattattacacttacttcgttctaccttaatgtttttatttagagacaagatctcactctgccaccctggctggagtgcagtggcatgattacagctcactgcagcctcaacctccctggctctagctattctcccatctcagccctccaagtagctgggactacaggtgtgcaccaccatgcacggctaatttttaagtttttgtagatatggggtcttactatgttgcccaggctggtctcaaagtcctgggctcaattaatcctccctcttcagcctcctgtgtaggtgatagtacaggcatgagccaccatgtgcctggccctaccttaatgttaatatctgtctaccttaagaagatataagccttgtaaatataagcaatatcacagttgtagatactcgtgctttttaaatagattaatgaatactactaaaggcaagaaatggtattactaaaactcaagtgaataattaaatgagatcaaaatatttgtgacaggccaggcacggtggcttacgcctgtaatcccagcactttgggaggccaggcggatcacttgagctcagcagttcaagaccagcctgggcaacatggcgaaactccgtctttaccaaaaatacaaaaataagccaagcatggtggcacgtacctgttgttccagcaacttgggggctgaggcaggagaatcacttgagccggggagtttgaggctgcagtgagttgatagcatgccaccacactccagcctgggcaacagagtgagaccctgcctgaaaaaaagcccaggtgtggtggctcacatctgtaatcccagcattttgggattacaaatctgccagcgcaagcagatcacttgaggataggagtttgagaccagcctgaccaacatgttgaaaccccatctcttattaaaatacaaaaattagctgggcgtggtggcatgcgcctgtaatccgagctactcaggtggctgaggcacaagaatcgcttgaacctgggagatggaagttgcaatgagctgagatcaagccactgcactccagcctgggcaacagagcaagactgtctcaaaaaaaaaaaatttgtacagtcatgttcaaagtagcattaattcacaatagccaaaagctggaagtagcccaagtatccaccaatgaatgaaaggataaacaaaatgtggcatatacatacaatggaatattatacagccttaaaaaggaaggaaattcatatacatgctacagcatggataaaccttgaaaaagttatgctaactgaaatcagccagtcacaaaaagacaaatactgtatgattccctttataagagttacctggagcactcaaattcatagagacagtaaaatgatggttaccaggggatgggggagggagaaacaggaaactattctttagtgagtacagaatttcagtttttttgttttgtttttgtttttgtttttgagatggagcctcacactgtcacccaggctggagtgcaatggtgtgatcttggttcactgcaacctctgcctcctaggttcaaatgattcttctgcctcagtctcctgagtctgggattacaggcgcctgccatcatgcccagctaatttttgtatttttaatagagacagggtttcacaggttggccaagctagtctcgaactcctgacctcatgatccgcccacctcgacctcccaaagtgctgggattacaggggtgagccaccatgcccagtccagaatttcaagttttgcaagatgaaaagagttctggagatggttgatggtgatggttgcacaacaatttgaatattttaaatgccaatgaactgttcatttacaaatggttacgatggaatttttctttttcttttttttttcttgagacggagtctcgctctgtcactcaggctagagtgcagtggcactatctcggctcactgcaacctcctcctgctgggttaaagtgattctcttgcctcagcctcccgagcagctgagactacaggcgcgtgccaccatgctcagctaattttttctatttttagtggagacagggtttcaccatgttagccagatggtctcgatctcctgacctcgtgatccacctccctcagcctctcaaagtgctgggattacaggcatgagccaccgtgcacagccaagatggaaatttttatgttctttgtttgatatggtttggctgtgtccccacccaaatctcaacttgaactgtatctctcagaattcccacatgttgtgggagggacccacagggaggtaattgaatcacaagggccggtttttaccatgctttcttgtgatagtgaataagtctcacaagatctgatgggtttatcaggggtttccgattttgcttcttcctcattttctcttgccactcccatgtaagaagtgcctttcgcctcccgccaagattctgaggcttcctcagccatgtggaactttggggacgaaaagaggtttaattggacttaaagttccaattaaagtttcaggtatgtctttatcagcagcatgaaaatgaactaatacagtgttttatcactttttttttttttttttttttttgagatggagtttcgctcttgttgcccaggctggagtgcaatggcgcaacatcaggtcactgcaaactctgcctcccgggttcaagcgattctcttgcctcagcctcctgagtagctgggattacaggcttgtgccaccacacccggctaatttttgtatttttagtagagacagagtttcaccatgttggccaggctagtcttgaactcctgacctcaggtgatccacccaccttggcttcccaaagtgggtggatgacctctgggattacaggcgtgcgccaccgcgctcggtctatattcaccaattttaagatgcacatctttccatattttagtatctctaagttggagtatgtcttacaattaatggcatctgacagttataactggcagcatttgtgactgaaaaacatcttagatgcaatgaaatacagtgtgtgtgtttgtattgtgctgcaatataaaatgtatttcaggccaggtatggtggttcacacctgtaatcccagcactttggaaggccaaagtgggaggatcacttgagcccaggagttcaaggctgcagtgagctctgattataccactgtactccagcctaggcaacagagcaagacccagtctctaaaaaataaatgaaaatgtttcttattgtggatcacagtcaaaagtttgaaaaaacacaatctgtttgaacagcactactttctgacaggaaaaccccaacaggttaggatctgtgtattcctcagagtaagaatttttctaaaaagtttttaaaaacttaaagtcttactgatctcttcctatgctccaattttatagatataacttagccttgcgaggtgatgtaattaaagtctaacttcaagttgctgttgagcatagatctcaggtcttctgacttcacaacacctttctgccactttcagtggatttttccctcctagggaccagaggtcctctactggattaaaagtttctccatcccggcagggtgcggtggctcacgcctgtaatcccaacactttgggaggccaaggcgggcggatcacgaggtcaggaaatagagaccatcctggctaacatggtgaaaccccgtgtctactaaaaatacgaaaaattagccgggtgtggtggtgcgcgcctgtagtcccagctactcgggaggctgaggcaggagaatggcgtgaagccaggaggcggagcttgcaatgagccgagatcgcgccactgcactctagcctgggcgacaaagcgagactctgtctcaaaaaaaaaaaaaaaaaaaaaaaattctccatcccttttgaacaatctggaagtctgtttctcttaaccttcagttcccattccaatcctttgtaacctatttcaggttaagcatttatggaggtgccatgcttaattagccattatggcactcactctatttcaaaggttatcccagaatttggaggctgtaggggaattcagagtgtgaatttcacttgaacagcaccctctgcagacttaaaatattcctcctatatctgaagacaataataatttcttagaatttgctaggctaaacaactattttttagtccagtggcttgtaattaagtcatttttagtctttaattatgttggttgcttttagaattctcttttagagttggtctacatccttttaaaacatgggcaatccaaatttataacagtaaattaagatacataaaaaaaaacactggctaaatttaaaaggaaacacttctagaatatactgtattttgacacaagaccagactgtgctatgtgtatgtggtgtttcaagtaatttaagaaaactgttggaattttctgtatttccagtttcacaagaaacaacctcaaggagggcagtttaactgaaaattcagaggtattatagctctgaagaaaaatactgatgagcagttatacaaaatgagaaattgagttctaagaaatgcatccctaacttcaacataaagatagctatgagaaaacattctttgtacccaaccataaatgaataaaaatcacctcatttctcatcagatgtttactgggttgctagttatatatagaatcctgcaagaggctcaacagggaagtccaaagagtcaatcaagaaggtatgataatggctaaagatggggactgtaggtcaatgctccacgaggttcttcttttgttgcaccaatatagctgcactgttatacccatatggttacaatccaggcctcagaaaatgttgcagatgccctcaccagaaggctgagaaccagttcctcagtttgcatgcctccagacagcactagaagtcaaactcaaattgcttacatggtaacttggtttatcccaacaccaactaggatattccctcaatcacatgattgtactgaaaatataaccaagttttatttatgtttttcatttggtattagccatctggtatttaacctctgaaaaccacacaatcttctatacgcttttttcactggaataaatgaaactgcttacttttga

SEQ ID NO: 2490 - DNA, 11022 bp, Homo sapiens
  source 1..11022: mol_type = genomic DNA
aggcaatcggtccgagtggctgtcggctcttcagctctcccgctcggcgtcttccttcctcctcccggtcagcgtcggcggctgcaccggcggcggcgcagtccctgcgggaggggcgacaagagctgagcggcggccgccgagcgtcgagctcagcgcggcggaggcggcggcggcccggcagccaacatggcggcggcggcggcggcgggcgcgggcccggagatggtccgcgggcaggtgttcgacgtggggccgcgctacaccaacctctcgtacatcggcgagggcgcctacggcatggtgtgctctgcttatgataatgtcaacaaagttcgagtagctatcaagaaaatcagcccctttgagcaccagacctactgccagagaaccctgagggagataaaaatcttactgcgcttcagacatgagaacatcattggaatcaatgacattattcgagcaccaaccatcgagcaaatgaaagatgtatatatagtacaggacctcatggaaacagatctttacaagctcttgaagacacaacacctcagcaatgaccatatctgctattttctctaccagatcctcagagggttaaaatatatccattcagctaacgttctgcaccgtgacctcaagccttccaacctgctgctcaacaccacctgtgatctcaagatctgtgactttggcctggcccgtgttgcagatccagaccatgatcacacagggttcctgacagaatatgtggccacacgttggtacagggctccagaaattatgttgaattccaagggctacaccaagtccattgatatttggtctgtaggctgcattctggcagaaatgctttctaacaggcccatctttccagggaagcattatcttgaccagctgaaccacattttgggtattcttggatccccatcacaagaagacctgaattgtataataaatttaaaagctaggaactatttgctttctcttccacacaaaaataaggtgccatggaacaggctgttcccaaatgctgactccaaagctctggacttattggacaaaatgttgacattcaacccacacaagaggattgaagtagaacaggctctggcccacccatatctggagcagtattacgacccgagtgacgagcccatcgccgaagcaccattcaagttcgacatggaattggatgacttgcctaaggaaaagctcaaagaactaatttttgaagagactgctagattccagccaggatacagatcttaaatttgtcaggacaagggctcagaggactggacgtgctcagacatcggtgttcttcttcccagttcttgacccctggtcctgtctccagcccgtcttggcttatccactttgactcctttgagccgtttggaggggcggtttctggtagttgtggcttttatgctttcaaagaatttcttcagtccagagaattcctcctggcagccctgtgtgtgtcacccattggtgacctgcggcagtatgtacttcagtgcacctactgcttactgttgctttagtcactaattgctttctggtttgaaagatgcagtggttcctccctctcctgaatccttttctacatgatgccctgctgaccatgcagccgcaccagagagagattcttccccaattggctctagtcactggcatctcactttatgatagggaaggctactacctagggcactttaagtcagtgacagccccttatttgcacttcaccttttgaccataactgtttccccagagcaggagcttgtggaaataccttggctgatgttgcagcctgcagcaagtgcttccgtctccggaatccttggggagcacttgtccacgtcttttctcatatcatggtagtcactaacatatataaggtatgtgctattggcccagcttttagaaaatgcagtcatttttctaaataaaaaggaagtactgcacccagcagtgtcactctgtagttactgtggtcacttgtaccatatagaggtgtaacacttgtcaagaagcgttatgtgcagtacttaatgtttgtaagacttacaaaaaaagatttaaagtggcagcttcactcgacatttggtgagagaagtacaaaggttgcagtgctgagctgtgggcggtttctggggatgtcccagggtggaactccacatgctggtgcatatacgcccttgagctacttcaaatgtgggtgtttcagtaaccacgttccatgcctgaggatttagcagagaggaacactgcgtctttaaatgagaaagtatacaattctttttccttctacagcatgtcagcatctcaagttcatttttcaacctacagtataacaatttgtaataaagcctccaggagctcatgacgtgaagcactgttctgtcctcaagtactcaaatatttctgatactgctgagtcagactgtcagaaaaagctagcactaactcgtgtttggagctctatccatattttactgatctctttaagtatttgttcctgccactgtgtactgtggagttgactcggtgttctgtcccagtgcggtgcctcctcttgacttccccactgctctctgtggtgagaaatttgccttgttcaataattactgtaccctcgcatgactgttacagctttctgtgcagagatgactgtccaagtgccacatgcctacgattgaaatgaaaactctattgttacctctgagttgtgttccacggaaaatgctatccagcagatcatttaggaaaaataattctatttttagcttttcatttctcagctgtccttttttcttgtttgatttttgacagcaatggagaatgggttatataaagactgcctgctaatatgaacagaaatgcatttgtaattcatgaaaataaatgtacatcttctatcttcacattcatgttaagattcagtgttgctttcctctggatcagcgtgtctgaatggacagtcaggttcaggttgtgctgaacacagaaatgctcacaggcctcactttgccgcccaggcactggcccagcacttggatttacataagatgagttagaaaggtacttctgtagggtcctttttacctctgctcggcagagaatcgatgctgtcatgttcctttattcacaatcttaggtctcaaatattctgtcaaaccctaacaaagaagccccgacatctcaggttggattccctggttctctctaaagagggcctgcccttgtgccccagaggtgctgctgggcacagccaagagttgggaagggccgccccacagtacgcagtcctcaccacccagcccagggtgctcacgctcaccactcctgtggctgaggaaggatagctggctcatcctcggaaaacagacccacatctctattcttgccctgaaatacgcgcttttcacttgcgtgctcagagctgccgtctgaaggtccacacagcattgacgggacacagaaatgtgactgttaccggataacactgattagtcagttttcatttataaaaaagcattgacagttttattactcttgtttctttttaaatggaaagttactattataaggttaatttggagtcctcttctaaatagaaaaccatatccttggctactaacatctggagactgtgagctccttcccattccccttcctggtactgtggagtcagattggcatgaaaccactaacttcattctagaatcattgtagccataagttgtgtgctttttattaatcatgccaaacataatgtaactgggcagagaatggtcctaaccaaggtacctatgaaaagcgctagctatcatgtgtagtagatgcatcattttggctcttcttacatttgtaaaaatgtacagattaggtcatcttaattcatattagtgacacggaacagcacctccactatttgtatgttcaaataagctttcagactaatagcttttttggtgtctaaaatgtaagcaaaaaattcctgctgaaacattccagtcctttcatttagtataaaagaaatactgaacaagccagtgggatggaattgaaagaactaatcatgaggactctgtcctgacacaggtcctcaaagctagcagagatacgcagacattgtggcatctgggtagaagaatactgtattgtgtgtgcagtgcacagtgtgtggtgtgtgcacactcattccttctgctcttgggcacaggcagtgggtgtagaggtaaccagtagctttgagaagctacatgtagctcaccagtggttttctctaaggaatcacaaaagtaaactacccaaccacatgccacgtaatatttcagccattcagaggaaactgttttctctttatttgcttatatgttaatatggtttttaaattggtaacttttatatagtatggtaacagtatgttaatacacacatacatacgcacacatgctttgggtccttccataatacttttatatttgtaaatcaatgttttggagcaatcccaagtttaagggaaatatttttgtaaatgtaatggttttgaaaatctgagcaatccttttgcttatacatttttaaagcatttgtgctttaaaattgttatgctggtgtttgaaacatgatactcctgtggtgcagatgagaagctataacagtgaatatgtggtttctcttacgtcatccaccttgacatgatgggtcagaaacaaatggaaatccagagcaagtcctccagggttgcaccaggtttacctaaagcttgttgccttttcttgtgctgtttatgcgtgtagagcactcaagaaagttctgaaactgctttgtatctgctttgtactgttggtgccttcttggtattgtaccccaaaattctgcatagattatttagtataatggtaagttaaaaaatgttaaaggaagattttattaagaatctgaatgtttattcattatattgttacaatttaacattaacatttatttgtggtatttgtgatttggttaatctgtataaaaattgtaagtagaaaggtttatatttcatcttaattcttttgatgttgtaaacgtactttttaaaagatggattatttgaatgtttatggcacctgacttgtaaaaaaaaaaaactacaaaaaaatccttagaatcattaaattgtgtccctgtattaccaaaataacacagcaccgtgcatgtatagtttaattgcagtttcatctgtgaaaacgtgaaattgtctagtccttcgttatgttccccagatgtcttccagatttgctctgcatgtggtaacttgtgttagggctgtgagctgttcctcgagttgaatggggatgtcagtgctcctagggttctccaggtggttcttcagaccttcacctgtgggggggggggtaggcggtgcccacgcccatctcctcatcctcctgaacttctgcaaccccactgctgggcagacatcctgggcaaccccttttttcagagcaagaagtcataaagataggatttcttggacatttggttcttatcaatattgggcattatgtaatgacttatttacaaaacaaagatactggaaaatgttttggatgtggtgttatggaaagagcacaggccttggacccatccagctgggttcagaactaccccctgcttataactgcggctggctgtgggccagtcattctgcgtctctgctttcttcctctgcttcagactgtcagctgtaaagtggaagcaatattacttgccttgtatatggtaaagattataaaaatacatttcaactgttcagcatagtacttcaaagcaagtactcagtaaatagcaagtctttttaaatgctgctttatttcactaaattttgttgtgaggtgtcactaaaatgcctgcaaacaaacgtaactgctaatctgagaggaaaccctcttactaatcagagaagaaaccctcctgtcagaaaccttcagggaagtgagctgatcacacctaaactgggagtttgcaatggggtatttgaagcactgtgggagtattccactggccctctccctgagagacttaacagtcttccctgttgtccagattctgtataaggcaatcagaataatcatcttccttgttcagcagaggagcctggtcccattttccccactttgtgatgggcttctctcagcggtagctcagcagttccagatggcagtttggaccagcatctaggctggccagttcgctgtgtttacttagaaccaacacgttcagagctggcctggaccatctgaggggaacaggaaacacccctaggctgtggaagcaagtgcagacccccacccccggccctgaagccaagggggcagggtttgggagtggccaaagagaagcagtgcagggatgggttttcctagggacaggcttagcattcctgactctaggaagaaggagcagtgaggcggagaaacagtggaggggatggtggcattgggccccatggggccgagatggacacagggctcgttctcttgagtctggtgccaaggacagctgaagacgacatcattttcaggtggagaggagagagtggagggagatcatgccctgtgatgtgtcttttgcaggtgaaggtgggagacaaggtctctgctgacgatgaggcagagccaccgtgaaagttgtaataggaggactgcccgccgctggaagggcctgcagtgacgctaggacaccctctgcctgcatgtcacgttagctgggctgggcgaagtagaagaccaaggggaagaggtgcagtggggagaccaggtgggatgcaaccacaggaccagtggaggggctgtggcacgtgggcggagactgagtggctgggcatgtgttgtggctgagcatgtggtgtgggcagtggtcctagaccccgccatgtccggacaatgatatagagcgtctcagcatcgccagtctagactgtctatggagagcagaaagttgtctggggctgcctggggaactgtgaggccagctatatcaccgtcgctgatggtgacattacggtggtggcaggagcaaggagagagggaagaaggaccccgtccagctttagtcacaaaatacccaatggaagatgccagtgccaatcctgtgggtttccttgggacttcacactggctttcttatctgctccagatccattcagtagtcactgagttcctgccaaatactttgtagcgccagaagccaggagcggggtctgcagcagggcagtccccattttcaggaaatgcctggagctgctggtccctgagagaaaggaaaacatctttcagccgtacgcaggccaagaaggccaatgtccagtagctttgtgattttttttatatttttttatttatttatttttgagatagagtcttgctctgtcgctcaggctggagtgcagtggcgtgatctccactcactgcaacttccgcctcctggggtcaagcagttctgcctcagcctcccgagtagctgggattacaggcacacgccaccacacccagctaatttttgtgtttttagtagagacggtttcaccatgtcggccaggctggtctcaaactcctgacctcagatgattcagcctcccaaagtgctgggattacaggtgtgagccactgcacccagcctgtgatgtttctgtggggttccacaaatgtgtgtgtgtgtaaaagctgatgattacagcaagaatgtgaacagtagcagttttccatttgaaggcaagttttgtctttatctgggtatcagaaggaccctctgggccattgtcgcttcctgtactcagagccaccctagtactacgggcacacacagaaaacagcagcctgcgtactttcaaaggaaaggcatctttaatcaccaatgcctggaaaaattattttgtttccctcttccttccgtcttgtttcctaacttcttaccaaagtttagagtctgagtttttcgtataataatgtcccacatccacacatcgggcctacagatgctctcccttgaatcgactggaaacatgacaccggttccatgctctggaactgtcacctgtgatgtgctgggctgtgtcccaagcacaggaatcccagcagtttcagctcgatgcagaaccaccatgctccagacacaggcttgggaaagacacgtcaaaattaaaatactaggtaagagaagcacctgattgggtagaagttggagaggaatcctggaattttgtggccagaaggagccactgccccttttgtttagtaagactagacagtaacagaagccagttgtcagctatgaaagtggtgggtgaagcaggggaggctcctctatggtgggaccctggacaagggaagccgaatgtgtgaagaaggggtgcgggggtgtgcggtgccctaggacactagggcaaaggtttcaaacctggaacaaggcactggaggaagatctgctgccagtcagcagtgcgggccctcgagttagcagtccgtgcgcagaggggccagttctgagaccagtttggagagtcaggcagtgacccattggccatgtcataattccttcagcctgcctcctctttaatcccagagagtgctctttcttcatacttcctttaaaatactaaattgttcccattccatggggagctggctaggctttacaggctaggaaatgtaggttttctgagatggaaccatctacacaaggaggaggaaggcactaagactacagatgagacccatgacagggctgagcatttggaagccaaccctggttgcttttcaagaattgctttgtggctgggtgcagtggttcacacctgtaattgcagcactttgggaggctgaggcaggtggattgcttgaacccaggagttcgagaccagcctgggcaacatatgggacaccccaccgcccccggctctgcaaaaaaattaaaaattagccaggcgtggtgtcatgagcctgtggtctcaactactcaggaggctgaggctggaggatcgcttgaacctgggaggtcaaggctccagtgaaccataattgtgccactgcactgcagcctgggcgacaatttgttttctaaattgcttttgaaagtctactgcattacatattccaaaaagcagtggttttcaaatacttttatcaccgatatccttttatgaaatgaaatcagtagaactttctctgctctgaataagcaagggtgggaacctgtctacctcccacagatagcataatgtgcctgccatagaggagccaaaaaatggtgatgggaactgagaggagagcaaatgtcacaaaagactgagcaattgagaaaacaaaacaagaccacagatgactgttaacgcctccacagtggaccaagaaaggacagagagctggcagcatgggcatcactgtctggtcggcagcaggaaggcctcgctagggaattgagtacagtcatctaactagtttaaaagtacaggaaggatgattaaggctattggagaggtcatacaaataggggaggggcaggcaatggctgataagacatgaatttgtaaggcgatgagtattgcagtcagcaaaacaaacgagactgctctcccaacacataactcagcagggaggccaggcattggtttaaccatttaatataaagaagttaaaattacaaatgcgctaagtgcctaaagaagaataagtgcaggaatgagagcagcatggactgccacagttttagaataagcactgtcactgctagattggaaacaaaaatccataaatttggcccggtgtggtggcggacgcctgtagtcccagctacttggaggctgaggcgtgagaatcgcttgaacccgggaggcggaggttgcagtgagccgagatggcgccactgcactccagcctgggcgtcagagtgagaactctgtatcaaaaaataaaaataaaaaaaagtccataaatctgcaatgtctcagttaagaaagaaagactgggccaatgcagatttcaaaccggagaaagtcatactgtcagtgaaggccgcctgtggccggaaggcgccaggggattagcaccctggactcagtgttgctgggaaacagggccccaaggctgggagcacagtgtttaaagggcatctacccaagaagggagcacagggcaaggaggagctgcaggggggcttggctgccaaagtgaattctgaggagagagctattgctgcctacgatatgcaggctgcacagaacacaagtggaatcagcaggcaggagaggcagctaacgacgcagcccgtttcttatttctgttttctcacaagcgatgaaagtggaaaagagggtgagcaggtggcccacacatgtgcctccagtgctgcggcccctccggggaccatcagccaggccccggggagggagccagccacagtgtgtccggctcttctctgaagggaagagagccttgaatagactgaagcgaagacggttctgcaaggacaaggcagaccgaaggcattggttttttttttcagataaggagaattagactcccaagtagacaccagagtcactgtttggttggtgggtgatagtggggtcacagtggctgcctgtgctcccccagggtgagcgtgactgtgctaacctgggtggggcagcatgcacacccctctggcagccctttgttgctcgctgatgacaagtttggatgatcccgccaaacagcttgctaagatgtagtccccagtgttggaggtggggcctgatgggaggtgctacccttgtgagataaggttgtgtaaaagcctgtggcacctccccacactgacgctctcacccctgctctggccatgtgccgcgcctgctcccacttccccttctgccaggagtaaaagcccccgagacctcccagaagccaagcagatgctagtgccatgcttcctctgcagcctgcagaactgtgagccaattaaacctcttttctctataaa

SEQ ID NO: 2491 - DNA, 1487 bp, Homo sapiens
  source 1..1487: mol_type = genomic DNA
gcccctccctccgcccgcccgccggcccgcccgtcagtctggcaggcaggcaggcaatcggtccgagtggctgtcggctcttcagctctcccgctcggcgtcttccttcctcctcccggtcagcgtcggcggctgcaccggcggcggcgcagtccctgcgggaggggcgacaagagctgagcggcggccgccgagcgtcgagctcagcgcggcggaggcggcggcggcccggcagccaacatggcggcggcggcggcggcgggcgcgggcccggagatggtccgcgggcaggtgttcgacgtggggccgcgctacaccaacctctcgtacatcggcgagggcgcctacggcatggtgtgctctgcttatgataatgtcaacaaagttcgagtagctatcaagaaaatcagcccctttgagcaccagacctactgccagagaaccctgagggagataaaaatcttactgcgcttcagacatgagaacatcattggaatcaatgacattattcgagcaccaaccatcgagcaaatgaaagatgtatatatagtacaggacctcatggaaacagatctttacaagctcttgaagacacaacacctcagcaatgaccatatctgctattttctctaccagatcctcagagggttaaaatatatccattcagctaacgttctgcaccgtgacctcaagccttccaacctgctgctcaacaccacctgtgatctcaagatctgtgactttggcctggcccgtgttgcagatccagaccatgatcacacagggttcctgacagaatatgtggccacacgttggtacagggctccagaaattatgttgaattccaagggctacaccaagtccattgatatttggtctgtaggctgcattctggcagaaatgctttctaacaggcccatctttccagggaagcattatcttgaccagctgaaccacattttgggtattcttggatccccatcacaagaagacctgaattgtataataaatttaaaagctaggaactatttgctttctcttccacacaaaaataaggtgccatggaacaggctgttcccaaatgctgactccaaagctctggacttattggacaaaatgttgacattcaacccacacaagaggattgaagtagaacaggctctggcccacccatatctggagcagtattacgacccgagtgacgagcccatcgccgaagcaccattcaagttcgacatggaattggatgacttgcctaaggaaaagctcaaagaactaatttttgaagagactgctagattccagccaggatacagatcttaaatttgtcaggtacctggagtttaatacagtgagctctagcaagggaggcgctgccttttgtttctagaatattatgttcctcaaggtccattattttgtattcttttccaagctccttattggaaggtatttttttaaatttagaattaaaaattatttagaaa

SEQ ID NO: 2492 - DNA, 1480 bp, Homo sapiens
  source 1..1480: mol_type = genomic DNA
gtcagtctggcaggcaggcaggcaatcggtccgagtggctgtcggctcttcagctctcccgctcggcgtcttccttcctcctcccggtcagcgtcggcggctgcaccggcggcggcgcagtccctgcgggaggggcgacaagagctgagcggcggccgccgagcgtcgagctcagcgcggcggaggcggcggcgggcgcgggcccggagatggtccgcgggcaggtgttcgacgtggggccgcgctacaccaacctctcgtacatcggcgagggcgcctacggcatggtgtgctctgcttatgataatgtcaacaaagttcgagtagctatcaagaaaatcagcccctttgagcaccagacctactgccagagaaccctgagggagataaaaatcttactgcgcttcagacatgagaacatcattggaatcaatgacattattcgagcaccaaccatcgagcaaatgaaagatgtatatatagtacaggacctcatggaaacagatctttacaagctcttgaagacacaacacctcagcaatgaccatatctgctattttctctaccagatcctcagagggttaaaatatatccattcagctaacgttctgcaccgtgacctcaagccttccaacctgctgctcaacaccacctgtgatctcaagatctgtgactttggcctggcccgtgttgcagatccagaccatgatcacacagggttcctgacagaatatgtggccacacgttggtacagggctccagaaattatgttgaattccaagggctacaccaagtccattgatatttggtctgtaggctgcattctggcagaaatgctttctaacaggcccatctttccagggaagcattatcttgaccagctgaaccacattttgggtattcttggatccccatcacaagaagacctgaattgtataataaatttaaaagctaggaactatttgctttctcttccacacaaaaataaggtgccatggaacaggctgttcccaaatgctgactccaaagctctggacttattggacaaaatgttgacattcaacccacacaagaggattgaagtagaacaggctctggcccacccatatctggagcagtattacgacccgagtgacgagcccatcgccgaagcaccattcaagttcgacatggaattggatgacttgcctaaggaaaagctcaaagaactaatttttgaagagactgctagattccagccaggatacagatcttaaatttgtcaggacaagggctcagaggactggacgtgctcagacatcggtgttcttcttcccagttcttgacccctggtcctgtctccagcccgtcttggcttatccactttgactcctttgagccgtttggaggggcggtttctggtagttgtggcttttatgctttcaaagaatttcttcagtccagagaattcctcctggcagccctgtgtgtgtcacccatt

SEQ ID NO: 2493 - DNA, 951 bp, Homo sapiens
  source 1..951: mol_type = genomic DNA
atggcggcggcggcggcggcgggcgcgggcccggagatggtccgcgggcaggtgttcgacgtggggccgcgctacaccaacctctcgtacatcggcgagggcgcctacggcatggtgtgctctgcttatgataatgtcaacaaagttcgagtagctatcaagaaaatcagcccctttgagcaccagacctactgccagagaaccctgagggagataaaaatcttactgcgcttcagacatgagaacatcattggaatcaatgacattattcgagcaccaaccatcgagcaaatgaaagatgtatatatagtacaggacctcatggaaacagatctttacaagctcttgaagacacaacacctcagcaatgaccatatctgctattttctctaccagatcctcagagggttaaaatatatccattcagctaacgttctgcaccgtgacctcaagccttccaacctgctgctcaacaccacctgtgatctcaagatctgtgactttggcctggcccgtgttgcagatccagaccatgatcacacagggttcctgacagaatatgtggccacacgttggtacagggctccagaaattatgttgaattccaagggctacaccaagtccattgatatttggtctgtaggctgcattctggcagaaatgctttctaacaggcccatctttccagggaagcattatcttgaccagctgaaccacattttggctctggacttattggacaaaatgttgacattcaacccacacaagaggattgaagtagaacaggctctggcccacccatatctggagcagtattacgacccgagtgacgagcccatcgccgaagcaccattcaagttcgacatggaattggatgacttgcctaaggaaaagctcaaagaactaatttttgaagagactgctagattccagccaggatacagatcttaa

SEQ ID NO: 2494 - DNA, 2431 bp, Homo sapiens
  source 1..2431: mol_type = genomic DNA
cgccgcctccgccgccctccgctccgctcggctcgggctcggctcgggcgcgggcgcggggcgcggggctgggcccgggcggagcggcggctgctccggacatgtcgggccctcgcgccggcttctaccggcaggagctgaacaagaccgtgtgggaggtgccgcagcggctgcaggggctgcgcccggtgggctccggcgcctacggctccgtctgttcggcctacgacgcccggctgcgccagaaggtggcggtgaagaagctgtcgcgccccttccagtcgctgatccacgcgcgcagaacgtaccgggagctgcggctgctcaagcacctgaagcacgagaacgtcatcgggcttctggacgtcttcacgccggccacgtccatcgaggacttcagcgaagtgtacttggtgaccaccctgatgggcgccgacctgaacaacatcgtcaagtgccaggcgctgagcgacgagcacgttcaattcctggtttaccagctgctgcgcgggctgaagtacatccactcggccgggatcatccaccgggacctgaagcccagcaacgtggctgtgaacgaggactgtgagctcaggatcctggattttgggctggcgcgccaggcggacgaggagatgaccggctatgtggccacgcgctggtaccgggcacctgagatcatgctcaactggatgcattacaaccaaacagtggatatctggtccgtgggctgcatcatggctgagctgctccagggcaaggccctcttcccgggaagcgactacattgaccagctgaagcgcatcatggaagtggtgggcacacccagccctgaggttctggcaaaaatctcctcagaacacgcccggacatatatccagtccctgccccccatgccccagaaggacctgagcagcatcttccgtggagccaaccccctggccatagacctccttggaaggatgctggtgctggacagtgaccagagggtcagtgcagctgaggcactggcccacgcctacttcagccagtaccacgaccccgaggatgagccagaggccgagccatatgatgagagcgttgaggccaaggagcgcacgctggaggagtggaaggagctcacttaccaggaagtcctcagcttcaagcccccagagccaccgaagccacctggcagcctggagattgagcagtgaggtgctgcccagcagcccctgagagcctgtggaggggcttgggcctgcacccttccacagctggcctggtttcctcgagaggcacctcccacactcctatggtcacagacttctggcctaggacccctcgccttcaggagaatctacacgcatgtatgcatgcacaaacatgtgtgtacatgtgcttgccatgtgtaggagtctgggcacaagtgtccctgggcctaccttggtcctcctgtcctcttctggctactgcactctccactgggacctgactgtggggtcctagatgccaaaggggttcccctgcggagttcccctgtctgtcccaggccgacccaagggagtgtcagccttgggctctcttctgtcccagggctttctggaggacgcgctggggccgggaccccgggagactcaaagggagaggtctcagtggttagagctgctcagcctggaggtagggggctgtcttggtcactgctgagacccacaggtctaagaggagaggcagagccagtgtgccaccaggctgggcagggacaaccaccaggtgtcaaatgagaaaagctgcctggagtcttgtgttcacccgtgggtgtgtgtgggcacgtgtggatgagcgtgcactccccgtgttcatatgtcagggcacatgtgatgtggtgcgtgtgaatctgtgggcgcccaaggccagcagccatatctggcaagaagctggagccggggtgggtgtgctgttgccttccctctcctcggttcctgatgccttgaggggtgtttcagactggcggctccagtgggccaaagggcaaccacatgagcatgggcaggggctttctccttggatgtgggacccacagcagcttcctgaggctgggggtgggtgggtgggtggtttggccttgaggacgctagggcaggcagcacacctggatgtggacttggactcggacacttctgccctgcaccctggcccgctctctacctctgcccaccgttgtggccctgcagccggagatctgaggtgctctggtctgtgggtcagtcctctttccttgtcccaggatggagctgatccagtaacctcggagacgggaccctgcccagagctgagttgggggtgtggctctgccctggaaagggggtgacctcttgcctcgaggggcccagggaagcctgggtgtcaagtgcctgcaccaggggtgcacaataaagggggttctctctca

SEQ ID NO: 2495 - DNA, 1512 bp, Homo sapiens
  source 1..1512: mol_type = genomic DNA
cgccgcctccgccgccctccgctccgctcggctcgggctcggctcgggcgcgggcgcggggcgcggggctgggcccgggcggagcggcggctgctccggacatgtcgggccctcgcgccggcttctaccggcaggagctgaacaagaccgtgtgggaggtgccgcagcggctgcaggggctgcgcccggtgggctccggcgcctacggctccgtctgttcggcctacgacgcccggctgcgccagaaggtggcggtgaagaagctgtcgcgccccttccagtcgctgatccacgcgcgcagaacgtaccgggagctgcggctgctcaagcacctgaagcacgagaacgtcatcgggcttctggacgtcttcacgccggccacgtccatcgaggacttcagcgaagtgtacttggtgaccaccctgatgggcgccgacctgaacaacatcgtcaagtgccaggcgctgagcgacgagcacgttcaattcctggtttaccagctgctgcgcgggctgaagtacatccactcggccgggatcatccaccgggacctgaagcccagcaacgtggctgtgaacgaggactgtgagctcaggatcctggattttgggctggcgcgccaggcggacgaggagatgaccggctatgtggccacgcgctggtaccgggcacctgagatcatgctcaactggatgcattacaaccaaacagtggatatctggtccgtgggctgcatcatggctgagctgctccagggcaaggccctcttcccgggaagcgactacattgaccagctgaagcgcatcatggaagtggtgggcacacccagccctgaggttctggcaaaaatctcctcagaacacgcccggacatatatccagtccctgccccccatgccccagaaggacctgagcagcatcttccgtggagccaaccccctggccatagacctccttggaaggatgctggtgctggacagtgaccagagggtcagtgcagctgaggcactggcccacgcctacttcagccagtaccacgaccccgaggatgagccagaggccgagccatatgatgagagcgttgaggccaaggagcgcacgctggaggagtggaaggagctcacttaccaggaagtcctcagcttcaagcccccagagccaccgaagccacctggcagcctggagattgagcagtgaggtgctgcccagcagcccctgagagcctgtggaggggcttgggcctgcacccttccacagctggcctggtttcctcgagaggcacctcccacactcctatggtcacagacttctggcctaggacccctcgccttcaggagaatctacacgcatgatggagctgatccagtaacctcggagacgggaccctgcccagagctgagttgggggtgtggctctgccctggaaagggggtgacctcttgcctcgaggggcccagggaagcctgggtgtcaagtgcctgcaccaggggtgcacaataaagggggttctctct

SEQ ID NO: 2496 - DNA, 1408 bp, Homo sapiens
  source 1..1408: mol_type = genomic DNA
ggctcgggctcggctcgggcgcgggcgcggggcgcggggctgggcccgggcggagcggcggctgctccggacatgtcgggccctcgcgccggcttctaccggcaggagctgaacaagaccgtgtgggaggtgccgcagcggctgcaggggctgcgcccggtgggctccggcgcctacggctccgtctgttcggcctacgacgcccggctgcgccagaaggtggcggtgaagaagctgtcgcgccccttccagtcgctgatccacgcgcgcagaacgtaccgggagctgcggctgctcaagcacctgaagcacgagaacgtacttggtgaccaccctgatgggcgccgacctgaacaacatcgtcaagtgccaggcgctgagcgacgagcacgttcaattcctggtttaccagctgctgcgcgggctgaagtacatccactcggccgggatcatccaccgggacctgaagcccagcaacgtggctgtgaacgaggactgtgagctcaggatcctggattttgggctggcgcgccaggcggacgaggagatgaccggctatgtggccacgcgctggtaccgggcacctgagatcatgctcaactggatgcattacaaccaaacaggtgcagggggaaggccttggggggacgaaggccaagggcctcgtctggccctcgactggctctgcatgccaggtcttagggggcaggcaaggtccccaagaatgtgggacccacattcaaaagtagcccttcagaggccgctagagcatgatgggtgctggcctcctctggctgtgcagctatggacctccccctgcctaggggggttgggtatggcagaggagggggtctgcccatcttggggtctggatgtgactgtgggtctcctggaggagggacgtggggtgggcacactgatggaggtcccctcgccctcgcacagtggatatctggtccgtgggctgcatcatggctgagctgctccagggcaaggccctcttcccgggaagcgactgtatccttggcccaggttggggagcagggtcaaacagggcccctcctgtagggtagggaccagcgctggccccttctggcgggtcttgcctcctctgccccccatgctatgctactttgggctggccatcctcacctataggagagcgggctctgggcagcgccccaaagttttgggtctgggggcccaggaggggtctgtggctggcccgtgggtgtttcctgagtgacacagacattgaccagctgaagcgcatcatggaagtggtgggcacacccagccctgaggttctggcaaaaatctcctcagaacacgtgagttggtgcccgccagccagcagctccctctcctggctgagcccccaggctctctgggggagagggtggtgtgg

SEQ ID NO: 2497 - DNA, 1918 bp, Homo sapiens
  source 1..1918: mol_type = genomic DNA
cggcggcggccgcctcgggtttccggaggggccggagggcgggcgagggcgtcacgtgcgcgccgcccgcgggccggttggtccccgggcgggggaggggccgtgcgcagcctgggtcggggtcgggccggggtcggcacctgggacatccctgagggaagggccgggagcgggagcgccccagcggccggcgggcgggcgggcgagcggacgagcggcgcggagccggcccgaggcgcgcgccgagggagccccgtccccggtcgtgggggcaccgcccgcaggctctgcggggtgggcagctcccgggcctgccatgagctctccgccgcccgcccgcagtggcttttaccgccaggaggtgaccaagacggcctgggaggtgcgcgccgtgtaccgggacctgcagcccgtgggctcgggcgcctacggcgcggtgtgctcggccgtggacggccgcaccggcgctaaggtggccatcaagaagctgtatcggcctttccagtccgagctgttcgccaagcgcgcctaccgcgagctgcgcctgctcaagcacatgcgccacgagaacgtgatcgggctgctggacgtattcactcctgatgagaccctggatgacttcacggacttttacctggtgatgccgttcatgggcaccgacctgggcaagctcatgaaacatgagaagctaggcgaggaccggatccagttcctcgtgtaccagatgctgaaggggctgaggtatatccacgctgccggcatcatccacagagacctgaagcccggcaacctggctgtgaacgaagactgtgagctgaagatcctggacttcggcctggccaggcaggcagacagtgagatgactgggtacgtggtgacccggtggtaccgggctcccgaggtcatcttgaattggatgcgctacacgcagacggtggacatctggtctgtgggctgcatcatggcggagatgatcacaggcaagacgctgttcaagggcagcgaccacctggaccagctgaaggagatcatgaaggtgacggggacgcctccggctgagtttgtgcagcggctgcagagcgatgaggccaagaactacatgaagggcctccccgaattggagaagaaggattttgcctctatcctgaccaatgcaagccctctggctgtgaacctcctggagaagatgctggtgctggacgcggagcagcgggtgacggcaggcgaggcgctggcccatccctacttcgagtccctgcacgacacggaagatgagccccaggtccagaagtatgatgactcctttgacgacgttgaccgcacactggatgaatggaagcgtgttacttacaaagaggtgctcagcttcaagcctccccggcagctgggggccagggtctccaaggagacgcctctgtgaagatctctgggctccggggtggcagtgaggaccaccttcaccttccacctgagaggggactctcgttgccaccttgaccttggctggggcttgcatcccaaggcatccatcagagcagacgcccgggttccatggaccctcctccccacggccatgcctctgctcttgggcgcccatcatggaggagcacctgaactttctggacaagacctctggccgacctggggatggcctctgatccctggagcagtggcccacttgcccggtgctctcagaaacctcagagctggtggggctccagatcaggccttggcctctgagccctgcctgctctgggccatgcagaggaaggacagagggtgggcgcagggcaccaactcagggacatcccctctcctgggcgacgtcagtggaccttcctgcacccccagcctggaatgtaaatcagctgtgtggtgcccgcgtggctggaaggaaatagacccttttgtagctccc

SEQ ID NO: 2498 - DNA, 1724 bp, Homo sapiens
  source 1..1724: mol_type = genomic DNA
gggagcgggagcgccccagcggccggcgggcgggcgggcgagcggacgagcggcgcggagccggcccgaggcgcgcgccgagggagccccgtccccggtcgtgggggcaccgcccgcaggctctgcggggtgggcagctcccgggcctgccatgagctctccgccgcccgcccgcagtggcttttaccgccaggaggtgaccaagacggcctgggaggtgcgcgccgtgtaccgggacctgcagcccgtgggctcgggcgcctacggcgcggtgtgctcggccgtggacggccgcaccggcgctaaggtggccatcaagaagctgtatcggcctttccagtccgagctgttcgccaagcgcgcctaccgcgagctgcgcctgctcaagcacatgcgccacgagaacgtgatcgggctgctggacgtattcactcctgatgagaccctggatgacttcacggacttttacctggtgatgccgttcatgggcaccgacctgggcaagctcatgaaacatgagaagctaggcgaggaccggatccagttcctcgtgtaccagatgctgaaggggctgagggacctgaagcccggcaacctggctgtgaacgaagactgtgagctgaagatcctggacttcggcctggccaggcaggcagacagtgagatgactgggtacgtggtgacccggtggtaccgggctcccgaggtcatcttgaattggatgcgctacacgcagacggtggacatctggtctgtgggctgcatcatggcggagatgatcacaggcaagacgctgttcaagggcagcgaccacctggaccagctgaaggagatcatgaaggtgacggggacgcctccggctgagtttgtgcagcggctgcagagcgatgaggccaagaactacatgaagggcctccccgaattggagaagaaggattttgcctctatcctgaccaatgcaagccctctggctgtgaacctcctggagaagatgctggtgctggacgcggagcagcgggtgacggcaggcgaggcgctggcccatccctacttcgagtccctgcacgacacggaagatgagccccaggtccagaagtatgatgactcctttgacgacgttgaccgcacactggatgaatggaagcgtgttacttacaaagaggtgctcagcttcaagcctccccggcagctgggggccagggtctccaaggagacgcctctgtgaagatctctgggctccggggtggcagtgaggaccaccttcaccttccacctgagaggggactctcgttgccaccttgaccttggctggggcttgcatcccaaggcatccatcagagcagacgcccgggttccatggaccctcctccccacggccatgcctctgctcttgggcgcccatcatggaggagcacctgaactttctggacaagacctctggccgacctggggatggcctctgatccctggagcagtggcccacttgcccggtgctctcagaaacctcagagctggtggggctccagatcaggccttggcctctgagccctgcctgctctgggccatgcagaggaaggacagagggtgggcgcagggcaccaactcagggacatcccctctcctgggcgacgtcagtggaccttcctgcacccccagcctggaatgtaaatcagctgtgtggtgcccgcgtggctggaaggaaatagacccttttgtagctccct

SEQ ID NO: 2499 - DNA, 2052 bp, Homo sapiens
  source 1..2052: mol_type = genomic DNA
cgtgcctgggccgcacctgccgcagtggctccgtcgggccgggcggaagcgcgggagcgcagggctggacaggcccgggcgtggcggccccggcgcacctgggcgagccggcaggtgggagcgtagcagcccggggcccccgccctcgcgcgggggaggagcgggcggcgcggggcgggcgcagcgggggtcggggcgctgggagcccgttgggccgcgaacgcagccgccacgctggggccgccgagatcgggtgcccgggatgagcctcatccggaaaaagggcttctacaagcaggacgtcaacaagacagcctgggagctgcccaagacctacgtgtccccgacgcacgtcggcagcggggcctatggctccgtgtgctcggccatcgacaagcggtcaggggagaaggtggccatcaagaagctgagccgaccctttcagtccgagatcttcgccaagcgcgcctaccgggagctgctgctgctgaagcacatgcagcatgagaacgtcattgggctcctggatgtcttcaccccagcctcctccctgcgcaacttctatgacttctacctggtgatgcccttcatgcagacggatctgcagaagatcatggggatggagttcagtgaggagaagatccagtacctggtgtatcagatgctcaaaggccttaagtacatccactctgctggggtcgtgcacagggacctgaagccaggcaacctggctgtgaatgaggactgtgaactgaagattctggattttgggctggcgcgacatgcagacgccgagatgactggctacgtggtgacccgctggtaccgagcccccgaggtgatcctcagctggatgcactacaaccagacagtggacatctggtctgtgggctgtatcatggcagagatgctgacagggaaaactctgttcaaggggaaagattacctggaccagctgacccagatcctgaaagtgaccggggtgcctggcacggagtttgtgcagaagctgaacgacaaagcggccaaatcctacatccagtccctgccacagacccccaggaaggatttcactcagctgttcccacgggccagcccccaggctgcggacctgctggagaagatgctggagctagacgtggacaagcgcctgacggccgcgcaggccctcacccatcccttctttgaacccttccgggaccctgaggaagagacggaggcccagcagccgtttgatgattccttagaacacgagaaactcacagtggatgaatggaagcagcacatctacaaggagattgtgaacttcagccccattgcccggaaggactcacggcgccggagtggcatgaagctgtagggactcatcttgcatggcaccgccggccagacactgcccaaggaccagtatttgtcactaccaaactcagcccttcttggaatacagcctttcaagcagaggacagaagggtccttctccttatgtgggaaatgggcctagtagatgcagaattcaaagatgtcggttgggagaaactagctctgatcctaacaggccacgttaaactgcccatctggagaatcgcctgcaggtggggccctttccttcccgccagagtggggctgagtgggcgctgagccaggccgggggcctatggcagtgatgctgtgttggtttcctagggatgctctaacgaattaccacaaacctggtggattgaaacagcagaacttgattcccttacagttctggaggctggaaatctgggatggaggtgttggcagggctgtggtccctttgaaggctctggggaagaatccttccttggctctttttagcttgtggcggcagtgggcagtccgtggcattccccagcttattgctgcatcactccagtctctgtctcttctgttctctcctcttttaacaacagtcattggatttagggcccaccctaatcctgtgtgatcttatcttgatccttattaattaaacctgcaaatactctagttccaaataaagtcacattctcaggttccaggtggacatga

SEQ ID NO: 2500 - DNA, 1036 bp, Homo sapiens
  source 1..1036: mol_type = genomic DNA
cccgacgcacgtcggcagcggggcctatggctccgtgtgctcggccatcgacaagcggtcaggggagaaggtggccatcaagaagctgagccgaccctttcagtccgagatcttcgccaagcgcgcctaccgggagctgctgctgctgaagcacatgcagcatgagaacgtcattgggctcctggatgtcttcaccccagcctcctccctgcgcaacttctatgacttctacctggtgatgcccttcatgcagacggatctgcagaagatcatggggatggagttcagtgaggagaagatccagtacctggtgtatcagatgctcaaaggccttaagtacatccactctgctggggtcgtgcacagggacctgaagccaggcaacctggctgtgaatgaggactgtgaactgaagattctggattttgggctggcgcgacatgcagacgccgagatgactggctacgtggtgacccgctggtaccgagcccccgaggtgatcctcagctggatgcactacaaccagacaggccaaatcctacatccagtccctgccacagacccccaggaaggatttcactcagctgttcccacgggccagcccccagggtgagtctcagagcccgctccccaggggcctctcagcgtatcccagagggcgggctctcccagcccctggtgtgaggctcttggctctgcccctgcagctgcggacctgctggagaagatgctggagctagacgtggacaagcgcctgacggccgcgcaggccctcacccatcccttctttgaacccttccgggaccctgaggaagagacggaggcccagcagccgtttgatgattccttagaacacgagaaactcacagtggatgaatggaagcgtaagagctggggcctcgggcttcctcgcctccgcctgcagcctctcttccttgcttcctccatctttgtgcctggcctctgccagccctacctgccacctccttcttggtgggcattgtctcctgggtgcttctttctccttgagctgact

SEQ ID NO: 2501 - DNA, 1637 bp, Homo sapiens
  source 1..1637: mol_type = genomic DNA
cgtgcctgggccgcacctgccgcagtggctccgtcgggccgggcggaagcgcgggagcgcagggctggacaggcccgggcgtggcggccccggcgcacctgggcgagccggcaggtgggagcgtagcagcccggggcccccgccctcgcgcgggggaggagcgggcggcgcggggcgggcgcagcgggggtcggggcgctgggagcccgttgggccgcgaacgcagccgccacgctggggccgccgagatcgggtgcccgggatgagcctcatccggaaaaagggcttctacaagcaggacgtcaacaagacagcctgggagctgcccaagacctacgtgtccccgacgcacgtcggcagcggggcctatggctccgtgtgctcggccatcgacaagcggtcaggggagaaggtggccatcaagaagctgagccgaccctttcagtccgagatcttcgccaagcgcgcctaccgggagctgctgctgctgaagcacatgcagcatgagaacgtcattgggctcctggatgtcttcaccccagcctcctccctgcgcaacttctatgacttctacctggtgatgcccttcatgcagacggatctgcagaagatcatggggatggagttcagtgaggagaagatccagtacctggtgtatcagatgctcaaaggccttaaggacctgaagccaggcaacctggctgtgaatgaggactgtgaactgaagattctggattttgggctggcgcgacatgcagacgccgagatgactggctacgtggtgacccgctggtaccgagcccccgaggtgatcctcagctggatgcactacaaccagacagtggacatctggtctgtgggctgtatcatggcagagatgctgacagggaaaactctgttcaaggggaaagattacctggaccagctgacccagatcctgaaagtgaccggggtgcctggcacggagtttgtgcagaagctgaacgacaaagcggccaaatcctacatccagtccctgccacagacccccaggaaggatttcactcagctgttcccacgggccagcccccaggctgcggacctgctggagaagatgctggagctagacgtggacaagcgcctgacggccgcgcaggccctcacccatcccttctttgaacccttccgggaccctgaggaagagacggaggcccagcagccgtttgatgattccttagaacacgagaaactcacagtggatgaatggaagcagcacatctacaaggagattgtgaacttcagccccattgcccggaaggactcacggcgccggagtggcatgaagctgtagggactcatcttgcatggcaccgccggccagacactgcccaaggaccagtatttgtcactaccaaactcagcccttcttggaatacagcctttcaagcagaggacagaagggtccttctccttatgtgggaaatgggcctagtagatgcagaattcaaagatgtcggttgggagaaactagctctgatcctaacaggccacgttaaactgcccatctggagaatcgcctgcaggtggggccctttccttcccgccagagtggggctgagtgggcgctgagccaggccgggggcctatggcagtgatgc

SEQ ID NO: 2502 - DNA, 1664 bp, Homo sapiens
  source 1..1664: mol_type = genomic DNA
gggcgctgggagcccgttgggccgcgaacgcagccgccacgctggggccgccgagatcgggtgcccgggatgagcctcatccggaaaaagggcttctacaagcaggacgtcaacaagacagcctgggagctgcccaagacctacgtgtccccgacgcacgtcggcagcggggcctatggctccgtgtgctcggccatcgacaagcggtcaggggagaaggtggccatcaagaagctgagccgaccctttcagtccgagatcttcgccaagcgcgcctaccgggagctgctgctgctgaagcacatgcagcatgagaacgtcattgggctcctggatgtcttcaccccagcctcctccctgcgcaacttctatgacttctacctggtgatgcccttcatgcagacggatctgcagaagatcatggggatggagttcagtgaggagaagatccagtacctggtgtatcagatgctcaaaggccttaagtacatccactctgctggggtcgtgcacagggacctgaagccaggcaacctggctgtgaatgaggactgtgaactgaagattctggattttgggctggcgcgacatgcagacgccgagatgactggctacgtggtgacccgctggtaccgagcccccgaggtgatcctcagctggatgcactacaaccagacaggccaaatcctacatccagtccctgccacagacccccaggaaggatttcactcagctgttcccacgggccagcccccaggctgcggacctgctggagaagatgctggagctagacgtggacaagcgcctgacggccgcgcaggccctcacccatcccttctttgaacccttccgggaccctgaggaagagacggaggcccagcagccgtttgatgattccttagaacacgagaaactcacagtggatgaatggaagcagcacatctacaaggagattgtgaacttcagccccattgcccggaaggactcacggcgccggagtggcatgaagctgtagggactcatcttgcatggcaccgccggccagacactgcccaaggaccagtatttgtcactaccaaactcagcccttcttggaatacagcctttcaagcagaggacagaagggtccttctccttatgtgggaaatgggcctagtagatgcagaattcaaagatgtcggttgggagaaactagctctgatcctaacaggccacgttaaactgcccatctggagaatcgcctgcaggtggggccctttccttcccgccagagtggggctgagtgggcgctgagccaggccgggggcctatggcagtgatgctgtgttggtttcctagggatgctctaacgaattaccacaaacctggtggattgaaacagcagaacttgattcccttacagttctggaggctggaaatctgggatggaggtgttggcagggctgtggtccctttgaaggctctggggaagaatccttccttggctctttttagcttgtggcggcagtgggcagtccgtggcattccccagcttattgctgcatcactccagtctctgtctcttctgttctctcctcttttaacaacagtcattggatttagggcccaccctaatcctgtgtgatcttatcttgatccttattaattaaacctgcaaatactct

SEQ ID NO: 2503 - DNA, 1723 bp, Homo sapiens
  source 1..1723: mol_type = genomic DNA
gcggcgcggggcgggcgcagcgggggtcggggcgctgggagcccgttgggccgcgaacgcagccgccacgctggggccgccgagatcgggtgcccgggatgagcctcatccggaaaaagggcttctacaagcaggacgtcaacaagacagcctgggagctgcccaagacctacgtgtccccgacgcacgtcggcagcggggcctatggctccgtgtgctcggccatcgacaagcggtcaggggagaaggtggccatcaagaagctgagccgaccctttcagtccgagatcttcgccaagcgcgcctaccgggagctgctgctgctgaagcacatgcagcatgagaacgtcattgggctcctggatgtcttcaccccagcctcctccctgcgcaacttctatgacttctacctggtgatgcccttcatgcagacggatctgcagaagatcatggggatggagttcagtgaggagaagatccagtacctggtgtatcagatgctcaaaggccttaagtacatccactctgctggggtcgtgcacagggacctgaagccaggcaacctggctgtgaatgaggactgtgaactgaagattctggattttgggctggcgcgacatgcagacgccgagatgactggctacgtggtgacccgctggtaccgagcccccgaggtgatcctcagctggatgcactacaaccagacagtggacatctggtctgtgggctgtatcatggcagagatgctgacagggaaaactctgttcaaggggaaagattacctgctggagaagatgctggagctagacgtggacaagcgcctgacggccgcgcaggccctcacccatcccttctttgaacccttccgggaccctgaggaagagacggaggcccagcagccgtttgatgattccttagaacacgagaaactcacagtggatgaatggaagcagcacatctacaaggagattgtgaacttcagccccattgcccggaaggactcacggcgccggagtggcatgaagctgtagggactcatcttgcatggcaccgccggccagacactgcccaaggaccagtatttgtcactaccaaactcagcccttcttggaatacagcctttcaagcagaggacagaagggtccttctccttatgtgggaaatgggcctagtagatgcagaattcaaagatgtcggttgggagaaactagctctgatcctaacaggccacgttaaactgcccatctggagaatcgcctgcaggtggggccctttccttcccgccagagtggggctgagtgggcgctgagccaggccgggggcctatggcagtgatgctgtgttggtttcctagggatgctctaacgaattaccacaaacctggtggattgaaacagcagaacttgattcccttacagttctggaggctggaaatctgggatggaggtgttggcagggctgtggtccctttgaaggctctggggaagaatccttccttggctctttttagcttgtggcggcagtgggcagtccgtggcattccccagcttattgctgcatcactccagtctctgtctcttctgttctctcctcttttaacaacagtcattggatttagggcccaccctaatcctgtgtgatcttatcttgatccttattaattaaacctgcaaatactctagttccaaataaagtcacattctcaggttccaggtggacatga

SEQ ID NO: 2504 - DNA, 3779 bp, Homo sapiens
  source 1..3779: mol_type = genomic DNA
cgggaggctcccgtttgctggctcttggaaccgcgaccactggagccttagcgggcgcagcagctggaacgggagtactgcgacgcagcccggagtcggccttgtaggggcgaaggtgcagggagatcgcggcgggcgcagtcttgagcgccggagcgcgtccctgcccttagcggggcttgccccagtcgcaggggcacatccagccgctgcggctgacagcagccgcgcgcgcgggagtctgcggggtcgcggcagccgcacctgcgcgggcgaccagcgcaaggtccccgcccggctgggcgggcagcaagggccggggagagggtgcgggtgcaggcgggggccccacagggccaccttcttgcccggcggctgccgctggaaaatgtctcaggagaggcccacgttctaccggcaggagctgaacaagacaatctgggaggtgcccgagcgttaccagaacctgtctccagtgggctctggcgcctatggctctgtgtgtgctgcttttgacacaaaaacggggttacgtgtggcagtgaagaagctctccagaccatttcagtccatcattcatgcgaaaagaacctacagagaactgcggttacttaaacatatgaaacatgaaaatgtgattggtctgttggacgtttttacacctgcaaggtctctggaggaattcaatgatgtgtatctggtgacccatctcatgggggcagatctgaacaacattgtgaaatgtcagaagcttacagatgaccatgttcagttccttatctaccaaattctccgaggtctaaagtatatacattcagctgacataattcacagggacctaaaacctagtaatctagctgtgaatgaagactgtgagctgaagattctggattttggactggctcggcacacagatgatgaaatgacaggctacgtggccactaggtggtacagggctcctgagatcatgctgaactggatgcattacaaccagacagttgatatttggtcagtgggatgcataatggccgagctgttgactggaagaacattgtttcctggtacagaccatattgatcagttgaagctcattttaagactcgttggaaccccaggggctgagcttttgaagaaaatctcctcagagtctgcaagaaactatattcagtctttgactcagatgccgaagatgaactttgcgaatgtatttattggtgccaatcccctggctgtcgacttgctggagaagatgcttgtattggactcagataagagaattacagcggcccaagcccttgcacatgcctactttgctcagtaccacgatcctgatgatgaaccagtggccgatccttatgatcagtcctttgaaagcagggacctccttatagatgagtggaaaagcctgacctatgatgaagtcatcagctttgtgccaccaccccttgaccaagaagagatggagtcctgagcacctggtttctgttctgttgatcccacttcactgtgaggggaaggccttttcacgggaactctccaaatattattcaagtgcctcttgttgcagagatttcctccatggtggaagggggtgtgcgtgcgtgtgcgtgcgtgttagtgtgtgtgcatgtgtgtgtctgtctttgtgggagggtaagacaatatgaacaaactatgatcacagtgactttacaggaggttgtggatgctccagggcagcctccaccttgctcttctttctgagagttggctcaggcagacaagagctgctgtccttttaggaatatgttcaatgcaaagtaaaaaaatatgaattgtccccaatcccggtcatgcttttgccactttggcttctcctgtgaccccaccttgacggtggggcgtagacttgacaacatcccacagtggcacggagagaaggcccataccttctggttgcttcagacctgacaccgtccctcagtgatacgtacagccaaaaaggaccaactggcttctgtgcactagcctgtgattaacttgcttagtatggttctcagatcttgacagtatatttgaaactgtaaatatgtttgtgccttaaaaggagagaagaaagtgtagatagttaaaagactgcagctgctgaagttctgagccgggcaagtcgagagggctgttggacagctgcttgtgggcccggagtaatcaggcagccttcataggcggtcatgtgtgcatgtgagcacatgcgtatatgtgcgtctctctttctccctcacccccaggtgttgccatttctctgcttacccttcacctttggtgcagaggtttcttgaatatctgccccagtagtcagaagcaggttcttgatgtcatgtacttcctgtgtactctttatttctagcagagtgaggatgtgttttgcacgtcttgctatttgagcatgcacagctgcttgtcctgctctcttcaggaggccctggtgtcaggcaggtttgccagtgaagacttcttgggtagtttagatcccatgtcacctcagctgatattatggcaagtgatatcacctctcttcagcccctagtgctattctgtgttgaacacaattgatacttcaggtgcttttgatgtgaaaatcatgaaaagaggaacaggtggatgtatagcatttttattcatgccatctgttttcaaccaactatttttgaggaattatcatgggaaaagaccagggcttttcccaggaatatcccaaacttcggaaacaagttattctcttcactcccaataactaatgctaagaaatgctgaaaatcaaagtaaaaaattaaagcccataaggccagaaactccttttgctgtctttctctaaatatgattactttaaaataaaaaagtaacaaggtgtcttttccactcctatggaaaagggtcttcttggcagcttaacattgacttcttggtttggggagaaataaattttgtttcagaattttgtatattgtaggaatcctttgagaatgtgattccttttgatggggagaaagggcaaattattttaatattttgtattttcaactttataaagataaaatatcctcaggggtggagaagtgtcgttttcataacttgctgaatttcaggcattttgttctacatgaggactcatatatttaagccttttgtgtaataagaaagtataaagtcacttccagtgttggctgtgtgacagaatcttgtatttgggccaaggtgtttccatttctcaatcagtgcagtgatacatgtactccagagggacagggtggaccccctgagtcaactggagcaagaaggaaggaggcagactgatggcgattccctctcacccgggactctccccctttcaaggaaagtgaacctttaaagtaaaggcctcatctcctttattgcagttcaaatcctcaccatccacagcaagatgaattttatcagccatgtttggttgtaaatgctcgtgtgatttcctacagaaatactgctctgaatattttgtaataaaggtctttgcacatgtgaccacatacgtgttaggaggctgcatgctctggaagcctggactctaagctggagctcttggaagagctcttcggtttctgagcataatgctcccatctcctgatttctctgaacagaaaacaaaagagagaatgagggaaattgctattttatttgtattcatgaacttggctgtaatcagttatgccgtataggatgtcagacaataccactggttaaaataaagcctatttttcaaa

SEQ ID NO: 2505 - DNA, 4319 bp, Homo sapiens
  source 1..4319: mol_type = genomic DNA
atattgggtaaaatctcggctctcggagagtcccgggagctgttctcgcgagagtactgcgggaggctcccgtttgctggctcttggaaccgcgaccactggagccttagcgggcgcagcagctggaacgggagtactgcgacgcagcccggagtcggccttgtaggggcgaaggtgcagggagatcgcggcgggcgcagtcttgagcgccggagcgcgtccctgcccttagcggggcttgccccagtcgcaggggcacatccagccgctgcggctgacagcagccgcgcgcgcgggagtctgcggggtcgcggcagccgcacctgcgcgggcgaccagcgcaaggtccccgcccggctgggcgggcagcaagggccggggagagggtgcgggtgcaggcgggggccccacagggccaccttcttgcccggcggctgccgctggaaaatgtctcaggagaggcccacgttctaccggcaggagctgaacaagacaatctgggaggtgcccgagcgttaccagaacctgtctccagtgggctctggcgcctatggctctgtgtgtgctgcttttgacacaaaaacggggttacgtgtggcagtgaagaagctctccagaccatttcagtccatcattcatgcgaaaagaacctacagagaactgcggttacttaaacatatgaaacatgaaaatgtgattggtctgttggacgtttttacacctgcaaggtctctggaggaattcaatgatgtgtatctggtgacccatctcatgggggcagatctgaacaacattgtgaaatgtcagaagcttacagatgaccatgttcagttccttatctaccaaattctccgaggtctaaagtatatacattcagctgacataattcacagggacctaaaacctagtaatctagctgtgaatgaagactgtgagctgaagattctggattttggactggctcggcacacagatgatgaaatgacaggctacgtggccactaggtggtacagggctcctgagatcatgctgaactggatgcattacaaccagacagttgatatttggtcagtgggatgcataatggccgagctgttgactggaagaacattgtttcctggtacagaccatattaaccagcttcagcagattatgcgtctgacaggaacaccccccgcttatctcattaacaggatgccaagccatgaggcaagaaactatattcagtctttgactcagatgccgaagatgaactttgcgaatgtatttattggtgccaatcccctggctgtcgacttgctggagaagatgcttgtattggactcagataagagaattacagcggcccaagcccttgcacatgcctactttgctcagtaccacgatcctgatgatgaaccagtggccgatccttatgatcagtcctttgaaagcagggacctccttatagatgagtggaaaagcctgacctatgatgaagtcatcagctttgtgccaccaccccttgaccaagaagagatggagtcctgagcacctggtttctgttctgttgatcccacttcactgtgaggggaaggccttttcacgggaactctccaaatattattcaagtgcctcttgttgcagagatttcctccatggtggaagggggtgtgcgtgcgtgtgcgtgcgtgttagtgtgtgtgcatgtgtgtgtctgtctttgtgggagggtaagacaatatgaacaaactatgatcacagtgactttacaggaggttgtggatgctccagggcagcctccaccttgctcttctttctgagagttggctcaggcagacaagagctgctgtccttttaggaatatgttcaatgcaaagtaaaaaaatatgaattgtccccaatcccggtcatgcttttgccactttggcttctcctgtgaccccaccttgacggtggggcgtagacttgacaacatcccacagtggcacggagagaaggcccataccttctggttgcttcagacctgacaccgtccctcagtgatacgtacagccaaaaaggaccaactggcttctgtgcactagcctgtgattaacttgcttagtatggttctcagatcttgacagtatatttgaaactgtaaatatgtttgtgccttaaaaggagagaagaaagtgtagatagttaaaagactgcagctgctgaagttctgagccgggcaagtcgagagggctgttggacagctgcttgtgggcccggagtaatcaggcagccttcataggcggtcatgtgtgcatgtgagcacatgcgtatatgtgcgtctctctttctccctcacccccaggtgttgccatttctctgcttacccttcacctttggtgcagaggtttcttgaatatctgccccagtagtcagaagcaggttcttgatgtcatgtacttcctgtgtactctttatttctagcagagtgaggatgtgttttgcacgtcttgctatttgagcatgcacagctgcttgtcctgctctcttcaggaggccctggtgtcaggcaggtttgccagtgaagacttcttgggtagtttagatcccatgtcacctcagctgatattatggcaagtgatatcacctctcttcagcccctagtgctattctgtgttgaacacaattgatacttcaggtgcttttgatgtgaaaatcatgaaaagaggaacaggtggatgtatagcatttttattcatgccatctgttttcaaccaactatttttgaggaattatcatgggaaaagaccagggcttttcccaggaatatcccaaacttcggaaacaagttattctcttcactcccaataactaatgctaagaaatgctgaaaatcaaagtaaaaaattaaagcccataaggccagaaactccttttgctgtctttctctaaatatgattactttaaaataaaaaagtaacaaggtgtcttttccactcctatggaaaagggtcttcttggcagcttaacattgacttcttggtttggggagaaataaattttgtttcagaattttgtatattgtaggaatcctttgagaatgtgattccttttgatggggagaaagggcaaattattttaatattttgtattttcaactttataaagataaaatatcctcaggggtggagaagtgtcgttttcataacttgctgaatttcaggcattttgttctacatgaggactcatatatttaagccttttgtgtaataagaaagtataaagtcacttccagtgttggctgtgtgacagaatcttgtatttgggccaaggtgtttccatttctcaatcagtgcagtgatacatgtactccagagggacagggtggaccccctgagtcaactggagcaagaaggaaggaggcagactgatggcgattccctctcacccgggactctccccctttcaaggaaagtgaacctttaaagtaaaggcctcatctcctttattgcagttcaaatcctcaccatccacagcaagatgaattttatcagccatgtttggttgtaaatgctcgtgtgatttcctacagaaatactgctctgaatattttgtaataaaggtctttgcacatgtgaccacatacgtgttaggaggctgcatgctctggaagcctggactctaagctggagctcttggaagagctcttcggtttctgagcataatgctcccatctcctgatttctctgaacagaaaacaaaagagagaatgagggaaattgctattttatttgtattcatgaacttggctgtaatcagttatgccgtataggatgtcagacaataccactggttaaaataaagcctatttttcaaatttagtgagtttctcaagtttattatatttttctcttgtttttatttaatgcacaatatggcattatatcaatatcctttaaactgtgacctggcatacttgtctgacagatcttaatactactcctaacatttagaaaatgttgataaagcttcttagttgtacattttttggtgaagagtatccaggtctttgctgtggatgggtaaagcaaagagcaaatgaacgaagtattaagcattggggcctgtcttatctacactcgagtgtaagagtggccgaaatgacagggctcagcagactgtggcctgagggccaaatctggcccaccacctgtttggtgtagcctgctaagaatggcttttacatttttaaatggttgggaaagaaaaaaaaagaagtagtagattttgtagcatgtgatgtaagtaatgtaaaacttaaattccagtatccataaataaagttttatgagaacaga

SEQ ID NO: 2506 - DNA, 1066 bp, Homo sapiens
  source 1..1066: mol_type = genomic DNA
atgtctcaggagaggcccacgttctaccggcaggagctgaacaagacaatctgggaggtgcccgagcgttaccagaacctgtctccagtgggctctggcgcctatggctctgtgtgtgctgcttttgacacaaaaacggggttacgtgtggcagtgaagaagctctccagaccatttcagtccatcattcatgcgaaaagaacctacagagaactgcggttacttaaacatatgaaacatgaaaatgtgattggtctgttggacgtttttacacctgcaaggtctctggaggaattcaatgatgtgtatctggtgacccatctcatgggggcagatctgaacaacattgtgaaatgtcagaagcttacagatgaccatgttcagttccttatctaccaaattctccgaggtctaaagtatatacattcagctgacataattcacagggacctaaaacctagtaatctagctgtgaatgaagactgtgagctgaagattctggattttggactggctcggcacacagatgatgaaatgacaggctacgtggccactaggtggtacagggctcctgagatcatgctgaactggatgcattacaaccagacagttgatatttggtcagtgggatgcataatggccgagctgttgactggaagaacattgtttcctggtacagaccatattgatcagttgaagctcattttaagactcgttggaaccccaggggctgagcttttgaagaaaatctcctcagagtctctgtcgacttgctggagaagatgcttgtattggactcagataagagaattacagcggcccaagcccttgcacatgcctactttgctcagtaccacgatcctgatgatgaaccagtggccgatccttatgatcagtcctttgaaagcagggacctccttatagatgagtggaaaagcctgacctatgatgaagtcatcagctttgtgccaccaccccttgaccaagaagagatggagtcctgagcacctggtttctgttctgttgatcccacttcactgtgaggggaaggccttttcacgggaac

SEQ ID NO: 2507 - DNA, 1376 bp, Homo sapiens
  source 1..1376: mol_type = genomic DNA
gtttgctggctcttggaaccgcgaccactggagccttagcgggcgcagcagctggaacgggagtactgcgacgcagcccggagtcggccttgtaggggcgaaggagctgaacaagacaatctgggaggtgcccgagcgttaccagaacctgtctccagtgggctctggcgcctatggctctgtgtgtgctgcttttgacacaaaaacggggttacgtgtggcagtgaagaagctctccagaccatttcagtccatcattcatgcgaaaagaacctacagagaactgcggttacttaaacatatgaaacatgaaaatgtgattggtctgttggacgtttttacacctgcaaggtctctggaggaattcaatgatgtgtatctggtgacccatctcatgggggcagatctgaacaacattgtgaaatgtcagaagcttacagatgaccatgttcagttccttatctaccaaattctccgaggtctaaagtatatacattcagctgacataattcacagggacctaaaacctagtaatctagctgtgaatgaagactgtgagctgaagattctggattttggactggctcggcacacagatgatgaaatgacaggctacgtggccactaggtggtacagggctcctgagatcatgctgaactggatgcattacaaccagacagttgatatttggtcagtgggatgcataatggccgagctgttgactggaagaacattgtttcctggtacagaccatattgatcagttgaagctcattttaagactcgttggaaccccaggggctgagcttttgaagaaaatctcctcagagtctgcaagaaactatattcagtctttgactcagatgccgaagatgaactttgcgaatgtatttattggtgccaatcccctggctgtcgacttgctggagaagatgcttgtattggactcagataagagaattacagcggcccaagcccttgcacatgcctactttgctcagtaccacgatcctgatgatgaaccagtggccgatccttatgatcagtcctttgaaagcagggacctccttatagatgagtggaaaagcctgacctatgatgaagtcatcagctttgtgccaccaccccttgaccaagaagagatggagtcctgagcacctggtttctgttctgttgatcccacttcactgtgaggggaaggccttttcacgggaactctccaaatattattcaagtgcctcttgttgcagagatttcctccatggtggaagggggtgtgcgtgcgtgtgcgtgcgtgttagtgtgtgtgcatgtgtgtgtctgtctttgtgggagggtaagacaatatgaacaaactatgatcacagtgactttaca

SEQ ID NO: 2508 - DNA, 1861 bp, Homo sapiens
  source 1..1861: mol_type = genomic DNA
ctgcgggtgacaggcaggcgggaaggggcggggcctcgggcggggccgccgtggggaggagggcggtgggaggggaggagtggagatggcggcggcggcggctcaggggggcgggggcggggagccccgtagaaccgagggggtcggcccgggggtcccgggggaggtggagatggtgaaggggcagccgttcgacgtgggcccgcgctacacgcagttgcagtacatcggcgagggcgcgtacggcatggtcagctcggcctatgaccacgtgcgcaagactcgcgtggccatcaagaagatcagccccttcgaacatcagacctactgccagcgcacgctccgggagatccagatcctgctgcgcttccgccatgagaatgtcatcggcatccgagacattctgcgggcgtccaccctggaagccatgagagatgtctacattgtgcaggacctgatggagactgacctgtacaagttgctgaaaagccagcagctgagcaatgaccatatctgctacttcctctaccagatcctgcggggcctcaagtacatccactccgccaacgtgctccaccgagatctaaagccctccaacctgctcatcaacaccacctgcgaccttaagatttgtgatttcggcctggcccggattgccgatcctgagcatgaccacaccggcttcctgacggagtatgtggctacgcgctggtaccgggccccagagatcatgctgaactccaagggctataccaagtccatcgacatctggtctgtgggctgcattctggctgagatgctctctaaccggcccatcttccctggcaagcactacctggatcagctcaaccacattctgggcatcctgggctccccatcccaggaggacctgaattgtatcatcaacatgaaggcccgaaactacctacagtctctgccctccaagaccaaggtggcttgggccaagcttttccccaagtcagactccaaagcccttgacctgctggaccggatgttaacctttaaccccaataaacggatcacagtggaggaagcgctggctcacccctacctggagcagtactatgacccgacggatgagccagtggccgaggagcccttcaccttcgccatggagctggatgacctacctaaggagcggctgaaggagctcatcttccaggagacagcacgcttccagcccggagtgctggaggccccctagcccagacagacatctctgcaccctggggcctggacctgcctcctgcctgcccctctcccgccagactgttagaaaatggacactgtgcccagcccggaccttggcagcccaggccggggtggagcatgggcctggccacctctctcctttgctgaggcctccagcttcaggcaggccaaggccttctcctccccacccgccctccccacggggcctcgggacctcaggtggccccagttcaatctcccgctgctgctgctgcgcccttaccttccccagcgtcccagtctctggcagttctggaatggaagggttctggctgccccaacctgctgaagggcagaggtggagggtggggggcgctgagtagggactcagggccatgcctgcccccctcatctcattcaaaccccaccctagtttccctgaaggaacattccttagtctcaagggctagcatccctgaggagccaggccgggccgaatcccctccctgtcaaagctgtcacttcgcgtgccctcgctgcttctgtgtgtggtgagcagaagtggagctggggggcgtggagagcccggcgcccctgccacctccctgacccgtctaatatataaatatagagatgtgtctatggctga

SEQ ID NO: 2509 - DNA, 1743 bp, Homo sapiens
  source 1..1743: mol_type = genomic DNA
ctggcgcgcgcggccctgcgggtgacaggcaggcgggaaggggcggggcctcgggcggggccgccgtggggaggagggcggtgggaggggaggagtggagatggcggcggcggcggctcaggggggcgggggcggggagccccgtagaaccgagggggtcggcccgggggtcccgggggaggtggagatggtgaaggggcagccgttcgacgtgggcccgcgctacacgcagttgcagtacatcggcgagggcgcgtacggcatggtcagctcggcctatgaccacgtgcgcaagactcgcgtggccatcaagaagatcagccccttcgaacatcagacctactgccagcgcacgctccgggagatccagatcctgctgcgcttccgccatgagaatgtcatcggcatccgagacattctgcgggcgtccaccctggaagccatgagagatgtctacattgtgcaggacctgatggagactgacctgtacaagttgctgaaaagccagcagctgagcaatgaccatatctgctacttcctctaccagatcctgcggggcctcaagtacatccactccgccaacgtgctccaccgagatctaaagccctccaacctgctcatcaacaccacctgcgaccttaagatttgtgatttcggcctggcccggattgccgatcctgagcatgaccacaccggcttcctgacggagtatgtggctacgcgctggtaccgggccccagagatcatgctgaactccaagggctataccaagtccatcgacatctggtctgtgggctgcattctggctgagatgctctctaaccggcccatcttccctggcaagcactacctggatcagctcaaccacattctggcccttgacctgctggaccggatgttaacctttaaccccaataaacggatcacagtggaggaagcgctggctcacccctacctggagcagtactatgacccgacggatgagccagtggccgaggagcccttcaccttcgccatggagctggatgacctacctaaggagcggctgaaggagctcatcttccaggagacagcacgcttccagcccggagtgctggaggccccctagcccagacagacatctctgcaccctggggcctggacctgcctcctgcctgcccctctcccgccagactgttagaaaatggacactgtgcccagcccggaccttggcagcccaggccggggtggagcatgggcctggccacctctctcctttgctgaggcctccagcttcaggcaggccaaggccttctcctccccacccgccctccccacggggcctcgggacctcaggtggccccagttcaatctcccgctgctgctgctgcgcccttaccttccccagcgtcccagtctctggcagttctggaatggaagggttctggctgccccaacctgctgaagggcagaggtggagggtggggggcgctgagtagggactcagggccatgcctgcccccctcatctcattcaaaccccaccctagtttccctgaaggaacattccttagtctcaagggctagcatccctgaggagccaggccgggccgaatcccctccctgtcaaagctgtcacttcgcgtgccctcgctgcttctgtgtgtggtgagcagaagtggagctggggggcgtggagagcccggcgcccctgccacctccctgacccgtctaatatataaatatagagatgtgtctatggctg

SEQ ID NO: 2510 - DNA, 997 bp, Homo sapiens
  source 1..997: mol_type = genomic DNA
cggcccgggggtcccgggggaggtggagatggtgaaggggcagccgttcgacgtgggcccgcgctacacgcagttgcagtacatcggcgagggcgcgtacggcatggtcagctcggcctatgaccacgtgcgcaagactcgcgtggccatcaagaagatcagccccttcgaacatcagacctactgccagcgcacgctccgggagatccagatcctgctgcgcttccgccatgagaatgtcatcggcatccgagacattctgcgggcgtccaccctggaagccatgagagatgtctacattgtgcaggacctgatggagactgacctgtacaagttgctgaaaagccagcagctgagcaatgaccatatctgctacttcctctaccagatcctgcggggcctcaagtacatccactccgccaacgtgctccaccgagatctaaagccctccaacctgctcatcaacaccacctgcgaccttaagggctataccaagtccatcgacatctggtctgtgggctgcattctggctgagatgctctctaaccggcccatcttccctggcaagcactacctggatcagctcaaccacattctgggcatcctgggctccccatcccaggaggacctgaattgtatcatcaacatgaaggcccgaaactacctacagtctctgccctccaagaccaaggtggcttgggccaagcttttccccaagtcagactccaaagcccttgacctgctggaccggatgttaacctttaaccccaataaacggatcacagtggaggaagcgctggctcacccctacctggagcagtactatgacccgacggatgagccagtggccgaggagcccttcaccttcgccatggagctggatgacctacctaaggagcggctgaaggagctcatcttccaggagacagcacgcttccagcccggagtgctggaggccccctagcccagacagacatctctgcaccctggggcctgg

SEQ ID NO: 2511 - DNA, 1008 bp, Homo sapiens
  source 1..1008: mol_type = genomic DNA
atggcggcggcggcggctcaggggggcgggggcggggagccccgtagaaccgagggggtcggcccgggggtcccgggggaggtggagatggtgaaggggcagccgttcgacgtgggcccgcgctacacgcagttgcagtacatcggcgagggcgcgtacggcatggtcagctcggcctatgaccacgtgcgcaagactcgcgtggccatcaagaagatcagccccttcgaacatcagacctactgccagcgcacgctccgggagatccagatcctgctgcgcttccgccatgagaatgtcatcggcatccgagacattctgcgggcgtccaccctggaagccatgagagatgtctacattgtgcaggacctgatggagactgacctgtacaagttgctgaaaagccagcagctgagcaatgaccatatctgctacttcctctaccagatcctgcggggcctcaagtacatccactccgccaacgtgctccaccgagatctaaagccctccaacctgctcatcaacaccacctgcgaccttaagatttgtgatttcggcctggcccggattgccgatcctgagcatgaccacaccggcttcctgacggagtatgtggctacgcgctggtaccgggccccagagatcatgctgaactccaagggctataccaagtccatcgacatctggtctgtgggctgcattctggctgagatgctctctaaccggcccatcttccctggcaagcactacctggatcagctcaaccacattctggcccttgacctgctggaccggatgttaacctttaaccccaataaacggatcacagtggaggaagcgctggctcacccctacctggagcagtactatgacccgacggatgagccagtggccgaggagcccttcaccttcgccatggagctggatgacctacctaaggagcggctgaaggagctcatcttccaggagacagcacgcttccagcccggagtgctggaggccccctag

SEQ ID NO: 2512 - DNA, 1978 bp, Homo sapiens
  source 1..1978: mol_type = genomic DNA
ctggcgcgcgcggccctgcgggtgacaggcaggcgggaaggggcggggcctcgggcggggccgccgtggggaggagggcggtgggaggggaggagtggagatggcggcggcggcggctcaggggggcgggggcggggagccccgtagaaccgagggggtcggcccgggggtcccgggggaggtggagatggtgaaggggcagccgttcgacgtgggcccgcgctacacgcagttgcagtacatcggcgagggcgcgtacggcatggtcagctcggcctatgaccacgtgcgcaagactcgcgtggccatcaagaagatcagccccttcgaacatcagacctactgccagcgcacgctccgggagatccagatcctgctgcgcttccgccatgagaatgtcatcggcatccgagacattctgcgggcgtccaccctggaagccatgagagatgtctacattgtgcaggacctgatggagactgacctgtacaagttgctgaaaagccagcagctgagcaatgaccatatctgctacttcctctaccagatcctgcggggcctcaagtacatccactccgccaacgtgctccaccgagatctaaagccctccaacctgctcatcaacaccacctgcgaccttaagatttgtgatttcggcctggcccggattgccgatcctgagcatgaccacaccggcttcctgacggagtatgtggctacgcgctggtaccgggccccagagatcatgctgaactccaagggctataccaagtccatcgacatctggtctgtgggctgcattctggctgagatgctctctaaccggcccatcttccctggcaagcactacctggatcagctcaaccacattctgggcatcctgggctccccatcccaggaggacctgaattgtatcatcaacatgaaggcccgaaactacctacagtctctgccctccaagaccaaggtggcttgggccaagcttttccccaagtcagactccaaagcccttgacctgctggaccggatgttaacctttaaccccaataaacggatcacagtggaggaagcgctggctcacccctacctggagcagtactatgacccgacggatgaggtgggccagtccccagcagcagtggggctgggggcaggggagcaggggggcacgtaggcatcccccatgccaggcctgagccttgctgtctctaccaccccagccagtggccgaggagcccttcaccttcgccatggagctggatgacctacctaaggagcggctgaaggagctcatcttccaggagacagcacgcttccagcccggagtgctggaggccccctagcccagacagacatctctgcaccctggggcctggacctgcctcctgcctgcccctctcccgccagactgttagaaaatggacactgtgcccagcccggaccttggcagcccaggccggggtggagcatgggcctggccacctctctcctttgctgaggcctccagcttcaggcaggccaaggccttctcctccccacccgccctccccacggggcctcgggacctcaggtggccccagttcaatctcccgctgctgctgctgcgcccttaccttccccagcgtcccagtctctggcagttctggaatggaagggttctggctgccccaacctgctgaagggcagaggtggagggtggggggcgctgagtagggactcagggccatgcctgcccccctcatctcattcaaaccccaccctagtttccctgaaggaacattccttagtctcaagggctagcatccctgaggagccaggccgggccgaatcccctccctgtcaaagctgtcacttcgcgtgccctcgctgcttctgtgtgtggtgagcagaagtggagctggggggcgtggagagcccggcgcccctgccacctccctgacccgtctaatatataaatatagagatgtgtctatggctg

SEQ ID NO: 2513 - DNA, 2567 bp, Homo sapiens
  source 1..2567: mol_type = genomic DNA
gagcgctttccgggacgtggagacgcggagcgtcccgaggaggcaggagactcgggatgatcgggagcgtcccagggagggggcccctgagtgctttctgggggagggggcgctgcctacgtcctcaggggagcaggcttggaggctttgagtccacccttctgtaatgatgggaggggcatccgagtgcatgtgggggcccgcggggaccctagtgacacggggcgaggcccagaggatgagtactctcggggaggcgacatccttagtgaagaggcagtggagggcccgttttgggggaaagggtgtcttggattccccctgtgaggcagtgccagggagcctgggggagaagagccgagatcagggtggggcagggctttggccccaccaccccaggggcccagagagagatgaggcggccaggagtgccacctgcatgttttgggaggggtctgtgagtgcccccggccccaccgtgtgctctgggcctctatccctctgggacagccccgctgcccggatccctcaccctgggaccctcccctgccctgtccattctctcctgcccctcccctggctgccaccttcccagtatttgccccatggtgtgtccccagcatctgcacccccggacctgtcttgggttaaggagcctttcctgggaatgggggcgaagggttcagggccagtagaatggaaggggattgaggagaggggaagtcagtgagcggtcagtctcttcctctgtttgtaaagtcaccgaagggccgcctggctggtccccagctttctctctggagatcccaggcctccacagcaggaaggaaccagcattgtttatgatttgaccagagccagctcctgctctctcccctccctgccaaggcctgggtggggccaccaggcccggactccccctttgtaaggccacagcagcagcctctctccggtcccctcagctcggcctatgaccacgtgcgcaagactcgcgtggccatcaagaagatcagccccttcgaacatcagacctactgccagcgcacgctccgggagatccagatcctgctgcgcttccgccatgagaatgtcatcggcatccgagacattctgcgggcgtccaccctggaagccatgagagatgtctacattgtgcaggacctgatggagactgacctgtacaagttgctgaaaagccagcagctgagcaatgaccatatctgctacttcctctaccagatcctgcggggcctcaagtacatccactccgccaacgtgctccaccgagatctaaagccctccaacctgctcatcaacaccacctgcgaccttaagatttgtgatttcggcctggcccggattgccgatcctgagcatgaccacaccggcttcctgacggagtatgtggctacgcgctggtaccgggccccagagatcatgctgaactccaagggctataccaagtccatcgacatctggtctgtgggctgcattctggctgagatgctctctaaccggcccatcttccctggcaagcactacctggatcagctcaaccacattctgggcatcctgggctccccatcccaggaggacctgaattgtatcatcaacatgaaggcccgaaactacctacagtctctgccctccaagaccaaggtggcttgggccaagcttttccccaagtcagactccaaagcccttgacctgctggaccggatgttaacctttaaccccaataaacggatcacagtggaggaagcgctggctcacccctacctggagcagtactatgacccgacggatgagccagtggccgaggagcccttcaccttcgccatggagctggatgacctacctaaggagcggctgaaggagctcatcttccaggagacagcacgcttccagcccggagtgctggaggccccctagcccagacagacatctctgcaccctggggcctggacctgcctcctgcctgcccctctcccgccagactgttagaaaatggacactgtgcccagcccggaccttggcagcccaggccggggtggagcatgggcctggccacctctctcctttgctgaggcctccagcttcaggcaggccaaggccttctcctccccacccgccctccccacggggcctcgggacctcaggtggccccagttcaatctcccgctgctgctgctgcgcccttaccttccccagcgtcccagtctctggcagttctggaatggaagggttctggctgccccaacctgctgaagggcagaggtggagggtggggggcgctgagtagggactcagggccatgcctgcccccctcatctcattcaaaccccaccctagtttccctgaaggaacattccttagtctcaagggctagcatccctgaggagccaggccgggccgaatcccctccctgtcaaagctgtcacttcgcgtgccctcgctgcttctgtgtgtggtgagcagaagtggagctggggggcgtggagagcccggcgcccctgccacctccctgacccgtctaatatataaatatagagatgtgtctatggctg

SEQ ID NO: 2514 - DNA, 1402 bp, Homo sapiens
  source 1..1402: mol_type = genomic DNA
attaattgcttgccatcatgagcagaagcaagcgtgacaacaatttttatagtgtagagattggagattctacattcacagtcctgaaacgatatcagaatttaaaacctataggctcaggagctcaaggaatagtatgcgcagcttatgatgccattcttgaaagaaatgttgcaatcaagaagctaagccgaccatttcagaatcagactcatgccaagcgggcctacagagagctagttcttatgaaatgtgttaatcacaaaaatataattggccttttgaatgttttcacaccacagaaatccctagaagaatttcaagatgtttacatagtcatggagctcatggatgcaaatctttgccaagtgattcagatggagctagatcatgaaagaatgtcctaccttctctatcagatgctgtgtggaatcaagcaccttcattctgctggaattattcatcgggacttaaagcccagtaatatagtagtaaaatctgattgcactttgaagattcttgacttcggtctggccaggactgcaggaacgagttttatgatgacgccttatgtagtgactcgctactacagagcacccgaggtcatccttggcatgggctacaaggaaaacgtggatttatggtctgtggggtgcattatgggagaaatggtttgccacaaaatcctctttccaggaagggactatattgatcagtggaataaagttattgaacagcttggaacaccatgtcctgaattcatgaagaaactgcaaccaacagtaaggacttacgttgaaaacagacctaaatatgctggatatagctttgagaaactcttccctgatgtccttttcccagctgactcagaacacaacaaacttaaagccagtcaggcaagggatttgttatccaaaatgctggtaatagatgcatctaaaaggatctctgtagatgaagctctccaacacccgtacatcaatgtctggtatgatccttctgaagcagaagctccaccaccaaagatccctgacaagcagttagatgaaagggaacacacaatagaagagtggaaagaattgatatataaggaagttatggacttggaggagagaaccaagaatggagttatacgggggcagccctctcctttaggtgcagcagtgatcaatggctctcagcatccatcatcatcgtcgtctgtcaatgatgtgtcttcaatgtcaacagatccgactttggcctctgatacagacagcagtctagaagcagcagctgggcctctgggctgctgtagatgactacttgggccatcggggggtgggagggatggggagtcggttagtcattgatagaactactttgaaaacaattcagtggtcttatttttgggtgatttttc

SEQ ID NO: 2515 - DNA, 739 bp, Homo sapiens
  source 1..739: mol_type = genomic DNA
atgagcagaagcaagcgtgacaacaatttttatagtgtagagattggagattctacattcacagtcctgaaacgatatcagaatttaaaacctataggctcaggagctcaaggaatagtatgcgcagcttatgatgccattcttgaaagaaatgttgcaatcaagaagctaagccgaccatttcagaatcagactcatgccaagcgggcctacagagagctagttcttatgaaatgtgttaatcacaaaaatataattggccttttgaatgttttcacaccacagaaatccctagaagaatttcaagatgtttacatagtcatggagctcatggatgcaaatctttgccaagtgattcagatggagctagatcatgaaagaatgtcctaccttctctatcagatgctgtgtggaatcaagcaccttcattctgctggaattattcatcgggacttaaagcccagtaatatagtagtaaaatctgattgcactttgaagattcttgacttcggtctggccaggactgcaggaacgagttttatgatgacgccttatgtagtgactcgctactacagagcacccgaggtcatccttggcatgggctacaaggaaaacggaggaagaatgggaaaaggcatattcacaaggttacaataaggtgcctgtgagatataaaatttataactgccacatcctttcttaggaatttttaaatttctattttcttgtaatatgaata

SEQ ID NO: 2516 - DNA, 5628 bp, Homo sapiens
  source 1..5628: mol_type = genomic DNA
attgcttgccatcatgagcagaagcaagcgtgacaacaatttttatagtgtagagattggagattctacattcacagtcctgaaacgatatcagaatttaaaacctataggctcaggagctcaaggaatagtatgcgcagcttatgatgccattcttgaaagaaatgttgcaatcaagaagctaagccgaccatttcagaatcagactcatgccaagcgggcctacagagagctagttcttatgaaatgtgttaatcacaaaaatataattggccttttgaatgttttcacaccacagaaatccctagaagaatttcaagatgtttacatagtcatggagctcatggatgcaaatctttgccaagtgattcagatggagctagatcatgaaagaatgtcctaccttctctatcagatgctgtgtggaatcaagcaccttcattctgctggaattattcatcgggacttaaagcccagtaatatagtagtaaaatctgattgcactttgaagattcttgacttcggtctggccaggactgcaggaacgagttttatgatgacgccttatgtagtgactcgctactacagagcacccgaggtcatccttggcatgggctacaaggaaaacgttgacatttggtcagttgggtgcatcatgggagaaatgatcaaaggtggtgttttgttcccaggtacagatcatattgatcagtggaataaagttattgaacagcttggaacaccatgtcctgaattcatgaagaaactgcaaccaacagtaaggacttacgttgaaaacagacctaaatatgctggatatagctttgagaaactcttccctgatgtccttttcccagctgactcagaacacaacaaacttaaagccagtcaggcaagggatttgttatccaaaatgctggtaatagatgcatctaaaaggatctctgtagatgaagctctccaacacccgtacatcaatgtctggtatgatccttctgaagcagaagctccaccaccaaagatccctgacaagcagttagatgaaagggaacacacaatagaagagtggaaagaattgatatataaggaagttatggacttggaggagagaaccaagaatggagttatacgggggcagccctctcctttaggtgcagcagtgatcaatggctctcagcatccatcatcatcgtcgtctgtcaatgatgtgtcttcaatgtcaacagatccgactttggcctctgatacagacagcagtctagaagcagcagctgggcctctgggctgctgtagatgactacttgggccatcggggggtgggagggatggggagtcggttagtcattgatagaactactttgaaaacaattcagtggtcttatttttgggtgatttttcaaaaaatgtagaattcattttgtagtaaagtagtttattttttttaatttcaagtgatgtaatttaaaacctaagttgtgtttcaaaacagcaacaaaactgtattgtattttttttgctgtaattaactgtataatgtaaacctaattattttatcatggtttaaattttttgcatatttgctttatcttatgctgctgatttttttaactgaatttgtaagattttgtttatcaaagcaactattatgtggtgacttgcctatatcatgaattatttaagatttttatagttttttttaattagaatttatttcagatgttttgttcatgatactatccttcagggttatgtgcttatcaatgaaataaccccagaggagtgagggaaaataacttgtagccagttatattcaggaataactactgtaaatgatgaacgtgttaggagacctccaatatttgctacttgccaatcctaatttagttacaagaattggtaggcaatcctacttaattttggcaaaagccccgtcatctaaatggcagaataactcagagcatgtctttgaagatgctgggcgtctaccaccaccttatgtccccaccctacccaacaaaaataagtaaaaagaatatggtgtattctacaaatttgtggcatgctcaaagtttatgatcacataaaggcaagaggatacttcatgaataatacatttcaatgcaaataaacagatggttcacttctactagctatgagcctgtttttgtatacactgagttaatctactcaggctgtaggtcccagcaatgttctagagtctggtctttccctttcctgcagcttcgggtccttggacctttcctgtttcctattacttggagtgtctgtcagttgagcaccagttgttctggtgtttcatttgattctacttgtagcataatcatttatacgagctattgggaggttccaaaccctacctagatttgtgtaggtgatgtatcaaatgagcaatataccgttcatctgaaaatagtagcacacagccatatataggatatcattttctaaggactgtttcttcacattgagcagagcaggcataaatggtggttatttagtctaagtcttttatttttttatacctgattttcaacataacacgcaatgtggatgtcgagtagtgttaagaatggtgctgctcctgacaagtgtatgttaactgtttacattttctatctgtagaattatttctctattactgaacttttcctaagtaaaatgtctttgaagtctcgttatttctgaaatacgttgtctgtaatagacccaggcaccttttaaattatctctggaacaagagggatttcatgtaatgaactaggaaatgcatactcacataagcaacaaggttctaggcagaaagccccttggaatttgtgaccaacaggagcaagaacaggtgcggctcaacatgcaatgtctgaaaatttgcttggcattttattcatatatttagtgcaaaattatttttgagtgagatattttacatcactgttaatgtgcaatatttaagattaaaatacattagcttttttatatactttgaagtagcaagtttgttttcgatggcttagagtcatgatttccagcttcccagcctttttatcagtcccttttctaatacaacaaggtgcattaatttgattaggcaaattagagttctaagacacttcttgaattgtagacagaaaatattggattcacaatttcagcagaaatttgagaatgagtgtgtttatattaatttcacaattagctgtattttctgtagcatagattatgtcactgttgcactttcacagcagacatgctttcagaaggttctcatattttatgtttgattgctgataagccatctctattgatacagattttggttaagtaaggaaaaccaggtgtgtgtctgtatcatttattgtaaatgccagctgccacttgccaaccatcatgttcagttcaattcaaagaaaacaaactctcattacttagtgtaaactaaaatacttaacaaattatatcctaaaaacaaggtctctttgttaaatgttgcatgccctaggttttaaattactacatccaaatacagttttcgtcttaaatttgttaagctaaatatatgttggttctttttattttggaatcctttaagcatcttaaacattttttttttgaagagaagttacaaataacatttctatcaggtagtacttgtatgaaaccacctttcttattctataattttgatttttcaattttatatacttaatatactcactgtcttactatcagaaagttattttgaccaagatttttattatcttcatagattcagaaagagatgctaattctgtaccaatgtcttcctggttactattctcttccctctaatatatactggccatttgtaaaaccattgtgttgttgggatcacttagttatactatacgcagatagagcatctcaactctgtcatagtgtttgctgaacagttttcagtgtcatgcacctttggctgctaattgttcctgacgtgcactcttccgagttggtaaaggcacagtgtgttcatgccagacttctaagagaaacaccagcctcttaaatcagaagcctacacacaacccccttaacaatccaaagaagcttgatggtgtgcaaagaagcatcctgccagccttgtcattgttctgttctatgctaatcctgctgtgttgtctaaaagatggagggaagaggacatcagtgtctgatagtgaaatcatcagcaggaaagtgaagctctttccttggttacagataagacttggtttacactattggccagtatctgctaaacatatgaagacttaactattcagtgttgcctaggcattcgcctgcacaacattttgaggttagaacatagaatattttcagaaatactgttgtagtttgtgagtgttgttcattagttacacattagctatagagtggatgcatgaagccccatgacaccagtaaacttctcttaccagtaggtaaaccaaacaccattctgtcattagcagccctcttaaatgttgcctctccgtatcctgttgcatttttgtgtgcattgtgtttctactgatctctcttaggtttttacggaatcaaaggaaactaatttttccttaatagcaagaaagatgaagaggtaaagggcattgaagcagaaatgtatagtttggggtacgattagaaaactcgtaaggaaaacagaagtcctaatttcaaactgactgctcttcgttaagtgctcttaaggagagtctagtaacagtaacactttctggccatttctagtttagattctcttcgttactgaaacttttgagaaatattacctgtggattaattttgcacaatgttctattctcataatgacttacaaattaaactaggtttttattgaactacctcacactaattttctatgctttcccaagtaagctgttgccctgttagatctttactgagtgaattataaatgtgtgttaaatactttctagccaatgttgacacaataccagtaagtatgtaaagtatataccttacatcagtaagagacacgtgtaaaatctttgactgtatgtcttgcaaaattgtgctcgttgacattattactgtttttgtaagtagaaacctgctcgtgatatcggtccatttacattttacaaaaggagtaaatcttagtaaaaattttacgaagaaataaattacttttgtaggcccaatatttggtatatttttgagaagctgttaatcttttagctgaataatgaagttagactgaattacgtgtctccctggactgtgacatctattttctcattacagtttatcctggtcagcagggtgtcacacctggaaacctgagtatgatagctgacatttgcttttctccctctgcgatgtcattcctcctccattcctctccttccctgtgttccgttccctctcctttcctctagacaaaacaaaatggggcactttttagggaatgctgagatcattattgtggtttttcatcattcatgccctagtcattaaacatgcaccactggaatgtaaacaatgttatctagtatgtcaattggttataatattttaaataaaaaagaaaaaagtggtatgaaaattatgaaa

SEQ ID NO: 2517 - DNA, 5637 bp, Homo sapiens
  source 1..5637: mol_type = genomic DNA
attaattgcttgccatcatgagcagaagcaagcgtgacaacaatttttatagtgtagagattggagattctacattcacagtcctgaaacgatatcagaatttaaaacctataggctcaggagctcaaggaatagtatgcgcagcttatgatgccattcttgaaagaaatgttgcaatcaagaagctaagccgaccatttcagaatcagactcatgccaagcgggcctacagagagctagttcttatgaaatgtgttaatcacaaaaatataattggccttttgaatgttttcacaccacagaaatccctagaagaatttcaagatgtttacatagtcatggagctcatggatgcaaatctttgccaagtgattcagatggagctagatcatgaaagaatgtcctaccttctctatcagatgctgtgtggaatcaagcaccttcattctgctggaattattcatcgggacttaaagcccagtaatatagtagtaaaatctgattgcactttgaagattcttgacttcggtctggccaggactgcaggaacgagttttatgatgacgccttatgtagtgactcgctactacagagcacccgaggtcatccttggcatgggctacaaggaaaacgttgacatttggtcagttgggtgcatcatgggagaaatgatcaaaggtggtgttttgttcccaggtacagatcatattgatcagtggaataaagttattgaacagcttggaacaccatgtcctgaattcatgaagaaactgcaaccaacagtaaggacttacgttgaaaacagacctaaatatgctggatatagctttgagaaactcttccctgatgtccttttcccagctgactcagaacacaacaaacttaaagccagtcaggcaagggatttgttatccaaaatgctggtaatagatgcatctaaaaggatctctgtagatgaagctctccaacacccgtacatcaatgtctggtatgatccttctgaagcagaagctccaccaccaaagatccctgacaagcagttagatgaaagggaacacacaatagaagagtggaaagaattgatatataaggaagttatggacttggaggagagaaccaagaatggagttatacgggggcagccctctcctttagcacaggtgcagcagtgatcaatggctctcagcatccatcatcatcgtcgtctgtcaatgatgtgtcttcaatgtcaacagatccgactttggcctctgatacagacagcagtctagaagcagcagctgggcctctgggctgctgtagatgactacttgggccatcggggggtgggagggatggggagtcggttagtcattgatagaactactttgaaaacaattcagtggtcttatttttgggtgatttttcaaaaaatgtagaattcattttgtagtaaagtagtttattttttttaatttcaagtgatgtaatttaaaacctaagttgtgtttcaaaacagcaacaaaactgtattgtattttttttgctgtaattaactgtataatgtaaacctaattattttatcatggtttaaattttttgcatatttgctttatcttatgctgctgatttttttaactgaatttgtaagattttgtttatcaaagcaactattatgtggtgacttgcctatatcatgaattatttaagatttttatagttttttttaattagaatttatttcagatgttttgttcatgatactatccttcagggttatgtgcttatcaatgaaataaccccagaggagtgagggaaaataacttgtagccagttatattcaggaataactactgtaaatgatgaacgtgttaggagacctccaatatttgctacttgccaatcctaatttagttacaagaattggtaggcaatcctacttaattttggcaaaagccccgtcatctaaatggcagaataactcagagcatgtctttgaagatgctgggcgtctaccaccaccttatgtccccaccctacccaacaaaaataagtaaaaagaatatggtgtattctacaaatttgtggcatgctcaaagtttatgatcacataaaggcaagaggatacttcatgaataatacatttcaatgcaaataaacagatggttcacttctactagctatgagcctgtttttgtatacactgagttaatctactcaggctgtaggtcccagcaatgttctagagtctggtctttccctttcctgcagcttcgggtccttggacctttcctgtttcctattacttggagtgtctgtcagttgagcaccagttgttctggtgtttcatttgattctacttgtagcataatcatttatacgagctattgggaggttccaaaccctacctagatttgtgtaggtgatgtatcaaatgagcaatataccgttcatctgaaaatagtagcacacagccatatataggatatcattttctaaggactgtttcttcacattgagcagagcaggcataaatggtggttatttagtctaagtcttttatttttttatacctgattttcaacataacacgcaatgtggatgtcgagtagtgttaagaatggtgctgctcctgacaagtgtatgttaactgtttacattttctatctgtagaattatttctctattactgaacttttcctaagtaaaatgtctttgaagtctcgttatttctgaaatacgttgtctgtaatagacccaggcaccttttaaattatctctggaacaagagggatttcatgtaatgaactaggaaatgcatactcacataagcaacaaggttctaggcagaaagccccttggaatttgtgaccaacaggagcaagaacaggtgcggctcaacatgcaatgtctgaaaatttgcttggcattttattcatatatttagtgcaaaattatttttgagtgagatattttacatcactgttaatgtgcaatatttaagattaaaatacattagcttttttatatactttgaagtagcaagtttgttttcgatggcttagagtcatgatttccagcttcccagcctttttatcagtcccttttctaatacaacaaggtgcattaatttgattaggcaaattagagttctaagacacttcttgaattgtagacagaaaatattggattcacaatttcagcagaaatttgagaatgagtgtgtttatattaatttcacaattagctgtattttctgtagcatagattatgtcactgttgcactttcacagcagacatgctttcagaaggttctcatattttatgtttgattgctgataagccatctctattgatacagattttggttaagtaaggaaaaccaggtgtgtgtctgtatcatttattgtaaatgccagctgccacttgccaaccatcatgttcagttcaattcaaagaaaacaaactctcattacttagtgtaaactaaaatacttaacaaattatatcctaaaaacaaggtctctttgttaaatgttgcatgccctaggttttaaattactacatccaaatacagttttcgtcttaaatttgttaagctaaatatatgttggttctttttattttggaatcctttaagcatcttaaacattttttttttgaagagaagttacaaataacatttctatcaggtagtacttgtatgaaaccacctttcttattctataattttgatttttcaattttatatacttaatatactcactgtcttactatcagaaagttattttgaccaagatttttattatcttcatagattcagaaagagatgctaattctgtaccaatgtcttcctggttactattctcttccctctaatatatactggccatttgtaaaaccattgtgttgttgggatcacttagttatactatacgcagatagagcatctcaactctgtcatagtgtttgctgaacagttttcagtgtcatgcacctttggctgctaattgttcctgacgtgcactcttccgagttggtaaaggcacagtgtgttcatgccagacttctaagagaaacaccagcctcttaaatcagaagcctacacacaacccccttaacaatccaaagaagcttgatggtgtgcaaagaagcatcctgccagccttgtcattgttctgttctatgctaatcctgctgtgttgtctaaaagatggagggaagaggacatcagtgtctgatagtgaaatcatcagcaggaaagtgaagctctttccttggttacagataagacttggtttacactattggccagtatctgctaaacatatgaagacttaactattcagtgttgcctaggcattcgcctgcacaacattttgaggttagaacatagaatattttcagaaatactgttgtagtttgtgagtgttgttcattagttacacattagctatagagtggatgcatgaagccccatgacaccagtaaacttctcttaccagtaggtaaaccaaacaccattctgtcattagcagccctcttaaatgttgcctctccgtatcctgttgcatttttgtgtgcattgtgtttctactgatctctcttaggtttttacggaatcaaaggaaactaatttttccttaatagcaagaaagatgaagaggtaaagggcattgaagcagaaatgtatagtttggggtacgattagaaaactcgtaaggaaaacagaagtcctaatttcaaactgactgctcttcgttaagtgctcttaaggagagtctagtaacagtaacactttctggccatttctagtttagattctcttcgttactgaaacttttgagaaatattacctgtggattaattttgcacaatgttctattctcataatgacttacaaattaaactaggtttttattgaactacctcacactaattttctatgctttcccaagtaagctgttgccctgttagatctttactgagtgaattataaatgtgtgttaaatactttctagccaatgttgacacaataccagtaagtatgtaaagtatataccttacatcagtaagagacacgtgtaaaatctttgactgtatgtcttgcaaaattgtgctcgttgacattattactgtttttgtaagtagaaacctgctcgtgatatcggtccatttacattttacaaaaggagtaaatcttagtaaaaattttacgaagaaataaattacttttgtaggcccaatatttggtatatttttgagaagctgttaatcttttagctgaataatgaagttagactgaattacgtgtctccctggactgtgacatctattttctcattacagtttatcctggtcagcagggtgtcacacctggaaacctgagtatgatagctgacatttgcttttctccctctgcgatgtcattcctcctccattcctctccttccctgtgttccgttccctctcctttcctctagacaaaacaaaatggggcactttttagggaatgctgagatcattattgtggtttttcatcattcatgccctagtcattaaacatgcaccactggaatgtaaacaatgttatctagtatgtcaattggttataatattttaaataaaaaagaaaaaagtggtatgaaaattatgaaa

SEQ ID NO: 2518 - DNA, 5638 bp, Homo sapiens
  source 1..5638: mol_type = genomic DNA
aattaattgcttgccatcatgagcagaagcaagcgtgacaacaatttttatagtgtagagattggagattctacattcacagtcctgaaacgatatcagaatttaaaacctataggctcaggagctcaaggaatagtatgcgcagcttatgatgccattcttgaaagaaatgttgcaatcaagaagctaagccgaccatttcagaatcagactcatgccaagcgggcctacagagagctagttcttatgaaatgtgttaatcacaaaaatataattggccttttgaatgttttcacaccacagaaatccctagaagaatttcaagatgtttacatagtcatggagctcatggatgcaaatctttgccaagtgattcagatggagctagatcatgaaagaatgtcctaccttctctatcagatgctgtgtggaatcaagcaccttcattctgctggaattattcatcgggacttaaagcccagtaatatagtagtaaaatctgattgcactttgaagattcttgacttcggtctggccaggactgcaggaacgagttttatgatgacgccttatgtagtgactcgctactacagagcacccgaggtcatccttggcatgggctacaaggaaaacgtggatttatggtctgtggggtgcattatgggagaaatggtttgccacaaaatcctctttccaggaagggactatattgatcagtggaataaagttattgaacagcttggaacaccatgtcctgaattcatgaagaaactgcaaccaacagtaaggacttacgttgaaaacagacctaaatatgctggatatagctttgagaaactcttccctgatgtccttttcccagctgactcagaacacaacaaacttaaagccagtcaggcaagggatttgttatccaaaatgctggtaatagatgcatctaaaaggatctctgtagatgaagctctccaacacccgtacatcaatgtctggtatgatccttctgaagcagaagctccaccaccaaagatccctgacaagcagttagatgaaagggaacacacaatagaagagtggaaagaattgatatataaggaagttatggacttggaggagagaaccaagaatggagttatacgggggcagccctctcctttagcacaggtgcagcagtgatcaatggctctcagcatccatcatcatcgtcgtctgtcaatgatgtgtcttcaatgtcaacagatccgactttggcctctgatacagacagcagtctagaagcagcagctgggcctctgggctgctgtagatgactacttgggccatcggggggtgggagggatggggagtcggttagtcattgatagaactactttgaaaacaattcagtggtcttatttttgggtgatttttcaaaaaatgtagaattcattttgtagtaaagtagtttattttttttaatttcaagtgatgtaatttaaaacctaagttgtgtttcaaaacagcaacaaaactgtattgtattttttttgctgtaattaactgtataatgtaaacctaattattttatcatggtttaaattttttgcatatttgctttatcttatgctgctgatttttttaactgaatttgtaagattttgtttatcaaagcaactattatgtggtgacttgcctatatcatgaattatttaagatttttatagttttttttaattagaatttatttcagatgttttgttcatgatactatccttcagggttatgtgcttatcaatgaaataaccccagaggagtgagggaaaataacttgtagccagttatattcaggaataactactgtaaatgatgaacgtgttaggagacctccaatatttgctacttgccaatcctaatttagttacaagaattggtaggcaatcctacttaattttggcaaaagccccgtcatctaaatggcagaataactcagagcatgtctttgaagatgctgggcgtctaccaccaccttatgtccccaccctacccaacaaaaataagtaaaaagaatatggtgtattctacaaatttgtggcatgctcaaagtttatgatcacataaaggcaagaggatacttcatgaataatacatttcaatgcaaataaacagatggttcacttctactagctatgagcctgtttttgtatacactgagttaatctactcaggctgtaggtcccagcaatgttctagagtctggtctttccctttcctgcagcttcgggtccttggacctttcctgtttcctattacttggagtgtctgtcagttgagcaccagttgttctggtgtttcatttgattctacttgtagcataatcatttatacgagctattgggaggttccaaaccctacctagatttgtgtaggtgatgtatcaaatgagcaatataccgttcatctgaaaatagtagcacacagccatatataggatatcattttctaaggactgtttcttcacattgagcagagcaggcataaatggtggttatttagtctaagtcttttatttttttatacctgattttcaacataacacgcaatgtggatgtcgagtagtgttaagaatggtgctgctcctgacaagtgtatgttaactgtttacattttctatctgtagaattatttctctattactgaacttttcctaagtaaaatgtctttgaagtctcgttatttctgaaatacgttgtctgtaatagacccaggcaccttttaaattatctctggaacaagagggatttcatgtaatgaactaggaaatgcatactcacataagcaacaaggttctaggcagaaagccccttggaatttgtgaccaacaggagcaagaacaggtgcggctcaacatgcaatgtctgaaaatttgcttggcattttattcatatatttagtgcaaaattatttttgagtgagatattttacatcactgttaatgtgcaatatttaagattaaaatacattagcttttttatatactttgaagtagcaagtttgttttcgatggcttagagtcatgatttccagcttcccagcctttttatcagtcccttttctaatacaacaaggtgcattaatttgattaggcaaattagagttctaagacacttcttgaattgtagacagaaaatattggattcacaatttcagcagaaatttgagaatgagtgtgtttatattaatttcacaattagctgtattttctgtagcatagattatgtcactgttgcactttcacagcagacatgctttcagaaggttctcatattttatgtttgattgctgataagccatctctattgatacagattttggttaagtaaggaaaaccaggtgtgtgtctgtatcatttattgtaaatgccagctgccacttgccaaccatcatgttcagttcaattcaaagaaaacaaactctcattacttagtgtaaactaaaatacttaacaaattatatcctaaaaacaaggtctctttgttaaatgttgcatgccctaggttttaaattactacatccaaatacagttttcgtcttaaatttgttaagctaaatatatgttggttctttttattttggaatcctttaagcatcttaaacattttttttttgaagagaagttacaaataacatttctatcaggtagtacttgtatgaaaccacctttcttattctataattttgatttttcaattttatatacttaatatactcactgtcttactatcagaaagttattttgaccaagatttttattatcttcatagattcagaaagagatgctaattctgtaccaatgtcttcctggttactattctcttccctctaatatatactggccatttgtaaaaccattgtgttgttgggatcacttagttatactatacgcagatagagcatctcaactctgtcatagtgtttgctgaacagttttcagtgtcatgcacctttggctgctaattgttcctgacgtgcactcttccgagttggtaaaggcacagtgtgttcatgccagacttctaagagaaacaccagcctcttaaatcagaagcctacacacaacccccttaacaatccaaagaagcttgatggtgtgcaaagaagcatcctgccagccttgtcattgttctgttctatgctaatcctgctgtgttgtctaaaagatggagggaagaggacatcagtgtctgatagtgaaatcatcagcaggaaagtgaagctctttccttggttacagataagacttggtttacactattggccagtatctgctaaacatatgaagacttaactattcagtgttgcctaggcattcgcctgcacaacattttgaggttagaacatagaatattttcagaaatactgttgtagtttgtgagtgttgttcattagttacacattagctatagagtggatgcatgaagccccatgacaccagtaaacttctcttaccagtaggtaaaccaaacaccattctgtcattagcagccctcttaaatgttgcctctccgtatcctgttgcatttttgtgtgcattgtgtttctactgatctctcttaggtttttacggaatcaaaggaaactaatttttccttaatagcaagaaagatgaagaggtaaagggcattgaagcagaaatgtatagtttggggtacgattagaaaactcgtaaggaaaacagaagtcctaatttcaaactgactgctcttcgttaagtgctcttaaggagagtctagtaacagtaacactttctggccatttctagtttagattctcttcgttactgaaacttttgagaaatattacctgtggattaattttgcacaatgttctattctcataatgacttacaaattaaactaggtttttattgaactacctcacactaattttctatgctttcccaagtaagctgttgccctgttagatctttactgagtgaattataaatgtgtgttaaatactttctagccaatgttgacacaataccagtaagtatgtaaagtatataccttacatcagtaagagacacgtgtaaaatctttgactgtatgtcttgcaaaattgtgctcgttgacattattactgtttttgtaagtagaaacctgctcgtgatatcggtccatttacattttacaaaaggagtaaatcttagtaaaaattttacgaagaaataaattacttttgtaggcccaatatttggtatatttttgagaagctgttaatcttttagctgaataatgaagttagactgaattacgtgtctccctggactgtgacatctattttctcattacagtttatcctggtcagcagggtgtcacacctggaaacctgagtatgatagctgacatttgcttttctccctctgcgatgtcattcctcctccattcctctccttccctgtgttccgttccctctcctttcctctagacaaaacaaaatggggcactttttagggaatgctgagatcattattgtggtttttcatcattcatgccctagtcattaaacatgcaccactggaatgtaaacaatgttatctagtatgtcaattggttataatattttaaataaaaaagaaaaaagtggtatgaaaattatgaaa

SEQ ID NO: 2519 - DNA, 5796 bp, Homo sapiens
  source 1..5796: mol_type = genomic DNA
gcggccgaggccggacgacgcggcttggattgcggagccgcgagcagcgctgggtaacggccgcggcgaccaccccggacggcccctgtccccgctggcgggcttccctgtcgccgttcgctgcgctgccggcttcttggtgaatttttggatgaagccattaaattaattgcttgccatcatgagcagaagcaagcgtgacaacaatttttatagtgtagagattggagattctacattcacagtcctgaaacgatatcagaatttaaaacctataggctcaggagctcaaggaatagtatgcgcagcttatgatgccattcttgaaagaaatgttgcaatcaagaagctaagccgaccatttcagaatcagactcatgccaagcgggcctacagagagctagttcttatgaaatgtgttaatcacaaaaatataattggccttttgaatgttttcacaccacagaaatccctagaagaatttcaagatgtttacatagtcatggagctcatggatgcaaatctttgccaagtgattcagatggagctagatcatgaaagaatgtcctaccttctctatcagatgctgtgtggaatcaagcaccttcattctgctggaattattcatcgggacttaaagcccagtaatatagtagtaaaatctgattgcactttgaagattcttgacttcggtctggccaggactgcaggaacgagttttatgatgacgccttatgtagtgactcgctactacagagcacccgaggtcatccttggcatgggctacaaggaaaacgtggatttatggtctgtggggtgcattatgggagaaatggtttgccacaaaatcctctttccaggaagggactatattgatcagtggaataaagttattgaacagcttggaacaccatgtcctgaattcatgaagaaactgcaaccaacagtaaggacttacgttgaaaacagacctaaatatgctggatatagctttgagaaactcttccctgatgtccttttcccagctgactcagaacacaacaaacttaaagccagtcaggcaagggatttgttatccaaaatgctggtaatagatgcatctaaaaggatctctgtagatgaagctctccaacacccgtacatcaatgtctggtatgatccttctgaagcagaagctccaccaccaaagatccctgacaagcagttagatgaaagggaacacacaatagaagagtggaaagaattgatatataaggaagttatggacttggaggagagaaccaagaatggagttatacgggggcagccctctcctttaggtgcagcagtgatcaatggctctcagcatccatcatcatcgtcgtctgtcaatgatgtgtcttcaatgtcaacagatccgactttggcctctgatacagacagcagtctagaagcagcagctgggcctctgggctgctgtagatgactacttgggccatcggggggtgggagggatggggagtcggttagtcattgatagaactactttgaaaacaattcagtggtcttatttttgggtgatttttcaaaaaatgtagaattcattttgtagtaaagtagtttattttttttaatttcaagtgatgtaatttaaaacctaagttgtgtttcaaaacagcaacaaaactgtattgtattttttttgctgtaattaactgtataatgtaaacctaattattttatcatggtttaaattttttgcatatttgctttatcttatgctgctgatttttttaactgaatttgtaagattttgtttatcaaagcaactattatgtggtgacttgcctatatcatgaattatttaagatttttatagttttttttaattagaatttatttcagatgttttgttcatgatactatccttcagggttatgtgcttatcaatgaaataaccccagaggagtgagggaaaataacttgtagccagttatattcaggaataactactgtaaatgatgaacgtgttaggagacctccaatatttgctacttgccaatcctaatttagttacaagaattggtaggcaatcctacttaattttggcaaaagccccgtcatctaaatggcagaataactcagagcatgtctttgaagatgctgggcgtctaccaccaccttatgtccccaccctacccaacaaaaataagtaaaaagaatatggtgtattctacaaatttgtggcatgctcaaagtttatgatcacataaaggcaagaggatacttcatgaataatacatttcaatgcaaataaacagatggttcacttctactagctatgagcctgtttttgtatacactgagttaatctactcaggctgtaggtcccagcaatgttctagagtctggtctttccctttcctgcagcttcgggtccttggacctttcctgtttcctattacttggagtgtctgtcagttgagcaccagttgttctggtgtttcatttgattctacttgtagcataatcatttatacgagctattgggaggttccaaaccctacctagatttgtgtaggtgatgtatcaaatgagcaatataccgttcatctgaaaatagtagcacacagccatatataggatatcattttctaaggactgtttcttcacattgagcagagcaggcataaatggtggttatttagtctaagtcttttatttttttatacctgattttcaacataacacgcaatgtggatgtcgagtagtgttaagaatggtgctgctcctgacaagtgtatgttaactgtttacattttctatctgtagaattatttctctattactgaacttttcctaagtaaaatgtctttgaagtctcgttatttctgaaatacgttgtctgtaatagacccaggcaccttttaaattatctctggaacaagagggatttcatgtaatgaactaggaaatgcatactcacataagcaacaaggttctaggcagaaagccccttggaatttgtgaccaacaggagcaagaacaggtgcggctcaacatgcaatgtctgaaaatttgcttggcattttattcatatatttagtgcaaaattatttttgagtgagatattttacatcactgttaatgtgcaatatttaagattaaaatacattagcttttttatatactttgaagtagcaagtttgttttcgatggcttagagtcatgatttccagcttcccagcctttttatcagtcccttttctaatacaacaaggtgcattaatttgattaggcaaattagagttctaagacacttcttgaattgtagacagaaaatattggattcacaatttcagcagaaatttgagaatgagtgtgtttatattaatttcacaattagctgtattttctgtagcatagattatgtcactgttgcactttcacagcagacatgctttcagaaggttctcatattttatgtttgattgctgataagccatctctattgatacagattttggttaagtaaggaaaaccaggtgtgtgtctgtatcatttattgtaaatgccagctgccacttgccaaccatcatgttcagttcaattcaaagaaaacaaactctcattacttagtgtaaactaaaatacttaacaaattatatcctaaaaacaaggtctctttgttaaatgttgcatgccctaggttttaaattactacatccaaatacagttttcgtcttaaatttgttaagctaaatatatgttggttctttttattttggaatcctttaagcatcttaaacattttttttttgaagagaagttacaaataacatttctatcaggtagtacttgtatgaaaccacctttcttattctataattttgatttttcaattttatatacttaatatactcactgtcttactatcagaaagttattttgaccaagatttttattatcttcatagattcagaaagagatgctaattctgtaccaatgtcttcctggttactattctcttccctctaatatatactggccatttgtaaaaccattgtgttgttgggatcacttagttatactatacgcagatagagcatctcaactctgtcatagtgtttgctgaacagttttcagtgtcatgcacctttggctgctaattgttcctgacgtgcactcttccgagttggtaaaggcacagtgtgttcatgccagacttctaagagaaacaccagcctcttaaatcagaagcctacacacaacccccttaacaatccaaagaagcttgatggtgtgcaaagaagcatcctgccagccttgtcattgttctgttctatgctaatcctgctgtgttgtctaaaagatggagggaagaggacatcagtgtctgatagtgaaatcatcagcaggaaagtgaagctctttccttggttacagataagacttggtttacactattggccagtatctgctaaacatatgaagacttaactattcagtgttgcctaggcattcgcctgcacaacattttgaggttagaacatagaatattttcagaaatactgttgtagtttgtgagtgttgttcattagttacacattagctatagagtggatgcatgaagccccatgacaccagtaaacttctcttaccagtaggtaaaccaaacaccattctgtcattagcagccctcttaaatgttgcctctccgtatcctgttgcatttttgtgtgcattgtgtttctactgatctctcttaggtttttacggaatcaaaggaaactaatttttccttaatagcaagaaagatgaagaggtaaagggcattgaagcagaaatgtatagtttggggtacgattagaaaactcgtaaggaaaacagaagtcctaatttcaaactgactgctcttcgttaagtgctcttaaggagagtctagtaacagtaacactttctggccatttctagtttagattctcttcgttactgaaacttttgagaaatattacctgtggattaattttgcacaatgttctattctcataatgacttacaaattaaactaggtttttattgaactacctcacactaattttctatgctttcccaagtaagctgttgccctgttagatctttactgagtgaattataaatgtgtgttaaatactttctagccaatgttgacacaataccagtaagtatgtaaagtatataccttacatcagtaagagacacgtgtaaaatctttgactgtatgtcttgcaaaattgtgctcgttgacattattactgtttttgtaagtagaaacctgctcgtgatatcggtccatttacattttacaaaaggagtaaatcttagtaaaaattttacgaagaaataaattacttttgtaggcccaatatttggtatatttttgagaagctgttaatcttttagctgaataatgaagttagactgaattacgtgtctccctggactgtgacatctattttctcattacagtttatcctggtcagcagggtgtcacacctggaaacctgagtatgatagctgacatttgcttttctccctctgcgatgtcattcctcctccattcctctccttccctgtgttccgttccctctcctttcctctagacaaaacaaaatggggcactttttagggaatgctgagatcattattgtggtttttcatcattcatgccctagtcattaaacatgcaccactggaatgtaaacaatgttatctagtatgtcaattggttataatattttaaataaaaaagaaaaaagtggtatgaaaattatgaaa

SEQ ID NO: 2520 - DNA, 927 bp, Homo sapiens
  source 1..927: mol_type = genomic DNA
atgagcagaagcaagcgtgacaacaatttttatagtgtagagattggagattctacattcacagtcctgaaacgatatcagaatttaaaacctataggctcaggagctcaaggaatagtatgcgcagcttatgatgccattcttgaaagaaatgttgcaatcaagaagctaagccgaccatttcagaatcagactcatgccaagcgggcctacagagagctagttcttatgaaatgtgttaatcacaaaaatataattggccttttgaatgttttcacaccacagaaatccctagaagaatttcaagatgtttacatagtcatggagctcatggatgcaaatctttgccaagtgattcagatggagctagatcatgaaagaatgtcctaccttctctatcagatgctgtgtggaatcaagcaccttcattctgctggaattattcatcgggacttaaagcccagtaatatagtagtaaaatctgattgcactttgaagattcttgacttcggtctggccaggactgcaggaacgagttttatgatgacgccttatgtagtgactcgctactacagagcacccgaggtcatccttggcatgggctacaaggaaaacgctgactcagaacacaacaaacttaaagccagtcaggcaagggatttgttatccaaaatgctggtaatagatgcatctaaaaggatctctgtagatgaagctctccaacacccgtacatcaatgtctggtatgatccttctgaagcagaagctccaccaccaaagatccctgacaagcagttagatgaaagggaacacacaatagaagagtggaaagaattgatatataaggaagttatggacttggaggagagaaccaagaatggagttatacgggggcagccctctcctttagcacaggtgcagcagtga

SEQ ID NO: 2521 - DNA, 860 bp, Homo sapiens
  source 1..860: mol_type = genomic DNA
acctgggtgcgctccgctgcccgccagcccgcctgccgccgcgagccccgcccgcctgtcctctcgcgtcctcttcgcgtgggtcctgcctccgcggcgggagaagaaaatggagcggggggtcttgcagccttacagtcatttgtaatggttacctcagattcccctgctgtggttaacgttaaacctaggaggtcagatgctctaagtgaacatgtttagtgctgtgcctgacaaaagcaagcaatcaaaatgggacttccttgagggcaggcctgtcttgcatctgtttctccaccacctagcctggaatataactggccttatgggtttctagaaggaaaatcacagaggtaaagcatcatttcatcacatcctgtcaaggcttcttggtgaatttttggatgaagccattaaattaattgcttgccatcatgagcagaagcaagcgtgacaacaatttttatagtgtagagattggagattctacattcacagtcctgaaacgatatcagaatttaaaacctataggctcaggagctcaaggaatagtatgcgcagcttatgatgccattcttgaaagaaatgttgcaatcaagaagctaagccgaccatttcagaatcagactcatgccaagcgggcctacagagagctagttcttatgaaatgtgttaatcacaaaaatataattggccttttgaatgttttcacaccacagaaatccctagaagaatttcaagatgtttacatagtcatggagctcatggatgcaaatctttgccaagtgattcagatggagctagatcatgaaagaatgtcctaccttctctatcagatgctgtgtggaatcaagcacctt

SEQ ID NO: 2522 - DNA, 603 bp, Homo sapiens
  source 1..603: mol_type = genomic DNA
actcagccgagcggccgaggccggacgacgcggcttggattgcggagccgcgagcagcgctgggtaacggccgcggcgaccaccccggacggcccctgtccccgctggcgggcttccctgtcgccgttcgctgcgctgccggcttcttggtgaatttttggatgaagccattaaattaattgcttgccatcatgagcagaagcaagcgtgacaacaatttttatagtgtagagattggagattctacattcacagtcctgaaacgatatcagaatttaaaacctataggctcaggagctcaaggaatagtatgataattggccttttgaatgttttcacaccacagaaatccctagaagaatttcaagatgtttacatagtcatggagctcatggatgcaaatctttgccaagtgattcagatggagctagatcatgaaagaatgtcctaccttctctatcagatgctgtgtggaatcaagcaccttcattctgctggaattattcatcgggacttaaagcccagtaatatagtagtaaaatctgattgcactttgaagattcttgacttcggtctggccaggactgcaggaacgagttttat

SEQ ID NO: 2523 - DNA, 907 bp, Homo sapiens
  source 1..907: mol_type = genomic DNA
cgcggtgacggcccgcgtctctgttactcagccgagcggccgaggccggacgacgcggcttggattgcggagccgcgagcagcgctgggtaacggccgcggcgaccaccccggacggcccctgtccccgctggcgggcttccctgtcgccgttcgctgcgctgccggtcttgcagccttacagtcatttgtaatggttacctcagattcccctgctgtggttaacgttaaacctaggaggtcagatgctctaagtgaacatgtttagtgctgtgcctgacaaaagcaagcaatcaaaatgggacttccttgagggcaggcctgtcttgcatctgtttctccaccacctagcctggaatataactggccttatgggtttctagaaggaaaatcacagaggtaaagcatcatttcatcacatcctgtcaaggcttcttggtgaatttttggatgaagccattaaattaattgcttgccatcatgagcagaagcaagcgtgacaacaatttttatagtgtagagattggagattctacattcacagtcctgaaacgatatcagaatttaaaacctataggctcaggagctcaaggaatagtatgcgcagcttatgatgccattcttgaaagaaatgttgcaatcaagaagctaagccgaccatttcagaatcagactcatgccaagcgggcctacagagagctagttcttatgaaatgtgttaatcacaaaaatataattggccttttgaatgttttcacaccacagaaatccctagaagaatttcaagatgtttacatagtcatggagctcatggatgcaaatctttgccaagtgattcagatggagctagatcatgaaagaatgtcctaccttctctatcagatgctgtgtggaatcaagcaccttca

SEQ ID NO: 2524 - DNA, 2642 bp, Homo sapiens
  source 1..2642: mol_type = genomic DNA
gaggcaataggggcggagccgagtgggagtgtggaaagcgccgcatcccgggtgggaggcgaggcttccccttccccgcccctcccccggcctccagtccctcccagggccgcttcgcagagcggctaggagcacggcggcggcggcactttccccggcaggagctggagctgggctctggtgcgcgcgcggctgtgccgcccgagccggagggactggttggttgagagagagagaggaagggaatcccgggctgccgaaccgcacgttcagcccgctccgctcctgcagggcagcctttcggctctctgcgcgcgaagccgagtcccgggcgggtggggcgggggtccactgagaccgctaccggcccctcggcgctgacgggaccgcgcggggcgcacccgctgaaggcagccccggggcccgcggcccggacttggtcctgcgcagcgggcgcggggcagcgcagcgggaggaagcgagaggtgctgccctccccccggagttggaagcgcgttacccgggtccaaaatgcccaagaagaagccgacgcccatccagctgaacccggcccccgacggctctgcagttaacgggaccagctctgcggagaccaacttggaggccttgcagaagaagctggaggagctagagcttgatgagcagcagcgaaagcgccttgaggcctttcttacccagaagcagaaggtgggagaactgaaggatgacgactttgagaagatcagtgagctgggggctggcaatggcggtgtggtgttcaaggtctcccacaagccttctggcctggtcatggccagaaagctaattcatctggagatcaaacccgcaatccggaaccagatcataagggagctgcaggttctgcatgagtgcaactctccgtacatcgtgggcttctatggtgcgttctacagcgatggcgagatcagtatctgcatggagcacatggatggaggttctctggatcaagtcctgaagaaagctggaagaattcctgaacaaattttaggaaaagttagcattgctgtaataaaaggcctgacatatctgagggagaagcacaagatcatgcacagagatgtcaagccctccaacatcctagtcaactcccgtggggagatcaagctctgtgactttggggtcagcgggcagctcatcgactccatggccaactccttcgtgggcacaaggtcctacatgtcgccagaaagactccaggggactcattactctgtgcagtcagacatctggagcatgggactgtctctggtagagatggcggttgggaggtatcccatccctcctccagatgccaaggagctggagctgatgtttgggtgccaggtggaaggagatgcggctgagaccccacccaggccaaggacccccgggaggccccttagctcatacggaatggacagccgacctcccatggcaatttttgagttgttggattacatagtcaacgagcctcctccaaaactgcccagtggagtgttcagtctggaatttcaagattttgtgaataaatgcttaataaaaaaccccgcagagagagcagatttgaagcaactcatggttcatgcttttatcaagagatctgatgctgaggaagtggattttgcaggttggctctgctccaccatcggccttaaccagcccagcacaccaacccatgctgctggcgtctaagtgtttgggaagcaacaaagagcgagtcccctgcccggtggtttgccatgtcgcttttgggcctccttcccatgcctgtctctgttcagatgtgcatttcacctgtgacaaaggatgaagaacacagcatgtgccaagattctactcttgtcatttttaatattactgtctttattcttattactattattgttcccctaagtggattggctttgtgcttggggctatttgtgtgtatgctgatgatcaaaacctgtgccaggctgaattacagtgaaattttggtgaatgtgggtagtcattcttacaattgcactgctgttcctgctccatgactggctgtctgcctgtattttcgggattctttgacatttggtggtactttattcttgctgggcatactttctctctaggagggagccttgtgagatccttcacaggcagtgcatgtgaagcatgctttgctgctatgaaaatgagcatcagagagtgtacatcatgttattttattattattatttgcttttcatgtagaactcagcagttgacatccaaatctagccagagcccttcactgccatgatagctggggcttcaccagtctgtctactgtggtgatctgtagacttctggttgtatttctatatttattttcagtatactgtgtgggatacttagtggtatgtctctttaagttttgattaatgtttcttaaatggaattattttgaatgtcacaaattgatcaagatattaaaatgtcggatttatctttccccatatccaagtaccaatgctgttgtaaacaacgtgtatagtgcctaaaattgtatgaaaatccttttaaccattttaacctagatgtttaacaaatctaatctcttattctaataaatatactatgaaataaaaaaaaaaggatgaaagcta

SEQ ID NO: 2525 - DNA, 1734 bp, Homo sapiens
  source 1..1734: mol_type = genomic DNA
cccctgcctctcggactcgggctgcggcgtcagccttcttcgggcctcggcagcggtagcggctcgctcgcctcagccccagcgcccctcggctaccctcggcccaggcccgcagcgccgcccgccctcggccgccccgacgccggcctgggccgcggccgcagccccgggctcgcgtaggcgccgaccgctcccggcccgccccctatgggccccggctagaggcgccgccgccgccggcccgcggagccccgatgctggcccggaggaagccggtgctgccggcgctcaccatcaaccctaccatcgccgagggcccatcccctaccagcgagggcgcctccgaggcaaacctggtggacctgcagaagaagctggaggagctggaacttgacgagcagcagaagaagcggctggaagcctttctcacccagaaagccaaggtcggcgaactcaaagacgatgacttcgaaaggatctcagagctgggcgcgggcaacggcggggtggtcaccaaagtccagcacagaccctcgggcctcatcatggccaggaagctgatccaccttgagatcaagccggccatccggaaccagatcatccgcgagctgcaggtcctgcacgaatgcaactcgccgtacatcgtgggcttctacggggccttctacagtgacggggagatcagcatttgcatggaacacatggacggcggctccctggaccaggtgctgaaagaggccaagaggattcccgaggagatcctggggaaagtcagcatcgcggttctccggggcttggcgtacctccgagagaagcaccagatcatgcaccgagatgtgaagccctccaacatcctcgtgaactctagaggggagatcaagctgtgtgacttcggggtgagcggccagctcatcgactccatggccaactccttcgtgggcacgcgctcctacatggctccggagcggttgcagggcacacattactcggtgcagtcggacatctggagcatgggcctgtccctggtggagctggccgtcggaaggtaccccatccccccgcccgacgccaaagagctggaggccatctttggccggcccgtggtcgacggggaagaaggagagcctcacagcatctcgcctcggccgaggccccccgggcgccccgtcagcggtcacgggatggatagccggcctgccatggccatctttgaactcctggactatattgtgaacgagccacctcctaagctgcccaacggtgtgttcacccccgacttccaggagtttgtcaataaatgcctcatcaagaacccagcggagcgggcggacctgaagatgctcacaaaccacaccttcatcaagcggtccgaggtggaagaagtggattttgccggctggttgtgtaaaaccctgcggctgaaccagcccggcacacccacgcgcaccgccgtgtgacagtggccgggctccctgcgtcccgctggtgacctgcccaccgtccctgtccatgccccgcccttccagctgaggacaggctggcgcctccacccaccctcctgcctcacccctgcggagagcaccgtggcggggcgacagcgcatgcaggaacgggggtctcctctcctgcccgtcctggccggggtgcctctggggacgggcgacgctgctgtgtgtggtctcagaggctctgcttccttaggttacaaaacaaaacagggagagaaaaagcaaa

SEQ ID NO: 2526 - DNA, 2039 bp, Homo sapiens
  source 1..2039: mol_type = genomic DNA
atgggagtgcaggggacattgatgtcaagggatcagacgcctcaccttctctccattctaggaaaatccaagaggaagaaggatctacggatatcctgcatgtccaagccacccgcacccaaccccacacccccccggaacctggactcccggaccttcatcaccattggagacagaaactttgaggtggaggctgatgacttggtgaccatctcagaactgggccgtggagcctatggggtggtagagaaggtgcggcacgcccagagcggcaccatcatggccgtgaagcggatccgggccaccgtgaactcacaggagcagaagcggctgctcatggacctggacatcaacatgcgcacggtcgactgtttctacactgtcaccttctacggggcactattcagagagggagacgtgtggatctgcatggagctcatggacacatccttggacaagttctaccggaaggtgctggataaaaacatgacaattccagaggacatccttggggagattgctgtgtctatcgtgcgggccctggagcatctgcacagcaagctgtcggtgatccacagagatgtgaagccctccaatgtccttatcaacaaggagggccatgtgaagatgtgtgactttggcatcagtggctacttggtggactctgtggccaagacgatggatgccggctgcaagccctacatggcccctgagaggatcaacccagagctgaaccagaagggctacaatgtcaagtccgacgtctggagcctgggcatcaccatgattgagatggccatcctgcggttcccttacgagtcctgggggaccccgttccagcagctgaagcaggtggtggaggagccgtccccccagctcccagccgaccgtttctcccccgagtttgtggacttcactgctcagtgcctgaggaagaaccccgcagagcgtatgagctacctggagctgatggagcaccccttcttcaccttgcacaaaaccaagaagacggacattgctgccttcgtgaaggagatcctgggagaagactcataggggctgggcctcggaccccactccggccctccagagccccacagccccatctgcgggggcagtgctcacccacaccataagctactgccatcctggcccagggcatctgggaggaaccgagggggctgctcccacctggctctgtggcgagccatttgtcccaagtgccaaagaagcagaccattggggctcccagccaggcccttgtcggccccaccagtgcctctccctgctgctcctaggacccgtctccagctgctgagatcctggactgagggggcctggatgccccctgtggatgctgctgcccctgcacagcaggctgccagtgcctgggtggatgggccaccgccttgcccagcctggatgccatccaagttgtatatttttttaatctctcgactgaatggactttgcacactttggcccagggtggccacacctctatcccggctttggtgcggggtacacaagaggggatgagttgtgtgaataccccaagactcccatgagggagatgccatgagccgcccaaggccttcccctggcactggcaaacagggcctctgcggagcacactggctcacccagtcctgcccgccaccgttatcggtgtcattcacctttcgtgttttttttaatttatcctctgttgattttttcttttgctttatgggtttggcttgtttttcttgcatggtttggagctgatcgcttctcccccaccccctagggtaccagcaggcagagccttgccctctgctcaggctggggtccagtgggaggggcccaagatctctgctcagagaagtgcagggggagccttccagctcactctccctgaggactggcttgacaggggctatgggtttgctttggtgttgtttttaaaaaaagaaaatatatttttttgaaaaaacgactgcccatcccgggtcctttccctgatgggttggggcagttacctggttgctgttttaatt

SEQ ID NO: 2527 - DNA, 2303 bp, Homo sapiens
  source 1..2303: mol_type = genomic DNA
agtcagcgcagttcggccggggtctccccggcgctgcccagtctgtctccggcgccgcccgtcgcggactcgtccttgctgcagtcgccgccgcagtcctcgccgcagtcgccgccgccgccgccgccgccgccgctgctcctccgcctggcctgggccgtctgcccgcagccatgagcgtgctcggccccggtggagcccgcagtcctctagattagtctccaccgccgtccaggacccacttgcagcatggagtcgcccgcctcgagccagcccgccagcatgccccagtccaaaggaaaatccaagaggaagaaggatctacggatatcctgcatgtccaagccacccgcacccaaccccacacccccccggaacctggactcccggaccttcatcaccattggagacagaaactttgaggtggaggctgatgacttggtgaccatctcagaactgggccgtggagcctatggggtggtagagaaggtgcggcacgcccagagcggcaccatcatggccgtgaagcggatccgggccaccgtgaactcacaggagcagaagcggctgctcatggacctggacatcaacatgcgcacggtcgactgtttctacactgtcaccttctacggggcactattcagagagggagacgtgtggatctgcatggagctcatggacacatccttggacaagttctaccggaaggtgctggataaaaacatgacaattccagaggacatccttggggagattgctgtgtctatcgtgcgggccctggagcatctgcacagcaagctgtcggtgatccacagagatgtgaagccctccaatgtccttatcaacaaggagggccatgtgaagatgtgtgactttggcatcagtggctacttggtggactctgtggccaagacgatggatgccggctgcaagccctacatggcccctgagaggatcaacccagagctgaaccagaagggctacaatgtcaagtccgacgtctggagcctgggcatcaccatgattgagatggccatcctgcggttcccttacgagtcctgggggaccccgttccagcagctgaagcaggtggtggaggagccgtccccccagctcccagccgaccgtttctcccccgagtttgtggacttcactgctcagtgcctgaggaagaaccccgcagagcgtatgagctacctggagctgatggagcaccccttcttcaccttgcacaaaaccaagaagacggacattgctgccttcgtgaaggagatcctgggagaagactcataggggctgggcctcggaccccactccggccctccagagccccacagccccatctgcgggggcagtgctcacccacaccataagctactgccatcctggcccagggcatctgggaggaaccgagggggctgctcccacctggctctgtggcgagccatttgtcccaagtgccaaagaagcagaccattggggctcccagccaggcccttgtcggccccaccagtgcctctccctgctgctcctaggacccgtctccagctgctgagatcctggactgagggggcctggatgccccctgtggatgctgctgcccctgcacagcaggctgccagtgcctgggtggatgggccaccgccttgcccagcctggatgccatccaagttgtatatttttttaatctctcgactgaatggactttgcacactttggcccagggtggccacacctctatcccggctttggtgcggggtacacaagaggggatgagttgtgtgaataccccaagactcccatgagggagatgccatgagccgcccaaggccttcccctggcactggcaaacagggcctctgcggagcacactggctcacccagtcctgcccgccaccgttatcggtgtcattcacctttcgtgttttttttaatttatcctctgttgattttttcttttgctttatgggtttggcttgtttttcttgcatggtttggagctgatcgcttctcccccaccccctagggtaccagcaggcagagccttgccctctgctcaggctggggtccagtgggaggggcccaagatctctgctcagagaagtgcagggggagccttccagctcactctccctgaggactggcttgacaggggctatgggtttgctttggtgttgtttttaaaaaaagaaaatatatttttttgaaaaaacgactgcccatcccgggtcctttccctgatgggttggggcagttacctggttgctgttttaattaaaaaaaaaaaaaaaaaaaggactaaa

SEQ ID NO: 2528 - DNA, 2034 bp, Homo sapiens
  source 1..2034: mol_type = genomic DNA
aaagttctcagttggcccgtgtgaggagaaggccggggcagcggaggcttccggcggaaaatccaagaggaagaaggatctacggatatcctgcatgtccaagccacccgcacccaaccccacacccccccggaacctggactcccggaccttcatcaccattggagacagaaactttgaggtggaggctgatgacttggtgaccatctcagaactgggccgtggagcctatggggtggtagagaaggtgcggcacgcccagagcggcaccatcatggccgtgaagcggatccgggccaccgtgaactcacaggagcagaagcggctgctcatggacctggacatcaacatgcgcacggtcgactgtttctacactgtcaccttctacggggcactattcagagagggagacgtgtggatctgcatggagctcatggacacatccttggacaagttctaccggaaggtgctggataaaaacatgacaattccagaggacatccttggggagattgctgtgtctatcgtgcgggccctggagcatctgcacagcaagctgtcggtgatccacagagatgtgaagccctccaatgtccttatcaacaaggagggccatgtgaagatgtgtgactttggcatcagtggctacttggtggactctgtggccaagacgatggatgccggctgcaagccctacatggcccctgagaggatcaacccagagctgaaccagaagggctacaatgtcaagtccgacgtctggagcctgggcatcaccatgattgagatggccatcctgcggttcccttacgagtcctgggggaccccgttccagcagctgaagcaggtggtggaggagccgtccccccagctcccagccgaccgtttctcccccgagtttgtggacttcactgctcagtgcctgaggaagaaccccgcagagcgtatgagctacctggagctgatggagcaccccttcttcaccttgcacaaaaccaagaagacggacattgctgccttcgtgaaggagatcctgggagaagactcataggggctgggcctcggaccccactccggccctccagagccccacagccccatctgcgggggcagtgctcacccacaccataagctactgccatcctggcccagggcatctgggaggaaccgagggggctgctcccacctggctctgtggcgagccatttgtcccaagtgccaaagaagcagaccattggggctcccagccaggcccttgtcggccccaccagtgcctctccctgctgctcctaggacccgtctccagctgctgagatcctggactgagggggcctggatgccccctgtggatgctgctgcccctgcacagcaggctgccagtgcctgggtggatgggccaccgccttgcccagcctggatgccatccaagttgtatatttttttaatctctcgactgaatggactttgcacactttggcccagggtggccacacctctatcccggctttggtgcggggtacacaagaggggatgagttgtgtgaataccccaagactcccatgagggagatgccatgagccgcccaaggccttcccctggcactggcaaacagggcctctgcggagcacactggctcacccagtcctgcccgccaccgttatcggtgtcattcacctttcgtgttttttttaatttatcctctgttgattttttcttttgctttatgggtttggcttgtttttcttgcatggtttggagctgatcgcttctcccccaccccctagggtaccagcaggcagagccttgccctctgctcaggctggggtccagtgggaggggcccaagatctctgctcagagaagtgcagggggagccttccagctcactctccctgaggactggcttgacaggggctatgggtttgctttggtgttgtttttaaaaaaagaaaatatatttttttgaaaaaacgactgcccatcccgggtcctttccctgatgggttggggcagttacctggttgctgttttaatt

SEQ ID NO: 2529 - DNA, 2171 bp, Homo sapiens
  source 1..2171: mol_type = genomic DNA
gcggccgcttccccccggccgggcccccgccgccccgcggtccccagagcgccaggcccccggggggagggagggagggcgccgggccggtgggagccagcggcgcgcggtgggacccacggagccccgcgacccgccgagcctggagccgggccgggtcggggaagccggctccagcccggagcgaacttcgcagcccgtcggggggcggcggggagggggcccggagccggaggagggggcggccgcgggcacccccgcctgtgccccggcgtccccgggcaccatgctgtccaactcccagggccagagcccgccggtgccgttccccgccccggccccgccgccgcagccccccacccctgccctgccgcaccccccggcgcagccgccgccgccgcccccgcagcagttcccgcagttccacgtcaagtccggcctgcagatcaagaagaacgccatcatcgatgactacaaggtcaccagccaggtcctggggctgggcatcaacggcaaagttttgcagatcttcaacaagaggacccaggagaaattcgccctcaaaatgcttcaggactgccccaaggcccgcagggaggtggagctgcactggcgggcctcccagtgcccgcacatcgtacggatcgtggatgtgtacgagaatctgtacgcagggaggaagtgcctgctgattgtcatggaatgtttggacggtggagaactctttagccgaatccaggatcgaggagaccaggcattcacagaaagagaagcatccgaaatcatgaagagcatcggtgaggccatccagtatctgcattcaatcaacattgcccatcgggatgtcaagcctgagaatctcttatacacctccaaaaggcccaacgccatcctgaaactcactgactttggctttgccaaggaaaccaccagccacaactctttgaccactccttgttatacaccgtactatgtggctccagaagtgctgggtccagagaagtatgacaagtcctgtgacatgtggtccctgggtgtcatcatgtacatcctgctgtgtgggtatccccccttctactccaaccacggccttgccatctctccgggcatgaagactcgcatccgaatgggccagtatgaatttcccaacccagaatggtcagaagtatcagaggaagtgaagatgctcattcggaatctgctgaaaacagagcccacccagagaatgaccatcaccgagtttatgaaccacccttggatcatgcaatcaacaaaggtccctcaaaccccactgcacaccagccgggtcctgaaggaggacaaggagcggtgggaggatgtcaaggggtgtcttcatgacaagaacagcgaccaggccacttggctgaccaggttgtgagcagaggattctgtgttcctgtccaaactcagtgctgtttcttagaatccttttattccctgggtctctaatgggaccttaaagaccatctggtatcatcttctcattttgcagaagagaaactgaggcccagaggcggagggcagtctgctcaaggtcacgcagctggtgactggttggggcagaccggacccaggtttcctgactcctggcccaagtctcttcctcctatcctgcgggatcactggggggctctcagggaacagcagcagtgccatagccaggctctctgctgcccagcgctggggtgaggctgccgttgtcagcgtggaccactaaccagcccgtcttctctctctgctcccacccctgccgccctcaccctgcccttgttgtctctgtctctcacgtctctcttctgctgtctctcctacctgtcttctggctctctctgtacccttcctggtgctgccgtgcccccaggaggagatgaccagtgccttggccacaatgcgcgttgactacgagcagatcaagataaaaaagattgaagatgcatccaaccctctgctgctgaagaggcggaagaaagctcgggccctggaggctgcggctctggcccactgagccaccgcgccctcctgcccacgggaggacaagcaataactctctacaggaatatattttttaaacgaagagacagaactgtccacatctgcctcctctcctcctcagctgcatggagcctggaactgcatcagtgactgaattc

SEQ ID NO: 2530 - DNA, 2961 bp, Homo sapiens
  source 1..2961: mol_type = genomic DNA
gagccagcggcgcgcggtgggacccacggagccccgcgacccgccgagcctggagccgggccgggtcggggaagccggctccagcccggagcgaacttcgcagcccgtcggggggcggcggggagggggcccggagccggaggagggggcggccgcgggcacccccgcctgtgccccggcgtccccgggcaccatgctgtccaactcccagggccagagcccgccggtgccgttccccgccccggccccgccgccgcagccccccacccctgccctgccgcaccccccggcgcagccgccgccgccgcccccgcagcagttcccgcagttccacgtcaagtccggcctgcagatcaagaagaacgccatcatcgatgactacaaggtcaccagccaggtcctggggctgggcatcaacggcaaagttttgcagatcttcaacaagaggacccaggagaaattcgccctcaaaatgcttcaggactgccccaaggcccgcagggaggtggagctgcactggcgggcctcccagtgcccgcacatcgtacggatcgtggatgtgtacgagaatctgtacgcagggaggaagtgcctgctgattgtcatggaatgtttggacggtggagaactctttagccgaatccaggatcgaggagaccaggcattcacagaaagagaagcatccgaaatcatgaagagcatcggtgaggccatccagtatctgcattcaatcaacattgcccatcgggatgtcaagcctgagaatctcttatacacctccaaaaggcccaacgccatcctgaaactcactgactttggctttgccaaggaaaccaccagccacaactctttgaccactccttgttatacaccgtactatgtggctccagaagtgctgggtccagagaagtatgacaagtcctgtgacatgtggtccctgggtgtcatcatgtacatcctgctgtgtgggtatccccccttctactccaaccacggccttgccatctctccgggcatgaagactcgcatccgaatgggccagtatgaatttcccaacccagaatggtcagaagtatcagaggaagtgaagatgctcattcggaatctgctgaaaacagagcccacccagagaatgaccatcaccgagtttatgaaccacccttggatcatgcaatcaacaaaggtccctcaaaccccactgcacaccagccgggtcctgaaggaggacaaggagcggtgggaggatgtcaaggaggagatgaccagtgccttggccacaatgcgcgttgactacgagcagatcaagataaaaaagattgaagatgcatccaaccctctgctgctgaagaggcggaagaaagctcgggccctggaggctgcggctctggcccactgagccaccgcgccctcctgcccacgggaggacaagcaataactctctacaggaatatattttttaaacgaagagacagaactgtccacatctgcctcctctcctcctcagctgcatggagcctggaactgcatcagtgactgaattctgccttggttctggccaccccagagtgggagaggctgggaggttgggaggctgtggagagaagtgagcaaggtgctcttgaacctgtgctcattttgcaattttatcagtaatttgacttagagtttttacgaaacctcttttgttgtccttgccccactcctctccaccagacgccttcctctctggatactgcaaaggcttgtggtttgttagagggtatttgtggaaactgtcatagggattgtccctgtgttgtcccatctgccctccctgtttctccacaacagcctggggttgtccccgctggctcacgcgttctgggagctcaaggccaccttggaggaggatgccacgcacttcctctctcggagccctcagacatctccagtgtgccagacaaataggagtgagtgtatgtgtgtgtgtgtgtgtgtgtgtgtgcacacgtgtgtatgagtgcgcagatctgtgcctgggatcgtgcatttgaggggccaggggcaggcagggctgcagagggagacggccctgctggggcttaggaaccttctcccttcttgggtctgccctgcccatactgagcctgccaaagtgcctgggaagcccacccagattctgaaacaggccctctgtggcctgtctctattagctgggttccgggaggcagagaggagtgaccgggcactggcactgcgatcaggaagactggacccccagcccccagggcccccctccccccacttagtgctggtcctaggtcctctgaggcactcatctactgaatgacctctctacttccccttcttgccattattaacccatttttgtttattttccttaaatttttagccatttctccatgggccaccgcccagctcatgtaggtgagcctgggcagcttctgttggcagagcttttgcatttcctgtgtttgtcctgggttctggggcatcagccagctaccccttgtgggcaaaggcagggccacttttgaagtcttccctcagatttccattgtgtggcctggtgggtcagggggagtctttgcaccaaagatgtcctgactttgcccccttgcccatcagccatttgccatcaccccaaacaactcagcttcggggccggtgaggggaggggcctcccccagcacagatgaggagcagctggggtaggctgtctgtgccatggccccccactcccccttcccttggagggagaggtggcaggaatacttcacctttcctctccctcaggggcaggtggtggaggggcgcccagggtcgtctttgtgtatgggggaaggcgctgggtgcctgcagcgcctcccttgtctcagatggtgtgtccagcactcgattgttgtaaactgttgttttgtatgagcgaaattgtctttactaaacagatttaatagttga

SEQ ID NO: 2531 - DNA, 2500 bp, Homo sapiens
  source 1..2500: mol_type = genomic DNA
ctgcggccgccagctcccgcgaccgcctctcctgcccctcgccggtacctcagcaaggtgccactagaagcgccaggctggggccgcctctgagcgccccgcgggggccatggatggtgaaacagcagaggagcaggggggccctgtgcccccgccagttgcacccggcggacccggcttgggcggtgctccgggggggcggcgggagcccaagaagtacgcagtgaccgacgactaccagttgtccaagcaggtgctgggcctgggtgtgaacggcaaagtgctggagtgcttccatcggcgcactggacagaagtgtgccctgaagctcctgtatgacagccccaaggcccggcaggaggtagaccatcactggcaggcttctggcggcccccatattgtctgcatcctggatgtgtatgagaacatgcaccatggcaagcgctgtctcctcatcatcatggaatgcatggaaggtggtgagttgttcagcaggattcaggagcgtggcgaccaggctttcactgagagagaagctgcagagataatgcgggatattggcactgccatccagtttctgcacagccataacattgcccaccgagatgtcaagcctgaaaacctactctacacatctaaggagaaagacgcagtgcttaagctcaccgattttggctttgctaaggagaccacccaaaatgccctgcagacaccctgctatactccctattatgtggcccctgaggtcctgggtccagagaagtatgacaagtcatgtgacatgtggtccctgggtgtcatcatgtacatcctcctttgtggcttcccacccttctactccaacacgggccaggccatctccccggggatgaagaggaggattcgcctgggccagtacggcttccccaatcctgagtggtcagaagtctctgaggatgccaagcagctgatccgcctcctgttgaagacagaccccacagagaggctgaccatcactcagttcatgaaccacccctggatcaaccaatcgatggtagtgccacagaccccactccacacggcccgagtgctgcaggaggacaaagaccactgggacgaagtcaaggaggagatgaccagtgccttggccactatgcgggtagactacgaccaggtgaagatcaaggacctgaagacctctaacaaccggctcctcaacaagaggagaaaaaagcaggcaggcagctcctctgcctcacagggctgcaacaaccagtagctcatggggccttggaggagcctggcctctcagcctgcataacagactgaaatgtgctcaggccctggccaggagggcccagggtcattcttttaacaaaaggattattttgttgtgttttaatttgtcactcggaacttcaggatggaggaccctgaccctaaacctccttcagatctctggcccaggctcaagccctagagatgggcagggcctaggggctgggagctgcctgctgccatagcagcacctttagctaggttggcccgagtgaggcctctgtgctgtcctgccctggtgcatggccttagctttctaggccactgggagttgtggctgggcttcccatcttccacagagacatctccctgtgggatgggcagatgggcctggccttgagaaaggcattggccattggttgccatggtgaccagggaccacgttgctgcctgtgaatgctgagtgagcgagtaagggaggaggggcgattgagggttcacctctgccttggggaggctgatttctcacacactggctggccctctcattctcactcctccttgggccctgaggctgctggatccggtctgcctgcctccctgtgcagtccagccctgccttgctgcagccccagcccagatggcactcagcgctctcccctgagggagtccctgggcctagccatcccctcactattcccgacccaaagggtgacttttcatctgaacttaaggtgggagatatttttaacttttttccactttggaaaatgtcactgtgacaaaagccagcatactttccctgcacccatctgctcaccagatctcaggcaggaaagcccctctctgttgaagtcaggggctatcttttggtatacttgtgtgaaagtggctggttgggagcagagctaagtggcttcccattaacctgaggtctctttctttactctgggtcagacctgaggttggggaaggcgactgagccatgctcagaatgtctggtcctggcttgggcctgagtagggcagagagggcctttcctggctgatcagagcttaccagccccaccccaccatggtagccttagggtgctgagtgcctgatactgcctgacaagtgcctgacacgcagcctagttccttcctggcccctctctcactggctgggaaaccctagaccatgtcagataggacaacactgctgggttttacatccagatagtaataaacaccatttcatcatt

SEQ ID NO: 2532 - DNA, 1160 bp, Homo sapiens
  source 1..1160: mol_type = genomic DNA
acgtgggcgccggcagcgcgactctcggccctgggatttctgcggccgccagctcccgcgaccgcctctcctgcccctcgccggtacctcagcaaggtgcgttgccgccaggtgccactagaagcgccaggctggggccgcctctgagcgccccgcgggggccatggatggtgaaacagcagaggagcaggggggccctgtgcccccgccagttgcacccggcggacccggcttgggcggtgctccgggggggcggcgggagcccaagaagtacgcagtgaccgacgactaccagttgtccaagcaggtgctgggcctgggtgtgaacggcaaagtgctggagtgcttccatcggcgcactggacagaagtgtgccctgaagctcctgtatgacagccccaaggcccggcaggaggtagaccatcactggcaggcttctggcggcccccatattgtctgcatcctggatgtgtatgagaacatgcaccatggcaagcgctgtctcctcatcatcatggaatgcatggaaggtggtgagttgttcagcaggattcaggagcgtggcgaccaggctttcactgagagagaagctgcagagataatgcgggatattggcactgccatccagtttctgcacagccataacattgcccaccgagatgtcaagcctgaaaacctactctacacatctaaggagaaagacgcagtgcttaagctcaccgattttggctttgctaaggagaccacccaaaatgccctgcagacaccctgctatactccctattatgtggcccctgaggtcctgggtccagagaagtatgacaagtcatgtgacatgtggtccctgggtgtcatcatgtacatcctcctttgtggcttcccacccttctactccaacacgggccaggccatctccccggggatgaagaggaggattcgcctgggccagtacggcttccccaatcctgagtggtcagaagtctctgaggatgccaagcagctgatccgcctcctgttgaagacagaccccacagagaggctgaccatcactcagttcatgaaccacccctggatcaaccaatcgatggtagtgccacagaccccactccacacggcccgagtgctgcaggaggacaaagaccactgggacgaagtcaagg

SEQ ID NO: 2533 - DNA, 2988 bp, Homo sapiens
  source 1..2988: mol_type = genomic DNA
gggctgagcggtggggcccgggcggggtgcgcgggccccgtcgccgggtctggggccctgagcagtgaaaggaaatactttgacagatttccaagaactttccaggaaaacggggcggggccccgcgagctgaccaatcgcgacgctgaaggtggagccgagcggtcggggagggccaatagcagcgcgtggacccggggctgaagctacccagaggggcagggagtacttgctgcatttgatcctctacaactggtgttgctcccgttatgcggacagaagacagccccagggaacaaatgctaggaaatggcagggtgagaaaactgaggcatggagaggttacaatataacttagatctcccagctggcaagtaatggtttaagccaggagcctacacacttcctcctacttcctctatgggtgctggtgatctgccgactcctagacatccagctttaaggtcctcagtgaagcttctctgcccccaggcctgtccatgtcagagcaccatgggtgtccctttgaaagtatctcctacaggtgccactagaagcgccaggctggggccgcctctgagcgccccgcgggggccatggatggtgaaacagcagaggagcaggggggccctgtgcccccgccagttgcacccggcggacccggcttgggcggtgctccgggggggcggcgggagcccaagaagtacgcagtgaccgacgactaccagttgtccaagcaggtgctgggcctgggtgtgaacggcaaagtgctggagtgcttccatcggcgcactggacagaagtgtgccctgaagctcctgtatgacagccccaaggcccggcaggaggtagaccatcactggcaggcttctggcggcccccatattgtctgcatcctggatgtgtatgagaacatgcaccatggcaagcgctgtctcctcatcatcatggaatgcatggaaggtggtgagttgttcagcaggattcaggagcgtggcgaccaggctttcactgagagagaagctgcagagataatgcgggatattggcactgccatccagtttctgcacagccataacattgcccaccgagatgtcaagcctgaaaacctactctacacatctaaggagaaagacgcagtgcttaagctcaccgattttggctttgctaaggagaccacccaaaatgccctgcagacaccctgctatactccctattatgtggcccctgaggtcctgggtccagagaagtatgacaagtcatgtgacatgtggtccctgggtgtcatcatgtacatcctcctttgtggcttcccacccttctactccaacacgggccaggccatctccccggggatgaagaggaggattcgcctgggccagtacggcttccccaatcctgagtggtcagaagtctctgaggatgccaagcagctgatccgcctcctgttgaagacagaccccacagagaggctgaccatcactcagttcatgaaccacccctggatcaaccaatcgatggtagtgccacagaccccactccacacggcccgagtgctgcaggaggacaaagaccactgggacgaagtcaaggaggagatgaccagtgccttggccactatgcgggtagactacgaccaggtgaagatcaaggacctgaagacctctaacaaccggctcctcaacaagaggagaaaaaagcaggcaggcagctcctctgcctcacagggctgcaacaaccagtagctcatggggccttggaggagcctggcctctcagcctgcataacagactgaaatgtgctcaggccctggccaggagggcccagggtcattcttttaacaaaaggattattttgttgtgttttaatttgtcactcggaacttcaggatggaggaccctgaccctaaacctccttcagatctctggcccaggctcaagccctagagatgggcagggcctaggggctgggagctgcctgctgccatagcagcacctttagctaggttggcccgagtgaggcctctgtgctgtcctgccctggtgcatggccttagctttctaggccactgggagttgtggctgggcttcccatcttccacagagacatctccctgtgggatgggcagatgggcctggccttgagaaaggcattggccattggttgccatggtgaccagggaccacgttgctgcctgtgaatgctgagtgagcgagtaagggaggaggggcgattgagggttcacctctgccttggggaggctgatttctcacacactggctggccctctcattctcactcctccttgggccctgaggctgctggatccggtctgcctgcctccctgtgcagtccagccctgccttgctgcagccccagcccagatggcactcagcgctctcccctgagggagtccctgggcctagccatcccctcactattcccgacccaaagggtgacttttcatctgaacttaaggtgggagatatttttaacttttttccactttggaaaatgtcactgtgacaaaagccagcatactttccctgcacccatctgctcaccagatctcaggcaggaaagcccctctctgttgaagtcaggggctatcttttggtatacttgtgtgaaagtggctggttgggagcagagctaagtggcttcccattaacctgaggtctctttctttactctgggtcagacctgaggttggggaaggcgactgagccatgctcagaatgtctggtcctggcttgggcctgagtagggcagagagggcctttcctggctgatcagagcttaccagccccaccccaccatggtagccttagggtgctgagtgcctgatactgcctgacaagtgcctgacacgcagcctagttccttcctggcccctctctcactggctgggaaaccctagaccatgtcagataggacaacactgctgggttttacatccagatagtaataaacaccatttcatcattt

SEQ ID NO: 2534 - DNA, 535 bp, Homo sapiens
  source 1..535: mol_type = genomic DNA
ctcaggccgttcgtcccgcactcccagcttgccccgggctcgcagcccagcccagttcagaggctccaaggctggggtgtgttggaaaagtctgggcgggactcactcttcccctttcccccaggtgccactagaagcgccaggctggggccgcctctgagcgccccgcgggggccatggatggtgaaacagcagaggagcaggggggccctgtgcccccgccagttgcacccggcggacccggcttgggcggtgctccgggggggcggcgggagcccaagaagtacgcagtgaccgacgactaccagttgtccaagcaggtgctgggcctgggtgtgaacggcaaagtgctggagtgcttccatcggcgcactggacagaagtgtgccctgaagctcctgtatgacagccccaaggcccggcaggaggtagaccatcactggcaggcttctggcggcccccatattgtctgcatcctggatgtgtatgagaacatgcaccatggcaagcgctgtctcctcatcatcatggaatg

SEQ ID NO: 2535 - DNA, 2043 bp, Homo sapiens
  source 1..2043: mol_type = genomic DNA
gcggccgcgtggggcccagcacaaagacctgtccccaggggccgccgcctccgccgctgctgctgccgccagcctagagccgcccgccgaagcagagccggcgccggggtcctcatccccaccggtcccgaggggcggctgctgcccgtcgccacgaggcccaggggcccgagtgccgagccctttgctccctcggccgcgcggggacagggctgctgagcagcctccgcctctcccggctgtgggggccccactgagtatgtcggaggagagcgacatggacaaagccatcaaggaaacttccattttagaagaatacagtatcaattggactcagaagctgggagctggaattagtggtccagttagagtctgtgtaaagaaatctactcaagaacggtttgcgctgaaaattcttcttgatcgtccaaaagctagaaatgaggtacgtctgcacatgatgtgtgccacacacccaaacatagttcagattattgaagtgtttgctaacagtgtccagtttccccatgagtccagccctagggcccgactcttaattgtaatggagatgatggaagggggagagctatttcacagaatcagccagcaccggcactttacagagaagcaagccagccaagtaacaaagcagatagctttggctctgcggcactgtcacttgttaaacattgcgcacagagacctcaagcctgaaaatctgctttttaaggataactctttggatgccccagtgaagttgtgtgactttggatttgccaagattgaccaaggtgacttgatgacaccccagttcaccccttattatgtagcaccccaggtactggaggcgcaaagaaggcatcagaaggagaaatctggcatcatacctacctcaccgacgccctacacttacaacaagagctgtgacttgtggtccctaggggtgattatctatgtgatgctgtgcggataccctcctttttactccaaacaccacagccggactatcccaaaggatatgcgaagaaagatcatgacaggcagttttgagttcccagaggaagagtggagtcagatctcagagatggccaaagatgttgtgaggaagctcctgaaggtcaaaccggaggagagactcaccatcgagggagtgctggaccacccctggctcaattccaccgaggccctggataatgtgctgccttctgctcagctgatgatggacaaggcagtggttgcaggaatccagcaggctcacgcggaacagttggccaacatgagaatccaggatctgaaagtcagcctcaaacccctgcactcagtgaacaaccccattctgcggaagaggaagttacttggcaccaagccaaaggacagtgtctatatccacgaccatgagaatggagccgaggattccaatgttgccttggaaaaactccgagatgtgattgctcagtgtattctcccccaggctggtaaaggagagaatgaagatgagaaactgaatgaagtaatgcaggaggcttggaagtataaccgggaatgcaaactcctaagagatactctgcagagcttcagctggaatggtcgtggattcacagataaagtagatcgactaaaactggcagaaattgtgaagcaggtgatagaagagcaaaccacgtcccacgaatcccaataatgacagcttcagactttgtttttttaacaatttgaaaaattattctttaatgtataaagtaattttatgtaaattaataaatcataatttcatttccacattgattaaagctgctgtatagatttagggtgcaggacttaataatagtatagttattgtttgtttttaagaaaagctcagttctagagacatactattactttaggactgtgtagttgtatatttgtaagatgacagatgatgctgtcaagcaatattgttttatttgtaataaaatatacaaaaatcacttgccagcagtagaaaaaggaccgactataccgacctttctgattagtaaacagttgaatcaaggactctgg

SEQ ID NO: 2536 - DNA, 2037 bp, Homo sapiens
  source 1..2037: mol_type = genomic DNA
gcggccgcgtggggcccagcacaaagacctgtccccaggggccgccgcctccgccgctgctgctgccgccagcctagagccgcccgccgaagcagagccggcgccggggtcctcatccccaccggtcccgaggggcggctgctgcccgtcgccacgaggcccaggggcccgagtgccgagccctttgctccctcggccgcgcggggacagggctgctgagcagcctccgcctctcccggctgtgggggccccactgagtatgtcggaggagagcgacatggacaaagccatcaaggaaacttccattttagaagaatacagtatcaattggactcagaagctgggagctggaattagtggtccagttagagtctgtgtaaagaaatctactcaagaacggtttgcgctgaaaattcttcttgatcgtccaaaagctagaaatgaggtacgtctgcacatgatgtgtgccacacacccaaacatagttcagattattgaagtgtttgctaacagtgtccagtttccccatgagtccagccctagggcccgactcttaattgtaatggagatgatggaagggggagagctatttcacagaatcagccagcaccggcactttacagagaagcaagccagccaagtaacaaagcagatagctttggctctgcggcactgtcacttgttaaacattgcgcacagagacctcaagcctgaaaatctgctttttaaggataactctttggatgccccagtgaagttgtgtgactttggatttgccaagattgaccaaggtgacttgatgacaccccagttcaccccttattatgtagcaccccaggtactggaggcgcaaagaaggcatcagaaggagaaatctggcatcatacctacctcaccgacgccctacacttacaacaagagctgtgacttgtggtccctaggggtgattatctatgtgatgctgtgcggataccctcctttttactccaaacaccacagccggactatcccaaaggatatgcgaagaaagatcatgacaggcagttttgagttcccagaggaagagtggagtcagatctcagagatggccaaagatgttgtgaggaagctcctgaaggtcaaaccggaggagagactcaccatcgagggagtgctggaccacccctggctcaattccaccgaggccctggataatgtgctgccttctgctcagctgatgatggacaaggcagtggttgcaggaatccagcaggctcacgcggaacagttggccaacatgagaatccaggatctgaaagtcagcctcaaacccctgcactcagtgaacaaccccattctgcggaagaggaagttacttggcaccaagccaaaggacagtgtctatatccacgaccatgagaatggagccgaggattccaatgttgccttggaaaaactccgagatgtgattgctcagtgtattctcccccaggctggagagaatgaagatgagaaactgaatgaagtaatgcaggaggcttggaagtataaccgggaatgcaaactcctaagagatactctgcagagcttcagctggaatggtcgtggattcacagataaagtagatcgactaaaactggcagaaattgtgaagcaggtgatagaagagcaaaccacgtcccacgaatcccaataatgacagcttcagactttgtttttttaacaatttgaaaaattattctttaatgtataaagtaattttatgtaaattaataaatcataatttcatttccacattgattaaagctgctgtatagatttagggtgcaggacttaataatagtatagttattgtttgtttttaagaaaagctcagttctagagacatactattactttaggactgtgtagttgtatatttgtaagatgacagatgatgctgtcaagcaatattgttttatttgtaataaaatatacaaaaatcacttgccagcagtagaaaaaggaccgactataccgacctttctgattagtaaacagttgaatcaaggactctgg

SEQ ID NO: 2537 - DNA, 2527 bp, Homo sapiens
  source 1..2527: mol_type = genomic DNA
attagcgcagcgccatcgccgcggaaggcccaggggcctgtcctgtatgcggcgtgtcttagggaggcccaggcggacgcctgcaagtcgggtgcgcggttcgggggcggctcggaaaccccagcggaaggcagcaaggggcgcgtggggccgtggagtcacgaagctgggcggcaggaggggcggcctggagctcccgcggggcacagcgcgtgcgtgagggcggccggcggggctgcccggcgcgggtgtcccggcgatgtgtggcgctgaggcggcggcgggagcagcggcgccgagctctgcttcggcttcggcttcggcttcgcggcggtgcaggcggcggaggcggaggcgcaggctcttctttaggacctggcgagcccaggtctaagcggcggccccgcgaggcccttgcacggcgccccgggtcgaggccctccccgcctcgccctaccccaggagcctgcctccccagctggggatgaggctaggaggcggccgcgtggggcccagcacaaagacctgtccccaggggccgccgcctccgccgctgctgctgccgccagcctagagccgcccgccgaagcagagccggcgccggggtcctcatccccaccggtcccgaggggcggctgctgcccgtcgccacgaggcccaggggcccgagtgccgagccctttgctccctcggccgcgcggggacagggctgctgagcagcctccgcctctcccggctgtgggggccccactgagtatgtcggaggagagcgacatggacaaagccatcaaggaaacttccattttagaagaatacagtatcaattggactcagaagctgggagctggaattagtggtccagttagagtctgtgtaaagaaatctactcaagaacggtttgcgctgaaaattcttcttgatcgtccaaaagctagaaatgaggtacgtctgcacatgatgtgtgccacacacccaaacatagttcagattattgaagtgtttgctaacagtgtccagtttccccatgagtccagccctagggcccgactcttaattgtaatggagatgatggaagggggagagctatttcacagaatcagccagcaccggcactttacagagaagcaagccagccaagtaacaaagcaggcaactttggctctgcggcactgtcacttgttaaacattgcgcacagagacctcaagcctgaaaatctgctttttaaggataactctttggatgccccagtgaagttgtgtgactttggatttgccaagattgaccaaggtgacttgatgacaccccagttcaccccttattatgtagcaccccaggtactggaggcgcaaagaaggcatcagaaggagaaatctggcatcatacctacctcaccgacgccctacacttacaacaagagctgtgacttgtggtccctaggggtgattatctatgtgatgctgtgcggataccctcctttttactccaaacaccacagccggactatcccaaaggatatgcgaagaaagatcatgacaggcagttttgagttcccagaggaagagtggagtcagatctcagagatggccaaagatgttgtgaggaagctcctgaaggtcaaaccggaggagagactcaccatcgagggagtgctggaccacccctggctcaattccaccgaggccctggataatgtgctgccttctgctcagctgatgatggacaaggcagtggttgcaggaatccagcaggctcacgcggaacagttggccaacatgagaatccaggatctgaaagtcagcctcaaacccctgcactcagtgaacaaccccattctgcggaagaggaagttacttggcaccaagccaaaggacagtgtctatatccacgaccatgagaatggagccgaggattccaatgttgccttggaaaaactccgagatgtgattgctcagtgtattctcccccaggctggagagaatgaagatgagaaactgaatgaagtaatgcaggaggcttggaagtataaccgggaatgcaaactcctaagagatactctgcagagcttcagctggaatggtcgtggattcacagataaagtagatcgactaaaactggcagaaattgtgaagcaggtgatagaagagcaaaccacgtcccacgaatcccaataatgacagcttcagactttgtttttttaacaatttgaaaaattattctttaatgtataaagtaattttatgtaaattaataaatcataatttcatttccacattgattaaagctgctgtatagatttagggtgcaggacttaataatagtatagttattgtttgtttttaagaaaagctcagttctagagacatactattactttaggactgtgtagttgtatatttgtaagatgacagatgatgctgtcaagcaatattgttttatttgtaataaaatatacaaaaatcacttgccagcagtagaaaaaggaccgactataccgacctttctgattagtaaacagttgaatcaagg

SEQ ID NO: 2538 - DNA, 1825 bp, Homo sapiens
  source 1..1825: mol_type = genomic DNA
ccacgaggcccaggggcccgagtgccgagccctttgctccctcggccgcgcggggacagggctgctgagcagcctccgcctctcccggctgtgggggccccactgagtatgtcggaggagagcgacatggacaaagccatcaaggaaacttccattttagaagaatacagtatcaattggactcagaagctgggagctggaattagtggtccagttagagtctgtgtaaagaaatctactcaagaacggtttgcgctgaaaattcttcttgatcgtccaaaagctagaaatgaggtacgtctgcacatgatgtgtgccacacacccaaacatagttcagattattgaagtgtttgctaacagtgtccagtttccccatgagtccagccctagggcccgactcttaattgtaatggagatgatggaagggggagagctatttcacagaatcagccagcaccggcactttacagagaagcaagccagccaagtaacaaagcaggcaactttggctctgcggcactgtcacttgttaaacattgcgcacagagacctcaagcctgaaaatctgctttttaaggataactctttggatgccccagtgaagttgtgtgactttggatttgccaagattgaccaaggtgacttgatgacaccccagttcaccccttattatgtagcaccccaggtactggaggcgcaaagaaggcatcagaaggagaaatctggcatcatacctacctcaccgacgccctacacttacaacaagagctgtgacttgtggtccctaggggtgattatctatgtgatgctgtgcggataccctcctttttactccaaacaccacagccggactatcccaaaggatatgcgaagaaagatcatgacaggcagttttgagttcccagaggaagagtggagtcagatctcagagatggccaaagatgttgtgaggaagctcctgaaggtcaaaccggaggagagactcaccatcgagggagtgctggaccacccctggctcaattccaccgaggccctggataatgtgctgccttctgctcagctgatgatggacaaggcagtggttgcaggaatccagcaggctcacgcggaacagttggccaacatgagaatccaggatctgaaagtcagcctcaaacccctgcactcagtgaacaaccccattctgcggaagaggaagttacttggcaccaagccaaaggacagtgtctatatccacgaccatgagaatggagccgaggattccaatgttgccttggaaaaactccgagatgtgattgctcagtgtattctcccccaggctggtaaaggagagaatgaagatgagaaactgaatgaagtaatgcaggaggcttggaagtataaccgggaatgcaaactcctaagagatactctgcagagcttcagctggaatggtcgtggattcacagataaagtagatcgactaaaactggcagaaattgtgaagcaggtgatagaagagcaaaccacgtcccacgaatcccaataatgacagcttcagactttgtttttttaacaatttgaaaaattattctttaatgtataaagtaattttatgtaaattaataaatcataatttcatttccacattgattaaagctgctgtatagatttagggtgcaggacttaataatagtatagttattgtttgtttttaagaaaagctcagttctagagacatactattactttaggactgtgtagttgtatatttgtaagatgacagatgatgctgtcaagcaatattgttttatttgtaataaaatatacaaaaatcacttgcc

SEQ ID NO: 2539 - DNA, 3165 bp, Homo sapiens
  source 1..3165: mol_type = genomic DNA
atggccgctgccgcggctgtggaggcggcggcgcctatgggtgccctatggggcctcgtgcacgacttcgtcgtgggtcagcaagagggccccgctgaccaggtggctgcagatgtgaaatctggcaactatacagtgttacaagttgtggaagcccttgggtcctctctagagaatccagaaccccgaactcgggcacgagcaatccagcttttgtcacaggtgctactccactgtcacaccttgctcctggagaaggaagtggtacacctgatactgttctatgagaaccggctgaaggaccatcatcttgtgatcccatctgtcctgcagggtttgaaggcacttagcctgtgtgtggccctgcccccagggctggctgtttctgtgcttaaagccatcttccaggaagtgcatgtacagtccctgccacaggtggaccgacacacagtctacaatatcatcaccaattttatgcgaacccgggaagaagagctaaagagcctaggagctgacttcacctttggcttcatccaggtgatggatggggaaaaggatccccgtaatcttctggtggccttccgcatcgtccatgacctcatctccagggactatagcctgggaccctttgtggaggagttgtttgaagtgacatcctgttatttccctatcgattttacccctccacctaatgatccccatggtatccagagagaagacctcatcctgagtcttcgcgctgtgctggcttctacaccacgatttgctgagtttctgctgcccctgttgattgagaaagtggattctgaggttctgagtgccaagttggattctctacagactctgaatgcttgctgtgctgtgtatggacagaaggaactgaaggacttcctccccagcctttgggcttctatccgcagagagagcagccagcggcggacaatccttgaaatgctcctgggtttcttgaagctgcagcagaaatggagctatgaagacaaagatcaaaggcctctgaatggcttcaaggaccagctgtgctcactggtattcatggctctaacagaccccagcacccagcttcagcttgttggcatccgtacactgacagtcttgggtgcccagccagatctcctatcttatgaggacttggagctggcagtgggtcacctgtacagactgagcttcctgaaggaggattcccagagttgcagggtggcagcactggaagcatcaggaaccctggctgctctctaccctgtggccttcagcagccacctcgtacccaagctcgctgaggagctgcgtgtaggggagtcaaatttgactaacggagatgagcccacccaatgctcccggcatctgtgctgtctgcaagccttgtcagctgtatcaacacatcccagcatcgtcaaggagacactgcctctgctgctgcagcatctctggcaagtgaacagagggaatatggttgcacaatccagtgacgttattgctgtctgtcagagcctcagacagatggcagaaaaatgtcagcaggaccctgagagttgctggtatttccaccagacagctataccttgcctgcttgccttggctgtgcaggcctctatgccagagaaggagccctcagttctgagaaaagtactattggaggatgaggtgttggctgccatggtgtctgtcattggcactgctacaacccacctgagccctgagttagctgcccagagtgtgacacacattgtgcccctcttcttggatggcaacgtgtcctttctgcctgaaaacagcttcccgagcagattccagccattccaggatggctcctcagggcagaggcggctgattgcactgcttatggcctttgtctgctccctgcctcgaaatgtggaaatccctcagctgaaccaactcatgcgggagcttttggaactgagctgctgccacagctgccccttttcttccaccgctgctgccaagtgctttgcaggactcctcaacaagcaccctgcagggcagcagctggatgaattcctacagctagctgtggacaaagtggaggctggcctgggctctgggccctgtcgtagtcaggccttcactcttcttctctgggtaacaaaggccctagtgctcagataccatcctctcagctcctgccttacagcccggctcatgggcctcctgagtgacccagaattaggtccagcagcagctgatggcttctctctgctcatgtctgactgcactgatgtgctgactcgtgctggccatgccgaagtgcggatcatgttccgccagcggttcttcacagataatgtgcctgctttggtccagggcttccatgctgctccccaagatgtgaagccaaactacttgaagggtctttctcatgtacttaacaggctgcccaagcctgtactcttgccagagctgcccacgcttctttccttgctgctggaggccctgtcctgccctgactgtgtggtgcagctctccaccctcagctgccttcagcctcttctactggaagcaccccaagtcatgagtcttcacgtggacaccctcgtcaccaagtttctgaacctcagctctagcccttccatggctgtccggatcgccgcactgcagtgcatgcatgctctcactcgcctgcccacccctgtgctgctgccgtacaaaccacaggtgattcgggccttagccaaacccctggatgacaagaagagactggtgcgcaaggaagcagtgtcagccagaggggagtggtttctgttggggagccctggcagctgagccctcagtcctggcctagactgttctgacaatctaacctgggattactaactgttgagccatcttccccaaagcagggaaaccactggtctctgactgcctttcccacagacacagcacaaatgctaggcctctgttgcatggctgtacaaagaacataagagtccatatttctagtggatttgtaaaataagtgtgtgtgagacacttgcgtttgaagaaagatctagggtcctgggtctcttgcatttatatgtcagaaaaggggcgatatgctgctgaggggtgagtgcatatgagtgtggccctgaggaccagggctggcagatgttgtctacctgctgaagaataaagatttcttttggt

SEQ ID NO: 2540 - DNA, 3465 bp, Homo sapiens
  source 1..3465: mol_type = genomic DNA
agttcgcgttatggccgctgccgcggctgtggaggcggcggcgcctatgggtgccctatggggcctcgtgcacgacttcgtcgtgggtcagcaagagggccccgctgaccaggtggctgcagatgtgaaatctggcaactatacagtgttacaagttgtggaagcccttgggtcctctctagagaatccagaaccccgaactcgggcacgagcaatccagcttttgtcacaggtgctactccactgtcacaccttgctcctggagaaggaagtggtacacctgatactgttctatgagaaccggctgaaggaccatcatcttgtgatcccatctgtcctgcagggtttgaaggcacttagcctgtgtgtggccctgcccccagggctggctgtttctgtgcttaaagccatcttccaggaagtgcatgtacagtccctgccacaggtggaccgacacacagtctacaatatcatcaccaattttatgcgaacccgggaagaagagctaaagagcctaggagctgacttcacctttggcttcatccaggtgatggatggggaaaaggatccccgtaatcttctggtggccttccgcatcgtccatgacctcatctccagggactatagcctgggaccctttgtggaggagttgtttgaagtgacatcctgttatttccctatcgattttacccctccacctaatgatccccatggtatccagagagaagacctcatcctgagtcttcgcgctgtgctggcttctacaccacgatttgctgagtttctgctgcccctgttgattgagaaagtggattctgaggttctgagtgccaagttggattctctacagactctgaatgcttgctgtgctgtgtatggacagaaggaactgaaggacttcctccccagcctttgggcttctatccgcagagaggtgttccagacggcaagtgagcgggtggaggcagagggcctggcggccctccactccctgactgcgtgtttgtctcgctctgtgctgagggctgatgctgaggacctccttgactccttccttagcaacattctacaggactgcaggcaccacctgtgtgaaccggacatgaaactggtgtggcctagtgccaagctgttgcaggcagctgcaggtgcatctgcccgggcctgtgactctgtcaccagcaatgtactgcctttactgctggaacagttccacaagcacagtcagagcagccagcggcggacaatccttgaaatgctcctgggtttcttgaagctgcagcagaaatggagctatgaagacaaagatcaaaggcctctgaatggcttcaaggaccagctgtgctcactggtattcatggctctaacagaccccagcacccagcttcagcttgttggcatccgtacactgacagtcttgggtgcccagccagatctcctatcttatgaggacttggagctggcagtgggtcacctgtacagactgagcttcctgaaggaggattcccagagttgcagggtggcagcactggaagcatcaggaaccctggctgctctctaccctgtggccttcagcagccacctcgtacccaagctcgctgaggagctgcgtgtaggggagtcaaatttgactaacggagatgagcccacccaatgctcccggcatctgtgctgtctgcaagccttgtcagctgtatcaacacatcccagcatcgtcaaggagacactgcctctgctgctgcagcatctctggcaagtgaacagagggaatatggttgcacaatccagtgacgttattgctgtctgtcagagcctcagacagatggcagaaaaatgtcagcaggaccctgagagttgctggtatttccaccagacagctataccttgcctgcttgccttggctgtgcaggcctctatgccagagaaggagccctcagttctgagaaaagtactattggaggatgaggtgttggctgccatggtgtctgtcattggcactgctacaacccacctgagccctgagttagctgcccagagtgtgacacacattgtgcccctcttcttggatggcaacgtgtcctttctgcctgaaaacagcttcccgagcagattccagccattccaggatggctcctcagggcagaggcggctgattgcactgcttatggcctttgtctgctccctgcctcgaaatgtggaaatccctcagctgaaccaactcatgcgggagcttttggaactgagctgcacagctgccccttttcttccaccgctgctgccaagtgctttgcaggactcctcaacaagcaccctgcagggcagcagctggatgaattcctacagctagctgtggacaaagtggaggctggcctgggctctgggccctgtcgtagtcaggccttcactcttcttctctgggtaacaaaggccctagtgctcagataccatcctctcagctcctgccttacagcccggctcatgggcctcctgagtgacccagaattaggtccagcagcagctgatggcttctctctgctcatgtctgactgcactgatgtgctgactcgtgctggccatgccgaagtgcggatcatgttccgccagcggttcttcacagataatgtgcctgctttggtccagggcttccatgctgctccccaagatgtgaagccaaactacttgaagggtctttctcatgtacttaacaggctgcccaagcctgtactcttgccagagctgcccacgcttctttccttgctgctggaggccctgtcctgccctgactgtgtggtgcagctctccaccctcagctgccttcagcctcttctactggaagcaccccaagtcatgagtcttcacgtggacaccctcgtcaccaagtttctgaacctcagctctagcccttccatggctgtccggatcgccgcactgcagtgcatgcatgctctcactcgcctgcccacccctgtgctgctgccgtacaaaccacaggtgattcgggccttagccaaacccctggatgacaagaagagactggtgcgcaaggaagcagtgtcagccagaggggagtggtttctgttggggagccctggcagctgagccctcagtcctggcctagactgttctgacaatctaacctgggattactaactgttgagccatcttccccaaagcagggaaaccactggtctctgactgcctttcccacagacacagcacaaatgctaggcctctgttgcatggctgtacaaagaacataagagtccatatttctagtggatttgtaaaataagtgtgtgtgagacacttgcgtttgaagaaagatctagggtcctgggtctcttgcatttatatgtcagaaaaggggcgatatgctgctgaggggtgagtgcatatgagtgtggccctgaggaccagggctggcagatgttgtctacctgctgaagaataaagatttcttttggt

SEQ ID NO: 2541 - DNA, 3348 bp, Homo sapiens
  source 1..3348: mol_type = genomic DNA
agttcgcgttatggccgctgccgcggctgtggaggcggcggcgcctatgggtgccctatggggcctcgtgcacgacttcgtcgtgggtcagcaagagggccccgctgaccaggtggctgcagatgtgaaatctggcaactatacagtgttacaagttgtggaagcccttgggtcctctctagagaatccagaaccccgaactcgggcacgagcaatccagcttttgtcacaggtgctactccactgtcacaccttgctcctggagaaggaagtggtacacctgatactgttctatgagaaccggctgaaggaccatcatcttgtgatcccatctgtcctgcagggtttgaaggcacttagcctgtgtgtggccctgcccccagggctggctgtttctgtgcttaaagccatcttccaggaagtgcatgtacagtccctgccacaggtggaccgacacacagtctacaatatcatcaccaattttatgcgaacccgggaagaagagctaaagagcctaggagctgacttcacctttggcttcatccaggtgatggatggggaaaaggatccccgtaatcttctggtggccttccgcatcgtccatgacctcatctccagggactatagcctgggaccctttgtggaggagttgtttgaagtgacatcctgttatttccctatcgattttacccctccacctaatgatccccatggtatccagagagaagacctcatcctgagtcttcgcgctgtgctggcttctacaccacgatttgctgagtttctgctgcccctgttgattgagaaagtggattctgaggttctgagtgccaagttggattctctacagactctgaatgcttgctgtgctgtgtatggacagaaggaactgaaggacttcctccccagcctttgggcttctatccgcagagaggtgttccagacggcaagtgagcgggtggaggcagagggcctggcggccctccactccctgactgcgtgtttgtctcgctctgtgctgagggctgatgctgaggacctccttgactccttccttagcaacattctacaggactgcaggcaccacctgtgtgaaccggacatgaaactggtgtggcctagtgccaagctgttgcaggcagctgcaggtgcatctgcccgggcctgtgactctgtcaccagcaatgtactgcctttactgctggaacagttccacaagcacagtcagagcagccagcggcggacaatccttgaaatgctcctgggtttcttgaagctgcagcagaaatggagctatgaagacaaagatcaaaggcctctgaatggcttcaaggaccagctgtgctcactggtattcatggctctaacagaccccagcacccagcttcagcttgttggcatccgtacactgacagtcttgggtgcccagccagatctcctatcttatgaggacttggagctggcagtgggtcacctgtacagactgagcttcctgaaggaggattcccagagttgcagggtggcagcactggaagcatcaggaaccctggctgctctctaccctgtggccttcagcagccacctcgtacccaagctcgctgaggagctgcgtgtaggggagtcaaatttgactaacggagatgagcccacccaatgctcccggcatctgtgctgtctgcaagccttgtcagctgtatcaacacatcccagcatcgtcaaggagacactgcctctgctgctgcagcatctctggcaagtgaacagagggaatatggttgcacaatccagtgacgttattgctgtctgtcagagcctcagacagatggcagaaaaatgtcagcaggaccctgagagttgctggtatttccaccagacagctataccttgcctgcttgccttggctgtgcaggcctctatgccagagaaggagccctcagttctgagaaaagtactattggaggatgaggtgttggctgccatggtgtctgtcattggcactgctacaacccacctgagccctgagttagctgcccagagtgtgacacacattgtgcccctcttcttggatggcaacgtgtcctttctgcctgaaaacagcttcccgagcagattccagccattccaggtaacagatggctcctcagggcagaggcggctgattgcactgcttatggcctttgtctgctccctgcctcgaaatggcagcagctggatgaattcctacagctagctgtggacaaagtggaggctggcctgggctctgggccctgtcgtagtcaggccttcactcttcttctctgggtaacaaaggccctagtgctcagataccatcctctcagctcctgccttacagcccggctcatgggcctcctgagtgacccagaattaggtccagcagcagctgatggcttctctctgctcatgtctgactgcactgatgtgctgactcgtgctggccatgccgaagtgcggatcatgttccgccagcggttcttcacagataatgtgcctgctttggtccagggcttccatgctgctccccaagatgtgaagccaaactacttgaagggtctttctcatgtacttaacaggctgcccaagcctgtactcttgccagagctgcccacgcttctttccttgctgctggaggccctgtcctgccctgactgtgtggtgcagctctccaccctcagctgccttcagcctcttctactggaagcaccccaagtcatgagtcttcacgtggacaccctcgtcaccaagtttctgaacctcagctctagcccttccatggctgtccggatcgccgcactgcagtgcatgcatgctctcactcgcctgcccacccctgtgctgctgccgtacaaaccacaggtgattcgggccttagccaaacccctggatgacaagaagagactggtgcgcaaggaagcagtgtcagccagaggggagtggtttctgttggggagccctggcagctgagccctcagtcctggcctagactgttctgacaatctaacctgggattactaactgttgagccatcttccccaaagcagggaaaccactggtctctgactgcctttcccacagacacagcacaaatgctaggcctctgttgcatggctgtacaaagaacataagagtccatatttctagtggatttgtaaaataagtgtgtgtgagacacttgcgtttgaagaaagatctagggtcctgggtctcttgcatttatatgtcagaaaaggggcgatatgctgctgaggggtgagtgcatatgagtgtggccctgaggaccagggctggcagatgttgtctacctgctgaagaataaagatttcttttggt

SEQ ID NO: 2542 - DNA, 3348 bp, Homo sapiens; identical to SEQ ID NO: 2541
  source 1..3348: mol_type = genomic DNA

SEQ ID NO: 2543 - DNA, 3174 bp, Homo sapiens
  source 1..3174: mol_type = genomic DNA
acggtctctagttcgcgttatggccgctgccgcggctgtggaggcggcggcgcctatgggtgccctatggggcctcgtgcacgacttcgtcgtgggtcagcaagagggccccgctgaccaggtggctgcagatgtgaaatctggcaactatacagtgttacaagttgtggaagcccttgggtcctctctagagaatccagaaccccgaactcgggcacgagcaatccagcttttgtcacaggtgctactccactgtcacaccttgctcctggagaaggaagtggtacacctgatactgttctatgagaaccggctgaaggaccatcatcttgtgatcccatctgtcctgcagggtttgaaggcacttagcctgtgtgtggccctgcccccagggctggctgtttctgtgcttaaagccatcttccaggaagtgcatgtacagtccctgccacaggtggaccgacacacagtctacaatatcatcaccaattttatgcgaacccgggaagaaggaccctttgtggaggagttgtttgaagtgacatcctgttatttccctatcgattttacccctccacctaatgatccccatggtatccagagagaagacctcatcctgagtcttcgcgctgtgctggcttctacaccacgatttgctgagtttctgctgcccctgttgattgagaaagtggattctgaggttctgagtgccaagttggattctctacagactctgaatgcttgctgtgctgtgtatggacagaaggaactgaaggacttcctccccagcctttgggcttctatccgcagagaggtgttccagacggcaagtgagcgggtggaggcagagggcctggcggccctccactccctgactgcgtgtttgtctcgctctgtgctgagggctgatgctgaggacctccttgactccttccttagcaacattctacaggactgcaggcaccacctgtgtgaaccggacatgaaactggtgtggcctagtgccaagctgttgcaggcagctgcaggtgcatctgcccgggcctgtgactctgtcaccagcaatgtactgcctttactgctggaacagttccacaagcacagtcagagcagccagcggcggacaatccttgaaatgctcctgggtttcttgaagctgcagcagaaatggagctatgaagacaaagatcaaaggcctctgaatggcttcaaggaccagctgtgctcactggtattcatggctctaacagaccccagcacccagcttcagcttgttggcatccgtacactgacagtcttgggtgcccagccagatctcctatcttatgaggacttggagctggcagtgggtcacctgtacagactgagcttcctgaaggaggattcccagagttgcagggtggcagcactggaagcatcaggaaccctggctgctctctaccctgtggccttcagcagccacctcgtacccaagctcgctgaggagctgcgtgtaggggagtcaaatttgactaacggagatgagcccacccaatgctcccggcatctgtgctgtctgcaagccttgtcagctgtatcaacacatcccagcatcgtcaaggagacactgcctctgctgctgcagcatctctggcaagtgaacagagggaatatggttgcacaatccagtgacgttattgctgtctgtcagagcctcagacagatggcagaaaaatgtcagcaggaccctgagagttgctggtatttccaccagacagctataccttgcctgcttgccttggctgtgcaggcctctatgccagagaaggagccctcagttctgagaaaagtactattggaggatgaggtgttggctgccatggtgtctgtcattggcactgctacaacccacctgagccctgagttagctgcccagagtgtgacacacattgtgcccctcttcttggatggcaacgtgtcctttctgcctgaaaacagcttcccgagcagattccagccattccaggatggctcctcagggcagaggcggctgattgcactgcttatggcctttgtctgctccctgcctcgaaatgtggaaatccctcagctgaaccaactcatgcgggagcttttggaactgagctgctgccacagctgccccttttcttccaccgctgctgccaagtgctttgcaggactcctcaacaagcaccctgcagggcagcagctggatgaattcctacagctagctgtggacaaagtggaggctggcctgggctctgggccctgtcgtagtcaggccttcactcttcttctctgggtaacaaaggccctagtgctcagataccatcctctcagctcctgccttacagcccggctcatgggcctcctgagtgacccagaattaggtccagcagcagctgatggcttctctctgctcatgtctgactgcactgatgtgctgactcgtgctggccatgccgaagtgcggatcatgttccgccagcggttcttcacagataatgtgcctgctttggtccagggcttccatgctgctccccaagatgtgaagccaaactacttgaagggtctttctcatgtacttaacaggctgcccaagcctgtactcttgccagagctgcccacgcttctttccttgctgctggaggccctgtcctgccctgactgtgtggtgcagctctccaccctcagctgccttcagcctcttctactggaagcaccccaagtcatgagtcttcacgtggacaccctcgtcaccaagtttctgaacctcagctctagcccttccatggctgtccggatcgccgcactgcagtgcatgcatgctctcactcgcctgcccacccctgtgctgctgccgtacaaaccacaggtgattcgggccttagccaaacccctggatgacaagaagagactggtgcgcaaggaagcagtgtcagccagaggggagtggtttctgttggggagccctggcagctgagccctcagtcctggcctagactgttctgacaatctaacctgggattactaactgttgagccatcttccccaaagcagggaaaccactggtctctgactgcctttcccacagacacagcacaaatgctaggcctctgttgcatggctgtacaaagaacataagagtccatatttctagtggatttgtaaaat

SEQ ID NO: 2544 - DNA, 3530 bp, Homo sapiens
  source 1..3530: mol_type = genomic DNA
atgtgaccgacagcaccgccccctagggctgggcctgattttctcattggcttcccccgtgttcgcgttatggccgctgccgcggctgtggaggcggcggcgcctatgggtgccctatggggcctcgtgcacgacttcgtcgtgggtcagcaagagggccccgctgaccaggtggctgcagatgtgaaatctggcaactatacagtgttacaagttgtggaagcccttgggtcctctctagagaatccagaaccccgaactcgggcacgagcaatccagcttttgtcacaggtgctactccactgtcacaccttgctcctggagaaggaagtggtacacctgatactgttctatgagaaccggctgaaggaccatcatcttgtgatcccatctgtcctgcagggtttgaaggcacttagcctgtgtgtggccctgcccccagggctggctgtttctgtgcttaaagccatcttccaggaagtgcatgtacagtccctgccacaggtggaccgacacacagtctacaatatcatcaccaattttatgcgaacccgggaagaagagctaaagagcctaggagctgacttcacctttggcttcatccaggtgatggatggggaaaaggatccccgtaatcttctggtggccttccgcatcgtccatgacctcatctccagggactatagcctgggaccctttgtggaggagttgtttgaagtgacatcctgttatttccctatcgattttacccctccacctaatgatccccatggtatccagagagaagacctcatcctgagtcttcgcgctgtgctggcttctacaccacgatttgctgagtttctgctgcccctgttgattgagaaagtggattctgaggttctgagtgccaagttggattctctacagactctgaatgcttgctgtgctgtgtatggacagaaggaactgaaggacttcctccccagcctttgggcttctatccgcagagaggtgttccagacggcaagtgagcgggtggaggcagagggcctggcggccctccactccctgactgcgtgtttgtctcgctctgtgctgagggctgatgctgaggacctccttgactccttccttagcaacattctacaggactgcaggcaccacctgtgtgaaccggacatgaaactggtgtggcctagtgccaagctgttgcaggcagctgcaggtgcatctgcccgggcctgtgactctgtcaccagcaatgtactgcctttactgctggaacagttccacaagcacagtcagagcagccagcggcggacaatccttgaaatgctcctgggtttcttgaagctgcagcagaaatggagctatgaagacaaagatcaaaggcctctgaatggcttcaaggaccagctgtgctcactggtattcatggctctaacagaccccagcacccagcttcagcttgttggcatccgtacactgacagtcttgggtgcccagccagatctcctatcttatgaggacttggagctggcagtgggtcacctgtacagactgagcttcctgaaggaggattcccagagttgcagggtggcagcactggaagcatcaggaaccctggctgctctctaccctgtggccttcagcagccacctcgtacccaagctcgctgaggagctgcgtgtaggggagtcaaatttgactaacggagatgagcccacccaatgctcccggcatctgtgctgtctgcaagccttgtcagctgtatcaacacatcccagcatcgtcaaggagacactgcctctgctgctgcagcatctctggcaagtgaacagagggaatatggttgcacaatccagtgacgttattgctgtctgtcagagcctcagacagatggcagaaaaatgtcagcaggaccctgagagttgctggtatttccaccagacagctataccttgcctgcttgccttggctgtgcaggcctctatgccagagaaggagccctcagttctgagaaaagtactattggaggatgaggtgttggctgccatggtgtctgtcattggcactgctacaacccacctgagccctgagttagctgcccagagtgtgacacacattgtgcccctcttcttggatggcaacgtgtcctttctgcctgaaaacagcttcccgagcagattccagccattccaggatggctcctcagggcagaggcggctgattgcactgcttatggcctttgtctgctccctgcctcgaaatgtggaaatccctcagctgaaccaactcatgcgggagcttttggaactgagctgctgccacagctgccccttttcttccaccgctgctgccaagtgctttgcaggactcctcaacaagcaccctgcagggcagcagctggatgaattcctacagctagctgtggacaaagtggaggctggcctgggctctgggccctgtcgtagtcaggccttcactcttcttctctgggtaacaaaggccctagtgctcagataccatcctctcagctcctgccttacagcccggctcatgggcctcctgagtgacccagaattaggtccagcagcagctgatggcttctctctgctcatgtctgactgcactgatgtgctgactcgtgctggccatgccgaagtgcggatcatgttccgccagcggttcttcacagataatgtgcctgctttggtccagggcttccatgctgctccccaagatgtgaagccaaactacttgaagggtctttctcatgtacttaacaggctgcccaagcctgtactcttgccagagctgcccacgcttctttccttgctgctggaggccctgtcctgccctgactgtgtggtgcagctctccaccctcagctgccttcagcctcttctactggaagcaccccaagtcatgagtcttcacgtggacaccctcgtcaccaagtttctgaacctcagctctagcccttccatggctgtccggatcgccgcactgcagtgcatgcatgctctcactcgcctgcccacccctgtgctgctgccgtacaaaccacaggtgattcgggccttagccaaacccctggatgacaagaagagactggtgcgcaaggaagcagtgtcagccagaggggagtggtttctgttggggagccctggcagctgagccctcagtcctggcctagactgttctgacaatctaacctgggattactaactgttgagccatcttccccaaagcagggaaaccactggtctctgactgcctttcccacagacacagcacaaatgctaggcctctgttgcatggctgtacaaagaacataagagtccatatttctagtggatttgtaaaataagtgtgtgtgagacacttgcgtttgaagaaagatctagggtcctgggtctcttgcatttatatgtcagaaaaggggcgatatgctgctgaggggtgagtgcatatgagtgtggccctgaggaccagggctggcagatgttgtctacctgctgaagaataaagatttcttttggtaa

SEQ ID NO: 2545 - DNA, 3396 bp, Homo sapiens
  source 1..3396: mol_type = genomic DNA
atggccgctgccgcggctgtggaggcggcggcgcctatgggtgccctatggggcctcgtgcacgacttcgtcgtgggtcagcaagagggccccgctgaccaggtggctgcgtcctctctagagaatccagaaccccgaactcgggcacgagcaatccagcttttgtcacaggtgctactccactgtcacaccttgctcctggagaaggaagtggtacacctgatactgttctatgagaaccggctgaaggaccatcatcttgtgatcccatctgtcctgcagggtttgaaggcacttagcctgtgtgtggccctgcccccagggctggctgtttctgtgcttaaagccatcttccaggaagtgcatgtacaggtggaccgacacacagtctacaatatcatcaccaattttatgcgaacccgggaagaagagctaaagagcctaggagctgacttcacctttggcttcatccaggtgatggatggggaaaaggatccccgtaatcttctggtggccttccgcatcgtccatgacctcatctccagggactatagcctgggaccctttgtggaggagttgtttgaagtgacatcctgttatttccctatcgattttacccctccacctaatgatccccatggtatccagagagaagacctcatcctgagtcttcgcgctgtgctggcttctacaccacgatttgctgagtttctgctgcccctgttgattgagaaagtggattctgaggttctgagtgccaagttggattctctacagactctgaatgcttgctgtgctgtgtatggacagaaggaactgaaggacttcctccccagcctttgggcttctatccgcagagaggtgttccagacggcaagtgagcgggtggaggcagagggcctggcggccctccactccctgactgcgtgtttgtctcgctctgtgctgagggctgatgctgaggacctccttgactccttccttagcaacattctacaggactgcaggcaccacctgtgtgaaccggacatgaaactggtgtggcctagtgccaagctgttgcaggcagctgcaggtgcatctgcccgggcctgtgactctgtcaccagcaatgtactgcctttactgctggaacagttccacaagcacagtcagagcagccagcggcggacaatccttgaaatgctcctgggtttcttgaagctgcagcagaaatggagctatgaagacaaagatcaaaggcctctgaatggcttcaaggaccagctgtgctcactggtattcatggctctaacagaccccagcacccagcttcagcttgttggcatccgtacactgacagtcttgggtgcccagccagatctcctatcttatgaggacttggagctggcagtgggtcacctgtacagactgagcttcctgaaggaggattcccagagttgcagggtggcagcactggaagcatcaggaaccctggctgctctctaccctgtggccttcagcagccacctcgtacccaagctcgctgaggagctgcgtgtaggggagtcaaatttgactaacggagatgagcccacccaatgctcccggcatctgtgctgtctgcaagccttgtcagctgtatcaacacatcccagcatcgtcaaggagacactgcctctgctgctgcagcatctctggcaagtgaacagagggaatatggttgcacaatccagtgacgttattgctgtctgtcagagcctcagacagatggcagaaaaatgtcagcaggaccctgagagttgctggtatttccaccagacagctataccttgcctgcttgccttggctgtgcaggcctctatgccagagaaggagccctcagttctgagaaaagtactattggaggatgaggtgttggctgccatggtgtctgtcattggcactgctacaacccacctgagccctgagttagctgcccagagtgtgacacacattgtgcccctcttcttggatggcaacgtgtcctttctgcctgaaaacagcttcccgagcagattccagccattccaggatggctcctcagggcagaggcggctgattgcactgcttatggcctttgtctgctccctgcctcgaaatgtggaaatccctcagctgaaccaactcatgcgggagcttttggaactgagctgctgccacagctgccccttttcttccaccgctgctgccaagtgctttgcaggactcctcaacaagcaccctgcagggcagcagctggatgaattcctacagctagctgtggacaaagtggaggctggcctgggctctgggccctgtcgtagtcaggccttcactcttcttctctgggtaacaaaggccctagtgctcagataccatcctctcagctcctgccttacagcccggctcatgggcctcctgagtgacccagaattaggtccagcagcagctgatggcttctctctgctcatgtctgactgcactgatgtgctgactcgtgctggccatgccgaagtgcggatcatgttccgccagcggttcttcacagataatgtgcctgctttggtccagggcttccatgctgctccccaagatgtgaagccaaactacttgaagggtctttctcatgtacttaacaggctgcccaagcctgtactcttgccagagctgcccacgcttctttccttgctgctggaggccctgtcctgccctgactgtgtggtgcagctctccaccctcagctgccttcagcctcttctactggaagcaccccaagtcatgagtcttcacgtggacaccctcgtcaccaagtttctgaacctcagctctagcccttccatggctgtccggatcgccgcactgcagtgcatgcatgctctcactcgcctgcccacccctgtgctgctgccgtacaaaccacaggtgattcgggccttagccaaacccctggatgacaagaagagactggtgcgcaaggaagcagtgtcagccagaggggagtggtttctgttggggagccctggcagctgagccctcagtcctggcctagactgttctgacaatctaacctgggattactaactgttgagccatcttccccaaagcagggaaaccactggtctctgactgcctttcccacagacacagcacaaatgctaggcctctgttgcatggctgtacaaagaacataagagtccatatttctagtggatttgtaaaataagtgtgtgtgagacacttgcgtttgaagaaagatctagggtcctgggtctcttgcatttatatgtcagaaaaggggcgatatgctgctgaggggtgagtgcatatgagtgtggccctgaggaccagggctggcagatgttgtctacctgctgaagaataaagatttcttttggt

SEQ ID NO: 2546 - DNA, 3797 bp, Homo sapiens
  source 1..3797: mol_type = genomic DNA
gattttctcattggcttcccccgtggtgcgtaccgcccctctccccacccagccaggtgcccgccccgcagcccgtctcccggggagccgggctgggaattattcgccctcaatcgcctccggctgcgtgcccagcagccgccttccctctcggtgccaccgccccatttcaggccccgcccctccctggaactgcctaggcagaagccggcaggcacgtgaccccggcgccccgcccccttgcgcttccccggagattggctcgggaggcgcatgcgcggagagcccgtctcgagccaccgcccatatcccctcccacggtctctagttcgcgttatggccgctgccgcggctgtggaggcggcggcgcctatgggtgccctatggggcctcgtgcacgacttcgtcgtgggtcagcaagagggccccgctgaccaggtggctgcagatgtgaaatctggcaactatacagtgttacaagttgtggaagcccttgggtcctctctagagaatccagaaccccgaactcgggcacgagcaatccagcttttgtcacaggtgctactccactgtcacaccttgctcctggagaaggaagtggtacacctgatactgttctatgagaaccggctgaaggaccatcatcttgtgatcccatctgtcctgcagggtttgaaggcacttagcctgtgtgtggccctgcccccagggctggctgtttctgtgcttaaagccatcttccaggaagtgcatgtacagtccctgccacaggtggaccgacacacagtctacaatatcatcaccaattttatgcgaacccgggaagaagagctaaagagcctaggagctgacttcacctttggcttcatccaggtgatggatggggaaaaggatccccgtaatcttctggtggccttccgcatcgtccatgacctcatctccagggactatagcctgggaccctttgtggaggagttgtttgaagtgacatcctgttatttccctatcgattttacccctccacctaatgatccccatggtatccagagagaagacctcatcctgagtcttcgcgctgtgctggcttctacaccacgatttgctgagtttctgctgcccctgttgattgagaaagtggattctgaggttctgagtgccaagttggattctctacagactctgaatgcttgctgtgctgtgtatggacagaaggaactgaaggacttcctccccagcctttgggcttctatccgcagagaggtgttccagacggcaagtgagcgggtggaggcagagggcctggcggccctccactccctgactgcgtgtttgtctcgctctgtgctgagggctgatgctgaggacctccttgactccttccttagcaacattctacaggactgcaggcaccacctgtgtgaaccggacatgaaactggtgtggcctagtgccaagctgttgcaggcagctgcaggtgcatctgcccgggcctgtgactctgtcaccagcaatgtactgcctttactgctggaacagttccacaagcacagtcagagcagccagcggcggacaatccttgaaatgctcctgggtttcttgaagctgcagcagaaatggagctatgaagacaaagatcaaaggcctctgaatggcttcaaggaccagctgtgctcactggtattcatggctctaacagaccccagcacccagcttcagcttgttggcatccgtacactgacagtcttgggtgcccagccagatctcctatcttatgaggacttggagctggcagtgggtcacctgtacagactgagcttcctgaaggaggattcccagagttgcagggtggcagcactggaagcatcaggaaccctggctgctctctaccctgtggccttcagcagccacctcgtacccaagctcgctgaggagctgcgtgtaggggagtcaaatttgactaacggagatgagcccacccaatgctcccggcatctgtgctgtctgcaagccttgtcagctgtatcaacacatcccagcatcgtcaaggagacactgcctctgctgctgcagcatctctggcaagtgaacagagggaatatggttgcacaatccagtgacgttattgctgtctgtcagagcctcagacagatggcagaaaaatgtcagcaggaccctgagagttgctggtatttccaccagacagctataccttgcctgcttgccttggctgtgcaggcctctatgccagagaaggagccctcagttctgagaaaagtactattggaggatgaggtgttggctgccatggtgtctgtcattggcactgctacaacccacctgagccctgagttagctgcccagagtgtgacacacattgtgcccctcttcttggatggcaacgtgtcctttctgcctgaaaacagcttcccgagcagattccagccattccaggatggctcctcagggcagaggcggctgattgcactgcttatggcctttgtctgctccctgcctcgaaatgtggaaatccctcagctgaaccaactcatgcgggagcttttggaactgagctgctgccacagctgccccttttcttccaccgctgctgccaagtgctttgcaggactcctcaacaagcaccctgcagggcagcagctggatgaattcctacagctagctgtggacaaagtggaggctggcctgggctctgggccctgtcgtagtcaggccttcactcttcttctctgggtaacaaaggccctagtgctcagataccatcctctcagctcctgccttacagcccggctcatgggcctcctgagtgacccagaattaggtccagcagcagctgatggcttctctctgctcatgtctgactgcactgatgtgctgactcgtgctggccatgccgaagtgcggatcatgttccgccagcggttcttcacagataatgtgcctgctttggtccagggcttccatgctgctccccaagatgtgaagccaaactacttgaagggtctttctcatgtacttaacaggctgcccaagcctgtactcttgccagagctgcccacgcttctttccttgctgctggaggccctgtcctgccctgactgtgtggtgcagctctccaccctcagctgccttcagcctcttctactggaagcaccccaagtcatgagtcttcacgtggacaccctcgtcaccaagtttctgaacctcagctctagcccttccatggctgtccggatcgccgcactgcagtgcatgcatgctctcactcgcctgcccacccctgtgctgctgccgtacaaaccacaggtgattcgggccttagccaaacccctggatgacaagaagagactggtgcgcaaggaagcagtgtcagccagaggggagtggtttctgttggggagccctggcagctgagccctcagtcctggcctagactgttctgacaatctaacctgggattactaactgttgagccatcttccccaaagcagggaaaccactggtctctgactgcctttcccacagacacagcacaaatgctaggcctctgttgcatggctgtacaaagaacataagagtccatatttctagtggatttgtaaaataagtgtgtgtgagacacttgcgtttgaagaaagatctagggtcctgggtctcttgcatttatatgtcagaaaaggggcgatatgctgctgaggggtgagtgcatatgagtgtggccctgaggaccagggctggcagatgttgtctacctgctgaagaataaagatttcttttggtaa

SEQ ID NO: 2547 - DNA, 3942 bp, Homo sapiens
  source 1..3942: mol_type = genomic DNA
gggtttgtgaagtcgtggcccgttagcaggaagcctaacagtcgccccgacgctagtgagggacccaatctgagtccccggccagccgaatccaagccgtgtgtactgcgtgctcagcactgcccgacagtcctagctaaacttcgccaactccgctgcctttgccgccaccatgcccaaaacgatcagtgtgcgtgtgaccaccatggatgcagagctggagtttgccatccagcccaacaccaccgggaagcagctatttgaccaggtggtgaaaactattggcttgagggaagtttggttctttggtctgcagtaccaggacactaaaggtttctccacctggctgaaactcaataagaaggtgactgcccaggatgtgcggaaggaaagccccctgctctttaagttccgtgccaagttctaccctgaggatgtgtccgaggaattgattcaggacatcactcagcgcctgttctttctgcaagtgaaagagggcattctcaatgatgatatttactgcccgcctgagaccgctgtgctgctggcctcgtatgctgtccagtctaagtatggcgacttcaataaggaagtgcataagtctggctacctggccggagacaagttgctcccgcagagagtcctggaacagcacaaactcaacaaggaccagtgggaggagcggatccaggtgtggcatgaggaacaccgtggcatgctcagggaggatgctgtcctggaatatctgaagattgctcaagatctggagatgtatggtgtgaactacttcagcatcaagaacaagaaaggctcagagctgtggctgggggtggatgccctgggtctcaacatctatgagcagaatgacagactaactcccaagataggcttcccctggagtgaaatcaggaacatctctttcaatgataagaaatttgtcatcaagcccattgacaaaaaagccccggacttcgtcttctatgctccccggctgcggattaacaagcggatcttggccttgtgcatggggaaccatgaactatacatgcgccgtcgcaagcctgataccattgaggtgcagcagatgaaggcacaggcccgggaggagaagcaccagaagcagatggagcgtgctatgctggaaaatgagaagaagaagcgtgaaatggcagagaaggagaaagagaagattgaacgggagaaggaggagctgatggagaggctgaagcagatcgaggaacagactaagaaggctcagcaagaactggaagaacagacccgtagggctctggaacttgagcaggaacggaagcgtgcccagagcgaggctgaaaagctggccaaggagcgtcaagaagctgaagaggccaaggaggccttgctgcaggcctcccgggaccagaaaaagactcaggaacagctggccttggaaatggcagagctgacagctcgaatctcccagctggagatggcccgacagaagaaggagagtgaggctgtggagtggcagcagaaggcccagatggtacaggaagacttggagaagacccgtgctgagctgaagactgccatgagtacacctcatgtggcagagcctgctgagaatgagcaggatgagcaggatgagaatggggcagaggctagtgctgacctacgggctgatgctatggccaaggaccgcagtgaggaggaacgtaccactgaggcagagaagaatgagcgtgtgcagaagcacctgaaggccctcacttcggagctggccaatgccagagatgagtccaagaagactgccaatgacatgatccatgctgagaacatgcgactgggccgagacaaatacaagaccctgcgccagatccggcagggcaacaccaagcagcgcattgacgaatttgagtctatgtaatgggcacccagcctctagggacccctcctccctttttccttgtccccacactcctacacctaactcacctaactcatactgtgctggagccactaactagagcagccctggagtcatgccaagcatttaatgtagccatgggaccaaacctagccccttagcccccacccacttccctgggcaaatgaatggctcactatggtgccaatggaacctcctttctcttctctgttccattgaatctgtatggctagaatatcctacttctccagcctagaggtactttccacttgattttgcaaatgcccttacacttactgttgtcctatgggagtcaagtgtggagtaggttggaagctagctcccctcctctcccctaccactgtcttcttcagggtcctgagatttacacggttggagtgttatgcggtctagggaatgagacaggacctaggatatcttctccaggatgtcaactgacctaaaatttgccctcccatcccgtttagagttatttaggctttgtaacgattgggggataaaaagatgttcagtcatttttgtttctacctcccagatcggatctgttgcaaactcagcctcaataagccttgtcgttgactttagggactcaatttctccccagggtggatgggggaaatggtgccttcaagaccttcaccaaacatactagaagggcattggccattctattgtggcaaggctgagtagaagatcctaccccaattccttgtaggagtataggccggtctaaagtgagctctatgggcagatctaccccttacttattattccagatctgcagtcacttcgtgggatctgcccctccctgcttcaatacccaaatcctctccagctataacagtagggatgagtacccaaaagctcagccagccccatcaggactcttgtgaaaagagaggatatgttcacacctagcgtcagtattttccctgctaggggttttaggtctcttcccctctcagagctacttgggccatagctcctgctccacagccatcccagccttggcatctagagcttgatgccagtaggctcaactagggagtgagtgcaaaaagctgagtatggtgagagaagcctgtgccctgatccaagtttactcaaccctctcaggtgaccaaaatccccttctcatcactcccctccaaagaggtgactgggccctgcctctgtttgacaaacctctaacccaggtcttgacaccagctgttctgtcccttggagctgtaaaccagagagctgctggggattctggcctagtcccttccacacccccaccccttgctctcaacccaggagcatccacctccttctctgtctcatgtgtgctcttcttctttctacagtattatgtactctactgatatctaaatattgatttctgccttccttgctaatgcaccattagaagatattagtcttggggcaggatgattttggcctcattactttaccacccccacacctggaaagcatatactatattacaaaatgacattttgccaaaattattaatataagaagctttcagtattagtgatgtcatctgtcactataggtcatacaatccattcttaaagtacttgttatttgtttttattattactgtttgtcttctccccagggttcagtcctcaaggggccatcctgtcccaccatgcagtgcccctagcttagagcctccctcaattccccctggccaccaccccccactctgtgcctgaccttgaggagtcttgtgtgcattgctgtgaattagctcacttggtgatatgtcctatattggctaaattgaaacctggaattgtggggcaatctattaatagctgccttaaagtcagtaacttacccttagggaggctgggggaaaaggttagattttgtattcaggggttttttgtgtactttttgggttttttaaaaattgtttttggaggggtttatgctcaatccatgttctatttcagtgccaataaaatttaggaagactt

SEQ ID NO: 2548 - DNA, 2723 bp, Homo sapiens
  source 1..2723: mol_type = genomic DNA
gggcggggcgcaggagccccggggcggaggagccggggaggcgggaggcgggaggcgggaggtgttggggccgttgaagcggcctccctcccgcccccagccgcccggtctggccccagccctgtcccgacccccggcctggcccactccgaccctacccggccgaagggttccgctggacacgcaggcggcctccggagcagcccaagcccatgagggccgcgcgcccggccgccggtgctgacgagacggagctcctggcccccgaggaggagcagaggatcaatgcggttcaagaatcgattccagcggttcatgaaccatcgagctccagccaatggccgctacaagccaacttgctatgaacatgctgctaactgttacacacacgcattcctcattgttccggccatcgtgggcagtgccctcctccatcggctgtctgatgactgctgggaaaagataacagcatggatttatggaatgggactctgtgccctcttcatcgtttctacagtatttcacattgtatcatggaaaaagagccacttaaggacagtggagcattgttttcacatgtgtgatagaatggttatctatttcttcattgctgcttcttatgctccatggttaaatcttcgtgaacttggacccctggcatctcatatgcgttggtttatctggctcatggcagctggaggaaccatttatgtatttctctaccatgaaaaatataaggtggttgaactctttttctatctcacaatgggattctctccagccttggtggtgacatcaatgaacaacaccgatggacttcaggaacttgcctgtgggggcttaatttattgcttgggagttgtgttcttcaagagtgatggcatcattccatttgcccacgccatctggcacctgtttgtggccacggcagctgcagtgcattactacgccatttggaaatacctttaccgaagtcctacggactttatgcggcatttatgaccaatctgtactaattctccaaaccagtattatttcaattatggcacttgggagtggggtgagagctaaacattgcacagggaaagaaaaaaaataactgcactgactttatatcttttgaatataattactgtgaaagtataaaggctgtgttctggaattttctgcctcacagcaaataaataaggtagtgaattaattattcattccattccactatcatgaaggactctgaatagacttggccaactgatgtttacaaaccagacttttatattttaattttacagattttactacatgatttttctaaattactatgtcaggttgtaaaagtcagtgcaataacaaaccttcctttttaagaagaaaattgtttctattactttcccattcactaggtaaagaatcatggacagaacttacactactttttaccatgtttcatcttggcataacatggttcttttttaaatagaaactttagttttttgtaaatttttaaaaaaatatttcattgatatgcatctctgcaggtcctcattcatgttgtaaatttttgcagcaagcagtcaacattccacaaacgaacaaacattatacctcttctgatagttttattaagcatggagaaattgccaatttttaaaaactgcagttttccaaacttttctgccaacctcttactctgaattcagtgctgctttgggacatatacttgacctagcttggtttaccagtgatggaaaagtattttgatatcattaactttttcaaaagatccaactttttctctatgcctttgccacattctcttcagggtctctttccacagtggataaatgttttttctgtattatgacagtattgttgtgatggccatctgctggaaactcctgaagagcattatgtattacagtgagcagttgtattgcctgtttggtgcccaatggttaagtcattgtcacttagctttatattgtcagtttgatatttattttaaattgtggaactagatgcataaattcacatttctgcctttcctttgcatcttctcatatattgtgtttttttttttttttcctagaaaaaatatttaaagcattgtttgacaggtagaaactcatgtatctgtagtccatgagttatatcctggctcagtggagtgatatttatgtattatttttacttttctctcagtgtcttatattaagattaacatgttgttaatagttgctttgttgattaatctctcttgttggtgttttaataaatgaaataggcttgcctttagatcgggtgctgatattgcctgtttcctagtaatgggctgatcaaatgatcagtggaattcttggtttgatgataaccttattaattgaaattttttactgatgtggctttaaaagaggtttattttgtatatgtttagaactctctgattttgatgaattatatgggaatgagaaacagaagaagtggtatttgctggcgagttaaataggcaaggtacccagtgataacaccaaccaaaccactcctatctgcatgattctgaacatctggatgcctgttgttttactgtgtatattttatttttaatatattaactttgtggattcatttaaggtctactcaaaagtaacactgtcaaaaccactaatatgtatgtaaaaattgtgctgtatactacaataaagttgttacttggatttgttcca

SEQ ID NO: 2549 - DNA, 2746 bp, Homo sapiens
  source 1..2746: mol_type = genomic DNA
agccaatgagagccgaactggacttgaagcatctacgttatccatgaagtgtcgcgagagaaacggacgccgttctctcccgcggaattcaggtttacggccctgcgggttctcagagaatttctagaatttggaatcgagtgcattttctgacatttgagtacagtacccaggggttcttggagaagaacctggtcccagaggagcttgactgaccataaaaatgagtactgcagatgcacttgatgatgaaaacacatttaaaatattagttgcaacagatattcatcttggatttatggagaaagatgcagtcagaggaaatgatacgtttgtaacactcgatgaaattttaagacttgcccaggaaaatgaagtggattttattttgttaggtggtgatctttttcatgaaaataagccctcaaggaaaacattacatacctgcctcgagttattaagaaaatattgtatgggtgatcggcctgtccagtttgaaattctcagtgatcagtcagtcaactttggttttagtaagtttccatgggtgaactatcaagatggcaacctcaacatttcaattccagtgtttagtattcatggcaatcatgacgatcccacaggggcagatgcactttgtgccttggacattttaagttgtgctggatttgtaaatcactttggacgttcaatgtctgtggagaagatagacattagtccggttttgcttcaaaaaggaagcacaaagattgcgctatatggtttaggatccattccagatgaaaggctctatcgaatgtttgtcaataaaaaagtaacaatgttgagaccaaaggaagatgagaactcttggtttaacttatttgtgattcatcagaacaggagtaaacatggaagtactaacttcattccagaacaatttttggatgacttcattgatcttgttatctggggccatgaacatgagtgtaaaatagctccaaccaaaaatgaacaacagctgttttatatctcacaacctggaagctcagtggttacttctctttccccaggagaagctgtaaagaaacatgttggtttgctgcgtattaaagggaggaagatgaatatgcataaaattcctcttcacacagtgcggcagtttttcatggaggatattgttctagctaatcatccagacatttttaacccagataatcctaaagtaacccaagccatacaaagcttctgtttggagaagattgaagaaatgcttgaaaatgctgaacgggaacgtctgggtaattctcaccagccagagaagcctcttgtacgactgcgagtggactatagtggaggttttgaacctttcagtgttcttcgctttagccagaaatttgtggatcgggtagctaatccaaaagacattatccattttttcaggcatagagaacaaaaggaaaaaacaggagaagagatcaactttgggaaacttatcacaaagccttcagaaggaacaactttaagggtagaagatcttgtaaaacagtactttcaaaccgcagagaagaatgtgcagctctcactgctaacagaaagagggatgggtgaagcagtacaagaatttgtggacaaggaggagaaagatgccattgaggaattagtgaaataccagttggaaaaaacacagcgatttcttaaagaacgtcatattgatgccctcgaagacaaaatcgatgaggaggtacgtcgtttcagagaaaccagacaaaaaaatactaatgaagaagatgatgaagtccgtgaggctatgaccagggccagagcactcagatctcagtcagaggagtctgcttctgcctttagtgctgatgaccttatgagtatagatttagcagaacagatggctaatgactctgatgatagcatctcagcagcaaccaacaaaggaagaggccgaggaagaggtcgaagaggtggaagagggcagaattcagcatcgagaggagggtctcaaagaggaagagcagacactggtctggagacttctacccgtagcaggaactcaaagactgctgtgtcagcatctagaaatatgtctattatagatgcctttaaatctacaagacagcagccttcccgaaatgtcactactaagaattattcagaggtgattgaggtagatgaatcagatgtggaagaagacatttttcctaccacttcaaagacagatcaaaggtggtccagcacatcatccagcaaaatcatgtcccagagtcaagtatcgaaaggggttgattttgaatcaagtgaggatgatgatgatgatccttttatgaacactagttctttaagaagaaatagaagataatatatttaatggcactgagaaacatgcaagatacaggaaaaatgaaaatgttacaagctaagagtttacagtttaagattttaagtattgtttcctgagcataactccataagtaagaaatttctagttcacagacatacaatagcattgattcaccttgtttttttaacctggttgttgtagtaagagctttgtttcaatatcactcttgagtaaagattaaaataaagctaccattttacatttctatttcataatgaaaaactatgtcagtattttaatatggttacatttagccaaagttgagggaaagagcttataaaatttaacttcttcataattttagtaatttcctagaggttctgggttttctgaaagtaaaacaatttatgcgaa

SEQ ID NO: 2550 - DNA, 2588 bp, Homo sapiens
  source 1..2588: mol_type = genomic DNA
acgttatccatgaagtgtcgcgagagaaacggacgccgttctctcccgcggaattcaggtttacggccctgcgggttctcagaggcaagttcagaccgtgttgttttcttttcacggatcctgccctttcttcccgaaaagaagacagccttgggtcgcgattgtggggcttcgaagagtccagcagtgggaatttctagaatttggaatcgagtgcattttctgacatttgagtacagtacccaggggttcttggagaagaacctggtcccagaggagcttgactgaccataaaaatgagtactgcagatgcacttgatgatgaaaacacatttaaaatattagttgcaacagatattcatcttggatttatggagaaagatgcagtcagaggaaatgatacgtttgtaacactcgatgaaattttaagacttgcccaggaaaatgaagtggattttattttgttaggtggtgatctttttcatgaaaataagccctcaaggaaaacattacatacctgcctcgagttattaagaaaatattgtatgggtgatcggcctgtccagtttgaaattctcagtgatcagtcagtcaactttggttttagtaagtttccatgggtgaactatcaagatggcaacctcaacatttcaattccagtgtttagtattcatggcaatcatgacgatcccacaggggcagatgcactttgtgccttggacattttaagttgtgctggatttgtaaatcactttggacgttcaatgtctgtggagaagatagacattagtccggttttgcttcaaaaaggaagcacaaagattgcgctatatggtttaggatccattccagatgaaaggctctatcgaatgtttgtcaataaaaaagtaacaatgttgagaccaaaggaagatgagaactcttggtttaacttatttgtgattcatcagaacaggagtaaacatggaagtactaacttcattccagaacaatttttggatgacttcattgatcttgttatctggggccatgaacatgagtgtaaaatagctccaaccaaaaatgaacaacagctgttttatatctcacaacctggaagctcagtggttacttctctttccccaggagaagctgtaaagaaacatgttggtttgctgcgtattaaagggaggaagatgaatatgcataaaattcctcttcacacagtgcggcagtttttcatggaggatattgttctagctaatcatccagacatttttaacccagataatcctaaagtaacccaagccatacaaagcttctgtttggagaagattgaagaaatgcttgaaaatgctgaacgggaacgtctgggtaattctcaccagccagagaagcctcttgtacgactgcgagtggactatagtggaggttttgaacctttcagtgttcttcgctttagccagaaatttgtggatcgggtagctaatccaaaagacattatccattttttcaggcatagagaacaaaaggaaaaaacaggagaagagatcaactttgggaaacttatcacaaagccttcagaaggaacaactttaagggtagaagatcttgtaaaacagtactttcaaaccgcagagaagaatgtgcagctctcactgctaacagaaagagggatgggtgaagcagtacaagaatttgtggacaaggaggagaaagatgccattgaggaattagtgaaataccagttggaaaaaacacagcgatttcttaaagaacgtcatattgatgccctcgaagacaaaatcgatgaggaggtacgtcgtttcagagaaaccagacaaaaaaatactaatgaagaagatgatgaagtccgtgaggctatgaccagggccagagcactcagatctcagtcagaggagtctgcttctgcctttagtgctgatgaccttatgagtatagatttagcagaacagatggctaatgactctgatgatagcatctcagcagcaaccaacaaaggaagaggccgaggaagaggtcgaagaggtggaagagggcagaattcagcatcgagaggagggtctcaaagaggaagagcctttaaatctacaagacagcagccttcccgaaatgtcactactaagaattattcagaggtgattgaggtagatgaatcagatgtggaagaagacatttttcctaccacttcaaagacagatcaaaggtggtccagcacatcatccagcaaaatcatgtcccagagtcaagtatcgaaaggggttgattttgaatcaagtgaggatgatgatgatgatccttttatgaacactagttctttaagaagaaatagaagataatatatttaatggcactgagaaacatgcaagatacaggaaaaatgaaaatgttacaagctaagagtttacagtttaagattttaagtattgtttcctgagcataactccataagtaagaaatttctagttcacagacatacaatagcattgattcaccttgtttttttaacctggttgttgtagtaagagctttgtttcaatatcactcttgagtaaagattaaaataaagctaccattttacatttcta

SEQ ID NO: 2551 - DNA, 2604 bp, Homo sapiens
  source 1..2604: mol_type = genomic DNA
aaacggacgccgttctctcccgcggaattcaggtttacggccctgcgggttctcagaggcaagttcagaccgtgttgttttcttttcacggatcctgccctttcttcccgaaaagaagacagccttggaatttctagaatttggaatcgagtgcattttctgacatttgagtacagtacccaggggttcttggagaagaacctggtcccagaggagcttgactgaccataaaaatgagtactgcagatgcacttgatgatgaaaacacatttaaaatattagttgcaacagatattcatcttggatttatggagaaagatgcagtcagaggaaatgatacgtttgtaacactcgatgaaattttaagacttgcccaggaaaatgaagtggattttattttgttaggtggtgatctttttcatgaaaataagccctcaaggaaaacattacatacctgcctcgagttattaagaaaatattgtatgggtgatcggcctgtccagtttgaaattctcagtgatcagtcagtcaactttggttttagtaagtttccatgggtgaactatcaagatggcaacctcaacatttcaattccagtgtttagtattcatggcaatcatgacgatcccacaggggcagatgcactttgtgccttggacattttaagttgtgctggatttgtaaatcactttggacgttcaatgtctgtggagaagatagacattagtccggttttgcttcaaaaaggaagcacaaagattgcgctatatggtttaggatccattccagatgaaaggctctatcgaatgtttgtcaataaaaaagtaacaatgttgagaccaaaggaagatgagaactcttggtttaacttatttgtgattcatcagaacaggagtaaacatggaagtactaacttcattccagaacaatttttggatgacttcattgatcttgttatctggggccatgaacatgagtgtaaaatagctccaaccaaaaatgaacaacagctgttttatatctcacaacctggaagctcagtggttacttctctttccccaggagaagctgtaaagaaacatgttggtttgctgcgtattaaagggaggaagatgaatatgcataaaattcctcttcacacagtgcggcagtttttcatggaggatattgttctagctaatcatccagacatttttaacccagataatcctaaagtaacccaagccatacaaagcttctgtttggagaagattgaagaaatgcttgaaaatgctgaacgggaacgtctgggtaattctcaccagccagagaagcctcttgtacgactgcgagtggactatagtggaggttttgaacctttcagtgttcttcgctttagccagaaatttgtggatcgggtagctaatccaaaagacattatccattttttcaggcatagagaacaaaaggaaaaaacaggagaagagatcaactttgggaaacttatcacaaagccttcagaaggaacaactttaagggtagaagatcttgtaaaacagtactttcaaaccgcagagaagaatgtgcagctctcactgctaacagaaagagggatgggtgaagcagtacaagaatttgtggacaaggaggagaaagatgccattgaggaattagtgaaataccagttggaaaaaacacagcgatttcttaaagaacgtcatattgatgccctcgaagacaaaatcgatgaggaggtacgtcgtttcagagaaaccagacaaaaaaatactaatgaagaagatgatgaagtccgtgaggctatgaccagggccagagcactcagatctcagtcagaggagtctgcttctgcctttagtgctgatgaccttatgagtatagatttagcagaacagatggctaatgactctgatgatagcatctcagcagcaaccaacaaaggaagaggccgaggaagaggtcgaagaggtggaagagggcagaattcagcatcgagaggagggtctcaaagaggaagagacactggtctggagacttctacccgtagcaggaactcaaagactgctgtgtcagcatctagaaatatgtctattatagatgcctttaaatctacaagacagcagccttcccgaaatgtcactactaagaattattcagaggtgattgaggtagatgaatcagatgtggaagaagacatttttcctaccacttcaaagacagatcaaaggtggtccagcacatcatccagcaaaatcatgtcccagagtcaagtatcgaaaggggttgattttgaatcaagtgaggatgatgatgatgatccttttatgaacactagttctttaagaagaaatagaagataatatatttaatggcactgagaaacatgcaagatacaggaaaaatgaaaatgttacaagctaagagtttacagtttaagattttaagtattgtttcctgagcataactccataagtaagaaatttctagttcacagacatacaatagcattgattcaccttgtttttttaacctggttgttgtagtaagagctttgtttcaatatcactcttgagtaaagattaaaataaagctaccattttacatttc

SEQ ID NO: 2552 - DNA, 2684 bp, Homo sapiens
  source 1..2684: mol_type = genomic DNA
gacgccgttctctcccgcggaattcaggtttacggccctgcgggttctcagagaatttctagaatttggaatcgagtgcattttctgacatttgagtacagtacccaggggttcttggagaagaacctggtcccagaggagcttgactgaccataaaaatgagtactgcagatgcactgtaagcacctgacttctggaatcccttgttatttggggtttctaaagctcgtcaactgtgatcacagtaaaagaaaacttatttaataagcagtaaataaggaacctgtttatgaacagaaatattagtcatcaaaaaggtgatgatgaaaacacatttaaaatattagttgcaacagatattcatcttggatttatggagaaagatgcagtcagaggaaatgatacgtttgtaacactcgatgaaattttaagacttgcccaggaaaatgaagtggattttattttgttaggtggtgatctttttcatgaaaataagccctcaaggaaaacattacatacctgcctcgagttattaagaaaatattgtatgggtgatcggcctgtccagtttgaaattctcagtgatcagtcagtcaactttggttttagtaagtttccatgggtgaactatcaagatggcaacctcaacatttcaattccagtgtttagtattcatggcaatcatgacgatcccacaggggcagatgcactttgtgccttggacattttaagttgtgctggatttgtaaatcactttggacgttcaatgtctgtggagaagatagacattagtccggttttgcttcaaaaaggaagcacaaagattgcgctatatggtttaggatccattccagatgaaaggctctatcgaatgtttgtcaataaaaaagtaacaatgttgagaccaaaggaagatgagaactcttggtttaacttatttgtgattcatcagaacaggagtaaacatggaagtactaacttcattccagaacaatttttggatgacttcattgatcttgttatctggggccatgaacatgagtgtaaaatagctccaaccaaaaatgaacaacagctgttttatatctcacaacctggaagctcagtggttacttctctttccccaggagaagctgtaaagaaacatgttggtttgctgcgtattaaagggaggaagatgaatatgcataaaattcctcttcacacagtgcggcagtttttcatggaggatattgttctagctaatcatccagacatttttaacccagataatcctaaagtaacccaagccatacaaagcttctgtttggagaagattgaagaaatgcttgaaaatgctgaacgggaacgtctgggtaattctcaccagccagagaagcctcttgtacgactgcgagtggactatagtggaggttttgaacctttcagtgttcttcgctttagccagaaatttgtggatcgggtagctaatccaaaagacattatccattttttcaggcatagagaacaaaaggaaaaaacaggagaagagatcaactttgggaaacttatcacaaagccttcagaaggaacaactttaagggtagaagatcttgtaaaacagtactttcaaaccgcagagaagaatgtgcagctctcactgctaacagaaagagggatgggtgaagcagtacaagaatttgtggacaaggaggagaaagatgccattgaggaattagtgaaataccagttggaaaaaacacagcgatttcttaaagaacgtcatattgatgccctcgaagacaaaatcgatgaggaggtacgtcgtttcagagaaaccagacaaaaaaatactaatgaagaagatgatgaagtccgtgaggctatgaccagggccagagcactcagatctcagtcagaggagtctgcttctgcctttagtgctgatgaccttatgagtatagatttagcagaacagatggctaatgactctgatgatagcatctcagcagcaaccaacaaaggaagaggccgaggaagaggtcgaagaggtggaagagggcagaattcagcatcgagaggagggtctcaaagaggaagagcagacactggtctggagacttctacccgtagcaggaactcaaagactgctgtgtcagcatctagaaatatgtctattatagatgcctttaaatctacaagacagcagccttcccgaaatgtcactactaagaattattcagaggtgattgaggtagatgaatcagatgtggaagaagacatttttcctaccacttcaaagacagatcaaaggtggtccagcacatcatccagcaaaatcatgtcccagagtcaagtatcgaaaggggttgattttgaatcaagtgaggatgatgatgatgatccttttatgaacactagttctttaagaagaaatagaagataatatatttaatggcactgagaaacatgcaagatacaggaaaaatgaaaatgttacaagctaagagtttacagtttaagattttaagtattgtttcctgagcataactccataagtaagaaatttctagttcacagacatacaatagcattgattcaccttgtttttttaacctggttgttgtagtaagagctttgtttcaatatcactcttgagtaaagattaaaataaagctaccattttacatttctatttcataatg

SEQ ID NO: 2553 - DNA, 572 bp, Homo sapiens
  source 1..572: mol_type = genomic DNA
ttgaagcatctacgttatccatgaagtgtcgcgagagaaacggacgccgttctctcccgcggaattcaggtttacggccctgcgggttctcagagaatttggaatcgagtgcattttctgacatttgagtacagtacccaggggttcttggagaagaacctggtcccagaggagcttgactgaccataaaaatgagtactgcagatgcacttgatgatgaaaacacatttaaaatattagttgcaacagatattcatcttggatttatggagaaagatgcagtcagaggaaatgatacgtttgtaacactcgatgaaattttaagacttgcccaggaaaatgaagtggattttattttgttaggtggtgatctttttcatgaaaataagccctcaaggaaaacattacatacctgcctcgagttattaagaaaatattgtatgggtgatcggcctgtccagtttgaaattctcagtgatcagtcagtcaactttggttttagtaagtttccatgggtgaactatcaagatggcaacctcaacatttcaattccagtgtttagtattcatggc

SEQ ID NO: 2554 - DNA, 558 bp, Homo sapiens
  source 1..558: mol_type = genomic DNA
acggccctgcgggttctcagaggcaagttcagaccgtgttgttttcttttcacggatcctgccctttcttcccgaaaagaagacagccttgggtcgcgattgtggggcttcgaagagtccagcagtgggaatttggaatcgagtgcattttctgacatttgagtacagtacccaggggttcttggagaagaacctggtcccagaggagcttgactgaccataaaaatgagtactgcagatgcacttgatgatgaaaacacatttaaaatattagttgcaacagatattcatcttggatttatggagaaagatgcagtcagaggaaatgatacgtttgtaacactcgatgaaattttaagacttgcccaggaaaatgaagtggattttattttgttaggtggtgatctttttcatgaaaataagccctcaaggaaaacattacatacctgcctcgagttattaagaaaatattgtatgggtgatcggcctgtccagtttgaaattctcagtgatcagtcagtcaactttggttttagtaagtttccatgggtgaactat

SEQ ID NO: 2555 - DNA, 1212 bp, Homo sapiens
  source 1..1212: mol_type = genomic DNA
ctctcccgcggaattcaggtttacggccctgcgggttctcagagaatttctagaatttggaatcgagtgcattttctgacatttgagtacagtacccaggggttcttggagaagaacctggtcccagaggagcttgactgaccataaaaatgagtactgcagatgcacttgatgatgaaaacacatttaaaatattagttgcaacagatattcatcttggatttatggagaaagatgcagtcagaggaaatgatacgtttgtaacactcgatgaaattttaagacttgcccaggaaaatgaagtggattttattttgttaggtggtgatctttttcatgaaaataagccctcaaggaaaacattacatacctgcctcgagttattaagaaaatattgtatgggtgatcggcctgtccagtttgaaattctcagtgatcagtcagtcaactttggttttagtaagtttccatgggtgaactatcaagatggcaacctcaacatttcaattccagtgtttagtattcatggcaatcatgacgatcccacaggggcagatgcactttgtgccttggacattttaagttgtgctggatttgtaaatcactttggacgttcaatgtctgtggagaagatagacattagtccggttttgcttcaaaaaggaagcacaaagattgcgctatatggtttaggatccattccagatgaaaggctctatcgaatgtttgtcaataaaaaagtaacaatgttgagaccaaaggaagatgagaactcttggtttaacttatttgtgattcatcagaacagggtataggattgattgaaaagaagacagacttgaagaagcaagatttattatctgatcactgcagtaaaaatgtgaggtggtgacagtgatggcaatgaaacagaaatgggagggacacaccggagaagttgtcagggaagaactcaaaggatttggggcctgattatataatttattacagttgtcccttggtatccacggggggtgttcggtccaggacctaaaatcctgggatgctgaaatcccttgaataaaatggtatagcatttgcatataacctacatatatcctcctatgtactttaaatcatctctagattacttgtaatacctgatacaatgtaaatactgtttaaatagttgttatactgtattgctttaaaaatttatatttttcgttgtta

SEQ ID NO: 2556 - DNA, 859 bp, Homo sapiens
  source 1..859: mol_type = genomic DNA
cctccccacccatttcaccaccaccatgacaccgggcacccagtctcctttcttcctgctgctgctcctcacagtgcttacagttgttacgggttctggtcatgcaagctctaccccaggtggagaaaaggagacttcggctacccagagaagttcagtgcccagctctactgagaagaatgctttgtctactggggtctctttctttttcctgtcttttcacatttcaaacctccagtttaattcctctctggaagatcccagcaccgactactaccaagagctgcagagagacatttctgaaatgtttttgcagatttataaacaagggggttttctgggcctctccaatattaagttcaggccaggatctgtggtggtacaattgactctggccttccgagaaggtaccatcaatgtccacgacgtggagacacagttcaatcagtataaaacggaagcagcctctcgatataacctgacgatctcagacgtcagcgtgagtgatgtgccatttcctttctctgcccagtctggggctggggtgccaggctggggcatcgcgctgctggtgctggtctgtgttctggttgcgctggccattgtctatctcattgccttggctgtctgtcagtgccgccgaaagaactacgggcagctggacatctttccagcccgggatacctaccatcctatgagcgagtaccccacctaccacacccatgggcgctatgtgccccctagcagtaccgatcgtagcccctatgagaaggtttctgcaggtaatggtggcagcagcctctcttacacaaacccagcagtggcagccacttctgccaacttgtaggggcacgtcgcc

SEQ ID NO: 2557 - DNA, 1050 bp, Homo sapiens
  source 1..1050: mol_type = genomic DNA
acctctcaagcagccagcgcctgcctgaatctgttctgccccctccccacccatttcaccaccaccatgacaccgggcacccagtctcctttcttcctgctgctgctcctcacagtgcttacagctaccacagcccctaaacccgcaacagttgttacgggttctggtcatgcaagctctaccccaggtggagaaaaggagacttcggctacccagagaagttcagtgcccagctctactgagaagaatgctttcaggccaggatctgtggtggtacaattgactctggccttccgagaaggtaccatcaatgtccacgacgtggagacacagttcaatcagtataaaacggaagcagcctctcgatataacctgacgatctcagacgtcagcgtgagtgatgtgccatttcctttctctgcccagtctggggctggggtgccaggctggggcatcgcgctgctggtgctggtctgtgttctggttgcgctggccattgtctatctcattgccttggctgtctgtcagtgccgccgaaagaactacgggcagctggacatctttccagcccgggatacctaccatcctatgagcgagtaccccacctaccacacccatgggcgctatgtgccccctagcagtaccgatcgtagcccctatgagaaggtttctgcaggtaatggtggcagcagcctctcttacacaaacccagcagtggcagccacttctgccaacttgtaggggcacgtcgcccgctgagctgagtggccagccagtgccattccactccactcaggttcttcagggccagagcccctgcaccctgtttgggctggtgagctgggagttcaggtgggctgctcacagcctccttcagaggccccaccaatttctcggacacttctcagtgtgtggaagctcatgtgggcccctgagggctcatgcctgggaagtgttgtggtgggggctcccaggaggactggcccagagagccctgagatagcggggatcctgaactggactgaataaaacgtggtctcccactgcgcc

SEQ ID NO: 2558 - DNA, 537 bp, Homo sapiens
  source 1..537: mol_type = genomic DNA
ctccccacccatttcaccaccaccatgacaccgggcacccagtctcctttcttcctgctgctgctcctcacagtgcttacagctaccacagcccctaaacccgcaacagttgttacgggttctggtcatgcaagctctaccccaggtggagaaaaggagacttcggctacccagagaagttcagtgcccagctctactgagaagaatgcttctggggctggggtgccaggctggggcatcgcgctgctggtgctggtctgtgttctggttgcgctggccattgtctatctcattgccttggctgtctgtcagtgccgccgaaagaactacgggcagctggacatctttccagcccgggatacctaccatcctatgagcgagtaccccacctaccacacccatgggcgctatgtgccccctagcagtaccgatcgtagcccctatgagaaggtttctgcaggtaatggtggcagcagcctctcttacacaaacccagcagtggcagccacttctgccaacttgtaggggcacgtcgcc

SEQ ID NO: 2559 - DNA, 648 bp, Homo sapiens
  source 1..648: mol_type = genomic DNA
ctccccacccatttcaccaccaccatgacaccgggcacccagtctcctttcttcctgctgctgctcctcacagtgcttacagttgttacgggttctggtcatgcaagctctaccccaggtggagaaaaggagacttcggctacccagagaagttcagtgcccagctctactgagaagaatgctatcccagcaccgactactaccaagagctgcagagagacatttctgaaatgtttttgcagatttataaacaagggggttttctgggcctctccaatattaagttcagtgagtgatgtgccatttcctttctctgcccagtctggggctggggtgccaggctggggcatcgcgctgctggtgctggtctgtgttctggttgcgctggccattgtctatctcattgccttggctgtctgtcagtgccgccgaaagaactacgggcagctggacatctttccagcccgggatacctaccatcctatgagcgagtaccccacctaccacacccatgggcgctatgtgccccctagcagtaccgatcgtagcccctatgagaaggtttctgcaggtaatggtggcagcagcctctcttacacaaacccagcagtggcagccacttctgccaacttgtaggggcacgtcgcc

SEQ ID NO: 2560 - DNA, 543 bp, Homo sapiens
  source 1..543: mol_type = genomic DNA
ctccccacccatttcaccaccaccatgacaccgggcacccagtctcctttcttcctgctgctgctcctcacagtgcttacagttgttacgggttctggtcatgcaagctctaccccaggtggagaaaaggagacttcggctacccagagaagttcagtgcccagctctactgagaagaatgctttgtctactggggtctctttctttttcctgtcttttcacatttcaaacctccagtttaattcctctctggaagatcccagcaccgactactaccaagagctgcagagagacatttctgaaatggctgtctgtcagtgccgccgaaagaactacgggcagctggacatctttccagcccgggatacctaccatcctatgagcgagtaccccacctaccacacccatgggcgctatgtgccccctagcagtaccgatcgtagcccctatgagaaggtttctgcaggtaatggtggcagcagcctctcttacacaaacccagcagtggcagccacttctgccaacttgtaggggcacgtcgcc

SEQ ID NO: 2561 - DNA, 804 bp, Homo sapiens
  source 1..804: mol_type = genomic DNA
ctccccacccatttcaccaccaccatgacaccgggcacccagtctcctttcttcctgctgctgctcctcacagtgcttacagttgttacgggttctggtcatgcaagctctaccccaggtggagaaaaggagacttcggctacccagagaagttcagtgcccagctctactgagaagaatgcttttaattcctctctggaagatcccagcaccgactactaccaagagctgcagagagacatttctgaaatgtttttgcagatttataaacaagggggttttctgggcctctccaatattaagttcaggccaggatctgtggtggtacaattgactctggccttccgagaaggtaccatcaatgtccacgacgtggagacacagttcaatcagtataaaacggaagcagcctctcgatataacctgacgatctcagacgtcagcgtgagtgatgtgccatttcctttctctgcccagtctggggctggggtgccaggctggggcatcgcgctgctggtgctggtctgtgttctggttgcgctggccattgtctatctcattgccttggctgtctgtcagtgccgccgaaagaactacgggcagctggacatctttccagcccgggatacctaccatcctatgagcgagtaccccacctaccacacccatgggcgctatgtgccccctagcagtaccgatcgtagcccctatgagaaggtttctgcaggtaatggtggcagcagcctctcttacacaaacccagcagtggcagccacttctgccaacttgtaggggcacgtcgcc

SEQ ID NO: 2562 - DNA, 1032 bp, Homo sapiens
  source 1..1032: mol_type = genomic DNA
gcgcctgcctgaatctgttctgccccctccccacccatttcaccaccaccatgacaccgggcacccagtctcctttcttcctgctgctgctcctcacagtgcttacagctaccacagcccctaaacccgcaacagttgttacgggttctggtcatgcaagctctaccccaggtggagaaaaggagacttcggctacccagagaagttcagtgcccagctctactgagaagaatgcttttaattcctctctggaagatcccagcaccgactactaccaagagctgcagagagacatttctgaaatgtttttgcagatttataaacaagggggttttctgggcctctccaatattaagttcaggccaggatctgtggtggtacaattgactctggccttccgagaaggtaccatcaatgtccacgacgtggagacacagttcaatcagtataaaacggaagcagcctctcgatataacctgacgatctcagacgtcagcgtgagtgatgtgccatttcctttctctgcccagtctggggctggggtgccaggctggggcatcgcgctgctggtgctggtctgtgttctggttgcgctggccattgtctatctcattgccttggctgtctgtcagtgccgccgaaagaactacgggcagctggacatctttccagcccgggatacctaccatcctatgagcgagtaccccacctaccacacccatgggcgctatgtgccccctagcagtaccgatcgtagcccctatgagaaggtttctgcaggtaatggtggcagcagcctctcttacacaaacccagcagtggcagccacttctgccaacttgtaggggcacgtcgcccgctgagctgagtggccagccagtgccattccactccactcaggttcttcagggccagagcccctgcaccctgtttgggctggtgagctgggagttcaggtgggctgctcacagcctccttcagaggccccaccaatttctcggacacttctcagtgtgtggaagctcatgtggg

SEQ ID NO: 2563 - DNA, 937 bp, Homo sapiens
  source 1..937: mol_type = genomic DNA
gcgcctgcctgaatctgttctgccccctccccacccatttcaccaccaccatgacaccgggcacccagtctcctttcttcctgctgctgctcctcacagtgcttacagttgttacgggttctggtcatgcaagctctaccccaggtggagaaaaggagacttcggctacccagagaagttcagtgcccagctctactgagaagaatgctttgtctactggggtctctttctttttcctgtcttttcacatttcaaacctccagtttaattcctctctggaagatcccagcaccgactactaccaagagctgcagagagacatttctgaaatgtttttgcagatttataaacaagggggttttctgggcctctccaatattaagttcaggccaggatctgtggtggtacaattgactctggccttccgagaaggtaccatcaatgtccacgacgtggagacacagttcaatcagtataaaacggaagcagcctctcgatataacctgacgatctcagacgtcagcggctgtctgtcagtgccgccgaaagaactacgggcagctggacatctttccagcccgggatacctaccatcctatgagcgagtaccccacctaccacacccatgggcgctatgtgccccctagcagtaccgatcgtagcccctatgagaaggtttctgcaggtaatggtggcagcagcctctcttacacaaacccagcagtggcagccacttctgccaacttgtaggggcacgtcgcccgctgagctgagtggccagccagtgccattccactccactcaggttcttcagggccagagcccctgcaccctgtttgggctggtgagctgggagttcaggtgggctgctcacagcctccttcagaggccccaccaatttctcggacacttctcagtgtgtggaagctcatgtggg

SEQ ID NO: 2564 - DNA, 1811 bp, Homo sapiens
  source 1..1811: mol_type = genomic DNA
cgctccacctctcaagcagccagcgcctgcctgaatctgttctgccccctccccacccatttcaccaccaccatgacaccgggcacccagtctcctttcttcctgctgctgctcctcacagtgcttacagttgttacgggttctggtcatgcaagctctaccccaggtggagaaaaggagacttcggctacccagagaagttcagtgcccagctctactgagaagaatgctgtgagtatgaccagcagcgtactctccagccacagccccggttcaggctcctccaccactcagggacaggatgtcactctggccccggccacggaaccagcttcaggttcagctgccacctggggacaggatgtcacctcggtcccagtcaccaggccagccctgggctccaccaccccgccagcccacgatgtcacctcagccccggacaacaagccagccccgggctccaccgcccccccagcccacggtgtcacctcggccccggacaccaggccggccccgggctccaccgcccccccagcccatggtgtcacctcggccccggacaacaggcccgccttgggctccaccgcccctccagtccacaatgtcacctcggcctcaggctctgcatcaggctcagcttctactctggtgcacaacggcacctctgccagggctaccacaaccccagccagcaagagcactccattctcaattcccagccaccactctgatactcctaccacccttgccagccatagcaccaagactgatgccagtagcactcaccatagcacggtacctcctctcacctcctccaatcacagcacttctccccagttgtctactggggtctctttctttttcctgtcttttcacatttcaaacctccagtttaattcctctctggaagatcccagcaccgactactaccaagagctgcagagagacatttctgaaatgtttttgcagatttataaacaagggggttttctgggcctctccaatattaagttcaggccaggatctgtggtggtacaattgactctggccttccgagaaggtaccatcaatgtccacgacgtggagacacagttcaatcagtataaaacggaagcagcctctcgatataacctgacgatctcagacgtcagcgtgagtgatgtgccatttcctttctctgcccagtctggggctggggtgccaggctggggcatcgcgctgctggtgctggtctgtgttctggttgcgctggccattgtctatctcattgccttggctgtctgtcagtgccgccgaaagaactacgggcagctggacatctttccagcccgggatacctaccatcctatgagcgagtaccccacctaccacacccatgggcgctatgtgccccctagcagtaccgatcgtagcccctatgagaaggtttctgcaggtaatggtggcagcagcctctcttacacaaacccagcagtggcagccacttctgccaacttgtaggggcacgtcgcccgctgagctgagtggccagccagtgccattccactccactcaggttcttcagggccagagcccctgcaccctgtttgggctggtgagctgggagttcaggtgggctgctcacagcctccttcagaggccccaccaatttctcggacacttctcagtgtgtggaagctcatgtgggcccctgagggctcatgcctgggaagtgttgtggtgggggctcccaggaggactggcccagagagccctgagatagcggggatcctgaactggactgaataaaacgtggtctcccactgcgccaa

SEQ ID NO: 2565 - DNA, 516 bp, Homo sapiens
  source 1..516: mol_type = genomic DNA
ctccccacccatttcaccaccaccatgacaccgggcacccagtctcctttcttcctgctgctgctcctcacagtgcttacagctaccacagcccctaaacccgcaacagttgttacgggttctggtcatgcaagctctaccccaggtggagaaaaggagacttcggctacccagagaagttcagtgcccagctctactgagaagaatgcttttaattcctctctggaagatcccagcaccgactactaccaagagctgcagagagacatttctgaaatggctgtctgtcagtgccgccgaaagaactacgggcagctggacatctttccagcccgggatacctaccatcctatgagcgagtaccccacctaccacacccatgggcgctatgtgccccctagcagtaccgatcgtagcccctatgagaaggtttctgcaggtaatggtggcagcagcctctcttacacaaacccagcagtggcagccacttctgccaacttgtaggggcacgtcgcc

SEQ ID NO: 2566 - DNA, 729 bp, Homo sapiens
  source 1..729: mol_type = genomic DNA
ctccccacccatttcaccaccaccatgacaccgggcacccagtctcctttcttcctgctgctgctcctcacagtgcttacagttgttacgggttctggtcatgcaagctctaccccaggtggagaaaaggagacttcggctacccagagaagttcagtgcccagctctactgagaagaatgctatcccagcaccgactactaccaagagctgcagagagacatttctgaaatggccaggatctgtggtggtacaattgactctggccttccgagaaggtaccatcaatgtccacgacgtggagacacagttcaatcagtataaaacggaagcagcctctcgatataacctgacgatctcagacgtcagcgtgagtgatgtgccatttcctttctctgcccagtctggggctggggtgccaggctggggcatcgcgctgctggtgctggtctgtgttctggttgcgctggccattgtctatctcattgccttggctgtctgtcagtgccgccgaaagaactacgggcagctggacatctttccagcccgggatacctaccatcctatgagcgagtaccccacctaccacacccatgggcgctatgtgccccctagcagtaccgatcgtagcccctatgagaaggtttctgcaggtaatggtggcagcagcctctcttacacaaacccagcagtggcagccacttctgccaacttgtaggggcacgtcgcc

SEQ ID NO: 2567 - DNA, 1923 bp, Homo sapiens
  source 1..1923: mol_type = genomic DNA
acctctcaagcagccagcgcctgcctgaatctgttctgccccctccccacccatttcaccaccaccatgacaccgggcacccagtctcctttcttcctgctgctgctcctcacagtgcttacagttgttacgggttctggtcatgcaagctctaccccaggtggagaaaaggagacttcggctacccagagaagttcagtgcccagctctactgagaagaatgctgtgagtatgaccagcagcgtactctccagccacagccccggttcaggctcctccaccactcagggacaggatgtcactctggccccggccacggaaccagcttcaggttcagctgccacctggggacaggatgtcacctcggtcccagtcaccaggccagccctgggctccaccaccccgccagcccacgatgtcacctcggccccggacaccaggccggccccgggctccaccgcccccccagcccacggtgtcacctcggccccggacaccaggccggccccgggctccaccgcccccccagcccacggtgtcacctcggccccggacaccaggccggccccgggctccaccgcccccccagcccacggtgtcacctcggccccggacaccaggccggccccgggctccaccgcacccccagcccacggtgtcacctcggccccggacaccaggcgggccccgggctccaccccggccccgggctccaccgcccccccagcccacggtgtcacctcggccccggacaccaggccggccccgggctccaccgcccccccagcccatggtgtcacctcggccccggacaacaggcccgccttgggctccaccgcccctccagtccacaatgtcacctcggcctcaggctctgcatcaggctcagcttctactctggtgcacaacggcacctctgccagggctaccacaaccccagccagcaagagcactccattctcaattcccagccaccactctgatactcctaccacccttgccagccatagcaccaagactgatgccagtagcactcaccatagcacggtacctcctctcacctcctccaatcacagcacttctccccagttgtctactggggtctctttctttttcctgtcttttcacatttcaaacctccagtttaattcctctctggaagatcccagcaccgactactaccaagagctgcagagagacatttctgaaatgtttttgcagatttataaacaagggggttttctgggcctctccaatattaagttcaggccaggatctgtggtggtacaattgactctggccttccgagaaggtaccatcaatgtccacgacgtggagacacagttcaatcagtataaaacggaagcagcctctcgatataacctgacgatctcagacgtcagcgtgagtgatgtgccatttcctttctctgcccagtctggggctggggtgccaggctggggcatcgcgctgctggtgctggtctgtgttctggttgcgctggccattgtctatctcattgccttggctgtctgtcagtgccgccgaaagaactacgggcagctggacatctttccagcccgggatacctaccatcctatgagcgagtaccccacctaccacacccatgggcgctatgtgccccctagcagtaccgatcgtagcccctatgagaaggtttctgcaggtaatggtggcagcagcctctcttacacaaacccagcagtggcagccacttctgccaacttgtaggggcacgtcgcccgctgagctgagtggccagccagtgccattccactccactcaggttcttcagggccagagcccctgcaccctgtttgggctggtgagctgggagttcaggtgggctgctcacagcctccttcagaggccccaccaatttctcggacacttctcagtgtg

SEQ ID NO: 2568 - DNA, 927 bp, Homo sapiens
  source 1..927: mol_type = genomic DNA
gcgcctgcctgaatctgttctgccccctccccacccatttcaccaccaccatgacaccgggcacccagtctcctttcttcctgctgctgctcctcacagtgcttacagttgttacgggttctggtcatgcaagctctaccccaggtggagaaaaggagacttcggctacccagagaagttcagtgcccagctctactgagaagaatgctatttataaacaagggggttttctgggcctctccaatattaagttcaggccaggatctgtggtggtacaattgactctggccttccgagaaggtaccatcaatgtccacgacgtggagacacagttcaatcagtataaaacggaagcagcctctcgatataacctgacgatctcagacgtcagcgtgagtgatgtgccatttcctttctctgcccagtctggggctggggtgccaggctggggcatcgcgctgctggtgctggtctgtgttctggttgcgctggccattgtctatctcattgccttggctgtctgtcagtgccgccgaaagaactacgggcagctggacatctttccagcccgggatacctaccatcctatgagcgagtaccccacctaccacacccatgggcgctatgtgccccctagcagtaccgatcgtagcccctatgagaaggtttctgcaggtaatggtggcagcagcctctcttacacaaacccagcagtggcagccacttctgccaacttgtaggggcacgtcgcccgctgagctgagtggccagccagtgccattccactccactcaggttcttcagggccagagcccctgcaccctgtttgggctggtgagctgggagttcaggtgggctgctcacagcctccttcagaggccccaccaatttctcggacacttctcagtgtgtggaagctcatgtggg

SEQ ID NO: 2569 - DNA, 1194 bp, Homo sapiens
  source 1..1194: mol_type = genomic DNA
gcgcctgcctgaatctgttctgccccctccccacccatttcaccaccaccatgacaccgggcacccagtctcctttcttcctgctgctgctcctcacagtgcttacagctaccacagcccctaaacccgcaacagttgttacgggttctggtcatgcaagctctaccccaggtggagaaaaggagacttcggctacccagagaagttcagtgcccagctctactgagaagaatgcttttaattcctctctggaagatcccagcaccgactactaccaagagctgcagagagacatttctgaaatgtttttgcagatttataaacaagggggttttctgggcctctccaatattaagttcaggccaggatctgtggtggtacaattgactctggccttccgagaaggtaccatcaatgtccacgacgtggagacacagttcaatcagtataaaacggaagcagcctctcgatataacctgacgatctcagacgtcagcgtgagtgatgtgccatttcctttctctgcccagtctggggctggggtgccaggctggggcatcgcgctgctggtgctggtctgtgttctggttgcgctggccattgtctatctcattgccttggctgtctgtcagtgccgccgaaagaactacgggcagctggacatctttccagcccgggatacctaccatcctatgagcgagtaccccacctaccacacccatgggcgctatgtgccccctagcagtaccgatcgtagcccctatgagaagaggcaaaatgggtggagcactatgcccaggggagcccttcccgaggagtcccaggggtgagcctctgtgcccctaatcatctcctaggaatggagggtagaccgagaaaggctggcatagggggaggtttcccaggtagaagaagaagtgtcagcagaccaggtttctgcaggtaatggtggcagcagcctctcttacacaaacccagcagtggcagccacttctgccaacttgtaggggcacgtcgcccgctgagctgagtggccagccagtgccattccactccactcaggttcttcagggccagagcccctgcaccctgtttgggctggtgagctgggagttcaggtgggctgctcacagcctccttcagaggccccaccaatttctcggacacttctcagtgtgtggaagctcatgtggg

SEQ ID NO: 2570 - DNA, 2761 bp, Homo sapiens
  source 1..2761: mol_type = genomic DNA
ggtgtccggagccgcggacctagagatcccagaagccacagcgcagcggcccggcccgccactatttccaggctcagcggggcaggggccgccgcccaccgcccgccgccatggggctgaaggccgcccagaagacgctgttcccgctgcgctccatcgacgacgtggtgcgcctgtttgctgccgagctgggccgagaggagccggacctggtgctcctttccttggtgctgggcttcgtggagcattttctggctgtcaaccgcgtcatccctaccaacgttcccgagctcaccttccagcccagccccgcccccgacccgcctggcggcctcacctactttcccgtggccgacctgtctatcatcgccgccctctatgcccgcttcaccgcccagatccgaggcgccgtcgacctgtccctctatcctcgagaagggggtgtctccagccgtgagctggtgaagaaggtctccgatgtcatatggaacagcctcagccgctcctacttcaaggatcgggcccacatccagtccctcttcagcttcatcacaggcaccaaattggacagctccggtgtggcctttgctgtggttggggcctgccaggccctgggtctccgggatgtccacctcgccctgtctgaggatcatgcctgggtagtgtttgggcccaatggggagcagacagctgaggtcacctggcacggcaagggcaacgaggaccgcaggggccagacagtcaatgccggtgtggctgagcggagctggctgtacctgaaaggatcatacatgcgctgtgaccgcaagatggaggtggcgttcatggtgtgtgccatcaacccttccattgacctgcacaccgactcgctggagcttctgcagctgcagcagaagctgctctggctgctctatgacctgggacatctggaaaggtaccccatggccttagggaacctggcagatctagaggagctggagcccacccctggccggccagacccactcaccctctaccacaagggcattgcctcagccaagacctactatcgggatgaacacatctacccctacatgtacctggctggctaccactgtcgcaaccgcaatgtgcgggaagccctgcaggcctgggcggacacggccactgtcatccaggactacaactactgccgggaagacgaggagatctacaaggagttctttgaagtagccaatgatgtcatccccaacctgctgaaggaggcagccagcttgctggaggcgggcgaggagcggccgggggagcaaagccagggcacccagagccaaggttccgccctccaggaccctgagtgcttcgcccacctgctgcgattctacgacggcatctgcaaatgggaggagggcagtcccacgcctgtgctgcatgtgggctgggccacctttcttgtgcagtccctaggccgttttgagggacaggtgcggcagaaggtgcgcatagtgagccgagaggccgaggcggccgaggccgaggagccgtggggcgaggaagcccgggaaggccggcggcggggcccacggcgggagtccaagccagaggagcccccgccgcccaagaagccagcactggacaagggcctgggcaccggccagggtgcagtgtcaggacccccccggaagcctcctgggactgtcgctggcacagcccgaggccctgaaggtggcagcacggctcaggtgccagcacccacagcatcaccaccgccggagggtccagtgctcactttccagagtgagaagatgaagggcatgaaggagctgctggtggccaccaagatcaactcgagcgccatcaagctgcaactcacggcacagtcgcaagtgcagatgaagaagcagaaagtgtccacccctagtgactacactctgtctttcctcaagcggcagcgcaaaggcctctgaactactggggacttcggaccgcttgtggggacccaggctccgcccttagtcccccaactctgagcccatgttctgcccccagcccaaaggggacaggcctcacctctacccaaaccctaggttcccggtcccgagtacagtctgtatcaaacccacgattttctccagctcagaacccagggctctgccccagtcgttagaatataggtctcttctcccagaatcccagccggccaatggaaacctcacgctgggtcctaattaccagtctttaaaggcccagcccctagaaacccaagctcctcctcggaaccgctcacctagagccagaccaacgttactcagggctcctcccagcttgtaggagctgaggtttcacccttaacccaaggagcacaggtcccacctccagcccgggagcctaggaccactcagcccctaggagtatatttccgcacttcagaattccatatcttgcgaatccaagctccctgccccaaataacttcagtcctgctccagaatttggaaatcctagtttcctctccttcgtatcccgagtctgggacacaaaactccgcccccagcctatgagcatcctgagccccgccctcttcctgacgaaactggccccggatcagagcaggacctcccttccgaccctctgggaacctcccagaggtccagcccatctcggagcatcccggaggaaatctgcagagggttaggagtgggtgacaagagcctgatctcttcctgttttgtacatagatttatttttcagttccaagaaagatgaatacattttgttaaaaaaaa

SEQ ID NO: 2571 - DNA, 3148 bp, Homo sapiens
  source 1..3148: mol_type = genomic DNA
caatccctgagtatctcgggaaggaggtgtccggagccgcggacctagagatcccagaagccacagcgcagcggcccggcccgccactatttccaggctcagcggggcaggggtgggcccagactccacttcccggcgggtagtgcgaccctaggggcgggacttcatgtcccagcaggctccgggcggcgtgcgccgcggtgcctagtgtgggatgtaagcgcggaggtgggcgagggggaccgaggccaggactctccttggggtttgggggcttgacctgggtgcgctttctggacagactttacagccccgggggcacagtcgtagagagggggcggggcggccattggggctcctcattggggtgcttggggcgcaccccatcgggtaccgggcgtcccggaattgtgggggacaaaaaggctctgcagtctcggctgaggggtctcaccgacaaaagaggggaagccggccgccgcccaccgcccgccgccatggggctgaaggccgcccagaagacgctgttcccgctgcgctccatcgacgacgtggtgcgcctgtttgctgccgagctgggccgagaggagccggacctggtgctcctttccttggtgctgggcttcgtggagcattttctggctgtcaaccgcgtcatccctaccaacgttcccgagctcaccttccagcccagccccgcccccgacccgcctggcggcctcacctactttcccgtggccgacctgtctatcatcgccgccctctatgcccgcttcaccgcccagatccgaggcgccgtcgacctgtccctctatcctcgagaagggggtgtctccagccgtgagctggtgaagaaggtctccgatgtcatatggaacagcctcagccgctcctacttcaaggatcgggcccacatccagtccctcttcagcttcatcacaggcaccaaattggacagctccggtgtggcctttgctgtggttggggcctgccaggccctgggtctccgggatgtccacctcgccctgtctgaggatcatgcctgggtagtgtttgggcccaatggggagcagacagctgaggtcacctggcacggcaagggcaacgaggaccgcaggggccagacagtcaatgccggtgtggctgagcggagctggctgtacctgaaaggatcatacatgcgctgtgaccgcaagatggaggtggcgttcatggtgtgtgccatcaacccttccattgacctgcacaccgactcgctggagcttctgcagctgcagcagaagctgctctggctgctctatgacctgggacatctggaaaggtaccccatggccttagggaacctggcagatctagaggagctggagcccacccctggccggccagacccactcaccctctaccacaagggcattgcctcagccaagacctactatcgggatgaacacatctacccctacatgtacctggctggctaccactgtcgcaaccgcaatgtgcgggaagccctgcaggcctgggcggacacggccactgtcatccaggactacaactactgccgggaagacgaggagatctacaaggagttctttgaagtagccaatgatgtcatccccaacctgctgaaggaggcagccagcttgctggaggcgggcgaggagcggccgggggagcaaagccagggcacccagagccaaggttccgccctccaggaccctgagtgcttcgcccacctgctgcgattctacgacggcatctgcaaatgggaggagggcagtcccacgcctgtgctgcatgtgggctgggccacctttcttgtgcagtccctaggccgttttgagggacaggtgcggcagaaggtgcgcatagtgagccgagaggccgaggcggccgaggccgaggagccgtggggcgaggaagcccgggaaggccggcggcggggcccacggcgggagtccaagccagaggagcccccgccgcccaagaagccagcactggacaagggcctgggcaccggccagggtgcagtgtcaggacccccccggaagcctcctgggactgtcgctggcacagcccgaggccctgaaggtggcagcacggctcaggtgccagcacccacagcatcaccaccgccggagggtccagtgctcactttccagagtgagaagatgaagggcatgaaggagctgctggtggccaccaagatcaactcgagcgccatcaagctgcaactcacggcacagtcgcaagtgcagatgaagaagcagaaagtgtccacccctagtgactacactctgtctttcctcaagcggcagcgcaaaggcctctgaactactggggacttcggaccgcttgtggggacccaggctccgcccttagtcccccaactctgagcccatgttctgcccccagcccaaaggggacaggcctcacctctacccaaaccctaggttcccggtcccgagtacagtctgtatcaaacccacgattttctccagctcagaacccagggctctgccccagtcgttagaatataggtctcttctcccagaatcccagccggccaatggaaacctcacgctgggtcctaattaccagtctttaaaggcccagcccctagaaacccaagctcctcctcggaaccgctcacctagagccagaccaacgttactcagggctcctcccagcttgtaggagctgaggtttcacccttaacccaaggagcacaggtcccacctccagcccgggagcctaggaccactcagcccctaggagtatatttccgcacttcagaattccatatcttgcgaatccaagctccctgccccaaataacttcagtcctgctccagaatttggaaatcctagtttcctctccttcgtatcccgagtctgggacacaaaactccgcccccagcctatgagcatcctgagccccgccctcttcctgacgaaactggccccggatcagagcaggacctcccttccgaccctctgggaacctcccagaggtccagcccatctcggagcatcccggaggaaatctgcagagggttaggagtgggtgacaagagcctgatctcttcctgttttgtacatagatttatttttcagttccaagaaagatgaatacattttgttaaaaaaaa

SEQ ID NO: 2572 - DNA, 3162 bp, Homo sapiens
  source 1..3162: mol_type = genomic DNA
tatatttatgtatatgcacatacacacaaaattaggcgggagtggtggcgcacgcctgtgatcacagctactcgggaggctgaggcacgagaatcgcttgagcccgtgaagtcgaggctgcagtgagcccagatcgagccactgcattccagcctgggcgaaagagaaagaccgtgtctcaaaacaaacaaacaaaagctactcttagcacgtgttagagtatctcgcgggcggaagtgggaaacgagtgctgcacacagagtaggcatctttatatgttaacagacactgatacccagctaaagcggctgaacacatttactctctggcagtgtttaaaagtatctgtttttctcatattgttttattttaattttttctggatcaagcaacctgatctttttcctcataacttgccgaccgacccgtgacagcaaaaccggcagaagctcggcgacctcccaccccgagtctgcaggtagccgccgcccaccgcccgccgccatggggctgaaggccgcccagaagacgctgttcccgctgcgctccatcgacgacgtggtgcgcctgtttgctgccgagctgggccgagaggagccggacctggtgctcctttccttggtgctgggcttcgtggagcattttctggctgtcaaccgcgtcatccctaccaacgttcccgagctcaccttccagcccagccccgcccccgacccgcctggcggcctcacctactttcccgtggccgacctgtctatcatcgccgccctctatgcccgcttcaccgcccagatccgaggcgccgtcgacctgtccctctatcctcgagaagggggtgtctccagccgtgagctggtgaagaaggtctccgatgtcatatggaacagcctcagccgctcctacttcaaggatcgggcccacatccagtccctcttcagcttcatcacaggttggagcccagtaggcaccaaattggacagctccggtgtggcctttgctgtggttggggcctgccaggccctgggtctccgggatgtccacctcgccctgtctgaggatcatgcctgggtagtgtttgggcccaatggggagcagacagctgaggtcacctggcacggcaagggcaacgaggaccgcaggggccagacagtcaatgccggtgtggctgagcggagctggctgtacctgaaaggatcatacatgcgctgtgaccgcaagatggaggtggcgttcatggtgtgtgccatcaacccttccattgacctgcacaccgactcgctggagcttctgcagctgcagcagaagctgctctggctgctctatgacctgggacatctggaaaggtaccccatggccttagggaacctggcagatctagaggagctggagcccacccctggccggccagacccactcaccctctaccacaagggcattgcctcagccaagacctactatcgggatgaacacatctacccctacatgtacctggctggctaccactgtcgcaaccgcaatgtgcgggaagccctgcaggcctgggcggacacggccactgtcatccaggactacaactactgccgggaagacgaggagatctacaaggagttctttgaagtagccaatgatgtcatccccaacctgctgaaggaggcagccagcttgctggaggcgggcgaggagcggccgggggagcaaagccagggcacccagagccaaggttccgccctccaggaccctgagtgcttcgcccacctgctgcgattctacgacggcatctgcaaatgggaggagggcagtcccacgcctgtgctgcatgtgggctgggccacctttcttgtgcagtccctaggccgttttgagggacaggtgcggcagaaggtgcgcatagtgagccgagaggccgaggcggccgaggccgaggagccgtggggcgaggaagcccgggaaggccggcggcggggcccacggcgggagtccaagccagaggagcccccgccgcccaagaagccagcactggacaagggcctgggcaccggccagggtgcagtgtcaggacccccccggaagcctcctgggactgtcgctggcacagcccgaggccctgaaggtggcagcacggctcaggtgccagcacccacagcatcaccaccgccggagggtccagtgctcactttccagagtgagaagatgaagggcatgaaggagctgctggtggccaccaagatcaactcgagcgccatcaagctgcaactcacggcacagtcgcaagtgcagatgaagaagcagaaagtgtccacccctagtgactacactctgtctttcctcaagcggcagcgcaaaggcctctgaactactggggacttcggaccgcttgtggggacccaggctccgcccttagtcccccaactctgagcccatgttctgcccccagcccaaaggggacaggcctcacctctacccaaaccctaggttcccggtcccgagtacagtctgtatcaaacccacgattttctccagctcagaacccagggctctgccccagtcgttagaatataggtctcttctcccagaatcccagccggccaatggaaacctcacgctgggtcctaattaccagtctttaaaggcccagcccctagaaacccaagctcctcctcggaaccgctcacctagagccagaccaacgttactcagggctcctcccagcttgtaggagctgaggtttcacccttaacccaaggagcacaggtcccacctccagcccgggagcctaggaccactcagcccctaggagtatatttccgcacttcagaattccatatcttgcgaatccaagctccctgccccaaataacttcagtcctgctccagaatttggaaatcctagtttcctctccttcgtatcccgagtctgggacacaaaactccgcccccagcctatgagcatcctgagccccgccctcttcctgacgaaactggccccggatcagagcaggacctcccttccgaccctctgggaacctcccagaggtccagcccatctcggagcatcccggaggaaatctgcagagggttaggagtgggtgacaagagcctgatctcttcctgttttgtacatagatttatttttcagttccaagaaagatgaatacattttgtt

SEQ ID NO: 2573 - DNA, 1871 bp, Homo sapiens
  source 1..1871: mol_type = genomic DNA
gccgccgcccaccgcccgccgccatggggctgaaggccgcccagaagacgctgttcccgctgcgctccatcgacgacgtggtgcgcctgtttgctgccgagctgggccgagaggagccggacctggtgctcctttccttggtgctgggcttcgtggagcattttctggctgtcaaccgcgtcatccctaccaacgttcccgagctcaccttccagcccagccccgcccccgacccgcctggcggcctcacctactttcccgtggccgacctgtctatcatcgccgccctctatgcccgcttcaccgcccagatccgaggcgccgtcgacctgtccctctatcctcgagaagggggtgtctccagccgtgagctggtgaagaaggtctccgatgtcatatggaacagcctcagccgctcctacttcaaggatcgggcccacatccagtccctcttcagcttcatcacaggttggagcccagtaggcaccaaattggacagctccggtgtggcctttgctgtggttggggcctgccaggccctgggtctccgggatgtccacctcgccctgtctgaggatcatgcctgggtagtgtttgggcccaatggggagcagacagctgaggtcacctggcacggcaagggcaacgaggaccgcaggggccagacagtcaatgccggtgtggctgagcggagctggctgtacctgaaaggatcatacatgcgctgtgaccgcaagatggaggtggcgttcatggtgtgtgccatcaacccttccattgacctgcacaccgactcgctggagcttctgcagctgcagcagaagctgctctggctgctctatgacctgggacatctggaaaggtaccccatggccttagggaacctggcagatctagaggagctggagcccacccctggccggccagacccactcaccctctaccacaagggcattgcctcagccaagacctactatcgggatgaacacatctacccctacatgtacctggctggctaccactgtcgcaaccgcaatgtgcgggaagccctgcaggcctgggcggacacggccactgtcatccaggactacaactactgccgggaagacgaggagatctacaaggagttctttgaagtagccaatgatgtcatccccaacctgctgaaggaggcagccagcttgctggaggcgggcgaggagcggccgggggagcaaagccagggcacccagagccaaggttccgccctccaggaccctgagtgcttcgcccacctgctgcgattctacgacggcatctgcaaatgggaggagggcagtcccacgcctgtgctgcatgtgggctgggccacctttcttgtgcagtccctaggccgttttgagggacaggtgcggcagaaggtgcgcatagtgagccgagaggccgaggcggccgaggccgaggagccgtggggcgaggaagcccgggaaggccggcggcggggcccacggcgggagtccaagccagaggagcccccgccgcccaagaagccagcactggacaagggcctgggcaccggccagggtgcagtgtcaggacccccccggaagcctcctgggactgtcgctggcacagcccgaggccctgaaggtggcagcacggctcaggtgccagcacccacagcatcaccaccgccggagggtccagtgctcactttccagagtgagaagatgaagggcatgaaggagctgctggtggccaccaagatcaactcgagcgccatcaagctgcaactcacggcacagtcgcaagtgcagatgaagaagcagaaagtgtccacccctagtgactacactctgtctttcctcaagcggcagcgcaaaggcctctga

SEQ ID NO: 2574 - DNA, 2862 bp, Homo sapiens
  source 1..2862: mol_type = genomic DNA
ctccttggggtttgggggcttgacctgggtgcgctttctggacagactttacagccccgggggcacagtcgtagagagggggcggggcggccattggggctcctcattggggtgcttggggcgcaccccatcgggtaccgggcgtcccggaattgtgggggacaaaaaggctctgcagtctcggctgaggggtctcaccgacaaaagaggggaagccggtgagcagaggctgaagagggtggggaagcaggggagctgtgcgtgtgtcggggcgggtggaaccttagcggaccctgggaggaggctccccggccgaacctgcccgaccctccctcccccggcttgccttgcaggccgccgcccaccgcccgccgccatggggctgaaggccgcccagaagacgctgttcccgctgcgctccatcgacgacgtggtgcgcctgtttgctgccgagctgggccgagaggagccggacctggtgctcctttccttggtgctgggcttcgtggagcattttctggctgtcaaccgcgtcatccctaccaacgttcccgagctcaccttccagcccagccccgcccccgacccgcctggcggcctcacctactttcccgtggccgacctgtctatcatcgccgccctctatgcccgcttcaccgcccagatccgaggcgccgtcgacctgtccctctatcctcgagaagggggtgtctccagccgtgagctggtgaagaaggtctccgatgtcatatggaacagcctcagccgctcctacttcaaggatcgggcccacatccagtccctcttcagcttcatcacaggcaccaaattggacagctccggtgtggcctttgctgtggttggggcctgccaggccctgggtctccgggatgtccacctcgccctgtctgaggatcatgcctgggtagtgtttgggcccaatggggagcagacagctgaggtcacctggcacggcaagggcaacgaggaccgcaggggccagacagtcaatgccggtgtggctgagcggagctggctgtacctgaaaggatcatacatgcgctgtgaccgcaagatggaggtggcgttcatggtgtgtgccatcaacccttccattgacctgcacaccgactcgctggagcttctgcagctgcagcagaagctgctctggctgctctatgacctgggacatctggaaaggtaccccatggccttagggaacctggcagatctagaggagctggagcccacccctggccggccagacccactcaccctctaccacaagggcattgcctcagccaagacctactatcgggatgaacacatctacccctacatgtacctggctggctaccactgtcgcaaccgcaatgtgcgggaagccctgcaggcctgggcggacacggccactgtcatccaggactacaactactgccgggaagacgaggagatctacaaggagttctttgaagtagccaatgatgtcatccccaacctgctgaaggaggcagccagcttgctggaggcgggcgaggagcggccgggggagcaaagccaggtgcggcagaaggtgcgcatagtgagccgagaggccgaggcggccgaggccgaggagccgtggggcgaggaagcccgggaaggccggcggcggggcccacggcgggagtccaagccagaggagcccccgccgcccaagaagccagcactggacaagggcctgggcaccggccagggtgcagtgtcaggacccccccggaagcctcctgggactgtcgctggcacagcccgaggccctgaaggtggcagcacggctcaggtgccagcacccacagcatcaccaccgccggagggtccagtgctcactttccagagtgagaagatgaagggcatgaaggagctgctggtggccaccaagatcaactcgagcgccatcaagctgcaactcacggcacagtcgcaagtgcagatgaagaagcagaaagtgtccacccctagtgactacactctgtctttcctcaagcggcagcgcaaaggcctctgaactactggggacttcggaccgcttgtggggacccaggctccgcccttagtcccccaactctgagcccatgttctgcccccagcccaaaggggacaggcctcacctctacccaaaccctaggttcccggtcccgagtacagtctgtatcaaacccacgattttctccagctcagaacccagggctctgccccagtcgttagaatataggtctcttctcccagaatcccagccggccaatggaaacctcacgctgggtcctaattaccagtctttaaaggcccagcccctagaaacccaagctcctcctcggaaccgctcacctagagccagaccaacgttactcagggctcctcccagcttgtaggagctgaggtttcacccttaacccaaggagcacaggtcccacctccagcccgggagcctaggaccactcagcccctaggagtatatttccgcacttcagaattccatatcttgcgaatccaagctccctgccccaaataacttcagtcctgctccagaatttggaaatcctagtttcctctccttcgtatcccgagtctgggacacaaaactccgcccccagcctatgagcatcctgagccccgccctcttcctgacgaaactggccccggatcagagcaggacctcccttccgaccctctgggaacctcccagaggtccagcccatctcggagcatcccggaggaaatctgcagagggttaggagtgggtgacaagagcctgatctcttcctgttttgtacatagatttatttttcagttccaagaaagatgaatacattttgttaaaaaaaa

SEQ ID NO: 2575 - DNA, 2614 bp, Homo sapiens
  source 1..2614: mol_type = genomic DNA
gggcggcgtgcgccgcggtgcctagtgtgggatgtaagcgcggaggccgccgcccaccgcccgccgccatggggctgaaggccgcccagaagacgctgttcccgctgcgctccatcgacgacgtggtgcgcctgtttgctgccgagctgggccgagaggagccggacctggtgctcctttccttggtgctgggcttcgtggagcattttctggctgtcaaccgcgtcatccctaccaacgttcccgagctcaccttccagcccagccccgcccccgacccgcctggcggcctcacctactttcccgtggccgacctgtctatcatcgccgccctctatgcccgcttcaccgcccagatccgaggcgccgtcgacctgtccctctatcctcgagaagggggtgtctccagccgtgagctggtgaagaaggtctccgatgtcatatggaacagcctcagccgctcctacttcaaggatcgggcccacatccagtccctcttcagcttcatcacaggcaccaaattggacagctccggtgtggcctttgctgtggttggggcctgccaggccctgggtctccgggatgtccacctcgccctgtctgaggatcatgcctggagctggctgtacctgaaaggatcatacatgcgctgtgaccgcaagatggaggtggcgttcatggtgtgtgccatcaacccttccattgacctgcacaccgactcgctggagcttctgcagctgcagcagaagctgctctggctgctctatgacctgggacatctggaaaggtaccccatggccttagggaacctggcagatctagaggagctggagcccacccctggccggccagacccactcaccctctaccacaagggcattgcctcagccaagacctactatcgggatgaacacatctacccctacatgtacctggctggctaccactgtcgcaaccgcaatgtgcgggaagccctgcaggcctgggcggacacggccactgtcatccaggactacaactactgccgggaagacgaggagatctacaaggagttctttgaagtagccaatgatgtcatccccaacctgctgaaggaggcagccagcttgctggaggcgggcgaggagcggccgggggagcaaagccagggcacccagagccaaggttccgccctccaggaccctgagtgcttcgcccacctgctgcgattctacgacggcatctgcaaatgggaggagggcagtcccacgcctgtgctgcatgtgggctgggccacctttcttgtgcagtccctaggccgttttgagggacaggtgcggcagaaggtgcgcatagtgagccgagaggccgaggcggccgaggccgaggagccgtggggcgaggaagcccgggaaggccggcggcggggcccacggcgggagtccaagccagaggagcccccgccgcccaagaagccagcactggacaagggcctgggcaccggccagggtgcagtgtcaggacccccccggaagcctcctgggactgtcgctggcacagcccgaggccctgaaggtggcagcacggctcaggtgccagcacccacagcatcaccaccgccggagggtccagtgctcactttccagagtgagaagatgaagggcatgaaggagctgctggtggccaccaagatcaactcgagcgccatcaagctgcaactcacggcacagtcgcaagtgcagatgaagaagcagaaagtgtccacccctagtgactacactctgtctttcctcaagcggcagcgcaaaggcctctgaactactggggacttcggaccgcttgtggggacccaggctccgcccttagtcccccaactctgagcccatgttctgcccccagcccaaaggggacaggcctcacctctacccaaaccctaggttcccggtcccgagtacagtctgtatcaaacccacgattttctccagctcagaacccagggctctgccccagtcgttagaatataggtctcttctcccagaatcccagccggccaatggaaacctcacgctgggtcctaattaccagtctttaaaggcccagcccctagaaacccaagctcctcctcggaaccgctcacctagagccagaccaacgttactcagggctcctcccagcttgtaggagctgaggtttcacccttaacccaaggagcacaggtcccacctccagcccgggagcctaggaccactcagcccctaggagtatatttccgcacttcagaattccatatcttgcgaatccaagctccctgccccaaataacttcagtcctgctccagaatttggaaatcctagtttcctctccttcgtatcccgagtctgggacacaaaactccgcccccagcctatgagcatcctgagccccgccctcttcctgacgaaactggccccggatcagagcaggacctcccttccgaccctctgggaacctcccagaggtccagcccatctcggagcatcccggaggaaatctgcagagggttaggagtgggtgacaagagcctgatctcttcctgttttgtacatagatttatttttcagttccaagaaagatgaatacattttgttaaaaaaaa

SEQ ID NO: 2576 - DNA, 3150 bp, Homo sapiens
  source 1..3150: mol_type = genomic DNA
cggcgggtagtgcgaccctaggggcgggacttcatgtcccagcaggctccgggcggcgtgcgccgcggtgcctagtgtgggatgtaagcgcggaggtgggcgagggggaccgaggccaggactctccttggggtttgggggcttgacctgggtgcgctttctggacagactttacagccccgggggcacagtcgtagagagggggcggggcggccattggggctcctcattggggtgcttggggcgcaccccatcgggtaccgggcgtcccggaattgtgggggacaaaaaggctctgcagtctcggctgaggggtctcaccgacaaaagaggggaagccggtgagcagaggctgaagagggtggggaagcaggggagctgtgcgtgtgtcggggcgggtggaaccttagcggaccctgggaggaggctccccggccgaacctgcccgaccctccctcccccggcttgccttgcaggccgccgcccaccgcccgccgccatggggctgaaggccgcccagaagacgctgttcccgctgcgctccatcgacgacgtggtgcgcctgtttgctgccgagctgggccgagaggagccggacctggtgctcctttccttggtgctgggcttcgtggagcattttctggctgtcaaccgcgtcatccctaccaacgttcccgagctcaccttccagcccagccccgcccccgacccgcctggcggcctcacctactttcccgtggccgacctgtctatcatcgccgccctctatgcccgcttcaccgcccagatccgaggcgccgtcgacctgtccctctatcctcgagaagggggtgtctccagccgtgagctggtgaagaaggtctccgatgtcatatggaacagcctcagccgctcctacttcaaggatcgggcccacatccagtccctcttcagcttcatcacaggcaccaaattggacagctccggtgtggcctttgctgtggttggggcctgccaggccctgggtctccgggatgtccacctcgccctgtctgaggatcatgcctgggtagtgtttgggcccaatggggagcagacagctgaggtcacctggcacggcaagggcaacgaggaccgcaggggccagacagtcaatgccggtgtggctgagcggagctggctgtacctgaaaggatcatacatgcgctgtgaccgcaagatggaggtggcgttcatggtgtgtgccatcaacccttccattgacctgcacaccgactcgctggagcttctgcagctgcagcagaagctgctctggctgctctatgacctgggacatctggaaaggtaccccatggccttagggaacctggcagatctagaggagctggagcccacccctggccggccagacccactcaccctctaccacaagggcattgcctcagccaagacctactatcgggatgaacacatctacccctacatgtacctggctggctaccactgtcgcaaccgcaatgtgcgggaagccctgcaggcctgggcggacacggccactgtcatccaggactacaactactgccgggaagacgaggagatctacaaggagttctttgaagtagccaatgatgtcatccccaacctgctgaaggaggcagccagcttgctggaggcgggcgaggagcggccgggggagcaaagccagggcacccagagccaaggttccgccctccaggaccctgagtgcttcgcccacctgctgcgattctacgacggcatctgcaaatgggaggagggcagtcccacgcctgtgctgcatgtgggctgggccacctttcttgtgcagtccctaggccgttttgagggacaggtgcggcagaaggtgcgcatagtgagccgagaggccgaggcggccgaggccgaggagccgtggggcgaggaagcccgggaaggccggcggcggggcccacggcgggagtccaagccagaggagcccccgccgcccaagaagccagcactggacaagggcctgggcaccggccagggtgcagtgtcaggacccccccggaagcctcctgggactgtcgctggcacagcccgaggccctgaaggtggcagcacggctcaggtgccagcacccacagcatcaccaccgccggagggtccagtgctcactttccagagtgagaagatgaagggcatgaaggagctgctggtggccaccaagatcaactcgagcgccatcaagctgcaactcacggcacagtcgcaagtgcagatgaagaagcagaaagtgtccacccctagtgactacactctgtctttcctcaagcggcagcgcaaaggcctctgaactactggggacttcggaccgcttgtggggacccaggctccgcccttagtcccccaactctgagcccatgttctgcccccagcccaaaggggacaggcctcacctctacccaaaccctaggttcccggtcccgagtacagtctgtatcaaacccacgattttctccagctcagaacccagggctctgccccagtcgttagaatataggtctcttctcccagaatcccagccggccaatggaaacctcacgctgggtcctaattaccagtctttaaaggcccagcccctagaaacccaagctcctcctcggaaccgctcacctagagccagaccaacgttactcagggctcctcccagcttgtaggagctgaggtttcacccttaacccaaggagcacaggtcccacctccagcccgggagcctaggaccactcagcccctaggagtatatttccgcacttcagaattccatatcttgcgaatccaagctccctgccccaaataacttcagtcctgctccagaatttggaaatcctagtttcctctccttcgtatcccgagtctgggacacaaaactccgcccccagcctatgagcatcctgagccccgccctcttcctgacgaaactggccccggatcagagcaggacctcccttccgaccctctgggaacctcccagaggtccagcccatctcggagcatcccggaggaaatctgcagagggttaggagtgggtgacaagagcctgatctcttcctgttttgtacatagatttatttttcagttccaagaaagatgaatacattttgttaaaaaaaa

SEQ ID NO: 2577 - DNA, 3155 bp, Homo sapiens
  source 1..3155: mol_type = genomic DNA
caatccctgagtatctcgggaaggaggtgtccggagccgcggacctagagatcccagaagccacagcgcagcggcccggcccgccactatttccaggctcagcggggcaggggtgggcccagactccacttcccggcgggtagtgcgaccctaggggcgggacttcatgtcccagcaggctccgggcggcgtgcgccgcggtgcctagtgtgggatgtaagcgcggaggtgggcgagggggaccgaggccaggactctccttggggtttgggggcttgacctgggtgcgctttctggacagactttacagccccgggggcacagtcgtagagagggggcggggcggccattggggctcctcattggggtgcttggggcgcaccccatcgggtaccgggcgtcccggaattgtgggggacaaaaaggctctgcagtctcggctgaggggtctcaccgacaaaagaggggaagccggccgccgcccaccgcccgccgccatggggctgaaggccgcccagaagacgctgttcccgctgcgctccatcgacgacgtggtgcgcctgtttgctgccgagctgggccgagaggagccggacctggtgctcctttccttggtgctgggcttcgtggagcattttctggctgtcaaccgcgtcatccctaccaacgttcccgagctcaccttccagcccagccccgcccccgacccgcctggcggcctcacctactttcccgtggccgacctgtctatcatcgccgccctctatgcccgcttcaccgcccagatccgaggcgccgtcgacctgtccctctatcctcgagaagggggtgtctccagccgtgagctggtgaagaaggtctccgatgtcatatggaacagcctcagccgctcctacttcaaggatcgggcccacatccagtccctcttcagcttcatcacaggttggagcccagtaggcaccaaattggacagctccggtgtggcctttgctgtggttggggcctgccaggccctgggtctccgggatgtccacctcgccctgtctgaggatcatgcctgggtagtgtttgggcccaatggggagcagacagctgaggtcacctggcacggcaagggcaacgaggaccgcaggggccagacagtcaatgccggtgtggctgagcggagctggctgtacctgaaaggatcatacatgcgctgtgaccgcaagatggaggtggcgttcatggtgtgtgccatcaacccttccattgacctgcacaccgactcgctggagcttctgcagctgcagcagaagctgctctggctgctctatgacctgggacatctggaaaggtaccccatggccttagggaacctggcagatctagaggagctggagcccacccctggccggccagacccactcaccctctaccacaagggcattgcctcagccaagacctactatcgggatgaacacatctacccctacatgtacctggctggctaccactgtcgcaaccgcaatgtgcgggaagccctgcaggcctgggcggacacggccactgtcatccaggactacaactactgccgggaagacgaggagatctacaaggagttctttgaagtagccaatgatgtcatccccaacctgctgaaggaggcagccagcttgctggaggcgggcgaggagcggccgggggagcaaagccagggcacccagagccaaggttccgccctccaggaccctgagtgcttcgcccacctgctgcgattctacgacggcatctgcaaatgggaggagggcagtcccacgcctgtgctgcatgtgggctgggccacctttcttgtgcagtccctaggccgttttgagggacaggtgcggcagaaggtgcgcatagtgagccgagaggccgaggcggccgaggccgaggagccgtggggcgaggaagcccgggaaggccggcggcggggcccacggcgggagtccaagccagaggagcccccgccgcccaagaagccagcactggacaagggcctgggcaccggccagggtgcagtgtcaggacccccccggaagcctcctgggactgtcgctggcacagcccgaggccctgaaggtggcagcacggctcaggtgccagcacccacagcatcaccaccgccggagggtccagtgctcactttccagagtgagaagatgaagggcatgaaggagctgctggtggccaccaagatcaactcgagcgccatcaagctgcaactcacggcacagtcgcaagtgcagatgaagaagcagaaagtgtccacccctagtgactacactctgtctttcctcaagcggcagcgcaaaggcctctgaactactggggacttcggaccgcttgtggggacccaggctccgcccttagtcccccaactctgagcccatgttctgcccccagcccaaaggggacaggcctcacctctacccaaaccctaggttcccggtcccgagtacagtctgtatcaaacccacgattttctccagctcagaacccagggctctgccccagtcgttagaatataggtctcttctcccagaatcccagccggccaatggaaacctcacgctgggtcctaattaccagtctttaaaggcccagcccctagaaacccaagctcctcctcggaaccgctcacctagagccagaccaacgttactcagggctcctcccagcttgtaggagctgaggtttcacccttaacccaaggagcacaggtcccacctccagcccgggagcctaggaccactcagcccctaggagtatatttccgcacttcagaattccatatcttgcgaatccaagctccctgccccaaataacttcagtcctgctccagaatttggaaatcctagtttcctctccttcgtatcccgagtctgggacacaaaactccgcccccagcctatgagcatcctgagccccgccctcttcctgacgaaactggccccggatcagagcaggacctcccttccgaccctctgggaacctcccagaggtccagcccatctcggagcatcccggaggaaatctgcagagggttaggagtgggtgacaagagcctgatctcttcctgttttgtacatagatttatttttcagttccaagaaagatgaatacattttgtt

SEQ ID NO: 2578 - DNA, 3034 bp, Homo sapiens
  source 1..3034: mol_type = genomic DNA
tatatttatgtatatgcacatacacacaaaattaggcgggagtggtggcgcacgcctgtgatcacagctactcgggaggctgaggcacgagaatcgcttgagcccgtgaagtcgaggctgcagtgagcccagatcgagccactgcattccagcctgggcgaaagagaaagaccgtgtctcaaaacaaacaaacaaaagctactcttagcacgtgttagagtatctcgcgggcggaagtgggaaacgagtgctgcacacagacaacctgatctttttcctcataacttgccgaccgacccgtgacagcaaaaccggcagaagctcggcgacctcccaccccgagtctgcaggtagccgccgcccaccgcccgccgccatggggctgaaggccgcccagaagacgctgttcccgctgcgctccatcgacgacgtggtgcgcctgtttgctgccgagctgggccgagaggagccggacctggtgctcctttccttggtgctgggcttcgtggagcattttctggctgtcaaccgcgtcatccctaccaacgttcccgagctcaccttccagcccagccccgcccccgacccgcctggcggcctcacctactttcccgtggccgacctgtctatcatcgccgccctctatgcccgcttcaccgcccagatccgaggcgccgtcgacctgtccctctatcctcgagaagggggtgtctccagccgtgagctggtgaagaaggtctccgatgtcatatggaacagcctcagccgctcctacttcaaggatcgggcccacatccagtccctcttcagcttcatcacaggttggagcccagtaggcaccaaattggacagctccggtgtggcctttgctgtggttggggcctgccaggccctgggtctccgggatgtccacctcgccctgtctgaggatcatgcctgggtagtgtttgggcccaatggggagcagacagctgaggtcacctggcacggcaagggcaacgaggaccgcaggggccagacagtcaatgccggtgtggctgagcggagctggctgtacctgaaaggatcatacatgcgctgtgaccgcaagatggaggtggcgttcatggtgtgtgccatcaacccttccattgacctgcacaccgactcgctggagcttctgcagctgcagcagaagctgctctggctgctctatgacctgggacatctggaaaggtaccccatggccttagggaacctggcagatctagaggagctggagcccacccctggccggccagacccactcaccctctaccacaagggcattgcctcagccaagacctactatcgggatgaacacatctacccctacatgtacctggctggctaccactgtcgcaaccgcaatgtgcgggaagccctgcaggcctgggcggacacggccactgtcatccaggactacaactactgccgggaagacgaggagatctacaaggagttctttgaagtagccaatgatgtcatccccaacctgctgaaggaggcagccagcttgctggaggcgggcgaggagcggccgggggagcaaagccagggcacccagagccaaggttccgccctccaggaccctgagtgcttcgcccacctgctgcgattctacgacggcatctgcaaatgggaggagggcagtcccacgcctgtgctgcatgtgggctgggccacctttcttgtgcagtccctaggccgttttgagggacaggtgcggcagaaggtgcgcatagtgagccgagaggccgaggcggccgaggccgaggagccgtggggcgaggaagcccgggaaggccggcggcggggcccacggcgggagtccaagccagaggagcccccgccgcccaagaagccagcactggacaagggcctgggcaccggccagggtgcagtgtcaggacccccccggaagcctcctgggactgtcgctggcacagcccgaggccctgaaggtggcagcacggctcaggtgccagcacccacagcatcaccaccgccggagggtccagtgctcactttccagagtgagaagatgaagggcatgaaggagctgctggtggccaccaagatcaactcgagcgccatcaagctgcaactcacggcacagtcgcaagtgcagatgaagaagcagaaagtgtccacccctagtgactacactctgtctttcctcaagcggcagcgcaaaggcctctgaactactggggacttcggaccgcttgtggggacccaggctccgcccttagtcccccaactctgagcccatgttctgcccccagcccaaaggggacaggcctcacctctacccaaaccctaggttcccggtcccgagtacagtctgtatcaaacccacgattttctccagctcagaacccagggctctgccccagtcgttagaatataggtctcttctcccagaatcccagccggccaatggaaacctcacgctgggtcctaattaccagtctttaaaggcccagcccctagaaacccaagctcctcctcggaaccgctcacctagagccagaccaacgttactcagggctcctcccagcttgtaggagctgaggtttcacccttaacccaaggagcacaggtcccacctccagcccgggagcctaggaccactcagcccctaggagtatatttccgcacttcagaattccatatcttgcgaatccaagctccctgccccaaataacttcagtcctgctccagaatttggaaatcctagtttcctctccttcgtatcccgagtctgggacacaaaactccgcccccagcctatgagcatcctgagccccgccctcttcctgacgaaactggccccggatcagagcaggacctcccttccgaccctctgggaacctcccagaggtccagcccatctcggagcatcccggaggaaatctgcagagggttaggagtgggtgacaagagcctgatctcttcctgttttgtacatagatttatttttcagttccaagaaagatgaatacattttgtt

SEQ ID NO: 2579 - DNA, 870 bp, Homo sapiens
  source 1..870: mol_type = genomic DNA
gcgcggaggtgggcgagggggaccgaggccaggactctccttggggtttgggggcttgacctgggccgccgcccaccgcccgccgccatggggctgaaggccgcccagaagacgctgttcccgctgcgctccatcgacgacgtggtgcgcctgtttgctgccgagctgggccgagaggagccggacctggtgctcctttccttggtgctgggcttcgtggagcattttctggctgtcaaccgcgtcatccctaccaacgttcccgagctcaccttccagcccagccccgcccccgacccgcctggcggcctcacctactttcccgtggccgacctgtctatcatcgccgccctctatgcccgcttcaccgcccagatccgaggcgccgtcgacctgtccctctatcctcgagaagggggtgtctccagccgtgagctggtgaagaaggtctccgatgtcatatggaacagcctcagccgctcctacttcaaggatcgggcccacatccagtccctcttcagcttcatcacaggcaccaaattggacagctccggtgtggcctttgctgtggttggggcctgccaggccctgggtctccgggatgtccacctcgccctgtctgaggatcatgcctgggtagtgtttgggcccaatggggagcagacagctgaggtcacctggcacggcaagggcaacgaggaccgcaggggccagacagtcaatgccggtgtggctgagcggagctggctgtacctgaaaggatcatacatgcgctgtgaccgcaagatggaggtggcgttcatggtgtgtgccatcaacccttccattgacctgcacaccgactcgctggagcttctgcagctgcagcag

SEQ ID NO: 2580 - DNA, 816 bp, Homo sapiens
  source 1..816: mol_type = genomic DNA
tatatttatgtatatgcacatacacacaaaattaggcgggagtggtggcgcacgcctgtgatcacagctactcgggaggctgaggcacgagaatcgcttgagcccgtgaagtcgaggctgcagtgagcccagatcgagccactgcattccagcctgggcgaaagagaaagaccgtgtctcaaaacaaacaaacaaaagctactcttagcacgtgttagagtatctcgcgggcggaagtgggaaacgagtgctgcacacagacaacctgatctttttcctcataacttgccgaccgacccgtgacagcaaaaccggcagaagctcggcgacctcccaccccgagtctgcaggtagccgccgcccaccgcccgccgccatggggctgaaggccgcccagaagacgctgttcccgctgcgctccatcgacgacgtggtgcgcctgtttgctgccgagctgggccgagaggagccggacctggtgctcctttccttggtgctgggcttcgtggagcattttctggctgtcaaccgcgtcatccctaccaacgttcccgagctcaccttccagcccagccccgcccccgacccgcctggcggcctcacctactttcccgtggccgacctgtctatcatcgccgccctctatgcccgcttcaccgcccagatccgaggcgccgtcgacctgtccctctatcctcgagaagggggtgtctccagccgtgagctggtgaagaaggtctccgatgtcatatggaacagcctcagccgctcctacttcaaggatcgggcccacatccagtccctcttcagcttcat

SEQ ID NO: 2581 - DNA, 944 bp, Homo sapiens
  source 1..944: mol_type = genomic DNA
tatatttatgtatatgcacatacacacaaaattaggcgggagtggtggcgcacgcctgtgatcacagctactcgggaggctgaggcacgagaatcgcttgagcccgtgaagtcgaggctgcagtgagcccagatcgagccactgcattccagcctgggcgaaagagaaagaccgtgtctcaaaacaaacaaacaaaagctactcttagcacgtgttagagtatctcgcgggcggaagtgggaaacgagtgctgcacacagagtaggcatctttatatgttaacagacactgatacccagctaaagcggctgaacacatttactctctggcagtgtttaaaagtatctgtttttctcatattgttttattttaattttttctggatcaagcaacctgatctttttcctcataacttgccgaccgacccgtgacagcaaaaccggcagaagctcggcgacctcccaccccgagtctgcaggtagccgccgcccaccgcccgccgccatggggctgaaggccgcccagaagacgctgttcccgctgcgctccatcgacgacgtggtgcgcctgtttgctgccgagctgggccgagaggagccggacctggtgctcctttccttggtgctgggcttcgtggagcattttctggctgtcaaccgcgtcatccctaccaacgttcccgagctcaccttccagcccagccccgcccccgacccgcctggcggcctcacctactttcccgtggccgacctgtctatcatcgccgccctctatgcccgcttcaccgcccagatccgaggcgccgtcgacctgtccctctatcctcgagaagggggtgtctccagccgtgagctggtgaagaaggtctccgatgtcatatggaacagcctcagccgctcctacttcaaggatcgggcccacatccagtccctcttcagcttcat

SEQ ID NO: 2582 - DNA, 1107 bp, Homo sapiens
  source 1..1107: mol_type = genomic DNA
gggcggcgtgcgccgcggtgcctagtgtgggatgtaagcgcggaggccgccgcccaccgcccgccgccatggggctgaaggccgcccagaagacgctgttcccgctgcgctccatcgacgacgtggtgcgcctgtttgctgccgagctgggccgagaggagccggacctggtgctcctttccttggtgctgggcttcgtggagcattttctggctgtcaaccgcgtcatccctaccaacgttcccgagctcaccttccagcccagccccgcccccgacccgcctggcggcctcacctactttcccgtggccgacctgtctatcatcgccgccctctatgcccgcttcaccgcccagatccgaggcgccgtcgacctgtccctctatcctcgagaagggggtgtctccagccgtgagctggtgaagaaggtctccgatgtcatatggaacagcctcagccgctcctacttcaaggatcgggcccacatccagtccctcttcagcttcatcacaggcaccaaattggacagctccggtgtggcctttgctgtggttggggcctgccaggccctgggtctccgggatgtccacctcgccctgtctgaggatcatgcctgggtagtgtttgggcccaatggggagcagacagctgaggtcacctggcacggcaagggcaacgaggaccgcaggggccagacagtcaatgccggtgtggctgagcggagctggctgtacctgaaaggatcatacatgcgctgtgaccgcaagatggaggtggcgttcatggtgtgtgccatcaacccttccattgacctgcacaccgactcgctggagcttctgcagctgcagcagaagctgctctggctgctctatgacctgggacatctggaaaggtaccccatggccttagggaacctggcagatctagaggagctggagcccacccctggccggccagacccactcaccctctaccacaagggcattgcctcagccaagacctactatcgggatgaacacatctacccctacatgtacctggctggctaccactgtcgcaaccgcaatgtgcgggaagccctgcaggcctgggcggacacggccactg

SEQ ID NO: 2583 - DNA, 2768 bp, Homo sapiens
  source 1..2768: mol_type = genomic DNA
ggtgtccggagccgcggacctagagatcccagaagccacagcgcagcggcccggcccgccactatttccaggctcagcggggcaggggccgccgcccaccgcccgccgccatggggctgaaggccgcccagaagacgctgttcccgctgcgctccatcgacgacgtggtgcgcctgtttgctgccgagctgggccgagaggagccggacctggtgctcctttccttggtgctgggcttcgtggagcattttctggctgtcaaccgcgtcatccctaccaacgttcccgagctcaccttccagcccagccccgcccccgacccgcctggcggcctcacctactttcccgtggccgacctgtctatcatcgccgccctctatgcccgcttcaccgcccagatccgaggcgccgtcgacctgtccctctatcctcgagaagggggtgtctccagccgtgagctggtgaagaaggtctccgatgtcatatggaacagcctcagccgctcctacttcaaggatcgggcccacatccagtccctcttcagcttcatcacaggttggagcccagtaggcaccaaattggacagctccggtgtggcctttgctgtggttggggcctgccaggccctgggtctccgggatgtccacctcgccctgtctgaggatcatgcctgggtagtgtttgggcccaatggggagcagacagctgaggtcacctggcacggcaagggcaacgaggaccgcaggggccagacagtcaatgccggtgtggctgagcggagctggctgtacctgaaaggatcatacatgcgctgtgaccgcaagatggaggtggcgttcatggtgtgtgccatcaacccttccattgacctgcacaccgactcgctggagcttctgcagctgcagcagaagctgctctggctgctctatgacctgggacatctggaaaggtaccccatggccttagggaacctggcagatctagaggagctggagcccacccctggccggccagacccactcaccctctaccacaagggcattgcctcagccaagacctactatcgggatgaacacatctacccctacatgtacctggctggctaccactgtcgcaaccgcaatgtgcgggaagccctgcaggcctgggcggacacggccactgtcatccaggactacaactactgccgggaagacgaggagatctacaaggagttctttgaagtagccaatgatgtcatccccaacctgctgaaggaggcagccagcttgctggaggcgggcgaggagcggccgggggagcaaagccagggcacccagagccaaggttccgccctccaggaccctgagtgcttcgcccacctgctgcgattctacgacggcatctgcaaatgggaggagggcagtcccacgcctgtgctgcatgtgggctgggccacctttcttgtgcagtccctaggccgttttgagggacaggtgcggcagaaggtgcgcatagtgagccgagaggccgaggcggccgaggccgaggagccgtggggcgaggaagcccgggaaggccggcggcggggcccacggcgggagtccaagccagaggagcccccgccgcccaagaagccagcactggacaagggcctgggcaccggccagggtgcagtgtcaggacccccccggaagcctcctgggactgtcgctggcacagcccgaggccctgaaggtggcagcacggctcaggtgccagcacccacagcatcaccaccgccggagggtccagtgctcactttccagagtgagaagatgaagggcatgaaggagctgctggtggccaccaagatcaactcgagcgccatcaagctgcaactcacggcacagtcgcaagtgcagatgaagaagcagaaagtgtccacccctagtgactacactctgtctttcctcaagcggcagcgcaaaggcctctgaactactggggacttcggaccgcttgtggggacccaggctccgcccttagtcccccaactctgagcccatgttctgcccccagcccaaaggggacaggcctcacctctacccaaaccctaggttcccggtcccgagtacagtctgtatcaaacccacgattttctccagctcagaacccagggctctgccccagtcgttagaatataggtctcttctcccagaatcccagccggccaatggaaacctcacgctgggtcctaattaccagtctttaaaggcccagcccctagaaacccaagctcctcctcggaaccgctcacctagagccagaccaacgttactcagggctcctcccagcttgtaggagctgaggtttcacccttaacccaaggagcacaggtcccacctccagcccgggagcctaggaccactcagcccctaggagtatatttccgcacttcagaattccatatcttgcgaatccaagctccctgccccaaataacttcagtcctgctccagaatttggaaatcctagtttcctctccttcgtatcccgagtctgggacacaaaactccgcccccagcctatgagcatcctgagccccgccctcttcctgacgaaactggccccggatcagagcaggacctcccttccgaccctctgggaacctcccagaggtccagcccatctcggagcatcccggaggaaatctgcagagggttaggagtgggtgacaagagcctgatctcttcctgttttgtacatagatttatttttcagttccaagaaagatgaatacattttgtt

SEQ ID NO: 2584 - DNA, 922 bp, Homo sapiens
  source 1..922: mol_type = genomic DNA
gacttcatgtcccagcaggctccgggcggcgtgcgccgcggtgcctagtgtgggatgccgccgcccaccgcccgccgccatggggctgaaggccgcccagaagacgctgttcccgctgcgctccatcgacgacgtggtgcgcctgtttgctgccgagctgggccgagaggagccggacctggtgctcctttccttggtgctgggcttcgtggagcattttctggctgtcaaccgcgtcatccctaccaacgttcccgagctcaccttccagcccagccccgcccccgacccgcctggcggcctcacctactttcccgtggccgacctgtctatcatcgccgccctctatgcccgcttcaccgcccagatccgaggcgccgtcgacctgtccctctatcctcgagaagggggtgtctccagccgtgagctggtgaagaaggtctccgatgtcatatggaacagcctcagccgctcctacttcaaggatcgggcccacatccagtccctcttcagcttcatcacaggcaccaaattggacagctccggtgtggcctttgctgtggttggggcctgccaggccctgggtctccgggatgtccacctcgccctgtctgaggatcatgcctgggtagtgtttgggcccaatggggagcagacagctgaggtcacctggcacggcaagggcaacgaggaccgcaggggccagacagtcaatgccggtgtggctgagcggagctggctgtacctgaaaggatcatacatgcgctgtgaccgcaagatggaggtggcgttcatggtgtgtgccatcaacccttccattgacctgcacaccgactcgctggagcttctgcagctgcagcagaagctgctctggctgctctatgacctgggacatctggaaaggtaccccatggccttaggg

SEQ ID NO: 2585 - DNA, 2392 bp, Homo sapiens
  source 1..2392: mol_type = genomic DNA
acaaagaccccgctctcgaatctggggtgacaggaaggagccggtccaggctccgggggctgggaaagggcgcgtctcaaaggctggctggagtggagccaagggaaaagatcgttagagacagcgcccctgaccaaccacttagagcagcgcaggggtgggagggcggccgcaggctctcctctcgttagtgccccctgtgtttggggccccgtgatctcaacggtcctgccctcggtctccctcttcccccgccccgccctgggccaggtgttcgaatcccgactccagaactggcggcgtcccagtcccgcgggcgtggagcgccggaggacccgccctcgggctcatggcggccccggtccgcctgggccggaagcgcccgctgcctgcctgtcccaacccgctcttcgttcgctggctgaccgagtggcgggacgaggcgacccgcagcaggcgccgcacgcgcttcgtatttcagaaggcgctgcgttccctccgacggtacccactgccgctgcgcagcgggaaggaagctaagatcctacagcacttcggagacgggctctgccggatgctggacgagcggctgcagcggcaccgaacatcgggcggtgaccatgccccggactcaccatctggagagaacagtccagccccgcaggggcgacttgcggaagtccaggactcttccatgccagttcctgcccagcccaaagcgggaggctctggcagctactggccagctcggcactcaggagcccgagtgatactgctggtgctctaccgggagcacctgaatcctaatggtcaccacttcttaaccaaggaggagctgctgcagaggtgtgctcagaagtcccccagggtagcccctgggagtgctcgaccctggccagccctccgctccctccttcacaggaacctggtcctcaggacacaccagccagccaggtactcattgaccccagagggcctggagctggcccagaagttggccgagtcagaaggcctgagcttgctgaatgtgggcatcgggcccaaggagccccctggggaggagacagcagtgccaggagcagcttcagcagagcttgccagtgaagcaggggtccagcagcagccactggagctgaggcctggagagtacagggtgctgttgtgtgtggacattggcgagacccgggggggcgggcacaggccggagctgctccgagagctacagcggctgcacgtgacccacacggtgcgcaagctgcacgttggagattttgtgtgggtggcccaggagaccaatcctagagacccagcaaaccctggggagttggtactggatcacattgtggagcgcaagcgactggatgacctttgcagcagcatcatcgacggccgcttccgggagcagaagttccggctgaagcgctgtggtctggagcgccgggtatacctggtggaagagcatggttccgtccacaacctcagccttcctgagagcacactgctgcaggctgtcaccaacactcaggtcattgatggcttttttgtgaagcgcacagcagacattaaggagtcagccgcctacctggccctcttgacgcggggcctgcagagactctaccagggccacaccctacgcagccgcccctggggaacccctgggaaccctgaatcaggggccatgacctctccaaaccctctctgctcactcctcaccttcagtgacttcaacgcaggagccatcaagaataaggcccagtcggtgcgagaagtgtttgcccggcagctgatgcaggtgcgcggagtgagtggggagaaggcagcagccctggtggatcgatacagcacccctgccagcctcctggccgcctatgatgcctgtgccacccccaaggaacaagagacactgctgagcaccattaagtgtgggcgtctacagaggaatctggggcctgctctgagcaggaccttatcccagctctactgcagctacggccccttgacctgagcttatgccgtgaaacagcccccagcccccgtctgtcccccaacccaggctagccagccttttaacaacatcttttggggtacaattagaatctaagtgtttgcagccatatgtgtcatgtagaagatgcctagccctggggaccttgtgaaatacgcaggaaccagggataccatctggtccagtggtttttaaacaaagctgcttagcacctggaattccctggtcagggagatggagtcagtggggcattgcagcttggaatctattttatgtcaccagttggtcctcatcaaataaaatttccttaggagtgcagagggctcattgggaaaataaaaataataaaaataaataaaacttcctaaaagaaaagattgaaaacca

SEQ ID NO: 2586 - DNA, 2358 bp, Homo sapiens
  source 1..2358: mol_type = genomic DNA
aaagaccccgctctcgaatctggggtgacaggaaggagccggtccaggctccgggggctgggaaagggcgcgtctcaaaggctggctggagtggagccaagggaaaagatcgttagagacagcgcccctgaccaaccacttagagcagcgcaggggtgggagggcggccgcaggctctcctctcgttagtgccccctgtgtttggggccccgtgatctcaacggtcctgccctcggtctccctcttcccccgccccgccctgggcggcgtcccagtcccgcgggcgtggagcgccggaggacccgccctcgggctcatggcggccccggtccgcctgggccggaagcgcccgctgcctgcctgtcccaacccgctcttcgttcgctggctgaccgagtggcgggacgaggcgacccgcagcaggcgccgcacgcgcttcgtatttcagaaggcgctgcgttccctccgacggtacccactgccgctgcgcagcgggaaggaagctaagatcctacagcacttcggagacgggctctgccggatgctggacgagcggctgcagcggcaccgaacatcgggcggtgaccatgccccggactcaccatctggagagaacagtccagccccgcaggggcgacttgcggaagtccaggactcttccatgccagttcctgcccagcccaaagcgggaggctctggcagctactggccagctcggcactcaggagcccgagtgatactgctggtgctctaccgggagcacctgaatcctaatggtcaccacttcttaaccaaggaggagctgctgcagaggtgtgctcagaagtcccccagggtagcccctgggagtgctcgaccctggccagccctccgctccctccttcacaggaacctggtcctcaggacacaccagccagccaggtactcattgaccccagagggcctggagctggcccagaagttggccgagtcagaaggcctgagcttgctgaatgtgggcatcgggcccaaggagccccctggggaggagacagcagtgccaggagcagcttcagcagagcttgccagtgaagcaggggtccagcagcagccactggagctgaggcctggagagtacagggtgctgttgtgtgtggacattggcgagacccgggggggcgggcacaggccggagctgctccgagagctacagcggctgcacgtgacccacacggtgcgcaagctgcacgttggagattttgtgtgggtggcccaggagaccaatcctagagacccagcaaaccctggggagttggtactggatcacattgtggagcgcaagcgactggatgacctttgcagcagcatcatcgacggccgcttccgggagcagaagttccggctgaagcgctgtggtctggagcgccgggtatacctggtggaagagcatggttccgtccacaacctcagccttcctgagagcacactgctgcaggctgtcaccaacactcaggtcattgatggcttttttgtgaagcgcacagcagacattaaggagtcagccgcctacctggccctcttgacgcggggcctgcagagactctaccagggccacaccctacgcagccgcccctggggaacccctgggaaccctgaatcaggggccatgacctctccaaaccctctctgctcactcctcaccttcagtgacttcaacgcaggagccatcaagaataaggcccagtcggtgcgagaagtgtttgcccggcagctgatgcaggtgcgcggagtgagtggggagaaggcagcagccctggtggatcgatacagcacccctgccagcctcctggccgcctatgatgcctgtgccacccccaaggaacaagagacactgctgagcaccattaagtgtgggcgtctacagaggaatctggggcctgctctgagcaggaccttatcccagctctactgcagctacggccccttgacctgagcttatgccgtgaaacagcccccagcccccgtctgtcccccaacccaggctagccagccttttaacaacatcttttggggtacaattagaatctaagtgtttgcagccatatgtgtcatgtagaagatgcctagccctggggaccttgtgaaatacgcaggaaccagggataccatctggtccagtggtttttaaacaaagctgcttagcacctggaattccctggtcagggagatggagtcagtggggcattgcagcttggaatctattttatgtcaccagttggtcctcatcaaataaaatttccttaggagtgcagagggctcattgggaaaataaaaataataaaaataaataaaacttcctaaaagaaaagattgaaaacc

SEQ ID NO: 2587 - DNA, 8257 bp, Homo sapiens
  source 1..8257: mol_type = genomic DNA
agaaaccacttacaactccagacgattcgaaggggaaacttcggcgtgaagtgcagctccgctccggctccctctagctttctttccttctctggaatccgaggcgcggatcttcctcgccccaccgccctagttttttcgggagctcgccggtgccctctagggtgtcggctcgtgctgggaagtgccctccatcctggtaatggggggcggcgaggcaccgtaggagtggcgaggcggcgcccagggtggcactgccccggaacggggcgctgggtgcgcgcgggagggtccccgcgcgggctccgccgctgccgcagctgcgagcgcgccgcgccaccgagcctcctgcagcaatggctcgtccgtgaaacgcgagccacggctgctctttttaagagtgcctgcatcctccgtttgcgcttcgcaactgtcctgggtgaaaatggctgtctagactaaaatgtggcagaagggaccaagcagtggatattgagcctgtgaagtccaactcttaagctccgagacctgggggactgagagcccagctctgaaaagtgcatcatgaattccggagttgccatgaaatatggaaacgactcctcggccgagctgagtgagctccattcagcagccctggcatcactaaagggagatatagtggaacttaataaacgtctccagcaaacagagagggaacgggaccttctggaaaagaaattggccaaggcacagtgcgagcagtcccacctcatgagagagcatgaggatgtccaggagcgaacgacacttcgctatgaggaacgcatcacagagctccacagcgtcattgcggagctcaacaagaagatagaccgtctgcaaggcaccaccatcagggaggaagatgagtactcagaactgcgatcagaactcagccagagccaacacgaggtcaacgaggactctcgaagcatggaccaagaccagacctctgtctctatccccgaaaaccagtctaccatggttactgctgacatggacaactgcagtgacctgaactcagaactgcagagggtgctgacagggctggagaatgttgtctgcggcaggaagaagagcagctgcagcctctccgtggccgaggtggacaagcacattgagcagctcaccacagccagcgagcactgtgacctggctattaagacagtcgaggagattgagggggtgcttggccgggacctgtatcccaacctggctgaagagaggtctcggtgggagaaggagctggctgggctgagggaagagaatgagagcctgactgccatgctgtgcagcaaagaggaagaactgaaccggactaaggccaccatgaatgccatccgggaagagcgggaccggctccggaggagggtcagagagcttcaaactcgactacagagcgtgcaggccacaggtccctccagccctggccgcctcacttccaccaaccgcccgattaaccccagcactggggagctgagcacaagcagcagcagcaatgacattcccatcgccaagattgctgagagggtgaagctatcaaagacaaggtccgaatcgtcatcatctgatcggccagtcctgggctcagaaatcagtagcataggggtatccagcagtgtggctgaacacctggcccactcacttcaggactgctccaatatccaagagattttccaaacactctactcacacggatctgccatctcagaaagcaagattagagagtttgaggtggaaacagaacggctgaatagccggattgagcacctcaaatcccaaaatgacctcctgaccataaccttggaggaatgtaaaagcaatgccgagaggatgagcatgctggtgggaaaatacgaatccaatgccacagcgctgaggctggccttgcagtacagcgagcagtgcatcgaagcctacgaactcctcctggcgctggcagagagtgagcagagcctcatcctggggcagttccgagcggcgggcgtggggtcctcccctggagaccagtcgggggatgaaaacatcactcagatgctcaagcgagctcatgactgccggaagacagctgagaacgctgccaaggccctgctcatgaagctggacggcagctgtgggggagcctttgccgtggccggctgcagcgtgcagccctgggagagcctttcctccaacagccacaccagcacaaccagctccacagccagtagttgcgacaccgagttcactaaagaagacgagcagaggctgaaggattatatccagcagctcaagaatgacagggctgcggtcaagctgaccatgctggagctggaaagcatccacatcgatcctctcagctatgacgtcaagcctcggggagacagccagaggctggatctggaaaacgcagtgcttatgcaggagctcatggccatgaaggaggagatggccgagttgaaggcccagctctacctactggagaaagagaagaaggccctggagctgaagctgagcacgcgggaggcccaggagcaggcctacctggtgcacattgagcacctgaagtccgaggtggaggagcagaaggagcagcggatgcgatccctcagctccaccagcagcggcagcaaagacaaacctggcaaggagtgtgctgatgctgcctccccagctctgtccctagccgaactcaggacaacgtgcagcgagaatgagctggctgcggagttcaccaacgccattcgtcgagaaaagaagttgaaggccagagttcaagagctggtgagtgccttggagagactcaccaagagcagtgaaatccgacatcagcaatctgcagagttcgtgaatgatctaaagcgggccaacagcaacctggtggctgcctatgagaaagcaaagaaaaagcatcaaaacaaactgaagaagttagagtcgcagatgatggccatggtggagagacatgagacccaagtgaggatgctcaagcaaagaatagctctgctagaggaggagaactccaggccacacaccaatgaaacttcgctttaatcagcactcacgcaccggagttctgcccatgggaagtaaactgcagcaggccactggggacagaagggcccatgtacttgttgggaggaggaggaaagggaaggctggcaggtaggtcggcacttggacaatggagtgccccaactcaacccttggggcgactggccatggtgacattgtggactgtatccagaggtgcccgctcttccctcctgggcccacaacagcgtgtaaacacatgttctgtgcctgctcagcagagcctcgtttctgctttcagcactcactctccccctcctcttctggtctggcggctgtgcatcagtgggatcccagacatttgtttctgtaagattttccattgtatcctctttttggtagatgctgggctcatcttctagaatctcgtttctcctctttcctcctgcttcatgggaaaacagacctgtgtgtgcctccagcatttaaaaggactgctgatttgtttactacagcaaggctttggtttccaagtcccgggtctcaactttaagatagaggcggccataagaggtgatctctgggagttataggtcatgggaagagcgtagacaggtgttacttacagtcccagatacactaaagttacaaacagaccaccaccaggactgtgcctgaacaattttgtattgagagaataaaaacttccttcaatcttcattttggaggcagggctgggaagggagcgctctcttgattctgggatttctccctctcagtggagccttattaatatccaagacttagagctgggaatctttttgatacctgtagtggaactaaaattctgtcaggggtttcttcaagagctgagaaacattattagcacttcccgccccagggcactacataattgctgttctgctgaatcaaatctcttccacatgggtgcatttgtagctctggacctgtctctacctaaggacaagacactgaggagatactgaacattttgcaaaacttatcacgcctacttaagagtgctgtgtaacccccagttcaagacttagctcctgttgtcatgacggggacagagtgagggaatggtagttaaggcttcttttttgcccccagatacatggtgatggttagcatatggtgcttaaaaggttaaatttcaagcaaaatgcttacagggctaggcagtaccaaagtaactgaattatttcaggaaggtcttcaatcttaaaacaaattcattattctttttcagttttacctcttctctctcagttctacactgatacacttgaaggaccatttactgtttttttctgtagcaccagagaatccatccaaagttccctatgaaaaatgtgttccattgccatagctgactacaaattaaagttgaggaggtttctgcatagagtctttatgtccataagctacgggtaggtctattttcagagcatgatacaaattccacagccttctgttcgctggaggatactccagccaccagttcggagggcagacagctgtatcctaaaagcaaccactgagaggccagcagtgaggctgcccatctccaaaacgaaacaacagatcaactggtatcagtctagaaggaccagctttggggtgctttgatcactatgaaaatgttcactggtttctgtcaatcatttggtcaaagttagttcctgtgattttttttttttttttttgagatggagttttgctcgtcaccaggctgaagtgcagtggcgtgatcttggctcactgcaacctctgcctcctgagtagctggaattacaggtgcccgccaccatacccagctagtttttttgtatttttagtagagacagggtttcaccatgttggccaggctggtctcgaactcctgaccactgatccacccacctcggcctcccaaagtgctgggattacaggcatgagccaatgtgcctggccattcctgtgattttttagaatttttcacttttcatataaagttgcattttatcatgaggaaaatgttttggctgaaaaacatatgccccaaaaaaaaaaaaatcagttttcactatttttccagcttgcctagggaaacgtcctcccctgagcaaagtgggatgtgcatggctcttttttgtgattaagcaggcatcaaatgggcagttttcattttcactgacacagaaacatgtggctgaagcaggaataaaatcctgcctactgacttctgtctccattcttgctccaggtaaaatcagagaacctccccttctctgagaattcccccaggcagaggcggctccagctcctgttaagggccccagttttactcatgctacctgaccttagttttagtactttcaaatgtgatttgggtaaaaactattttgcaggcaaaagtgttaattttttataaatatgtataataaaaaagctataaaagtttttccttttcttgtatttttcaaatactccccaagacacaatccttgaaggtgaactaggtggcacttgattatgctaattgtgggagctactgaactaaactatactgattaaattaaatgcttgcaggttcctgggtaattttcctttgtgaataacctggcgctacctgaatttttctctaacaaacatctccaatgagggtaaacaatgatcttgattctaatttatatgaggttaaaaaccttcagatttcgtattttgaattgttctccctagtttcctcagtggttacccccttttagtcagtaaccatctctgttcagaattcagtctttggcttttgaagaaatgggcacagagccaaaggacccatttcacagttcccttggaatatatttcccattgttggactgaggcaaacaaaaccaactgtgcaaatcacaagcaaaagagacttctgtccgtagttgcgagtgccatcagtgtgagcttaccagctacaaaaatctgtcatggactggggaacagtatgattccttattgaaactttcatcctcatcggctggcttgtcagcgttctgaagttaatatccatgctgcctgaaacaaatgttatgtttaactagcacttaacttttaaaattgcttaattctcctttcagatgcatgcactaagtcttctctgagcctgcagcaatattttagagggacctcttctaagtcagagccttgacattctactccaaaaggaagtccaaattagagcccataggctttttcttaaaagctgttaaggagtagtaaagaaagttaccactctaaggaaaacatgaaactatctgaaagtcttctggttcctaactggatacagattagattattttaaatgagaaaaaagtgcaccgtagttacccgatcaagattggactgcctgtgtccctggcatgaattaaagaacctccatagttgcttgttcccttctgaaggtgtttcctatggcccacgagaattataaagcaatcactttttaagtctatcagtcaaccttaatagctctcaagagtttcgattatcaagctttaaagtgataacatatcaagatgactattaaaaaataaacatctctgaaagtgtcctttcctccataaggctttaaacaatttgcaaattcttaattgggagtatgtcccaatcattctattaaactatttacagctctacctacttctagattcagcaaacagagctactagttagagtattttgagagccaaaatagtaagagacttctgtaatggttgagatttctgcactgaccttaattagggtaccgccatagggctaccaaagtttttagtgagggctggggaggtggagcataagtaacattttttttctgcagaaggtgatggctttgtagaacactataaaatttttcaggaaaacatacagcaaattttcttatccagtgggaacagcctatttgacaaggaatgatatacaagtttgattcacctttgagcactcttatagagtttacagaagaggcgtaactggttacaaaacaaaagttacgccttcactatccagttcttaaagtttatccacatcctacaaatcttatgttcatgtaggtcaggttaaagtaagctccaaacttgtggccttcagaagcatctcctgtttaacacacctgaaattactctaacttaatacatttgtattctctaagaaataatgctgactgctgtcaccacagcatcactgatctctcagtggctgttaaaatataaacaagtggaaaaaaagtatacaagttgatagcagctgttcatgtattcttgttttgctaatacctgtgtagagaaagacagtttcacatgcagatcaccatacatttttgcttaaaggttacactgggtaaactgtttgtttatcacattacatctgggtgagattttgcatgtgaccaagaggaagaaatcattcagtcccggaaatagcaactgctatgtaaaaccacatccttgactagtacttcatctttccacagtcatccatctgctaatcaggtgaaatatcagctcagcagaacaaagcaagttatacacaaatttcccccacattcacactgatgccgtacttagtaattctggttctaccattcccttttgcactttttgcaagtcaaattcatgtggaaaaatgttctgtttgtagaactcatagtattcacttatagtgctcatgtcaggaatggcaagtgagtaagagcccctgataatctgcttttgttagaacgtaatgcaaagataataaaacatgtccacttcttttctagttctaatcagtttttagacatcaagatttatttactttgcatgagatttgtttcctattatttgaatatgtgctatacacttgaattagaaaaacctgcttgaatgtattgtcagttattaaagcacatgtgactaagtttgcatttgtcagtattgttctactgtttgtactgaaagtctcattttaaaattgctacttaacactgtactataccttgtaattttttagattctccacttgtattctttaaatgtttccagatgcctttagttttagctgctgtaaaatagctactttgcgttatttgatatagaattgttttttaaaaactccatttatttatacagagacatttataatattttacaaacattcttatattctgaataaatatttctaattccacagtgta

SEQ ID NO: 2588 - DNA, 2752 bp, Homo sapiens
  source 1..2752: mol_type = genomic DNA
gccgcttcagggagggacgaagagacccagcaacccacagagttgagaaatttgactggcattcaagctgtccaatcaatagctgccgctgaagggtggggctggatggcgtaagctacagctgaaggaagaacgtgagcacgaggcactgaggtgattggctgaaggcacttccgttgagcatctagacgtttccttggctcttctggcgccaaaatgtcgttcgtggcaggggttattcggcggctggacgagacagtggtgaaccgcatcgcggcgggggaagttatccagcggccagctaatgctatcaaagagatgattgagaactgtttagatgcaaaatccacaagtattcaagtgattgttaaagagggaggcctgaagttgattcagatccaagacaatggcaccgggatcaggaaagaagatctggatattgtatgtgaaaggttcactactagtaaactgcagtcctttgaggatttagccagtatttctacctatggctttcgaggtgaggctttggccagcataagccatgtggctcatgttactattacaacgaaaacagctgatggaaagtgtgcatacagagcaagttactcagatggaaaactgaaagcccctcctaaaccatgtgctggcaatcaagggacccagatcacggtggaggaccttttttacaacatagccacgaggagaaaagctttaaaaaatccaagtgaagaatatgggaaaattttggaagttgttggcaggtattcagtacacaatgcaggcattagtttctcagttaaaaaacaaggagagacagtagctgatgttaggacactacccaatgcctcaaccgtggacaatattcgctccatctttggaaatgctgttagtcgagaactgatagaaattggatgtgaggataaaaccctagccttcaaaatgaatggttacatatccaatgcaaactactcagtgaagaagtgcatcttcttactcttcatcaaccatcgtctggtagaatcaacttccttgagaaaagccatagaaacagtgtatgcagcctatttgcccaaaaacacacacccattcctgtacctcagtttagaaatcagtccccagaatgtggatgttaatgtgcaccccacaaagcatgaagttcacttcctgcacgaggagagcatcctggagcgggtgcagcagcacatcgagagcaagctcctgggctccaattcctccaggatgtacttcacccagactttgctaccaggacttgctggcccctctggggagatggttaaatccacaacaagtctgacctcgtcttctacttctggaagtagtgataaggtctatgcccaccagatggttcgtacagattcccgggaacagaagcttgatgcatttctgcagcctctgagcaaacccctgtccagtcagccccaggccattgtcacagaggataagacagatatttctagtggcagggctaggcagcaagatgaggagatgcttgaactcccagcccctgctgaagtggctgccaaaaatcagagcttggagggggatacaacaaaggggacttcagaaatgtcagagaagagaggacctacttccagcaaccccagaaagagacatcgggaagattctgatgtggaaatggtggaagatgattcccgaaaggaaatgactgcagcttgtaccccccggagaaggatcattaacctcactagtgttttgagtctccaggaagaaattaatgagcagggacatgaggttctccgggagatgttgcataaccactccttcgtgggctgtgtgaatcctcagtgggccttggcacagcatcaaaccaagttataccttctcaacaccaccaagcttagtgaagaactgttctaccagatactcatttatgattttgccaattttggtgttctcaggttatcggagccagcaccgctctttgaccttgccatgcttgccttagatagtccagagagtggctggacagaggaagatggtcccaaagaaggacttgctgaatacattgttgagtttctgaagaagaaggctgagatgcttgcagactatttctctttggaaattgatgaggaagggaacctgattggattaccccttctgattgacaactatgtgccccctttggagggactgcctatcttcattcttcgactagccactgaggtgaattgggacgaagaaaaggaatgttttgaaagcctcagtaaagaatgcgctatgttctattccatccggaagcagtacatatctgaggagtcgaccctctcaggccagcagagtgaagtgcctggctccattccaaactcctggaagtggactgtggaacacattgtctataaagccttgcgctcacacattctgcctcctaaacatttcacagaagatggaaatatcctgcagcttgctaacctgcctgatctatacaaagtctttgagaggtgttaaatatggttatttatgcactgtgggatgtgttcttctttctctgtattccgatacaaagtgttgtatcaaagtgtgatatacaaagtgtaccaacataagtgttggtagcacttaagacttatacttgccttctgatagtattcctttatacacagtggattgattataaataaatagatgtgtcttaacataatttcttatttaattttattatgtatatattgtgtcagttcagatgccaaaaagaggtcttgaacatgtcaca

SEQ ID NO: 2589 - DNA, 2251 bp, Homo sapiens
  source 1..2251: mol_type = genomic DNA
aaaatgtcgttcgtggcaggggttattcggcggctggacgagacagtggtgaaccgcatcgcggcgggggaagttatccagcggccagctaatgctatcaaagagatgattgagaactgtttagatgcaaaatccacaagtattcaagtgattgttaaagagggaggcctgaagttgattcagatccaagacaatggcaccgggatcaggaaagaagatctggatattgtatgtgaaaggttcactactagtaaactgcagtcctttgaggatttagccagtatttctacctatggctttcgaggtgaggctttggccagcataagccatgtggctcatgttactattacaacgaaaacagctgatggaaagtgtgcatacagagcaagttactcagatggaaaactgaaagcccctcctaaaccatgtgctggcaatcaagggacccagatcacggtggaggaccttttacaacatagccacgaggagaaaagctttaaaaaatccaagtgaagaatatgggaaaattttggaagttgttggcaggtattcagtacacaatgcaggcattagtttctcagttaaaaaacaaggagagacagtagctgatgttaggacactacccaatgcctcaaccgtggacaatattcgctccatctttggaaatgctgttagtcgagaactgatagaaattggatgtgaggataaaaccctagccttcaaaatgaatggttacatatccaatgcaaactactcagtgaagaagtgcatcttcttactcttcatcaaccatcgtctggtagaatcaacttccttgagaaaagccatagaaacagtgtatgcagcctatttgcccaaaaacacacacccattcctgtacctcagtttagaaatcagtccccagaatgtggatgttaatgtgcaccccacaaagcatgaagttcacttcctgcacgaggagagcatcctggagcgggtgcagcagcacatcgagagcaagctcctgggctccaattcctccaggatgtacttcacccagactttgctaccaggacttgctggcccctctggggagatggttaaatccacaacaagtctgacctcgtcttctacttctggaagtagtgataaggtctatgcccaccagatggttcgtacagattcccgggaacagaagcttgatgcatttctgcagcctctgagcaaacccctgtccagtcagccccaggccattgtcacagaggataagacagatatttctagtggcagggctaggcagcaagatgaggagatgcttgaactcccagcccctgctgaagtggctgccaaaaatcagagcttggagggggatacaacaaaggggacttcagaaatgtcagagaagagaggacctacttccagcaaccccagaaagagacatcgggaagattctgatgtggaaatggtggaagatgattcccgaaaggaaatgactgcagcttgtaccccccggagaaggatcattaacctcactagtgttttgagtctccaggaagaaattaatgagcagggacatgaggttctccgggagatgttgcataaccactccttcgtgggctgtgtgaatcctcagtgggccttggcacagcatcaaaccaagttataccttctcaacaccaccaagcttagtgaagaactgttctaccagatactcatttatgattttgccaattttggtgttctcaggttatcggagccagcaccgctctttgaccttgccatgcttgccttagatagtccagagagtggctggacagaggaagatggtcccaaagaaggacttgctgaatacattgttgagtttctgaagaagaaggctgagatgcttgcagactatttctctttggaaattgatgagagtgaagtgcctggctccattccaaactcctggaagtggactgtggaacacattgtctataaagccttgcgctcacacattctgcctcctaaacatttcacagaagatggaaatatcctgcagcttgctaacctgcctgatctatacaaagtctttgagaggtgttaaatatggttatttatgcactgtgggatgtgttcttctttctctgtattccgatacaaagtgttgtatcaaagtgtgatatacaaagtgtaccaacataagtgttggtagcacttaagacttatacttgccttctgatagtattcctttatacacagtggattgattataaataaatagatgtgtctt

SEQ ID NO: 2590 - DNA, 2024 bp, Homo sapiens
  source 1..2024: mol_type = genomic DNA
aaaatgtcgttcgtggcaggggttattcggcggctggacgagacagtggtgaaccgcatcgcggcgggggaagttatccagcggccagctaatgctatcaaagagatgattgagaactgtttagatgcaaaatccacaagtattcaagtgattgttaaagagggaggcctgaagttgattcagatccaagacaatggcaccgggatcaggaaagaagatctggatattgtatgtgaaaggttcactactagtaaactgcagtcctttgaggatttagccagtatttctacctatggctttcgaggtgaggctttggccagcataagccatgtggctcatgttactattacaacgaaaacagctgatggaaagtgtgcatacagagcaagttactcagatggaaaactgaaagcccctcctaaaccatgtgctggcaatcaagggacccagatcacggtggaggaccttttttacaacatagccacgaggagaaaagctttaaaaaatccaagtgaagaatatgggaaaattttggaagttgttggcaggtattcagtacacaatgcaggcattagtttctcagttaaaaaacaaggagagacagtagctgatgttaggacactacccaatgcctcaaccgtggacaatattcgctccatctttggaaatgctgttagtcgagaactgatagaaattggatgtgaggataaaaccctagccttcaaaatgaatggttacatatccaatgcaaactactcagtgaagaagtgcatcttcttactcttcatcaaccatcgtctggtagaatcaacttccttgagaaaagccatagaaacagtgtatgcagcctatttgcccaaaaacacacacccattcctgtacctcagtttagaaatcagtccccagaatgtggatgttaatgtgcaccccacaaagcatgaagttcacttcctgcacgaggagagcatcctggagcgggtgcagcagcacatcgagagcaagctcctgggctccaattcctccaggatgtacttcacccagactttgctaccaggacttgctggcccctctggggagatggttaaatccacaacaagtctgacctcgtcttctacttctggaagtagtgataaggtctatgcccaccagatggttcgtacagattcccgggaacagaagcttgatgcatttctgcagcctctgagcaaacccctgtccagtcagccccaggccattgtcacagaggataagacagatatttctagtggcagggctaggcagcaagatgaggagatgcttgaactcccagcccctgctgaagtggctgccaaaaatcagagcttggagggggatacaacaaaggggacttcagaaatgtcagagaagagaggacctacttccagcaaccccagaaagagacatcgggaagattctgatgtggaaatggtggaagatgattcccgaaaggaaatgactgcagcttgtaccccccggagaaggatcattaacctcactagtgttttgagtctccaggaagaaattaatgagcagggacatgaggttctccgggagatgttgcataaccactccttcgtgggctgtgtgaatcctcagtgggccttggcacagcatcaaaccaagttataccttctcaacaccaccaagcttagagtgaagtgcctggctccattccaaactcctggaagtggactgtggaacacattgtctataaagccttgcgctcacacattctgcctcctaaacatttcacagaagatggaaatatcctgcagcttgctaacctgcctgatctatacaaagtctttgagaggtgttaaatatggttatttatgcactgtgggatgtgttcttctttctctgtattccgatacaaagtgttgtatcaaagtgtgatatacaaagtgtaccaacataagtgttggtagcacttaagacttatacttgccttctgatagtattcctttatacacagtggattgattataaataaatagatgtgtctt

SEQ ID NO: 2591 - DNA, 2085 bp, Homo sapiens
  source 1..2085: mol_type = genomic DNA
aaaatgtcgttcgtggcaggggttattcggcggctggacgagacagtggtgaaccgcatcgcggcgggggaagttatccagcggccagctaatgctatcaaagagatgattgagaactgtttagatgcaaaatccacaagtattcaagtgattgttaaagagggaggcctgaagttgattcagatccaagacaatggcaccgggatcaggaaagaagatctggatattgtatgtgaaaggttcactactagtaaactgcagtcctttgaggatttagccagtatttctacctatggctttcgaggtgaggctttggccagcataagccatgtggctcatgttactattacaacgaaaacagctgatggaaagtgtgcatacagagcaagttactcagatggaaaactgaaagcccctcctaaaccatgtgctggcaatcaagggacccagatcacggtggaggaccttttttacaacatagccacgaggagaaaagctttaaaaaatccaagtgaagaatatgggaaaattttggaagttgttggcaggtattcagtacacaatgcaggcattagtttctcagttaaaaaacaaggagagacagtagctgatgttaggacactacccaatgcctcaaccgtggacaatattcgctccatctttggaaatgctgttagtcgagaactgatagaaattggatgtgaggataaaaccctagccttcaaaatgaatggttacatatccaatgcaaactactcagtgaagaagtgcatcttcttactcttcatcaaccatcgtctggtagaatcaacttccttgagaaaagccatagaaacagtgtatgcagcctatttgcccaaaaacacacacccattcctgtacctcagtttagaaatcagtccccagaatgtggatgttaatgtgcaccccacaaagcatgaagttcacttcctgcacgaggagagcatcctggagcgggtgcagcagcacatcgagagcaagctcctgggctccaattcctccaggatgtacttcacccagactttgctaccaggacttgctggcccctctggggagatggttaaatccacaacaagtctgacctcgtcttctacttctggaagtagtgataaggtctatgcccaccagatggttcgtacagattcccgggaacagaagcttgatgcatttctgcagcctctgagcaaacccctgtccagtcagccccaggccattgtcacagaggataagacagatatttctagtggcagggctaggcagcaagatgaggagatgcttgaactcccagcccctgctgaagtggctgccaaaaatcagagcttggagggggatacaacaaaggggacttcagaaatgtcagagaagagaggacctacttccagcaaccccagaaagagacatcgggaagattctgatgtggaaatggtggaagatgattcccgaaaggaaatgactgcagcttgtaccccccggagaaggatcattaacctcactagtgttttgagtctccaggaagaaattaatgagcagggacatgaggttctccgggagatgttgcataaccactccttcgtgggctgtgtgaatcctcagccttggcacagcatcaaaccaagttataccttctcaacaccaccaagtttcagtgaagaactgttctaccagatactcatttatgattttgccaattttggtgttctcaggttatcgagtgaagtgcctggctccattccaaactcctggaagtggactgtggaacacattgtctataaagccttgcgctcacacattctgcctcctaaacatttcacagaagatggaaatatcctgcagcttgctaacctgcctgatctatacaaagtctttgagaggtgttaaatatggttatttatgcactgtgggatgtgttcttctttctctgtattccgatacaaagtgttgtatcaaagtgtgatatacaaagtgtaccaacataagtgttggtagcacttaagacttatacttgccttctgatagtattcctttatacacagtggattgattataaataaatagatgtgtctt

SEQ ID NO: 2592 - DNA, 2428 bp, Homo sapiens
  source 1..2428: mol_type = genomic DNA
gacgtgccagtcaggccttctccttttccgcagaccgtgtgtttctttaccgctctcccccgagaccttttaagggttgtttggagttttagatgcaaaatccacaagtattcaagtgattgttaaagagggaggcctgaagttgattcagatccaagacaatggcaccgggatcaggaaagaagatctggatattgtatgtgaaaggttcactactagtaaactgcagtcctttgaggatttagccagtatttctacctatggctttcgaggctttggccagcataagccatgtggctcatgttactattacaacgaaaacagctgatggaaagtgtgcatacagagcaagttactcagatggaaaactgaaagcccctcctaaaccatgtgctggcaatcaagggacccagatcacggtggaggaccttttttacaacatagccacgaggagaaaagctttaaaaaatccaagtgaagaatatgggaaaattttggaagttgttggcaggtattcagtacacaatgcaggcattagtttctcagttaaaaaacaaggagagacagtagctgatgttaggacactacccaatgcctcaaccgtggacaatattcgctccatctttggaaatgctgttagtcgagaactgatagaaattggatgtgaggataaaaccctagccttcaaaatgaatggttacatatccaatgcaaactactcagtgaagaagtgcatcttcttactcttcatcaaccatcgtctggtagaatcaacttccttgagaaaagccatagaaacagtgtatgcagcctatttgcccaaaaacacacacccattcctgtacctcagtttagaaatcagtccccagaatgtggatgttaatgtgcaccccacaaagcatgaagttcacttcctgcacgaggagagcatcctggagcgggtgcagcagcacatcgagagcaagctcctgggctccaattcctccaggatgtacttcacccagactttgctaccaggacttgctggcccctctggggagatggttaaatccacaacaagtctgacctcgtcttctacttctggaagtagtgataaggtctatgcccaccagatggttcgtacagattcccgggaacagaagcttgatgcatttctgcagcctctgagcaaacccctgtccagtcagccccaggccattgtcacagaggataagacagatatttctagtggcagggctaggcagcaagatgaggagatgcttgaactcccagcccctgctgaagtggctgccaaaaatcagagcttggagggggatacaacaaaggggacttcagaaatgtcagagaagagaggacctacttccagcaaccccagaaagagacatcgggaagattctgatgtggaaatggtggaagatgattcccgaaaggaaatgactgcagcttgtaccccccggagaaggatcattaacctcactagtgttttgagtctccaggaagaaattaatgagcagggacatgaggttctccgggagatgttgcataaccactccttcgtgggctgtgtgaatcctcagtgggccttggcacagcatcaaaccaagttataccttctcaacaccaccaagcttagtgaagaactgttctaccagatactcatttatgattttgccaattttggtgttctcaggttatcggagccagcaccgctctttgaccttgccatgcttgccttagatagtccagagagtggctggacagaggaagatggtcccaaagaaggacttgctgaatacattgttgagtttctgaagaagaaggctgagatgcttgcagactatttctctttggaaattgatgaggaagggaacctgattggattaccccttctgattgacaactatgtgccccctttggagggactgcctatcttcattcttcgactagccactgaggtgaattgggacgaagaaaaggaatgttttgaaagcctcagtaaagaatgcgctatgttctattccatccggaagcagtacatatctgaggagtcgaccctctcaggccagcagagtgaagtgcctggctccattccaaactcctggaagtggactgtggaacacattgtctataaagccttgcgctcacacattctgcctcctaaacatttcacagaagatggaaatatcctgcagcttgctaacctgcctgatctatacaaagtctttgagaggtgttaaatatggttatttatgcactgtgggatgtgttcttctttctctgtattccgatacaaagtgttgtatcaaagtgtgatatacaaagtgtaccaacataagtgttggtagcacttaagacttatacttgccttctgatagtattcctttatacacagtggattgattataaataaatagatgtgtcttaacat

SEQ ID NO: 2593 - DNA, 2089 bp, Homo sapiens
  source 1..2089: mol_type = genomic DNA
aaaatgtcgttcgtggcaggggttattcggcggctggacgagacagtggtgaaccgcatcgcggcgggggaagttatccagcggccagctaatgctatcaaagagatgattgagaactgtttagatgcaaaatccacaagtattcaagtgattgttaaagagggaggcctgaagttgattcagatccaagacaatggcaccgggatcaggaaagaagatctggatattgtatgtgaaaggttcactactagtaaactgcagtcctttgaggatttagccagtatttctacctatggctttcgaggtgaggctttggccagcataagccatgtggctcatgttactattacaacgaaaacagctgatggaaagtgtgcatacagagcaagttactcagatggaaaactgaaagcccctcctaaaccatgtgctggcaatcaagggacccagatcacggtggaggaccttttttacaacatagccacgaggagaaaagctttaaaaaatccaagtgaagaatatgggaaaattttggaagttgttggcaggtattcagtacacaatgcaggcattagtttctcagttaaaaaacaaggagagacagtagctgatgttaggacactacccaatgcctcaaccgtggacaatattcgctccatctttggaaatgctgttagtcgagaactgatagaaattggatgtgaggataaaaccctagccttcaaaatgaatggttacatatccaatgcaaactactcagtgaagaagtgcatcttcttactcttcatcaaccatcgtctggtagaatcaacttccttgagaaaagccatagaaacagtgtatgcagcctatttgcccaaaaacacacacccattcctgtacctcagtttagaaatcagtccccagaatgtggatgttaatgtgcaccccacaaagcatgaagttcacttcctgcacgaggagagcatcctggagcgggtgcagcagcacatcgagagcaagctcctgggctccaattcctccaggatgtacttcacccagaaagagacatcgggaagattctgatgtggaaatggtggaagatgattcccgaaaggaaatgactgcagcttgtaccccccggagaaggatcattaacctcactagtgttttgagtctccaggaagaaattaatgagcagggacatgaggttctccgggagatgttgcataaccactccttcgtgggctgtgtgaatcctcagtgggccttggcacagcatcaaaccaagttataccttctcaacaccaccaagcttagtgaagaactgttctaccagatactcatttatgattttgccaattttggtgttctcaggttatcggagccagcaccgctctttgaccttgccatgcttgccttagatagtccagagagtggctggacagaggaagatggtcccaaagaaggacttgctgaatacattgttgagtttctgaagaagaaggctgagatgcttgcagactatttctctttggaaattgatgaggaagggaacctgattggattaccccttctgattgacaactatgtgccccctttggagggactgcctatcttcattcttcgactagccactgaggtgaattgggacgaagaaaaggaatgttttgaaagcctcagtaaagaatgcgctatgttctattccatccggaagcagtacatatctgaggagtcgaccctctcaggccagcagagtgaagtgcctggctccattccaaactcctggaagtggactgtggaacacattgtctataaagccttgcgctcacacattctgcctcctaaacatttcacagaagatggaaatatcctgcagcttgctaacctgcctgatctatacaaagtctttgagaggtgttaaatatggttatttatgcactgtgggatgtgttcttctttctctgtattccgatacaaagtgttgtatcaaagtgtgatatacaaagtgtaccaacataagtgttggtagcacttaagacttatacttgccttctgatagtattcctttatacacagtggattgattataaataaatagatgtgtctt

SEQ ID NO: 2594 - DNA, 2296 bp, Homo sapiens
  source 1..2296: mol_type = genomic DNA
ttccctgacgtgccagtcaggccttctccttttccgcagaccgtgtgtttctttaccgctctcccccgagaccttttaagggttgtttggagtatgcaaaatccacaagtattcaagtgattgttaaagagggaggcctgaagttgattcagatccaagacaatggcaccgggatcaggaaagaagatctggatattgtatgtgaaaggttcactactagtaaactgcagtcctttgaggatttagccagtatttctacctatggctttcgaggtgaggctttggccagcataagccatgtggctcatgttactattacaacgaaaacagctgatggaaagtgtgcatacagagcaagttactcagatggaaaactgaaagcccctcctaaaccatgtgctggcaatcaagggacccagatcacggtggaggaccttttttacaacatagccacgaggagaaaagctttaaaaaatccaagtgaagaatatgggaaaattttggaagttgttggcaggtattcagtacacaatgcaggcattagtttctcagttaaaaaacaaggagagacagtagctgatgttaggacactacccaatgcctcaaccgtggacaatattcgctccatctttggaaatgctgttagtcgagaactgatagaaattggatgtgaggataaaaccctagccttcaaaatgaatggttacatatccaatgcaaactactcagtgaagaagtgcatcttcttactcttcatcaaccatcgtctggtagaatcaacttccttgagaaaagccatagaaacagtgtatgcagcctatttgcccaaaaacacacacccattcctgtacctcagtttagaaatcagtccccagaatgtggatgttaatgtgcaccccacaaagcatgaagttcacttcctgcacgaggagagcatcctggagcgggtgcagcagcacatcgagagcaagctcctgggctccaattcctccaggatgtacttcacccagactttgctaccaggacttgctggcccctctggggagatggttaaatccacaacaagtctgacctcgtcttctacttctggaagtagtgataaggtctatgcccaccagatggttcgtacagattcccgggaacagaagcttgatgcatttctgcagcctctgagcaaacccctgtccagtcagccccaggccattgtcacagaggataagacagatatttctagtggcagggctaggcagcaagatgaggagatgcttgaactcccagcccctgctgaagtggctgccaaaaatcagagcttggagggggatacaacaaaggggacttcagaaatgtcagagaagagaggacctacttccagcaaccccagaaagagacatcgggaagattctgatgtggaaatggtggaagatgattcccgaaaggaaatgactgcagcttgtaccccccggagaaggatcattaacctcactagtgttttgagtctccaggaagaaattaatgagcagggacatgaggttctccgggagatgttgcataaccactccttcgtgggctgtgtgaatcctcagtgggccttggcacagcatcaaaccaagttataccttctcaacaccaccaagcttagtgaagaactgttctaccagatactcatttatgattttgccaattttggtgttctcaggttatcggagccagcaccgctctttgaccttgccatgcttgccttagatagtccagagagtggctggacagaggaagatggtcccaaagaaggacttgctgaatacattgttgagtttctgaagaagaaggctgagatgcttgcagactatttctctttggaaattgatgaggaagggaacctgattggattaccccttctgattgacaactatgtgccccctttggagggactgcctatcttcattcttcgactagccactgaggtgaattgggacgaagaaaaggaatgttttgaaagcctcagtaaagaatgcgctatgttctattccatccggaagcagtacatatctgaggagtcgaccctctcaggccagcagagtgaagtgcctggctccattccaaactcctggaagtggactgtggaacacattgtctataaagccttgcgctcacacattctgcctcctaaacatttcacagaagatggaaatatcctgcagcttgctaacctgcctgatctatacaaagtctttgagaggtgttaaatatggttatttatgcactgtgggatgtgttcttctttctctgtattccgata

SEQ ID NO: 2595 - DNA, 2230 bp, Homo sapiens
  source 1..2230: mol_type = genomic DNA
ggcggctggacgagacagtggtgaaccgcatcgcggcgggggaagttatccagcggccagctaatgctatcaaagagatgattgagaactgtttagatgcaaaatccacaagtattcaagtgattgttaaagagggaggcctgaagttgattcagatccaagacaatggcaccgggatcaggaaagaagatctggatattgtatgtgaaaggttcactactagtaaactgcagtcctttgaggatttagccagtatttctacctatggctttcgaggtgaggctttggccagcataagccatgtggctcatgttactattacaacgaaaacagctgatggaaagtgtgcatacagagcaagttactcagatggaaaactgaaagcccctcctaaaccatgtgctggcaatcaagggacccagatcacggtggaggaccttttttacaacatagccacgaggagaaaagctttaaaaaatccaagtgaagaatatgggaaaattttggaagttgttggcaggtattcagtacacaatgcaggcattagtttctcagttaaaaaacaaggagagacagtagctgatgttaggacactacccaatgcctcaaccgtggacaatattcgctccatctttggaaatgctgttagtcgagaactgatagaaattggatgtgaggataaaaccctagccttcaaaatgaatggttacatatccaatgcaaactactcagtgaagaagtgcatcttcttactcttcatcaaccatcgtctggtagaatcaacttccttgagaaaagccatagaaacagtgtatgcagcctatttgcccaaaaacacacacccattcctgtacctcagtttagaaatcagtccccagaatgtggatgttaatgtgcaccccacaaagcatgaagttcacttcctgcacgaggagagcatcctggagcgggtgcagcagcacatcgagagcaagctcctgggctccaattcctccaggatgtacttcacccagactttgctaccaggacttgctggcccctctggggagatggttaaatccacaacaagtctgacctcgtcttctacttctggaagtagtgataaggtctatgcccaccagatggttcgtacagattcccgggaacagaagcttgatgcatttctgcagcctctgagcaaacccctgtccagtcagccccaggccattgtcacagaggataagacagatatttctagtggcagggctaggcagcaagatgaggagatgcttgaactcccagcccctgctgaagtggctgccaaaaatcagagcttggagggggatacaacaaaggggacttcagaaatgtcagagaagagaggacctacttccagcaaccccagaaagagacatcgggaagattctgatgtggaaatggtggaagatgattcccgaaaggaaatgactgcagcttgtaccccccggagaaggatcattaacctcactagtgttttgagtctccaggaagaaattaatgagcagggacatgaggttctccgggagatgttgcataaccactccttcgtgggctgtgtgaatcctcagtgggccttggcacagcatcaaaccaagttataccttctcaacaccaccaagcttagtgaagaactgttctaccagatactcatttatgattttgccaattttggtgttctcaggttatcggagccagcaccgctctttgaccttgccatgcttgccttagatagtccagagagtggctggacagaggaagatggtcccaaagaaggacttgctgaatacattgttgagtttctgaagaagaaggctgagatgcttgcagactatttctctttggaaattgatgagagtgaagtgcctggctccattccaaactcctggaagtggactgtggaacacattgtctataaagccttgcgctcacacattctgcctcctaaacatttcacagaagatggaaatatcctgcagcttgctaacctgcctgatctatacaaagtctttgagaggtgttaaatatggttatttatgcactgtgggatgtgttcttctttctctgtattccgatacaaagtgttgtatcaaagtgtgatatacaaagtgtaccaacataagtgttggtagcacttaagacttatacttgccttctgatagtattcctttatacacagtggattgattataaataaatagatgtgtcttaacat

SEQ ID NO: 2596 - DNA, 2608 bp, Homo sapiens
  source 1..2608: mol_type = genomic DNA
cacaacggcggaggccgccgggttccctgacgtgccagtcaggccttctccttttccgcagaccgtgtgtttctttaccgctctcccccgagaccttttaagggttgtttggagttttagatgcaaaatccacaagtattcaagtgattgttaaagagggaggcctgaagttgattcagatccaagacaatggcaccgggatcaggaacaatatacgcaaagactattaaatggaagcatacctgacatgttaaaggactatcaaggaggccagtttgtctagaggctgaaaaggaaagagtaataggagatgaggtctgagtgaaaacacgtaaatccttgtgggccaagaaagaagatctggatattgtatgtgaaaggttcactactagtaaactgcagtcctttgaggatttagccagtatttctacctatggctttcgaggtgaggctttggccagcataagccatgtggctcatgttactattacaacgaaaacagctgatggaaagtgtgcatacagagcaagttactcagatggaaaactgaaagcccctcctaaaccatgtgctggcaatcaagggacccagatcacggtggaggaccttttttacaacatagccacgaggagaaaagctttaaaaaatccaagtgaagaatatgggaaaattttggaagttgttggcaggtattcagtacacaatgcaggcattagtttctcagttaaaaaacaaggagagacagtagctgatgttaggacactacccaatgcctcaaccgtggacaatattcgctccatctttggaaatgctgttagtcgagaactgatagaaattggatgtgaggataaaaccctagccttcaaaatgaatggttacatatccaatgcaaactactcagtgaagaagtgcatcttcttactcttcatcaaccatcgtctggtagaatcaacttccttgagaaaagccatagaaacagtgtatgcagcctatttgcccaaaaacacacacccattcctgtacctcagtttagaaatcagtccccagaatgtggatgttaatgtgcaccccacaaagcatgaagttcacttcctgcacgaggagagcatcctggagcgggtgcagcagcacatcgagagcaagctcctgggctccaattcctccaggatgtacttcacccagactttgctaccaggacttgctggcccctctggggagatggttaaatccacaacaagtctgacctcgtcttctacttctggaagtagtgataaggtctatgcccaccagatggttcgtacagattcccgggaacagaagcttgatgcatttctgcagcctctgagcaaacccctgtccagtcagccccaggccattgtcacagaggataagacagatatttctagtggcagggctaggcagcaagatgaggagatgcttgaactcccagcccctgctgaagtggctgccaaaaatcagagcttggagggggatacaacaaaggggacttcagaaatgtcagagaagagaggacctacttccagcaaccccagaaagagacatcgggaagattctgatgtggaaatggtggaagatgattcccgaaaggaaatgactgcagcttgtaccccccggagaaggatcattaacctcactagtgttttgagtctccaggaagaaattaatgagcagggacatgaggttctccgggagatgttgcataaccactccttcgtgggctgtgtgaatcctcagtgggccttggcacagcatcaaaccaagttataccttctcaacaccaccaagcttagtgaagaactgttctaccagatactcatttatgattttgccaattttggtgttctcaggttatcggagccagcaccgctctttgaccttgccatgcttgccttagatagtccagagagtggctggacagaggaagatggtcccaaagaaggacttgctgaatacattgttgagtttctgaagaagaaggctgagatgcttgcagactatttctctttggaaattgatgaggaagggaacctgattggattaccccttctgattgacaactatgtgccccctttggagggactgcctatcttcattcttcgactagccactgaggtgaattgggacgaagaaaaggaatgttttgaaagcctcagtaaagaatgcgctatgttctattccatccggaagcagtacatatctgaggagtcgaccctctcaggccagcagagtgaagtgcctggctccattccaaactcctggaagtggactgtggaacacattgtctataaagccttgcgctcacacattctgcctcctaaacatttcacagaagatggaaatatcctgcagcttgctaacctgcctgatctatacaaagtctttgagaggtgttaaatatggttatttatgcactgtgggatgtgttcttctttctctgtattccgatacaaagtgttgtatcaaagtgtgatatacaaagtgtaccaacataagtgttggtagcacttaagacttatacttgccttctgatagtattcctttatacacagtggattgattataaataaatagatgtgtcttaacataa

SEQ ID NO: 2597 - DNA, 2303 bp, Homo sapiens
  source 1..2303: mol_type = genomic DNA
ctttaccgctctcccccgagaccttttaagggttgtttggagttttagatgcaaaatccacaagtattcaagtgattgttaaagagggaggcctgaagttgattcagatccaagacaatggcaccgggatcaggaaagaagatctggatattgtatgtgaaaggttcactactagtaaactgcagtcctttgaggatttagccagtatttctacctatggctttcgaggtgaggctttggccagcataagccatgtggctcatgttactattacaacgaaaacagctgatggaaagtgtgcatacagagcaagttactcagatggaaaactgaaagcccctcctaaaccatgtgctggcaatcaagggacccagatcacggtggaggaccttttttacaacatagccacgaggagaaaagctttaaaaaatccaagtgaagaatatgggaaaattttggaagttgttggcaggtattcagtacacaatgcaggcattagtttctcagttaaaaaacaaggagagacagtagctgatgttaggacactacccaatgcctcaaccgtggacaatattcgctccatctttggaaatgctgttagtcgagaactgatagaaattggatgtgaggataaaaccctagccttcaaaatgaatggttacatatccaatgcaaactactcagtgaagaagtgcatcttcttactcttcatcaaccatcgtctggtagaatcaacttccttgagaaaagccatagaaacagtgtatgcagcctatttgcccaaaaacacacacccattcctgtacctcagtttagaaatcagtccccagaatgtggatgttaatgtgcaccccacaaagcatgaagttcacttcctgcacgaggagagcatcctggagcgggtgcagcagcacatcgagagcaagctcctgggctccaattcctccaggatgtacttcacccagactttgctaccaggacttgctggcccctctggggagatggttaaatccacaacaagtctgacctcgtcttctacttctggaagtagtgataaggtctatgcccaccagatggttcgtacagattcccgggaacagaagcttgatgcatttctgcagcctctgagcaaacccctgtccagtcagccccaggccattgtcacagaggataagacagatatttctagtggcagggctaggcagcaagatgaggagatgcttgaactcccagcccctgctgaagtggctgccaaaaatcagagcttggagggggatacaacaaaggggacttcagaaatgtcagagaagagaggacctacttccagcaaccccagaaagagacatcgggaagattctgatgtggaaatggtggaagatgattcccgaaaggaaatgactgcagcttgtaccccccggagaaggatcattaacctcactagtgttttgagtctccaggaagaaattaatgagcagggacatgaggttctccgggagatgttgcataaccactccttcgtgggctgtgtgaatcctcagtgggccttggcacagcatcaaaccaagttataccttctcaacaccaccaagcttagtgaagaactgttctaccagatactcatttatgattttgccaattttggtgttctcaggttatcggagccagcaccgctctttgaccttgccatgcttgccttagatagtccagagagtggctggacagaggaagatggtcccaaagaaggacttgctgaatacattgttgagtttctgaagaagaaggctgagatgcttgcagactatttctctttggaaattgatgaggaagggaacctgattggattaccccttctgattgacaactatgtgccccctttggagggactgcctatcttcattcttcgactagccactgaggtgaattgggacgaagaaaaggaatgttttgaaagcctcagtaaagaatgcgctatgttctattccatccggaagcagtacatatctgaggagtcgaccctctcaggccagcagtgacccagatgctgatttcccaaggtcaaggatgtctgaagacaatgtgccaatgtgcccagattcttctagttaaggatctacttgagtctcagcccttatgctgtttttgttttccaagctgggatatgaaaaagcagaaaacccaatagggtaacattaatccaagtcaacatagcaaccagtatcttacctaatggcccttctcctgctgactccaagacctgagcagcttcctgagacacaacagtgatggctccagccactggttca

SEQ ID NO: 2598 - DNA, 2306 bp, Homo sapiens
  source 1..2306: mol_type = genomic DNA
aaaatgtcgttcgtggcaggggttattcggcggctggacgagacagtggtgaaccgcatcgcggcgggggaagttatccagcggccagctaatgctatcaaagagatgattgagaactgtttagatgcaaaatccacaagtattcaagtgattgttaaagagggaggcctgaagttgattcagatccaagacaatggcaccgggatcaggaaagaagatctggatattgtatgtgaaaggttcactactagtaaactgcagtcctttgaggatttagccagtatttctacctatggctttcgaggtgaggctttggccagcataagccatgtggctcatgttactattacaacgaaaacagctgatggaaagtgtgcatacagagcaagttactcagatggaaaactgaaagcccctcctaaaccatgtgctggcaatcaagggacccagatcacggtggaggaccttttttacaacatagccacgaggagaaaagctttaaaaaatccaagtgaagaatatgggaaaattttggaagttgttggcaggtattcagtacacaatgcaggcattagtttctcagttaaaaaacaaggagagacagtagctgatgttaggacactacccaatgcctcaaccgtggacaatattcgctccatctttggaaatgctgttagtcgagaactgatagaaattggatgtgaggataaaaccctagccttcaaaatgaatggttacatatccaatgcaaactactcagtgaagaagtgcatcttcttactcttcatcaaccatcgtctggtagaatcaacttccttgagaaaagccatagaaacagtgtatgcagcctatttgcccaaaaacacacacccattcctgtacctcagactttgctaccaggacttgctggcccctctggggagatggttaaatccacaacaagtctgacctcgtcttctacttctggaagtagtgataaggtctatgcccaccagatggttcgtacagattcccgggaacagaagcttgatgcatttctgcagcctctgagcaaacccctgtccagtcagccccaggccattgtcacagaggataagacagatatttctagtggcagggctaggcagcaagatgaggagatgcttgaactcccagcccctgctgaagtggctgccaaaaatcagagcttggagggggatacaacaaaggggacttcagaaatgtcagagaagagaggacctacttccagcaaccccagaaagagacatcgggaagattctgatgtggaaatggtggaagatgattcccgaaaggaaatgactgcagcttgtaccccccggagaaggatcattaacctcactagtgttttgagtctccaggaagaaattaatgagcagggacatgaggttctccgggagatgttgcataaccactccttcgtgggctgtgtgaatcctcagtgggccttggcacagcatcaaaccaagttataccttctcaacaccaccaagcttagtgaagaactgttctaccagatactcatttatgattttgccaattttggtgttctcaggttatcggagccagcaccgctctttgaccttgccatgcttgccttagatagtccagagagtggctggacagaggaagatggtcccaaagaaggacttgctgaatacattgttgagtttctgaagaagaaggctgagatgcttgcagactatttctctttggaaattgatgaggaagggaacctgattggattaccccttctgattgacaactatgtgccccctttggagggactgcctatcttcattcttcgactagccactgaggtgaattgggacgaagaaaaggaatgttttgaaagcctcagtaaagaatgcgctatgttctattccatccggaagcagtacatatctgaggagtcgaccctctcaggccagcagagtgaagtgcctggctccattccaaactcctggaagtggactgtggaacacattgtctataaagccttgcgctcacacattctgcctcctaaacatttcacagaagatggaaatatcctgcagcttgctaacctgcctgatctatacaaagtctttgagaggtgttaaatatggttatttatgcactgtgggatgtgttcttctttctctgtattccgatacaaagtgttgtatcaaagtgtgatatacaaagtgtaccaacataagtgttggtagcacttaagacttatacttgccttctgatagtattcctttatacacagtggattgattataaataaatagatgtgtctt

SEQ ID NO: 2599 - DNA, 2366 bp, Homo sapiens
  source 1..2366: mol_type = genomic DNA
acaacggcggaggccgccgggttccctgacgtgccagtcaggccttctccttttccgcagaccgtgtgtttctttaccgctctcccccgagaccttttaagggttgtttggagttttagatgcaaaatccacaagtattcaagtgattgttaaagagggaggcctgaagttgattcagatccaagacaatggcaccgggatcaggaaagaagatctggatattgtatgtgaaaggttcactactagtaaactgcagtcctttgaggatttagccagtatttctacctatggctttcgaggtgaggctttggccagcataagccatgtggctcatgttactattacaacgaaaacagctgatggaaagtgtgcatacagagcaagttactcagatggaaaactgaaagcccctcctaaaccatgtgctggcaatcaagggacccagatcacggtattcagtacacaatgcaggcattagtttctcagttaaaaaacaaggagagacagtagctgatgttaggacactacccaatgcctcaaccgtggacaatattcgctccatctttggaaatgctgttagtcgagaactgatagaaattggatgtgaggataaaaccctagccttcaaaatgaatggttacatatccaatgcaaactactcagtgaagaagtgcatcttcttactcttcatcaaccatcgtctggtagaatcaacttccttgagaaaagccatagaaacagtgtatgcagcctatttgcccaaaaacacacacccattcctgtacctcagtttagaaatcagtccccagaatgtggatgttaatgtgcaccccacaaagcatgaagttcacttcctgcacgaggagagcatcctggagcgggtgcagcagcacatcgagagcaagctcctgggctccaattcctccaggatgtacttcacccagactttgctaccaggacttgctggcccctctggggagatggttaaatccacaacaagtctgacctcgtcttctacttctggaagtagtgataaggtctatgcccaccagatggttcgtacagattcccgggaacagaagcttgatgcatttctgcagcctctgagcaaacccctgtccagtcagccccaggccattgtcacagaggataagacagatatttctagtggcagggctaggcagcaagatgaggagatgcttgaactcccagcccctgctgaagtggctgccaaaaatcagagcttggagggggatacaacaaaggggacttcagaaatgtcagagaagagaggacctacttccagcaaccccagaaagagacatcgggaagattctgatgtggaaatggtggaagatgattcccgaaaggaaatgactgcagcttgtaccccccggagaaggatcattaacctcactagtgttttgagtctccaggaagaaattaatgagcagggacatgaggttctccgggagatgttgcataaccactccttcgtgggctgtgtgaatcctcagtgggccttggcacagcatcaaaccaagttataccttctcaacaccaccaagcttagtgaagaactgttctaccagatactcatttatgattttgccaattttggtgttctcaggttatcggagccagcaccgctctttgaccttgccatgcttgccttagatagtccagagagtggctggacagaggaagatggtcccaaagaaggacttgctgaatacattgttgagtttctgaagaagaaggctgagatgcttgcagactatttctctttggaaattgatgaggaagggaacctgattggattaccccttctgattgacaactatgtgccccctttggagggactgcctatcttcattcttcgactagccactgaggtgaattgggacgaagaaaaggaatgttttgaaagcctcagtaaagaatgcgctatgttctattccatccggaagcagtacatatctgaggagtcgaccctctcaggccagcagagtgaagtgcctggctccattccaaactcctggaagtggactgtggaacacattgtctataaagccttgcgctcacacattctgcctcctaaacatttcacagaagatggaaatatcctgcagcttgctaacctgcctgatctatacaaagtctttgagaggtgttaaatatggttatttatgcactgtgggatgtgttcttctttctctgtattccgatacaaagtgttgtatcaaagtgtgatatacaaagtgtaccaacataagtgttggtagcacttaagacttatacttgccttctgatagtattcctttatacacagtggattgattataaataaatagatgtgtcttaac

SEQ ID NO: 2600 - DNA, 5233 bp, Homo sapiens
  source 1..5233: mol_type = genomic DNA
aacaactggtgcgcatgcgcactggtgtctcgcggcctggcgcgccccctccgaagcgcatgctcgtgggcacgcacgagcctcaagatccaaggtgcgcgcgtcggcgtccgaggcggttggtgtcggagaatttgttaagcgggactccaggcaattatttccagtcagagaaggaaaccagtgcctggcattctcaccatctttctacctaccatgatcaagtgcttgtcagttgaagtacaagccaaattgcgttctggtttggccataagctccttgggccaatgtgttgaggaacttgccctcaacagtattgatgctgaagcaaaatgtgtggctgtcagggtgaatatggaaaccttccaagttcaagtgatagacaatggatttgggatggggagtgatgatgtagagaaagtgggaaatcgttatttcaccagtaaatgccactcggtacaggacttggagaatccaaggttttatggtttccgaggagaggccttggcaaatattgctgacatggccagtgctgtggaaatttcgtccaagaaaaacaggacaatgaaaacttttgtgaaactgtttcagagtggaaaagccctgaaagcttgtgaagctgatgtgactagagcaagcgctgggactactgtaacagtgtataacctattttaccagcttcctgtaaggaggaaatgcatggaccctagactggagtttgagaaggttaggcagagaatagaagctctctcactcatgcacccttccatttctttctctttgagaaatgatgtttctggttccatggttcttcagctccctaaaaccaaagacgtatgttcccgattttgtcaaatttatggattgggaaagtcccaaaagctaagagaaataagttttaaatataaagagtttgagcttagtggctatatcagctctgaagcacattacaacaagaatatgcagtttttgtttgtgaacaaaagactagttttaaggacaaagctacataaactcattgactttttattaaggaaagaaagtattatatgcaagccaaagaatggtcccaccagtaggcaaatgaattcaagtcttcggcaccggtctaccccagaactctatggcatatatgtaattaatgtgcagtgccaattctgtgagtatgatgtgtgcatggagccagccaaaactctgattgaatttcagaactgggacactctcttgttttgcattcaggaaggagtgaaaatgtttttaaagcaagaaaaattatttgtggaattatcaggtgaggatattaaggaatttagtgaagataatggttttagtttatttgatgctactcttcagaagcgtgtgacttccgatgagaggagcaatttccaggaagcatgtaataatattttagattcctatgagatgtttaatttgcagtcaaaagctgtgaaaagaaaaactactgcagaaaacgtaaacacacagagttctagggattcagaagctaccagaaaaaatacaaatgatgcatttttgtacatttatgaatcaggtggtccaggccatagcaaaatgacagagccatctttacaaaacaaagacagctcttgctcagaatcaaagatgttagaacaagagacaattgtagcatcagaagctggagaaaatgagaaacataaaaaatctttcctggaacatagctctttagaaaatccgtgtggaaccagtttagaaatgtttttaagcccttttcagacaccatgtcactttgaggagagtgggcaggatctagaaatatggaaagaaagtactactgttaatggcatggctgccaacatcttgaaaaataatagaattcagaatcaaccaaagagatttaaagatgctactgaagtgggatgccagcctctgccttttgcaacaacattatggggagtacatagtgctcagacagagaaagagaaaaaaaaagaatctagcaattgtggaagaagaaatgtttttagttatgggcgagttaaattatgttccactggctttataactcatgtagtacaaaatgaaaaaactaaatcaactgaaacagaacattcatttaaaaattatgttagacctggtcccacacgtgcccaagaaacatttggaaatagaacacgtcattcagttgaaactccagacatcaaagatttagccagcactttaagtaaagaatctggtcaattgcccaacaaaaaaaattgcagaacgaatataagttatgggctagagaatgaacctacagcaacttatacaatgttttctgcttttcaggaaggtagcaaaaaatcacaaacagattgcatattatctgatacatccccctctttcccctggtatagacacgtttccaatgatagtaggaaaacagataaattaattggtttctccaaaccaatcgtccgtaagaagctaagcttgagttcacagctaggatctttagagaagtttaagaggcaatatgggaaggttgaaaatcctctggatacagaagtagaggaaagtaatggagtcactaccaatctcagtcttcaagttgaacctgacattctgctgaaggacaagaaccgcttagagaactctgatgtttgtaaaatcactactatggagcatagtgattcagatagtagttgtcaaccagcaagccacatccttaactcagagaagtttccattctccaaggatgaagattgtttagaacaacagatgcctagtttgagagaaagtcctatgaccctgaaggagttatctctctttaatagaaaacctttggaccttgagaagtcatctgaatcactagcctctaaattatccagactgaagggttccgaaagagaaactcaaacaatggggatgatgagtcgttttaatgaacttccaaattcagattccagtaggaaagacagcaagttgtgcagtgtgttaacacaagatttttgtatgttatttaacaacaagcatgaaaaaacagagaatggtgtcatcccaacatcagattctgccacacaggataattcctttaataaaaatagtaaaacacattctaacagcaatacaacagagaactgtgtgatatcagaaactcctttggtattgccctataataattctaaagttaccggtaaagattcagatgttcttatcagagcctcagaacaacagataggaagtcttgactctcccagtggaatgttaatgaatccggtagaagatgccacaggtgaccaaaatggaatttgttttcagagtgaggaatctaaagcaagagcttgttctgaaactgaagagtcaaacacgtgttgttcagattggcagcggcatttcgatgtagccctgggaagaatggtttatgtcaacaaaatgactggactcagcacattcattgccccaactgaggacattcaggctgcttgtactaaagacctgacaactgtggctgtggatgttgtacttgagaatgggtctcagtacaggtgtcaaccttttagaagcgaccttgttcttcctttccttccgagagctcgagcagagaggactgtgatgagacaggataacagagatactgtggatgatactgttagtagcgaatcgcttcagtctttgttctcagaatgggacaatccagtatttgcccgttatccagaggttgctgttgatgtaagcagtggccaggctgagagcttagcagttaaaattcacaacatcttgtatccctatcgtttcaccaaaggaatgattcattcaatgcaggttctccagcaagtagataacaagtttattgcctgtttgatgagcactaagactgaagagaatggcgaggcagattcctacgagaagcaacaggcacaaggctctggtcggaaaaaattactgtcttctactctaattcctccgctagagataacagtgacagaggaacaaaggagactcttatggtgttaccacaaaaatctggaagatctgggccttgaatttgtatttccagacactagtgattctctggtccttgtgggaaaagtaccactatgttttgtggaaagagaagccaatgaacttcggagaggaagatctactgtgaccaagagtattgtggaggaatttatccgagaacaactggagctactccagaccaccggaggcatccaagggacattgccactgactgtccagaaggtgttggcatcccaagcctgccatggggccattaagtttaatgatggcctgagcttacaggaaagttgccgccttattgaagctctgtcctcatgccagctgccattccagtgtgctcacgggagaccttctatgctgccgttagctgacatagaccacttggaacaggaaaaacagattaaacccaacctcactaaacttcgcaaaatggcccaggcctggcgtctctttggaaaagcagagtgtgatacaaggcagagcctgcagcaatccatgcctccctgtgagccaccatgagaacagaatcactggtctaaaaggaacaaagggatgttcactgtatgcctctgagcagagagcagcagcagcaggtaccagcacggccctgactgaatcagcccagtgtccctgagcagcttagacagcagggctctctgtatcagtctttcttgagcagatgattcccctagttgagtagccagatgaaattcaagcctaaagacaattcattcatttgcatccatgggcacagaaggttgctatatagtatctaccttttgctacttatttaatgataaaatttaatgacagtttgattggttgcttggtttgttatttgaagggtgtgatttttgtttttgtacagttttttttcaagcttcacatttgcgtgtatctaattcagctgatgctcaagtccaaggggtagtctgccttcccaggctgcccccagggtttctgcactggtcccctcttttcccttcagtcttcttcacttccctatgctgctgcttcatgtgctacatctcagacttaaagagtttctctactacagtgaaaacattctctagggtctttcatcaggcctttagttattttagggataaaaactattgataaaaaggacaaggatagaacagagaaaatttaaagtcctgttccgggttttttgttatgttttctttaaaaactcagagactgatgttcaatatcccaaaccagtaaaatggtgaaaatactatga

SEQ ID NO: 2601 - DNA, 7896 bp, Homo sapiens
  source 1..7896: mol_type = genomic DNA
aacaactggtgcgcatgcgcactggtgtctcgcggcctggcgcgccccctccgaagcgcatgctcgtgggcacgcacgagcctcaagatccaaggtgcgcgcgtcggcgtccgaggcggttggtgtcggagaatttgttaagcgggactccaggcaattatttccagtcagagaaggaaaccagtgcctggcattctcaccatctttctacctaccatgatcaagtgcttgtcagttgaagtacaagccaaattgcgttctggtttggccataagctccttgggccaatgtgttgaggaacttgccctcaacagtattgatgctgaagcaaaatgtgtggctgtcagggtgaatatggaaaccttccaagttcaagtgatagacaatggatttgggatggggagtgatgatgtagagaaagtgggaaatcgttatttcaccagtaaatgccactcggtacaggacttggagaatccaaggttttatggtttccgaggagaggccttggcaaatattgctgacatggccagtgctgtggaaatttcgtccaagaaaaacaggacaatgaaaacttttgtgaaactgtttcagagtggaaaagccctgaaagcttgtgaagctgatgtgactagagcaagcgctgggactactgtaacagtgtataacctattttaccagcttcctgtaaggaggaaatgcatggaccctagactggagtttgagaaggttaggcagagaatagaagctctctcactcatgcacccttccatttctttctctttgagaaatgatgtttctggttccatggttcttcagctccctaaaaccaaagacgtatgttcccgattttgtcaaatttatggattgggaaagtcccaaaagctaagagaaataagttttaaatataaagagtttgagcttagtggctatatcagctctgaagcacattacaacaagaatatgcagtttttgtttgtgaacaaaagactagttttaaggacaaagctacataaactcattgactttttattaaggaaagaaagtattatatgcaagccaaagaatggtcccaccagtaggcaaatgaattcaagtcttcggcaccggtctaccccagaactctatggcatatatgtaattaatgtgcagtgccaattctgtgagtatgatgtgtgcatggagccagccaaaactctgattgaatttcagaactgggacactctcttgttttgcattcaggaaggagtgaaaatgtttttaaagcaagaaaaattatttgtggaattatcaggtgaggatattaaggaatttagtgaagataatggttttagtttatttgatgctactcttcagaagcgtgtgacttccgatgagaggagcaatttccaggaagcatgtaataatattttagattcctatgagatgtttaatttgcagtcaaaagctgtgaaaagaaaaactactgcagaaaacgtaaacacacagagttctagggattcagaagctaccagaaaaaatacaaatgatgcatttttgtacatttatgaatcaggtggtccaggccatagcaaaatgacagagccatctttacaaaacaaagacagctcttgctcagaatcaaagatgttagaacaagagacaattgtagcatcagaagctggagaaaatgagaaacataaaaaatctttcctggaacatagctctttagaaaatccgtgtggaaccagtttagaaatgtttttaagcccttttcagacaccatgtcactttgaggagagtgggcaggatctagaaatatggaaagaaagtactactgttaatggcatggctgccaacatcttgaaaaataatagaattcagaatcaaccaaagagatttaaagatgctactgaagtgggatgccagcctctgccttttgcaacaacattatggggagtacatagtgctcagacagagaaagagaaaaaaaaagaatctagcaattgtggaagaagaaatgtttttagttatgggcgagttaaattatgttccactggctttataactcatgtagtacaaaatgaaaaaactaaatcaactgaaacagaacattcatttaaaaattatgttagacctggtcccacacgtgcccaagaaacatttggaaatagaacacgtcattcagttgaaactccagacatcaaagatttagccagcactttaagtaaagaatctggtcaattgcccaacaaaaaaaattgcagaacgaatataagttatgggctagagaatgaacctacagcaacttatacaatgttttctgcttttcaggaaggtagcaaaaaatcacaaacagattgcatattatctgatacatccccctctttcccctggtatagacacgtttccaatgatagtaggaaaacagataaattaattggtttctccaaaccaatcgtccgtaagaagctaagcttgagttcacagctaggatctttagagaagtttaagaggcaatatgggaaggttgaaaatcctctggatacagaagtagaggaaagtaatggagtcactaccaatctcagtcttcaagttgaacctgacattctgctgaaggacaagaaccgcttagagaactctgatgtttgtaaaatcactactatggagcatagtgattcagatagtagttgtcaaccagcaagccacatccttaactcagagaagtttccattctccaaggatgaagattgtttagaacaacagatgcctagtttgagagaaagtcctatgaccctgaaggagttatctctctttaatagaaaacctttggaccttgagaagtcatctgaatcactagcctctaaattatccagactgaagggttccgaaagagaaactcaaacaatggggatgatgagtcgttttaatgaacttccaaattcagattccagtaggaaagacagcaagttgtgcagtgtgttaacacaagatttttgtatgttatttaacaacaagcatgaaaaaacagagaatggtgtcatcccaacatcagattctgccacacaggataattcctttaataaaaatagtaaaacacattctaacagcaatacaacagagaactgtgtgatatcagaaactcctttggtattgccctataataattctaaagttaccggtaaagattcagatgttcttatcagagcctcagaacaacagataggaagtcttgactctcccagtggaatgttaatgaatccggtagaagatgccacaggtgaccaaaatggaatttgttttcagagtgaggaatctaaagcaagagcttgttctgaaactgaagagtcaaacacgtgttgttcagattggcagcggcatttcgatgtagccctgggaagaatggtttatgtcaacaaaatgactggactcagcacattcattgccccaactgaggacattcaggctgcttgtactaaagacctgacaactgtggctgtggatgttgtacttgagaatgggtctcagtacaggtgtcaaccttttagaagcgaccttgttcttcctttccttccgagagctcgagcagagaggactgtgatgagacaggataacagagatactgtggatgatactgttagtagcgaatcgcttcagtctttgttctcagaatgggacaatccagtatttgcccgttatccagaggttgctgttgatgtaagcagtggccaggctgagagcttagcagttaaaattcacaacatcttgtatccctatcgtttcaccaaaggaatgattcattcaatgcaggttctccagcaagtagataacaagtttattgcctgtttgatgagcactaagactgaagagaatggcgaggcaggtgggaacctgctcgtgctggtggatcagcacgctgcccatgagcgtatacgtctggagcagcttatcattgattcctacgagaagcaacaggcacaaggctctggtcggaaaaaattactgtcttctactctaattcctccgctagagataacagtgacagaggaacaaaggagactcttatggtgttaccacaaaaatctggaagatctgggccttgaatttgtatttccagacactagtgattctctggtccttgtgggaaaagtaccactatgttttgtggaaagagaagccaatgaacttcggagaggaagatctactgtgaccaagagtattgtggaggaatttatccgagaacaactggagctactccagaccaccggaggcatccaagggacattgccactgactgtccagaaggtgttggcatcccaagcctgccatggggccattaagtttaatgatggcctgagcttacaggaaagttgccgccttattgaagctctgtcctcatgccagctgccattccagtgtgctcacgggagaccttctatgctgccgttagctgacatagaccacttggaacaggaaaaacagattaaacccaacctcactaaacttcgcaaaatggcccaggcctggcgtctctttggaaaagcagagtgtgatacaaggcagagcctgcagcaatccatgcctccctgtgagccaccatgagaacagaatcactggtctaaaaggaacaaagggatgttcactgtatgcctctgagcagagagcagcagcagcaggtaccagcacggccctgactgaatcagcccagtgtccctgagcagcttagacagcagggctctctgtatcagtctttcttgagcagatgattcccctagttgagtagccagatgaaattcaagcctaaagacaattcattcatttgcatccatgggcacagaaggttgctatatagtatctaccttttgctacttatttaatgataaaatttaatgacagtttgattggttgcttggtttgttatttgaagggtgtgatttttgtttttgtacagttttttttcaagcttcacatttgcgtgtatctaattcagctgatgctcaagtccaaggggtagtctgccttcccaggctgcccccagggtttctgcactggtcccctcttttcccttcagtcttcttcacttccctatgctgctgcttcatgtgctacatctcagacttaaagagtttctctactacagtgaaaacattctctagggtctttcatcaggcctttagttattttagggataaaaactattgataaaaaggacaaggatagaacagagaaaatttaaagtcctgttccgggttttttgttatgttttctttaaaaactcagagactgatgttcaatatcccaaaccagtaaaatggtgaaaatactatgagcttgttttttaaaatatgattttttttggtactttataaagtatctctttatgtgaaagcaattgtcatatcaaaacacagcatacatacgttcaacctaaccaaatatctttacactttttctttcaggagacaagggttctttgggtccctttcaaacggtatcttggtgttattacattatgcctatctattgcccttataatatcacttgggaccaggactgatcgttctgcaaatgcttgttatgccattctcaatctatttttcccgcaccttttcacatgatttgtggttaataggactcaacagactaaaattgcatagtagaaaaaaaatgcaaaaagccagctggtaatgtttattgcaactggggtgctatacaattagtaagatgatgcaatgagaatttctacttttgtatttcctgaccagcctgctcaaagtggcttttatatcaattgaatgattttcctcattttttaatacaggaaaccaattcgtgctcatggaagaaaagttcctttgccagcagccttgaagtgaatcttacaggagcaatgaaagtattgcattcattagcgtctgccccagagaaggttcagagaaaaccttcacttgttttcaaggggatccttgtagatttacgtaattggaatcctgaagaacaggccctactgtctaaaaaatggcttttattcttctaaatacatataaacggatgttttatagatgggaagacatgaccttagaaaggagagagttttcagaggatttgccaggctgtcaggggctctgcctccaggcccagtgtggcagtgtggcctcagggcctccgcctccctgcttgagggctgcatggaggccaactgtcctgggagttgtaaaaatcttttaaggccagaccaatttgagggattttaaaaagtgtctcagtgcctcttatgatttcagaaggttttgctatatgtaatcccaactactgttttcttgagagtagcagaggattagaaaaagtcctccataaattatgtaaccggccttcctgactagcctgactcaagcaatgtaagagataattattctgttttcataatttataagtgtgggggcatgcctcagcataaaaacaacctattagggaaaaatatctaatagattacctttatcgcctgttagggttttatgttgtttttaactcagatgccataagaacaaagatacatgtaatttataatagtaatcattaatacctatattgtgctttaaggtttacaaaataatttttctcatactttatcttagtttagtttcttgacagtccatgaggtaaggtggtagctttatcaccattttacaaagtgggaaacgaaggttcctcttaggaacctagttgtcacctttgtataataaaacttcgaagctcggagctgttaactggtttgctgaaggcttagctgtaagagccagaattcagacccaggtctgagtgacttcaaactgcacagtccttcccattattacccatatgctatcccttatatttttaatttattaggaattcattcatttataaacttggtgattcacctttattagattctggtcgctgaaggctttagtaacttcagagtaaaacttgagagatgagatgtaaaatgcagccattcttgagagttcctttttctgtaacattcatcaacacttcattgagaagtgaaggttcctatggctgtctctaccttcaagaggcttagctttagtcactgagaaagacaaggaaactaatgatagaatatagtagcttcttctggcgttaggtatcacagagtcacagctagttacagctagccctttattattgaaagaagaggagctagcagtcccactatcagaattaagactagagatggtaataggagctagtatcagaaaagcttaaggcaaagcataaagtgtaggctagaatgaagctggagaatggggagggggcttgggtaacatccagaacctggctggggacctggaactacatgagatgtaagaatggagaggttctagcagtcagaggtcaggtacaaatgaacagctgggatctgcgcatggcagacagtgaaaaaacccaggcaagcaaaatggtcagagcagaaaggggcccaaggccacgttcttgagatgtggagggggctgaggaagccacgccaagtaaggacagatgcagctcagcagttcctagcgagccctgacaagccagctcagctgaagcttcgggtgggagccagtcatggcacagtggagtgaaggaagagcagtttcaggcacccaaaacctgacccccacgacctgttttccacctgaagagccacccattccatccaaacccttggcaaaagtctgctaacagagagaaccggccagtatgctggccagtcgcgatcatgcctgtctttaccctctaagctgaagctgctcatcaacggtgagatggcaaaaaggtgggtccagaagaggggaaaagaagggagtctgtgaaaacaaaatgctgaagaatctgcatcaaataaacccttccttccttcctttttccttc

SEQ ID NO: 2602 - DNA, 7872 bp, Homo sapiens
  source 1..7872: mol_type = genomic DNA
aacaactggtgcgcatgcgcactggtgtctcgcggcctggcgcgccccctccgaagcgcatgctcgtgggcacgcacgagcctcaagatccaaggtgcgcgcgtcggcgtccgaggcggttggtgtcggagaatttgttaagcgggactccaggcaattatttccagtcagagaaggaaaccagtgcctggcattctcaccatctttctacctaccatgatcaagtgcttgtcagttgaagtacaagccaaattgcgttctggtttggccataagctccttgggccaatgtgttgaggaacttgccctcaacagtattgatgctgaagcaaaatgtgtggctgtcagggtgaatatggaaaccttccaagttcaagtgatagacaatggatttgggatggggagtgatgatgtagagaaagtgggaaatcgttatttcaccagtaaatgccactcggtacaggacttggagaatccaaggttttatggtttccgaggagaggccttggcaaatattgctgacatggccagtgctgtggaaatttcgtccaagaaaaacaggacaatgaaaacttttgtgaaactgtttcagagtggaaaagccctgaaagcttgtgaagctgatgtgactagagcaagcgctgggactactgtaacagtgtataacctattttaccagcttcctgtaaggaggaaatgcatggaccctagactggagtttgagaaggttaggcagagaatagaagctctctcactcatgcacccttccatttctttctctttgagaaatgatgtttctggttccatggttcttcagctccctaaaaccaaagacgtatgttcccgattttgtcaaatttatggattgggaaagtcccaaaagctaagagaaataagttttaaatataaagagtttgagcttagtggctatatcagctctgaagcacattacaacaagaatatgcagtttttgtttgtgaacaaaagactagttttaaggacaaagctacataaactcattgactttttattaaggaaagaaagtattatatgcaagccaaagaatggtcccaccagtaggcaaatgaattcaagtcttcggcaccggtctaccccagaactctatggcatatatgtaattaatgtgcagtgccaattctgtgagtatgatgtgtgcatggagccagccaaaactctgattgaatttcagaactgggacactctcttgttttgcattcaggaaggagtgaaaatgtttttaaagcaagaaaaattatttgtggaattatcaggtgaggatattaaggaatttagtgaagataatggttttagtttatttgatgctactcttcagaagcgtgtgacttccgatgagaggagcaatttccaggaagcatgtaataatattttagattcctatgagatgtttaatttgcagtcaaaagctgtgaaaagaaaaactactgcagaaaacgtaaacacacagagttctagggattcagaagctaccagaaaaaatacaaatgatgcatttttgtacatttatgaatcaggtggtccaggccatagcaaaatgacagagccatctttacaaaacaaagacagctcttgctcagaatcaaagatgttagaacaagagacaattgtagcatcagaagctggagaaaatgagaaacataaaaaatctttcctggaacatagctctttagaaaatccgtgtggaaccagtttagaaatgtttttaagcccttttcagacaccatgtcactttgaggagagtgggcaggatctagaaatatggaaagaaagtactactgttaatggcatggctgccaacatcttgaaaaataatagaattcagaatcaaccaaagagatttaaagatgctactgaagtgggatgccagcctctgccttttgcaacaacattatggggagtacatagtgctcagacagagaaagagaaaaaaaaagaatctagcaattgtggaagaagaaatgtttttagttatgggcgagttaaattatgttccactggctttataactcatgtagtacaaaatgaaaaaactaaatcaactgaaacagaacattcatttaaaaattatgttagacctggtcccacacgtgcccaagaaacatttggaaatagaacacgtcattcagttgaaactccagacatcaaagatttagccagcactttaagtaaagaatctggtcaattgcccaacaaaaaaaattgcagaacgaatataagttatgggctagagaatgaacctacagcaacttatacaatgttttctgcttttcaggaaggtagcaaaaaatcacaaacagattgcatattatctgatacatccccctctttcccctggtatagacacgtttccaatgatagtaggaaaacagataaattaattggtttctccaaaccaatcgtccgtaagaagctaagcttgagttcacagctaggatctttagagaagtttaagaggcaatatgggaaggttgaaaatcctctggatacagaagtagaggaaagtaatggagtcactaccaatctcagtcttcaagttgaacctgacattctgctgaaggacaagaaccgcttagagaactctgatgtttgtaaaatcactactatggagcatagtgattcagatagtagttgtcaaccagcaagccacatccttaactcagagaagtttccattctccaaggatgaagattgtttagaacaacagatgcctagtttgagagaaagtcctatgaccctgaaggagttatctctctttaatagaaaacctttggaccttgagaagtcatctgaatcactagcctctaaattatccagactgaagggttccgaaagagaaactcaaacaatggggatgatgagtcgttttaatgaacttccaaattcagattccagtaggaaagacagcaagttgtgcagtgtgttaacacaagatttttgtatgttatttaacaacaagcatgaaaaaacagagaatggtgtcatcccaacatcagattctgccacacaggataattcctttaataaaaatagtaaaacacattctaacagcaatacaacagagaactgtgtgatatcagaaactcctttggtattgccctataataattctaaagttaccggtaaagattcagatgttcttatcagagcctcagaacaacagataggaagtcttgactctcccagtggaatgttaatgaatccggtagaagatgccacaggtgaccaaaatggaatttgttttcagagtgaggaatctaaagcaagagcttgttctgaaactgaagagtcaaacacgtgttgttcagattggcagcggcatttcgatgtagccctgggaagaatggtttatgtcaacaaaatgactggactcagcacattcattgccccaactgaggacattcaggctgcttgtactaaagacctgacaactgtggctgtggatgttgtacttgagaatgggtctcagtacaggtgtcaaccttttagaagcgaccttgttcttcctttccttccgagagctcgagcagagaggactgtgatgagacaggataacagagatactgtggatgatactgttagtagcgaatcgcttcagtctttgttctcagaatgggacaatccagtatttgcccgttatccagaggttgctgttgatgtaagcagtggccaggctgagagcttagcagttaaaattcacaacatcttgtatccctatcgtttcaccaaaggaatgattcattcaatgcaggttctccagcaagtagataacaagtttattgcctgtttgatgagcactaagactgaagagaatggcgaggcaggtgggaacctgctcgtgctggtggatcagcacgctgcccatgagcgtatacgtctggagcagcttatcattgattcctacgagaagcaacaggcacaaggctctggtcggaaaaaattactgtcttctactctaattcctccgctagagataacagtgacagaggaacaaaggagactcttatggtgttaccacaaaaatctggaagatctgggccttgaatttgtatttccagacactagtgattctctggtccttgtgggaaaagtaccactatgttttgtggaaagagaagccaatgaacttcggagaggaagatctactgtgaccaagagtattgtggagctactccagaccaccggaggcatccaagggacattgccactgactgtccagaaggtgttggcatcccaagcctgccatggggccattaagtttaatgatggcctgagcttacaggaaagttgccgccttattgaagctctgtcctcatgccagctgccattccagtgtgctcacgggagaccttctatgctgccgttagctgacatagaccacttggaacaggaaaaacagattaaacccaacctcactaaacttcgcaaaatggcccaggcctggcgtctctttggaaaagcagagtgtgatacaaggcagagcctgcagcaatccatgcctccctgtgagccaccatgagaacagaatcactggtctaaaaggaacaaagggatgttcactgtatgcctctgagcagagagcagcagcagcaggtaccagcacggccctgactgaatcagcccagtgtccctgagcagcttagacagcagggctctctgtatcagtctttcttgagcagatgattcccctagttgagtagccagatgaaattcaagcctaaagacaattcattcatttgcatccatgggcacagaaggttgctatatagtatctaccttttgctacttatttaatgataaaatttaatgacagtttgattggttgcttggtttgttatttgaagggtgtgatttttgtttttgtacagttttttttcaagcttcacatttgcgtgtatctaattcagctgatgctcaagtccaaggggtagtctgccttcccaggctgcccccagggtttctgcactggtcccctcttttcccttcagtcttcttcacttccctatgctgctgcttcatgtgctacatctcagacttaaagagtttctctactacagtgaaaacattctctagggtctttcatcaggcctttagttattttagggataaaaactattgataaaaaggacaaggatagaacagagaaaatttaaagtcctgttccgggttttttgttatgttttctttaaaaactcagagactgatgttcaatatcccaaaccagtaaaatggtgaaaatactatgagcttgttttttaaaatatgattttttttggtactttataaagtatctctttatgtgaaagcaattgtcatatcaaaacacagcatacatacgttcaacctaaccaaatatctttacactttttctttcaggagacaagggttctttgggtccctttcaaacggtatcttggtgttattacattatgcctatctattgcccttataatatcacttgggaccaggactgatcgttctgcaaatgcttgttatgccattctcaatctatttttcccgcaccttttcacatgatttgtggttaataggactcaacagactaaaattgcatagtagaaaaaaaatgcaaaaagccagctggtaatgtttattgcaactggggtgctatacaattagtaagatgatgcaatgagaatttctacttttgtatttcctgaccagcctgctcaaagtggcttttatatcaattgaatgattttcctcattttttaatacaggaaaccaattcgtgctcatggaagaaaagttcctttgccagcagccttgaagtgaatcttacaggagcaatgaaagtattgcattcattagcgtctgccccagagaaggttcagagaaaaccttcacttgttttcaaggggatccttgtagatttacgtaattggaatcctgaagaacaggccctactgtctaaaaaatggcttttattcttctaaatacatataaacggatgttttatagatgggaagacatgaccttagaaaggagagagttttcagaggatttgccaggctgtcaggggctctgcctccaggcccagtgtggcagtgtggcctcagggcctccgcctccctgcttgagggctgcatggaggccaactgtcctgggagttgtaaaaatcttttaaggccagaccaatttgagggattttaaaaagtgtctcagtgcctcttatgatttcagaaggttttgctatatgtaatcccaactactgttttcttgagagtagcagaggattagaaaaagtcctccataaattatgtaaccggccttcctgactagcctgactcaagcaatgtaagagataattattctgttttcataatttataagtgtgggggcatgcctcagcataaaaacaacctattagggaaaaatatctaatagattacctttatcgcctgttagggttttatgttgtttttaactcagatgccataagaacaaagatacatgtaatttataatagtaatcattaatacctatattgtgctttaaggtttacaaaataatttttctcatactttatcttagtttagtttcttgacagtccatgaggtaaggtggtagctttatcaccattttacaaagtgggaaacgaaggttcctcttaggaacctagttgtcacctttgtataataaaacttcgaagctcggagctgttaactggtttgctgaaggcttagctgtaagagccagaattcagacccaggtctgagtgacttcaaactgcacagtccttcccattattacccatatgctatcccttatatttttaatttattaggaattcattcatttataaacttggtgattcacctttattagattctggtcgctgaaggctttagtaacttcagagtaaaacttgagagatgagatgtaaaatgcagccattcttgagagttcctttttctgtaacattcatcaacacttcattgagaagtgaaggttcctatggctgtctctaccttcaagaggcttagctttagtcactgagaaagacaaggaaactaatgatagaatatagtagcttcttctggcgttaggtatcacagagtcacagctagttacagctagccctttattattgaaagaagaggagctagcagtcccactatcagaattaagactagagatggtaataggagctagtatcagaaaagcttaaggcaaagcataaagtgtaggctagaatgaagctggagaatggggagggggcttgggtaacatccagaacctggctggggacctggaactacatgagatgtaagaatggagaggttctagcagtcagaggtcaggtacaaatgaacagctgggatctgcgcatggcagacagtgaaaaaacccaggcaagcaaaatggtcagagcagaaaggggcccaaggccacgttcttgagatgtggagggggctgaggaagccacgccaagtaaggacagatgcagctcagcagttcctagcgagccctgacaagccagctcagctgaagcttcgggtgggagccagtcatggcacagtggagtgaaggaagagcagtttcaggcacccaaaacctgacccccacgacctgttttccacctgaagagccacccattccatccaaacccttggcaaaagtctgctaacagagagaaccggccagtatgctggccagtcgcgatcatgcctgtctttaccctctaagctgaagctgctcatcaacggtgagatggcaaaaaggtgggtccagaagaggggaaaagaagggagtctgtgaaaacaaaatgctgaagaatctgcatcaaataaacccttccttccttcctttttccttc

SEQ ID NO: 2603 - DNA, 1119 bp, Homo sapiens
  source 1..1119: mol_type = genomic DNA
atgaatccggtagaagatgccacaggtgaccaaaatggaatttgttttcagagtgaggaatctaaagcaagagcttgttctgaaactgaagagtcaaacacgtgttgttcagattggcagcggcatttcgatgtagccctgggaagaatggtttatgtcaacaaaatgactggactcagcacattcattgccccaactgaggacattcaggctgcttgtactaaagacctgacaactgtggctgtggatgttgtacttgagaatgggtctcagtacaggtgtcaaccttttagaagcgaccttgttcttcctttccttccgagagctcgagcagagaggactgtgatgagacaggataacagagatactgtggatgatactgttagtagcgaatcgcttcagtctttgttctcagaatgggacaatccagtatttgcccgttatccagaggttctccagcaagtagataacaagtttattgcctgtttgatgagcactaagactgaagagaatggcgaggcagctgagttgatgatgttgcaggacccgtgttgcaggcagagcagagaggatgaaaatcatgagttcagtctttgaaatgctccagaagagatgtcaaggtggccaggcacggtggctcacgcctgtaatcccagcactttgggaggccgaggtgggaacctgctcgtgctggtggatcagcacgctgcccatgagcgtatacgtctggagcagcttatcattgattcctacgagaagcaacaggcacaaggctctggtcggaaaaaattactgtcttctactctaattcctccgctagagataacagtgacagaggaacaaaggagactcttatggtgttaccacaaaaatctggaagatctgggccttgaatttgtatttccagacactagtgattctctggtccttgtgggaaaagtaccactatgttttgtggaaagagaagccaatgaacttcggagaggaagatctactgtgaccaagagtattgtggaggaatttatccgagaacaactggagctactccagaccaccggaggcatccaagggacattgccactgactgtccagaaggtgttggcatcccaagcctgccat

SEQ ID NO: 2604 - DNA, 616 bp, Homo sapiens
  source 1..616: mol_type = genomic DNA
ctcgcggcctggcgcgccccctccgaagcgcatgctcgtgggcacgcacgagcctcaagatccaaggcaattatttccagtcagagaaggaaaccagtgcctggcattctcaccatctttctacctaccatgatcaagtgcttgtcagttgaagtacaagccaaattgcgttctggtttggccataagctccttgggccaatgtgttgaggaacttgccctcaacagtattgatgctgaagcaaaatgtgtggctgtcagggtgaatatggaaaccttccaagttcaagtgatagacaatggatttgggatggggagtgatgatgtagagaaagtgggaaatcgttatttcaccagtaaatgccactcggtacaggacttggagaatccaaggttttatggtttccgaggagaggccttggcaaatattgctgacatggccagtgctgtggaaatttcgtccaagaaaaacaggacaatgaaaacttttgtgaaactgtttcagagtggaaaagccctgaaagcttgtgaagctgatgtgactagagcaagcgctgggactactgtaacagtgtataacctattttaccagcttcctgtaaggaggaaatgcatgg

SEQ ID NO: 2605 - DNA, 4491 bp, Homo sapiens
  source 1..4491: mol_type = genomic DNA
ccagtgcctggcattctcaccatctttctacctaccatgatcaagtgcttgtcagttgaagtacaagccaaattgcgttctggtttggccataagctccttgggccaatgtgttgaggaacttgccctcaacagtattgatgctgaagcaaaatgtgtggctgtcagggtgaatatggaaaccttccaagttcaagtgatagacaatggatttgggatggggagtgatgatgtagagaaagtgggaaatcgttatttcaccagtaaatgccactcggtacaggacttggagaatccaaggttttatggtttccgaggagaggccttggcaaatattgctgacatggccagtgctgtggaaatttcgtccaagaaaaacaggacaatgaaaacttttgtgaaactgtttcagagtggaaaagccctgaaagcttgtgaagctgatgtgactagagcaagcgctgggactactgtaacagtgtataacctattttaccagcttcctgtaaggaggaaatgcatggaccctagactggagtttgagaaggttaggcagagaatagaagctctctcactcatgcacccttccatttctttctctttgagaaatgatgtttctggttccatggttcttcagctccctaaaaccaaagacgtatgttcccgattttgtcaaatttatggattgggaaagtcccaaaagctaagagaaataagttttaaatataaagagtttgagcttagtggctatatcagctctgaagcacattacaacaagaatatgcagtttttgtttgtgaacaaaagactagttttaaggacaaagctacataaactcattgactttttattaaggaaagaaagtattatatgcaagccaaagaatggtcccaccagtaggcaaatgaattcaagtcttcggcaccggtctaccccagaactctatggcatatatgtaattaatgtgcagtgccaattctgtgagtatgatgtgtgcatggagccagccaaaactctgattgaatttcagaactgggacactctcttgttttgcattcaggaaggagtgaaaatgtttttaaagcaagaaaaattatttgtggaattatcaggtgaggatattaaggaatttagtgaagataatggttttagtttatttgatgctactcttcagaagcgtgtgacttccgatgagaggagcaatttccaggaagcatgtaataatattttagattcctatgagatgtttaatttgcagtcaaaagctgtgaaaagaaaaactactgcagaaaacgtaaacacacagagttctagggattcagaagctaccagaaaaaatacaaatgatgcatttttgtacatttatgaatcaggtggtccaggccatagcaaaatgacagagccatctttacaaaacaaagacagctcttgctcagaatcaaagatgttagaacaagagacaattgtagcatcagaagctggagaaaatgagaaacataaaaaatctttcctggaacatagctctttagaaaatccgtgtggaaccagtttagaaatgtttttaagcccttttcagacaccatgtcactttgaggagagtgggcaggatctagaaatatggaaagaaagtactactgttaatggcatggctgccaacatcttgaaaaataatagaattcagaatcaaccaaagagatttaaagatgctactgaagtgggatgccagcctctgccttttgcaacaacattatggggagtacatagtgctcagacagagaaagagaaaaaaaaagaatctagcaattgtggaagaagaaatgtttttagttatgggcgagttaaattatgttccactggctttataactcatgtagtacaaaatgaaaaaactaaatcaactgaaacagaacattcatttaaaaattatgttagacctggtcccacacgtgcccaagaaacatttggaaatagaacacgtcattcagttgaaactccagacatcaaagatttagccagcactttaagtaaagaatctggtcaattgcccaacaaaaaaaattgcagaacgaatataagttatgggctagagaatgaacctacagcaacttatacaatgttttctgcttttcaggaaggtagcaaaaaatcacaaacagattgcatattatctgatacatccccctctttcccctggtatagacacgtttccaatgatagtaggaaaacagataaattaattggtttctccaaaccaatcgtccgtaagaagctaagcttgagttcacagctaggatctttagagaagtttaagaggcaatatgggaaggttgaaaatcctctggatacagaagtagaggaaagtaatggagtcactaccaatctcagtcttcaagttgaacctgacattctgctgaaggacaagaaccgcttagagaactctgatgtttgtaaaatcactactatggagcatagtgattcagatagtagttgtcaaccagcaagccacatccttaactcagagaagtttccattctccaaggatgaagattgtttagaacaacagatgcctagtttgagagaaagtcctatgaccctgaaggagttatctctctttaatagaaaacctttggaccttgagaagtcatctgaatcactagcctctaaattatccagactgaagggttccgaaagagaaactcaaacaatggggatgatgagtcgttttaatgaacttccaaattcagattccagtaggaaagacagcaagttgtgcagtgtgttaacacaagatttttgtatgttatttaacaacaagcatgaaaaaacagagaatggtgtcatcccaacatcagattctgccacacaggataattcctttaataaaaatagtaaaacacattctaacagcaatacaacagagaactgtgtgatatcagaaactcctttggtattgccctataataattctaaagttaccggtaaagattcagatgttcttatcagagcctcagaacaacagataggaagtcttgactctcccagtggaatgttaatgaatccggtagaagatgccacaggtgaccaaaatggaatttgttttcagagtgaggaatctaaagcaagagcttgttctgaaactgaagagtcaaacacgtgttgttcagattggcagcggcatttcgatgtagccctgggaagaatggtttatgtcaacaaaatgactggactcagcacattcattgccccaactgaggacattcaggctgcttgtactaaagacctgacaactgtggctgtggatgttgtacttgagaatgggtctcagtacaggtgtcaaccttttagaagcgaccttgttcttcctttccttccgagagctcgagcagagaggactgtgatgagacaggataacagagatactgtggatgatactgttagtagcgaatcgcttcagtctttgttctcagaatgggacaatccagtatttgcccgttatccagaggttgctgttgatgtaagcagtggccaggctgagagcttagcagttaaaattcacaacatcttgtatccctatcgtttcaccaaaggaatgattcattcaatgcaggttctccagcaagtagataacaagtttattgcctgtttgatgagcactaagactgaagagaatggcgaggcaggtgggaacctgctcgtgctggtggatcagcacgctgcccatgagcgtatacgtctggagcagcttatcattgattcctacgagaagcaacaggcacaaggctctggtcggaaaaaattactgtcttctactctaattcctccgctagagataacagtgacagaggaacaaaggagactcttatggtgttaccacaaaaatctggaagatctgggccttgaatttgtatttccagacactagtgattctctggtccttgtgggaaaagtaccactatgttttgtggaaagagaagccaatgaacttcggagaggaagatctactgtgaccaagagtattgtggaggaatttatccgagaacaactggagctactccagaccaccggaggcatccaagggacattgccactgactgtccagaaggtgttggcatcccaagcctgccatggggccattaagtttaatgatggcctgagcttacaggaaagttgccgccttattgaagctctgtcctcatgccagctgccattccagtgtgctcacgggagaccttctatgctgccgttagctgacatagaccacttggaacaggaaaaacagattaaacccaacctcactaaacttcgcaaaatggcccaggcctggcgtctctttggaaaagcagagtgtgatacaaggcagagcctgcagcaatccatgcctccctgtgagccaccatgagaacagaatcactggtctaaaaggaacaaagggatgttcactgtatgcctctgagcagagagcagcagcagcaggtaccagcacggccctgac

SEQ ID NO: 2606 - DNA, 583 bp, Homo sapiens
  source 1..583: mol_type = genomic DNA
gtgggcacgcacgagcctcaagatccaagttgctgccggctgcttagtgcattagcttagaaagcagcagaaattctgcagttaagagccctgatttgtcccgagtttggaaaaccggccccaccgcctgcaggggcccacccacgtggctctcactgatggagaagaaggggagacctttaatggcactggaatcttagggcaattatttccagtcagagaaggaaaccagtgcctggcattctcaccatctttctacctaccatgatcaagtgcttgtcagttgaagtacaagccaaattgcgttctggtttggccataagctccttgggccaatgtgttgaggaacttgccctcaacagtattgatgctgaagcaaaatgtgtggctgtcagggtgaatatggaaaccttccaagttcaagtgatagacaatggatttgggatggggagtgatgatgtagagaaagtgggaaatcgttatttcaccagtaaatgccactcggtacaggacttggagaatccaaggttttatggtttccgaggagaggccttggcaaatattgctgacatggccagtgctg

SEQ ID NO: 2607 - DNA, 3307 bp, Homo sapiens
  source 1..3307: mol_type = genomic DNA
gcagtagctaaagtcaccagcgtgcgcgggaagctgggccgcgtctgcttatgattggttgccgcggcagactcccacccaccgaaacgcagccctggaagctgattgggtgtggtcgccgtggccggacgccgctcgggggacgtgggaggggaggcgggaaacagcttagtgggtgtggggtcgcgcattttcttcaaccaggaggtgaggaggtttcgacatggcggtgcagccgaaggagacgctgcagttggagagcgcggccgaggtcggcttcgtgcgcttctttcagggcatgccggagaagccgaccaccacagtgcgccttttcgaccggggcgacttctatacggcgcacggcgaggacgcgctgctggccgcccgggaggtgttcaagacccagggggtgatcaagtacatggggccggcaggagcaaagaatctgcagagtgttgtgcttagtaaaatgaattttgaatcttttgtaaaagatcttcttctggttcgtcagtatagagttgaagtttataagaatagagctggaaataaggcatccaaggagaatgattggtatttggcatataaggcttctcctggcaatctctctcagtttgaagacattctctttggtaacaatgatatgtcagcttccattggtgttgtgggtgttaaaatgtccgcagttgatggccagagacaggttggagttgggtatgtggattccatacagaggaaactaggactgtgtgaattccctgataatgatcagttctccaatcttgaggctctcctcatccagattggaccaaaggaatgtgttttacccggaggagagactgctggagacatggggaaactgagacagataattcaaagaggaggaattctgatcacagaaagaaaaaaagctgacttttccacaaaagacatttatcaggacctcaaccggttgttgaaaggcaaaaagggagagcagatgaatagtgctgtattgccagaaatggagaatcaggttgcagtttcatcactgtctgcggtaatcaagtttttagaactcttatcagatgattccaactttggacagtttgaactgactacttttgacttcagccagtatatgaaattggatattgcagcagtcagagcccttaacctttttcagggttctgttgaagataccactggctctcagtctctggctgccttgctgaataagtgtaaaacccctcaaggacaaagacttgttaaccagtggattaagcagcctctcatggataagaacagaatagaggagagattgaatttagtggaagcttttgtagaagatgcagaattgaggcagactttacaagaagatttacttcgtcgattcccagatcttaaccgacttgccaagaagtttcaaagacaagcagcaaacttacaagattgttaccgactctatcagggtataaatcaactacctaatgttatacaggctctggaaaaacatgaaggaaaacaccagaaattattgttggcagtttttgtgactcctcttactgatcttcgttctgacttctccaagtttcaggaaatgatagaaacaactttagatatggatcaggtggaaaaccatgaattccttgtaaaaccttcatttgatcctaatctcagtgaattaagagaaataatgaatgacttggaaaagaagatgcagtcaacattaataagtgcagccagagatcttggcttggaccctggcaaacagattaaactggattccagtgcacagtttggatattactttcgtgtaacctgtaaggaagaaaaagtccttcgtaacaataaaaactttagtactgtagatatccagaagaatggtgttaaatttaccaacagcaaattgacttctttaaatgaagagtataccaaaaataaaacagaatatgaagaagcccaggatgccattgttaaagaaattgtcaatatttcttcaggctatgtagaaccaatgcagacactcaatgatgtgttagctcagctagatgctgttgtcagctttgctcacgtgtcaaatggagcacctgttccatatgtacgaccagccattttggagaaaggacaaggaagaattatattaaaagcatccaggcatgcttgtgttgaagttcaagatgaaattgcatttattcctaatgacgtatactttgaaaaagataaacagatgttccacatcattactggccccaatatgggaggtaaatcaacatatattcgacaaactggggtgatagtactcatggcccaaattgggtgttttgtgccatgtgagtcagcagaagtgtccattgtggactgcatcttagcccgagtaggggctggtgacagtcaattgaaaggagtctccacgttcatggctgaaatgttggaaactgcttctatcctcaggtctgcaaccaaagattcattaataatcatagatgaattgggaagaggaacttctacctacgatggatttgggttagcatgggctatatcagaatacattgcaacaaagattggtgctttttgcatgtttgcaacccattttcatgaacttactgccttggccaatcagataccaactgttaataatctacatgtcacagcactcaccactgaagagaccttaactatgctttatcaggtgaagaaaggtgtctgtgatcaaagttttgggattcatgttgcagagcttgctaatttccctaagcatgtaatagagtgtgctaaacagaaagccctggaacttgaggagtttcagtatattggagaatcgcaaggatatgatatcatggaaccagcagcaaagaagtgctatctggaaagagagcaaggtgaaaaaattattcaggagttcctgtccaaggtgaaacaaatgccctttactgaaatgtcagaagaaaacatcacaataaagttaaaacagctaaaagctgaagtaatagcaaagaataatagctttgtaaatgaaatcatttcacgaataaaagttactacgtgaaaaatcccagtaatggaatgaaggtaatattgataagctattgtctgtaatagttttatattgttttatattaaccctttttccatagtgttaactgtcagtgcccatgggctatcaacttaataagatatttagtaatattttactttgaggacattttcaaagatttttattttgaaaaatgagagctgtaactgaggactgtttgcaattgacataggcaataataagtgatgtgctgaattttataaataaaatcatgtagtttgtggaatttga

SEQ ID NO: 2608 - DNA, 2917 bp, Homo sapiens
  source 1..2917: mol_type = genomic DNA
tcgcgcattttcttcaaccaggaggtgaggaggtttcgacatggcggtgcagccgaaggagacgctgcagttggagagcgcggccgaggtcggcttcgtgcgcttctttcagggcatgccggagaagccgaccaccacagtgcgccttttcgaccggggcgacttctatacggcgcacggcgaggacgcgctgctggccgcccgggaggtgttcaagacccagggggtgatcaagtacatggggccggcaggagcaaagaatctgcagagtgttgtgcttagtaaaatgaattttgaatcttttgtaaaagatcttcttctggttcgtcagtatagagttgaagtttataagaatagagctggaaataaggcatccaaggagaatgattggtatttggcatataaggcttctcctggcaatctctctcagtttgaagacattctctttggtaacaatgatatgtcagcttccattggtgttgtgggtgttaaaatgtccgcagttgatggccagagacaggttggagttgggtatgtggattccatacagaggaaactaggactgtgtgaattccctgataatgatcagttctccaatcttgaggctctcctcatccagattggaccaaaggaatgtgttttacccggaggagagactgctggagacatggggaaactgagacagataattcaaagaggaggaattctgatcacagaaagaaaaaaagctgacttttccacaaaagacatttatcaggacctcaaccggttgttgaaaggcaaaaagggagagcagatgaatagtgctgtattgccagaaatggagaatcaggttgcagtttcatcactgtctgcggtaatcaagtttttagaactcttatcagatgattccaactttggacagtttgaactgactacttttgacttcagccagtatatgaaattggatattgcagcagtcagagcccttaacctttttcagggttctgttgaagataccactggctctcagtctctggctgccttgctgaataagtgtaaaacccctcaaggacaaacttgttaaccagtggattaagcagcctctcatggataagaacagaatagaggagagattgaatttagtggaagcttttgtagaagatgcagaattgaggcagactttacaagaagatttacttcgtcgattcccagatcttaaccgacttgccaagaagtttcaaagacaagcagcaaacttacaagattgttaccgactctatcagggtataaatcaactacctaatgttatacaggctctggaaaaacatgaaggaaaacaccagaaattattgttggcagtttttgtgactcctcttactgatcttcgttctgacttctccaagtttcaggaaatgatagaaacaactttagatatggatcaggtggaaaaccatgaattccttgtaaaaccttcatttgatcctaatctcagtgaattaagagaaataatgaatgacttggaaaagaagatgcagtcaacattaataagtgcagccagagatcttggcttggaccctggcaaacagattaaactggattccagtgcacagtttggatattactttcgtgtaacctgtaaggaagaaaaagtccttcgtaacaataaaaactttagtactgtagatatccagaagaatggtgttaaatttaccaacagcaaattgacttctttaaatgaagagtataccaaaaataaaacagaatatgaagaagcccaggatgccattgttaaagaaattgtcaatatttcttcaggctatgtagaaccaatgcagacactcaatgatgtgttagctcagctagatgctgttgtcagctttgctcacgtgtcaaatggagcacctgttccatatgtacgaccagccattttggagaaaggacaaggaagaattatattaaaagcatccaggcatgcttgtgttgaagttcaagatgaaattgcatttattcctaatgacgtatactttgaaaaagataaacagatgttccacatcattactggccccaatatgggaggtaaatcaacatatattcgacaaactggggtgatagtactcatggcccaaattgggtgttttgtgccatgtgagtcagcagaagtgtccattgtggactgcatcttagcccgagtaggggctggtgacagtcaattgaaaggagtctccacgttcatggctgaaatgttggaaactgcttctatcctcaggtctgcaaccaaagattcattaataatcatagatgaattgggaagaggaacttctacctacgatggatttgggttagcatgggctatatcagaatacattgcaacaaagattggtgctttttgcatgtttgcaacccattttcatgaacttactgccttggccaatcagataccaactgttaataatctacatgtcacagcactcaccactgaagagaccttaactatgctttatcaggtgaagaaaggtgtctgtgatcaaagttttgggattcatgttgcagagcttgctaatttccctaagcatgtaatagagtgtgctaaacagaaagccctggaacttgaggagtttcagtatattggagaatcgcaaggatatgatatcatggaaccagcagcaaagaagtgctatctggaaagagagcaaggtgaaaaaattattcaggagttcctgtccaaggtgaaacaaatgccctttactgaaatgtcagaagaaaacatcacaataaagttaaaacagctaaaagctgaagtaatagcaaagaataatagctttgtaaatgaaatcatttcacgaataaaagttactacgtgaaaaatcccagtaatggaatgaaggtaatattgataagctattgtctgtaatagttttatattgttttatattaa

SEQ ID NO: 2609 - DNA, 3628 bp, Homo sapiens
  source 1..3628: mol_type = genomic DNA
aaacagcttagtgggtgtggggtcgcgcattttcttcaaccaggaggtgaggaggtttcgacatggcggtgcagccgaaggagacgctgcagttggagagcgcggccgaggtcggcttcgtgcgcttctttcagggcatgccggagaagccgaccaccacagtgcgccttttcgaccggggcgacttctatacggcgcacggcgaggacgcgctgctggccgcccgggaggtgttcaagacccagggggtgatcaagtacatggggccggcaggagcaaagaatctgcagagtgttgtgcttagtaaaatgaattttgaatcttttgtaaaagatcttcttctggttcgtcagtatagagttgaagtttataagaatagagctggaaataaggcatccaaggagaatgattggtatttggcatataaggcttctcctggcaatctctctcagtttgaagacattctctttggtaacaatgatatgtcagcttccattggtgttgtgggtgttaaaatgtccgcagttgatggccagagacaggttggagttgggtatgtggattccatacagaggaaactaggactgtgtgaattccctgataatgatcagttctccaatcttgaggctctcctcatccagattggaccaaaggaatgtgttttacccggaggagagactgctggagacatggggaaactgagacagataattcaaagaggaggaattctgatcacagaaagaaaaaaagctgacttttccacaaaagacatttatcaggacctcaaccggttgttgaaaggcaaaaagggagagcagatgaatagtgctgtattgccagaaatggagaatcaggttgcagtttcatcactgtctgcggtaatcaagtttttagaactcttatcagatgattccaactttggacagtttgaactgactacttttgacttcagccagtatatgaaattggatattgcagcagtcagagcccttaacctttttcagggttctgttgaagataccactggctctcagtctctggctgccttgctgaataagtgtaaaacccctcaaggacaaagacttgttaaccagtggattaagcagcctctcatggataagaacagaatagaggagagattgaatttagtggaagcttttgtagaagatgcagaattgaggcagactttacaagaagatttacttcgtcgattcccagatcttaaccgacttgccaagaagtttcaaagacaagcagcaaacttacaagattgttaccgactctatcagggtataaatcaactacctaatgttatacaggctctggaaaaacatgaaggaaaacaccagaaattattgttggcagtttttgtgactcctcttactgatcttcgttctgacttctccaagtttcaggaaatgatagaaacaactttagatatggatcaggtggaaaaccatgaattccttgtaaaaccttcatttgatcctaatctcagtgaattaagagaaataatgaatgacttggaaaagaagatgcagtcaacattaataagtgcagccagagatcttggcttggaccctggcaaacagattaaactggattccagtgcacagtttggatattactttcgtgtaacctgtaaggaagaaaaagtccttcgtaacaataaaaactttagtactgtagatatccagaagaatggtgttaaatttaccaacagcaaattgacttctttaaatgaagagtataccaaaaataaaacagaatatgaagaagcccaggatgccattgttaaagaaattgtcaatatttcttcaggctatgtagaaccaatgcagacactcaatgatgtgttagctcagctagatgctgttgtcagctttgctcacgtgtcaaatggagcacctgttccatatgtacgaccagccattttggagaaaggacaaggaagaattatattaaaagcatccaggcatgcttgtgttgaagttcaagatgaaattgcatttattcctaatgacgtatactttgaaaaagataaacagatgttccacatcattactggccccaatatgggaggtaaatcaacatatattcgacaaactggggtgatagtactcatggcccaaattgggtgttttgtgccatgtgagtcagcagaagtgtccattgtggactgcatcttagcccgagtaggggctggtgacagtcaattgaaaggagtctccacgttcatggctgaaatgttggaaactgcttctatcctcaggtctgcaaccaaagattcattaataatcatagatgaattgggaagaggaacttctacctacgatggatttgggttagcatgggctatatcagaatacattgcaacaaagattggtgctttttgcatgtttgcaacccattttcatgaacttactgccttggccaatcagataccaactgttaataatctacatgtcacagcactcaccactgaagagaccttaactatgctttatcaggtgaagaaaggtgtctgtgatcaaagttttgggattcatgttgcagagcttgctaatttccctaagcatgtaatagagtgtgctaaacagaaagccctggaacttgaggagtttcagtatattggagaatcgcaaggatatgatatcatggaaccagcagcaaagaagtgctatctggaaagagagaacctcagagtgacagagccaaaagaccagtgcctcattttgctgacatggaaaaggaaacttcgtgggggaaagagatctgcttgcagtcggccagagagacagaaccagggcagtggtgagctctcatgacctggtgtctgttgccttctggttaagtttttcatttgtaattctacaaacatcccttctgtaaacatttccctcaaaatggagcaggaagctctcaaaaatggaccagaaaggggtcaggaatataactttctctgcccagattccaggacttacagtgagaaagcgccttctgggaacttcacaatggctaaagtgtgctaatgggatgatgtgcccttgtacacccactgcctctgaactctgctctgcattgctgagcaaactacatttcccagaactccttgttggattccttccaaacaggtttaccactgggagagcctgttggttggggagggcaggaagagggaggaaagaggaagggactcacttcctgtttccagctgaagtctaaatcaatccactatcaacaggtagctatcatactaccctcattgtcacccctcagaggtcccactgcagctgcataatgtcccctcagtggcctgaacatgagatgaacaacactcttcttgggagtaccagccttgcttggttcatggccacttttcctgattatcttgcagctatattaggtcatgtgacaaagttctggccagtggcaagggaacacaagtgataggtacagatagaagtgtctgatactacatagattatgcttgcactcactcttaagagagagacatgaacttttaccaacggaagccagtattattttgaacctctgttagagtggcttgaatctgtatcctaacttgtatccctaatgtgtgacccatgaaaattagccaggcagc

SEQ ID NO: 2610 - DNA, 2537 bp, Homo sapiens
  source 1..2537: mol_type = genomic DNA
gtaaaatgaattttgaatcttttgtaaaagatcttcttctggttcgtcagtatagagttgaagtttataagaatagagctggaaataaggcatccaaggagaatgattggtatttggcatataaggcttctcctggcaatctctctcagtttgaagacattctctttggtaacaatgatatgtcagcttccattggtgttgtgggtgttaaaatgtccgcagttgatggccagagacatggggaaactgagacagataattcaaagaggaggaattctgatcacagaaagaaaaaaagctgacttttccacaaaagacatttatcaggacctcaaccggttgttgaaaggcaaaaagggagagcagatgaatagtgctgtattgccagaaatggagaatcagggttctgttgaagataccactggctctcagtctctggctgccttgctgaataagtgtaaaacccctcaaggacaaagacttgttaaccagtggattaagcagcctctcatggataagaacagaatagaggagagattgaatttagtggaagcttttgtagaagatgcagaattgaggcagactttacaagaagatttacttcgtcgattcccagatcttaaccgacttgccaagaagtttcaaagacaagcagcaaacttacaagattgttaccgactctatcagggtataaatcaactacctaatgttatacaggctctggaaaaacatgaaggaaaacaccagaaattattgttggcagtttttgtgactcctcttactgatcttcgttctgacttctccaagtttcaggaaatgatagaaacaactttagatatggatcaggtggaaaaccatgaattccttgtaaaaccttcatttgatcctaatctcagtgaattaagagaaataatgaatgacttggaaaagaagatgcagtcaacattaataagtgcagccagagatcttggcttggaccctggcaaacagattaaactggattccagtgcacagtttggatattactttcgtgtaacctgtaaggaagaaaaagtccttcgtaacaataaaaactttagtactgtagatatccagaagaatggtgttaaatttaccaacagcaaattgacttctttaaatgaagagtataccaaaaataaaacagaatatgaagaagcccaggatgccattgttaaagaaattgtcaatatttcttcaggctatgtagaaccaatgcagacactcaatgatgtgttagctcagctagatgctgttgtcagctttgctcacgtgtcaaatggagcacctgttccatatgtacgaccagccattttggagaaaggacaaggaagaattatattaaaagcatccaggcatgcttgtgttgaagttcaagatgaaattgcatttattcctaatgacgtatactttgaaaaagataaacagatgttccacatcattactggccccaatatgggaggtaaatcaacatatattcgacaaactggggtgatagtactcatggcccaaattgggtgttttgtgccatgtgagtcagcagaagtgtccattgtggactgcatcttagcccgagtaggggctggtgacagtcaattgaaaggagtctccacgttcatggctgaaatgttggaaactgcttctatcctcaggtctgcaaccaaagattcattaataatcatagatgaattgggaagaggaacttctacctacgatggatttgggttagcatgggctatatcagaatacattgcaacaaagattggtgctttttgcatgtttgcaacccattttcatgaacttactgccttggccaatcagataccaactgttaataatctacatgtcacagcactcaccactgaagagaccttaactatgctttatcaggtgaagaaaggtgtctgtgatcaaagttttgggattcatgttgcagagcttgctaatttccctaagcatgtaatagagtgtgctaaacagaaagccctggaacttgaggagtttcagtatattggagaatcgcaaggatatgatatcatggaaccagcagcaaagaagtgctatctggaaagagagcaaggtgaaaaaattattcaggagttcctgtccaaggtgaaacaaatgccctttactgaaatgtcagaagaaaacatcacaataaagttaaaacagctaaaagctgaagtaatagcaaagaataatagctttgtaaatgaaatcatttcacgaataaaagttactacgtgaaaaatcccagtaatggaatgaaggtaatattgataagctattgtctgtaatagttttatattgttttatattaaccctttttccatagtgttaactgtcagtgcccatgggctatcaacttaataagatatttagtaatattttactttgaggacattttcaaagatttttattttgaaaaatgagagctgtaactgaggactgtttgcaattgacataggcaataataagtgatgtgctgaattttataaataaaatcatgtagtttgtgg

SEQ ID NO: 2611 - DNA, 2918 bp, Homo sapiens
  source 1..2918: mol_type = genomic DNA
tcgcgcattttcttcaaccaggaggtgaggaggtttcgacatggcggtgcagccgaaggagacgctgcagttggagagcgcggccgaggtcggcttcgtgcgcttctttcagggcatgccggagaagccgaccaccacagtgcgccttttcgaccggggcgacttctatacggcgcacggcgaggacgcgctgctggccgcccgggaggtgttcaagacccagggggtgatcaagtacatggggccggcaggagcaaagaatctgcagagtgttgtgcttagtaaaatgaattttgaatcttttgtaaaagatcttcttctggttcgtcagtatagagttgaagtttataagaatagagctggaaataaggcatccaaggagaatgattggtatttggcatataaggcttctcctggcaatctctctcagtttgaagacattctctttggtaacaatgatatgtcagcttccattggtgttgtgggtgttaaaatgtccgcagttgatggccagagacaggttggagttgggtatgtggattccatacagaggaaactaggactgtgtgaattccctgataatgatcagttctccaatcttgaggctctcctcatccagattggaccaaaggaatgtgttttacccggaggagagactgctggagacatggggaaactgagacagataattcaaagaggaggaattctgatcacagaaagaaaaaaagctgacttttccacaaaagacatttatcaggacctcaaccggttgttgaaaggcaaaaagggagagcagatgaatagtgctgtattgccagaaatggagaatcaggttgcagtttcatcactgtctgcggtaatcaagtttttagaactcttatcagatgattccaactttggacagtttgaactgactacttttgacttcagccagtatatgaaattggatattgcagcagtcagagcccttaacctttttcagggttctgttgaagataccactggctctcagtctctggctgccttgctgaataagtgtaaaacccctcaaggacaaagacttgttaaccagtggattaagcagcctctcatggataagaacagaatagaggagagattgaatttagtggaagcttttgtagaagatgcagaattgaggcagactttacaagaagatttacttcgtcgattcccagatcttaaccgacttgccaagaagtttcaaagacaagcagcaaacttacaagattgttaccgactctatcagggtataaatcaactacctaatgttatacaggctctggaaaaacatgaaggaaaacaccagaaattattgttggcagtttttgtgactcctcttactgatcttcgttctgacttctccaagtttcaggaaatgatagaaacaactttagatatggatcaggtggaaaaccatgaattccttgtaaaaccttcatttgatcctaatctcagtgaattaagagaaataatgaatgacttggaaaagaagatgcagtcaacattaataagtgcagccagagatcttggcttggaccctggcaaacagattaaactggattccagtgcacagtttggatattactttcgtgtaacctgtaaggaagaaaaagtccttcgtaacaataaaaactttagtactgtagatatccagaagaatggtgttaaatttaccaacagcaaattgacttctttaaatgaagagtataccaaaaataaaacagaatatgaagaagcccaggatgccattgttaaagaaattgtcaatatttcttcaggctatgtagaaccaatgcagacactcaatgatgtgttagctcagctagatgctgttgtcagctttgctcacgtgtcaaatggagcacctgttccatatgtacgaccagccattttggagaaaggacaaggaagaattatattaaaagcatccaggcatgcttgtgttgaagttcaagatgaaattgcatttattcctaatgacgtatactttgaaaaagataaacagatgttccacatcattactggccccaatatgggaggtaaatcaacatatattcgacaaactggggtgatagtactcatggcccaaattgggtgttttgtgccatgtgagtcagcagaagtgtccattgtggactgcatcttagcccgagtaggggctggtgacagtcaattgaaaggagtctccacgttcatggctgaaatgttggaaactgcttctatcctcaggtctgcaaccaaagattcattaataatcatagatgaattgggaagaggaacttctacctacgatggatttgggttagcatgggctatatcagaatacattgcaacaaagattggtgctttttgcatgtttgcaaccattttcatgaacttactgccttggccaatcagataccaactgttaataatctacatgtcacagcactcaccactgaagagaccttaactatgctttatcaggtgaagaaaggtgtctgtgatcaaagttttgggattcatgttgcagagcttgctaatttccctaagcatgtaatagagtgtgctaaacagaaagccctggaacttgaggagtttcagtatattggagaatcgcaaggatatgatatcatggaaccagcagcaaagaagtgctatctggaaagagagcaaggtgaaaaaattattcaggagttcctgtccaaggtgaaacaaatgccctttactgaaatgtcagaagaaaacatcacaataaagttaaaacagctaaaagctgaagtaatagcaaagaataatagctttgtaaatgaaatcatttcacgaataaaagttactacgtgaaaaatcccagtaatggaatgaaggtaatattgataagctattgtctgtaatagttttatattgttttatattaa

SEQ ID NO: 2612 - DNA, 1184 bp, Homo sapiens
  source 1..1184: mol_type = genomic DNA
gaggtttcgacatggcggtgcagccgaaggagacgctgcagttggagagcgcggccgaggtcggcttcgtgcgcttctttcagggcatgccggagaagccgaccaccacagtgcgccttttcgaccggggcgacttctatacggcgcacggcgaggacgcgctgctggccgcccgggaggtgttcaagacccagggggtgatcaagtacatggggccggcaggagcaaagaatctgcagagtgttgtgcttagtaaaatgaattttgaatcttttgtaaaagatcttcttctggttcgtcagtatagagttgaagtttataagaatagagctggaaataaggcatccaaggagaatgattggtatttggcatataaggcttctcctggcaatctctctcagtttgaagacattctctttggtaacaatgatatgtcagcttccattggtgttgtgggtgttaaaatgtccgcagttgatggccagagacaggttggagttgggtatgtggattccatacagtatatgaaattggatattgcagcagtcagagcccttaacctttttcagggttctgttgaagataccactggctctcagtctctggctgccttgctgaataagtgtaaaacccctcaaggacaaagacttgttaaccagtggattaagcagcctctcatggataagaacagaatagaggagagattgaatttagtggaagcttttgtagaagatgcagaattgaggcagactttacaagaagatttacttcgtcgattcccagatcttaaccgacttgccaagaagtttcaaagacaagcagcaaacttacaagattgttaccgactctatcagggtataaatcaactacctaatgttatacaggctctggaaaaacatgaaggaaaacaccagaaattattgttggcagtttttgtgactcctcttactgatcttcgttctgacttctccaagtttcaggaaatgatagaaacaactttagatatggatcaggtggaaaaccatgaattccttgtaaaaccttcatttgatcctaatctcagtgaattaagagaaataatgaatgacttggaaaagaagatgcagtcaacattaataagtgcagccagagatcttggaggatcacttcagcccaggagttcaagactagcctgtgccacatag

SEQ ID NO: 2613 - DNA, 2917 bp, Homo sapiens
  source 1..2917: mol_type = genomic DNA
tcgcgcattttcttcaaccaggaggtgaggaggtttcgacatggcggtgcagccgaaggagacgctgcagttggagagcgcggccgaggtcggcttcgtgcgcttctttcagggcatgccggagaagccgaccaccacagtgcgccttttcgaccggggcgacttctatacggcgcacggcgaggacgcgctgctggccgcccgggaggtgttcaagacccagggggtgatcaagtacatggggccggcaggagcaaagaatctgcagagtgttgtgcttagtaaaatgaattttgaatcttttgtaaaagatcttcttctggttcgtcagtatagagttgaagtttataagaatagagctggaaataaggcatccaaggagaatgattggtatttggcatataaggcttctcctggcaatctctctcagtttgaagacattctctttggtaacaatgatatgtcagcttccattggtgttgtgggtgttaaaatgtccgcagttgatggccagagacaggttggagttgggtatgtggattccatacagaggaaactaggactgtgtgaattccctgataatgatcagttctccaatcttgaggctctcctcatccagattggaccaaaggaatgtgttttacccggaggagagactgctggagacatggggaaactgagacagataattcaaagaggaggaattctgatcacagaaagaaaaaaagctgacttttccacaaaagacatttatcaggacctcaaccggttgttgaaaggcaaaaagggagagcagatgaatagtgctgtattgccagaaatggagaatcaggttgcagtttcatcactgtctgcggtaatcaagtttttagaactcttatcagatgattccaactttggacagtttgaactgactacttttgacttcagccagtatatgaaattggatattgcagcagtcagagcccttaacctttttcagggttctgttgaagataccactggctctcagtctctggctgccttgctgaataagtgtaaaacccctcaaggacaaagacttgttaaccagtggattaagcagcctctcatggataagaacagaatagaggagagattgaatttagtggaagcttttgtagaagatgcagaattgaggcagactttacaagaagatttacttcgtcgattcccagatcttaaccgacttgccaagaagtttcaaagacaagcagcaaacttacaagattgttaccgactctatcagggtataaatcaactacctaatgttatacaggctctggaaaaacatgaaggaaaacaccagaaattattgttggcagtttttgtgactcctcttactgatcttcgttctgacttctccaagtttcaggaaatgatagaaacaactttagatatggatcaggtggaaaaccatgaattccttgtaaaaccttcatttgatcctaatctcagtgaattaagagaaataatgaatgacttggaaaagaagatgcagtcaacattaataagtgcagccagagatcttggcttggaccctggcaaacagattaaactggattccagtgcacagtttggatattactttcgtgtaacctgtaaggaaaaaagtccttcgtaacaataaaaactttagtactgtagatatccagaagaatggtgttaaatttaccaacagcaaattgacttctttaaatgaagagtataccaaaaataaaacagaatatgaagaagcccaggatgccattgttaaagaaattgtcaatatttcttcaggctatgtagaaccaatgcagacactcaatgatgtgttagctcagctagatgctgttgtcagctttgctcacgtgtcaaatggagcacctgttccatatgtacgaccagccattttggagaaaggacaaggaagaattatattaaaagcatccaggcatgcttgtgttgaagttcaagatgaaattgcatttattcctaatgacgtatactttgaaaaagataaacagatgttccacatcattactggccccaatatgggaggtaaatcaacatatattcgacaaactggggtgatagtactcatggcccaaattgggtgttttgtgccatgtgagtcagcagaagtgtccattgtggactgcatcttagcccgagtaggggctggtgacagtcaattgaaaggagtctccacgttcatggctgaaatgttggaaactgcttctatcctcaggtctgcaaccaaagattcattaataatcatagatgaattgggaagaggaacttctacctacgatggatttgggttagcatgggctatatcagaatacattgcaacaaagattggtgctttttgcatgtttgcaacccattttcatgaacttactgccttggccaatcagataccaactgttaataatctacatgtcacagcactcaccactgaagagaccttaactatgctttatcaggtgaagaaaggtgtctgtgatcaaagttttgggattcatgttgcagagcttgctaatttccctaagcatgtaatagagtgtgctaaacagaaagccctggaacttgaggagtttcagtatattggagaatcgcaaggatatgatatcatggaaccagcagcaaagaagtgctatctggaaagagagcaaggtgaaaaaattattcaggagttcctgtccaaggtgaaacaaatgccctttactgaaatgtcagaagaaaacatcacaataaagttaaaacagctaaaagctgaagtaatagcaaagaataatagctttgtaaatgaaatcatttcacgaataaaagttactacgtgaaaaatcccagtaatggaatgaaggtaatattgataagctattgtctgtaatagttttatattgttttatattaa

SEQ ID NO: 2614 - DNA, 2918 bp, Homo sapiens
  source 1..2918: mol_type = genomic DNA
tcgcgcattttcttcaaccaggaggtgaggaggtttcgacatggcggtgcagccgaaggagacgctgcagttggagagcgcggccgaggtcggcttcgtgcgcttctttcagggcatgccggagaagccgaccaccacagtgcgccttttcgaccggggcgacttctatacggcgcacggcgaggacgcgctgctggccgcccgggaggtgttcaagacccagggggtgatcaagtacatggggccggcaggagcaaagaatctgcagagtgttgtgcttagtaaaatgaattttgaatcttttgtaaaagatcttcttctggttcgtcagtatagagttgaagtttataagaatagagctggaaataaggcatccaaggagaatgattggtatttggcatataaggcttctcctggcaatctctctcagtttgaagacattctctttggtaacaatgatatgtcagcttccattggtgttgtgggtgttaaaatgtccgcagttgatggccagagacaggttggagttgggtatgtggattccatacagaggaaactaggactgtgtgaattccctgataatgatcagttctccaatcttgaggctctcctcatccagattggaccaaaggaatgtgttttacccggaggagagactgctggagacatggggaaactgagacagataattcaaagaggaggaattctgatcacagaaagaaaaaaagctgacttttccacaaaagacatttatcaggacctcaaccggttgttgaaaggcaaaaagggagagcagatgaatagtgctgtattgccagaaatggagaatcaggttgcagtttcatcactgtctgcggtaatcaagtttttagaactcttatcagatgattccaactttggacagtttgaactgactacttttgacttcagccagtatatgaaattggatattgcagcagtcagagcccttaacctttttcagggttctgttgaagataccactggctctcagtctctggctgccttgctgaataagtgtaaaacccctcaaggacaaagacttgttaaccagtggattaagcagcctctcatggataagaacagaatagaggagagattgaatttagtggaagcttttgtagaagatgcagaattgaggcagactttacaagaagattacttcgtcgattcccagatcttaaccgacttgccaagaagtttcaaagacaagcagcaaacttacaagattgttaccgactctatcagggtataaatcaactacctaatgttatacaggctctggaaaaacatgaaggaaaacaccagaaattattgttggcagtttttgtgactcctcttactgatcttcgttctgacttctccaagtttcaggaaatgatagaaacaactttagatatggatcaggtggaaaaccatgaattccttgtaaaaccttcatttgatcctaatctcagtgaattaagagaaataatgaatgacttggaaaagaagatgcagtcaacattaataagtgcagccagagatcttggcttggaccctggcaaacagattaaactggattccagtgcacagtttggatattactttcgtgtaacctgtaaggaagaaaaagtccttcgtaacaataaaaactttagtactgtagatatccagaagaatggtgttaaatttaccaacagcaaattgacttctttaaatgaagagtataccaaaaataaaacagaatatgaagaagcccaggatgccattgttaaagaaattgtcaatatttcttcaggctatgtagaaccaatgcagacactcaatgatgtgttagctcagctagatgctgttgtcagctttgctcacgtgtcaaatggagcacctgttccatatgtacgaccagccattttggagaaaggacaaggaagaattatattaaaagcatccaggcatgcttgtgttgaagttcaagatgaaattgcatttattcctaatgacgtatactttgaaaaagataaacagatgttccacatcattactggccccaatatgggaggtaaatcaacatatattcgacaaactggggtgatagtactcatggcccaaattgggtgttttgtgccatgtgagtcagcagaagtgtccattgtggactgcatcttagcccgagtaggggctggtgacagtcaattgaaaggagtctccacgttcatggctgaaatgttggaaactgcttctatcctcaggtctgcaaccaaagattcattaataatcatagatgaattgggaagaggaacttctacctacgatggatttgggttagcatgggctatatcagaatacattgcaacaaagattggtgctttttgcatgtttgcaacccattttcatgaacttactgccttggccaatcagataccaactgttaataatctacatgtcacagcactcaccactgaagagaccttaactatgctttatcaggtgaagaaaggtgtctgtgatcaaagttttgggattcatgttgcagagcttgctaatttccctaagcatgtaatagagtgtgctaaacagaaagccctggaacttgaggagtttcagtatattggagaatcgcaaggatatgatatcatggaaccagcagcaaagaagtgctatctggaaagagagcaaggtgaaaaaattattcaggagttcctgtccaaggtgaaacaaatgccctttactgaaatgtcagaagaaaacatcacaataaagttaaaacagctaaaagctgaagtaatagcaaagaataatagctttgtaaatgaaatcatttcacgaataaaagttactacgtgaaaaatcccagtaatggaatgaaggtaatattgataagctattgtctgtaatagttttatattgttttatattaa

SEQ ID NO: 2615 - DNA, 2917 bp, Homo sapiens
  source 1..2917: mol_type = genomic DNA
tcgcgcattttcttcaaccaggaggtgaggaggtttcgacatggcggtgcagccgaaggagacgctgcagttggagagcgcggccgaggtcggcttcgtgcgcttctttcagggcatgccggagaagccgaccaccacagtgcgccttttcgaccggggcgacttctatacggcgcacggcgaggacgcgctgctggccgcccgggaggtgttcaagacccagggggtgatcaagtacatggggccggcaggagcaaagaatctgcagagtgttgtgcttagtaaaatgaattttgaatcttttgtaaaagatcttcttctggttcgtcagtatagagttgaagtttataagaatagagctggaaataaggcatccaaggagaatgattggtatttggcatataaggcttctcctggcaatctctctcagtttgaagacattctctttggtaacaatgatatgtcagcttccattggtgttgtgggtgttaaaatgtccgcagttgatggccagagacaggttggagttgggtatgtggattccatacagaggaaactaggactgtgtgaattccctgataatgatcagttctccaatcttgaggctctcctcatccagattggaccaaaggaatgtgttttacccggaggagagactgctggagacatggggaaactgagacagataattcaaagaggaggaattctgatcacagaaagaaaaaaagctgacttttccacaaaagacatttatcaggacctcaaccggttgttgaaaggcaaaaagggagagcagatgaatagtgctgtattgccagaaatggagaatcaggttgcagtttcatcactgtctgcggtaatcaagtttttagaactcttatcagatgattccaactttggacagtttgaactgactacttttgacttcagccagtatatgaaattggatattgcagcagtcagagcccttaacctttttcagggttctgttgaagataccactggctctcagtctctggctgccttgctgaataagtgtaaaacccctcaaggacaaagacttgttaaccagtggattaagcagcctctcatggataagaacagaatagaggagagattgaatttagtggaagcttttgtagaagatgcagaattgaggcagactttacaagaagatttacttcgtcgattcccagatcttaaccgacttgccaagaagtttcaaagacaagcagcaaacttacaagattgttaccgactctatcagggtataaatcaactacctaatgttatacaggctctggaaaaacatgaaggaaaacaccagaaattattgttggcagtttttgtgactcctcttactgatcttcgttctgacttctccaagtttcaggaaatgatagaaacaactttagatatggatcaggtggaaaaccatgaattccttgtaaaaccttcatttgatcctaatctcagtgaattaagaaataatgaatgacttggaaaagaagatgcagtcaacattaataagtgcagccagagatcttggcttggaccctggcaaacagattaaactggattccagtgcacagtttggatattactttcgtgtaacctgtaaggaagaaaaagtccttcgtaacaataaaaactttagtactgtagatatccagaagaatggtgttaaatttaccaacagcaaattgacttctttaaatgaagagtataccaaaaataaaacagaatatgaagaagcccaggatgccattgttaaagaaattgtcaatatttcttcaggctatgtagaaccaatgcagacactcaatgatgtgttagctcagctagatgctgttgtcagctttgctcacgtgtcaaatggagcacctgttccatatgtacgaccagccattttggagaaaggacaaggaagaattatattaaaagcatccaggcatgcttgtgttgaagttcaagatgaaattgcatttattcctaatgacgtatactttgaaaaagataaacagatgttccacatcattactggccccaatatgggaggtaaatcaacatatattcgacaaactggggtgatagtactcatggcccaaattgggtgttttgtgccatgtgagtcagcagaagtgtccattgtggactgcatcttagcccgagtaggggctggtgacagtcaattgaaaggagtctccacgttcatggctgaaatgttggaaactgcttctatcctcaggtctgcaaccaaagattcattaataatcatagatgaattgggaagaggaacttctacctacgatggatttgggttagcatgggctatatcagaatacattgcaacaaagattggtgctttttgcatgtttgcaacccattttcatgaacttactgccttggccaatcagataccaactgttaataatctacatgtcacagcactcaccactgaagagaccttaactatgctttatcaggtgaagaaaggtgtctgtgatcaaagttttgggattcatgttgcagagcttgctaatttccctaagcatgtaatagagtgtgctaaacagaaagccctggaacttgaggagtttcagtatattggagaatcgcaaggatatgatatcatggaaccagcagcaaagaagtgctatctggaaagagagcaaggtgaaaaaattattcaggagttcctgtccaaggtgaaacaaatgccctttactgaaatgtcagaagaaaacatcacaataaagttaaaacagctaaaagctgaagtaatagcaaagaataatagctttgtaaatgaaatcatttcacgaataaaagttactacgtgaaaaatcccagtaatggaatgaaggtaatattgataagctattgtctgtaatagttttatattgttttatattaa

SEQ ID NO: 2616 - DNA, 3018 bp, Homo sapiens
  source 1..3018: mol_type = genomic DNA
aagctgattgggtgtggtcgccgtggccggacgccgctcgggggacgtgggaggggaggcgggaaacagcttagtgggtgtggggtcgcgcattttcttcaaccaggaggtgttcaagacccagggggtgatcaagtacatggggccggcaggagcaaagaatctgcagagtgttgtgcttagtaaaatgaattttgaatcttttgtaaaagatcttcttctggttcgtcagtatagagttgaagtttataagaatagagctggaaataaggcatccaaggagaatgattggtatttggcatataaggcttctcctggcaatctctctcagtttgaagacattctctttggtaacaatgatatgtcagcttccattggtgttgtgggtgttaaaatgtccgcagttgatggccagagacaggttggagttgggtatgtggattccatacagaggaaactaggactgtgtgaattccctgataatgatcagttctccaatcttgaggctctcctcatccagattggaccaaaggaatgtgttttacccggaggagagactgctggagacatggggaaactgagacagataattcaaagaggaggaattctgatcacagaaagaaaaaaagctgacttttccacaaaagacatttatcaggacctcaaccggttgttgaaaggcaaaaagggagagcagatgaatagtgctgtattgccagaaatggagaatcaggttgcagtttcatcactgtctgcggtaatcaagtttttagaactcttatcagatgattccaactttggacagtttgaactgactacttttgacttcagccagtatatgaaattggatattgcagcagtcagagcccttaacctttttcagggttctgttgaagataccactggctctcagtctctggctgccttgctgaataagtgtaaaacccctcaaggacaaagacttgttaaccagtggattaagcagcctctcatggataagaacagaatagaggagagattgaatttagtggaagcttttgtagaagatgcagaattgaggcagactttacaagaagatttacttcgtcgattcccagatcttaaccgacttgccaagaagtttcaaagacaagcagcaaacttacaagattgttaccgactctatcagggtataaatcaactacctaatgttatacaggctctggaaaaacatgaaggaaaacaccagaaattattgttggcagtttttgtgactcctcttactgatcttcgttctgacttctccaagtttcaggaaatgatagaaacaactttagatatggatcaggtggaaaaccatgaattccttgtaaaaccttcatttgatcctaatctcagtgaattaagagaaataatgaatgacttggaaaagaagatgcagtcaacattaataagtgcagccagagatcttggcttggaccctggcaaacagattaaactggattccagtgcacagtttggatattactttcgtgtaacctgtaaggaagaaaaagtccttcgtaacaataaaaactttagtactgtagatatccagaagaatggtgttaaatttaccaacagcaaattgacttctttaaatgaagagtataccaaaaataaaacagaatatgaagaagcccaggatgccattgttaaagaaattgtcaatatttcttcaggctatgtagaaccaatgcagacactcaatgatgtgttagctcagctagatgctgttgtcagctttgctcacgtgtcaaatggagcacctgttccatatgtacgaccagccattttggagaaaggacaaggaagaattatattaaaagcatccaggcatgcttgtgttgaagttcaagatgaaattgcatttattcctaatgacgtatactttgaaaaagataaacagatgttccacatcattactggccccaatatgggaggtaaatcaacatatattcgacaaactggggtgatagtactcatggcccaaattgggtgttttgtgccatgtgagtcagcagaagtgtccattgtggactgcatcttagcccgagtaggggctggtgacagtcaattgaaaggagtctccacgttcatggctgaaatgttggaaactgcttctatcctcaggtctgcaaccaaagattcattaataatcatagatgaattgggaagaggaacttctacctacgatggatttgggttagcatgggctatatcagaatacattgcaacaaagattggtgctttttgcatgtttgcaacccattttcatgaacttactgccttggccaatcagataccaactgttaataatctacatgtcacagcactcaccactgaagagaccttaactatgctttatcaggtgaagaaaggtgtctgtgatcaaagttttgggattcatgttgcagagcttgctaatttccctaagcatgtaatagagtgtgctaaacagaaagccctggaacttgaggagtttcagtatattggagaatcgcaaggatatgatatcatggaaccagcagcaaagaagtgctatctggaaagagagcaaggtgaaaaaattattcaggagttcctgtccaaggtgaaacaaatgccctttactgaaatgtcagaagaaaacatcacaataaagttaaaacagctaaaagctgaagtaatagcaaagaataatagctttgtaaatgaaatcatttcacgaataaaagttactacgtgaaaaatcccagtaatggaatgaaggtaatattgataagctattgtctgtaatagttttatattgttttatattaaccctttttccatagtgttaactgtcagtgcccatgggctatcaacttaataagatatttagtaatattttactttgaggacattttcaaagatttttattttgaaaaatgagagctgtaactgaggactgtttgcaattgacataggcaataataagtgatgtgctgaattttataaataaaatcatgtagtttgtgg

SEQ ID NO: 2617 - DNA, 4092 bp, Homo sapiens
  source 1..4092: mol_type = genomic DNA
ccgcagacgcctgggaactgcggccgcgggctcgcgctcctcgccaggccctgccgccgggctgccatccttgccctgccatgtctcgccggaagcctgcgtcgggcggcctcgctgcctccagctcagcccctgcgaggcaagcggttttgagccgattcttccagtctacgggaagcctgaaatccacctcctcctccacaggtgcagccgaccaggtggaccctggcgctgcagcggctgcagcggccgcagcggccgcagcgcccccagcgcccccagctcccgccttcccgccccagctgccgccgcacatagctacagaaattgacagaagaaagaagagaccattggaaaatgatgggcctgttaaaaagaaagtaaagaaagtccaacaaaaggaaggaggaagtgatctgggaatgtctggcaactctgagccaaagaaatgtctgaggaccaggaatgtttcaaagtctctggaaaaattgaaagaattctgctgcgattctgcccttcctcaaagtagagtccagacagaatctctgcaggagagatttgcagttctgccaaaatgtactgattttgatgatatcagtcttctacacgcaaagaatgcagtttcttctgaagattcgaaacgtcaaattaatcaaaaggacacaacactttttgatctcagtcagtttggatcatcaaatacaagtcatgaaaatttacagaaaactgcttccaaatcagctaacaaacggtccaaaagcatctatacgccgctagaattacaatacatagaaatgaagcagcagcacaaagatgcagttttgtgtgtggaatgtggatataagtatagattctttggggaagatgcagagattgcagcccgagagctcaatatttattgccatttagatcacaactttatgacagcaagtatacctactcacagactgtttgttcatgtacgccgcctggtggcaaaaggatataaggtgggagttgtgaagcaaactgaaactgcagcattaaaggccattggagacaacagaagttcactcttttcccggaaattgactgccctttatacaaaatctacacttattggagaagatgtgaatcccctaatcaagctggatgatgctgtaaatgttgatgagataatgactgatacttctaccagctatcttctgtgcatctctgaaaataaggaaaatgttagggacaaaaaaaagggcaacatttttattggcattgtgggagtgcagcctgccacaggcgaggttgtgtttgatagtttccaggactctgcttctcgttcagagctagaaacccggatgtcaagcctgcagccagtagagctgctgcttccttcggccttgtccgagcaaacagaggcgctcatccacagagccacatctgttagtgtgcaggatgacagaattcgagtcgaaaggatggataacatttattttgaatacagccatgctttccaggcagttacagagttttatgcaaaagatacagttgacatcaaaggttctcaaattatttctggcattgttaacttagagaagcctgtgatttgctctttggctgccatcataaaatacctcaaagaattcaacttggaaaagatgctctccaaacctgagaattttaaacagctatcaagtaaaatggaatttatgacaattaatggaacaacattaaggaatctggaaatcctacagaatcagactgatatgaaaaccaaaggaagtttgctgtgggttttagaccacactaaaacttcatttgggagacggaagttaaagaagtgggtgacccagccactccttaaattaagggaaataaatgcccggcttgatgctgtatcggaagttctccattcagaatctagtgtgtttggtcagatagaaaatcatctacgtaaattgcccgacatagagaggggactctgtagcatttatcacaaaaaatgttctacccaagagttcttcttgattgtcaaaactttatatcacctaaagtcagaatttcaagcaataatacctgctgttaattcccacattcagtcagacttgctccggaccgttattttagaaattcctgaactcctcagtccagtggagcattacttaaagatactcaatgaacaagctgccaaagttggggataaaactgaattatttaaagacctttctgacttccctttaataaaaaagaggaaggatgaaattcaaggtgttattgacgagatccgaatgcatttgcaagaaatacgaaaaatactaaaaaatccttctgcacaatatgtgacagtatcaggacaggagtttatgatagaaataaagaactctgctgtatcttgtataccaactgattgggtaaaggttggaagcacaaaagctgtgagccgctttcactctccttttattgtagaaaattacagacatctgaatcagctccgggagcagctagtccttgactgcagtgctgaatggcttgattttctagagaaattcagtgaacattatcactccttgtgtaaagcagtgcatcacctagcaactgttgactgcattttctccctggccaaggtcgctaagcaaggagattactgcagaccaactgtacaagaagaaagaaaaattgtaataaaaaatggaaggcaccctgtgattgatgtgttgctgggagaacaggatcaatatgtcccaaataatacagatttatcagaggactcagagagagtaatgataattaccggaccaaacatgggtggaaagagctcctacataaaacaagttgcattgattaccatcatggctcagattggctcctatgttcctgcagaagaagcgacaattgggattgtggatggcattttcacaaggatgggtgctgcagacaatatatataaaggacagagtacatttatggaagaactgactgacacagcagaaataatcagaaaagcaacatcacagtccttggttatcttggatgaactaggaagagggacgagcactcatgatggaattgccattgcctatgctacacttgagtatttcatcagagatgtgaaatccttaaccctgtttgtcacccattatccgccagtttgtgaactagaaaaaaattactcacaccaggtggggaattaccacatgggattcttggtcagtgaggatgaaagcaaactggatccaggcgcagcagaacaagtccctgattttgtcaccttcctttaccaaataactagaggaattgcagcaaggagttatggattaaatgtggctaaactagcagatgttcctggagaaattttgaagaaagcagctcacaagtcaaaagagctggaaggattaataaatacgaaaagaaagagactcaagtattttgcaaagttatggacgatgcataatgcacaagacctgcagaagtggacagaggagttcaacatggaagaaacacagacttctcttcttcattaaaatgaagactacatttgtgaacaaaaaatggagaattaaaaataccaactgtacaaaataactctccagtaacagcctatctttgtgtgacatgtgagcataaaattatgaccatggtatattcctattggaaacagagaggtttttctgaagacagtctttttcaagtttctgtcttcctaacttttctacgtataaacactcttgaatagacttccactttgtaattagaaaattttatggacagtaagtccagtaaagccttaagtggcagaatataattcccaagcttttggagggtgatataaaaatttacttgatatttttatttgtttcagttcagataattggcaactgggtgaatctggcaggaatctatccattgaactaaaataattttattatgcaaccagtttatccaccaagaacataagaattttttataagtagaaagaattggccaggcatggtggctcatgcctgtaatcccagcactttgggaggccaaggtaggcagatcacctgaggtcaggagttcaagaccagcctggccaacatggcaaaaccccatctttactaaaaatataaagtacatctc

SEQ ID NO: 2618 - DNA, 4337 bp, Homo sapiens
  source 1..4337: mol_type = genomic DNA
atgtctcgccggaagcctgcgtcgggcggcctcgctgcctccagctcagcccctgcgaggcaagcggttttgagccgattcttccagtctacgggaagcctgaaatccacctcctcctccacaggtgcagccgaccaggtggaccctggcgctgcagcggctgcagcgcccccagctcccgccttcccgccccagctgccgccgcacatagctacagaaattgacagaagaaagaagagaccattggaaaatgatgggcctgttaaaaagaaagtaaagaaagtccaacaaaaggaaggaggaagtgatctgggaatgtctggcaactctgagccaaagaaatgtctgaggaccaggaatgtttcaaagtctctggaaaaattgaaagaattctgctgcgattctgcccttcctcaaagtagagtccagacagaatctctgcaggagagatttgcagttctgccaaaatgtactgattttgatgatatcagtcttctacacgcaaagaatgcagtttcttctgaagattcgaaacgtcaaattaatcaaaaggacacaacactttttgatctcagtcagtttggatcatcaaatacaagtcatgaaaatttacagaaaactgcttccaaatcagctaacaaacggtccaaaagcatctatacgccgctagaattacaatacatagaaatgaagcagcagcacaaagatgcagttttgtgtgtggaatgtggatataagtatagattctttggggaagatgcagagattgcagcccgagagctcaatatttattgccatttagatcacaactttatgacagcaagtatacctactcacagactgtttgttcatgtacgccgcctggtggcaaaaggatataaggtgggagttgtgaagcaaactgaaactgcagcattaaaggccattggagacaacagaagttcactcttttcccggaaattgactgccctttatacaaaatctacacttattggagaagatgtgaatcccctaatcaagctggatgatgctgtaaatgttgatgagataatgactgatacttctaccagctatcttctgtgcatctctgaaaataaggaaaatgttagggacaaaaaaaagggcaacatttttattggcattgtgggagtgcagcctgccacaggcgaggttgtgtttgatagtttccaggactctgcttctcgttcagagctagaaacccggatgtcaagcctgcagccagtagagctgctgcttccttcggccttgtccgagcaaacagaggcgctcatccacagagccacatctgttagtgtgcaggatgacagaattcgagtcgaaaggatggataacatttattttgaatacagccatgctttccaggcagttacagagttttatgcaaaagatacagttgacatcaaaggttctcaaattatttctggcattgttaacttagagaagcctgtgatttgctctttggctgccatcataaaatacctcaaagaattcaacttggaaaagatgctctccaaacctgagaattttaaacagctatcaagtaaaatggaatttatgacaattaatggaacaacattaaggaatctggaaatcctacagaatcagactgatatgaaaaccaaaggaagtttgctgtgggttttagaccacactaaaacttcatttgggagacggaagttaaagaagtgggtgacccagccactccttaaattaagggaaataaatgcccggcttgatgctgtatcggaagttctccattcagaatctagtgtgtttggtcagatagaaaatcatctacgtaaattgcccgacatagagaggggactctgtagcatttatcacaaaaaatgttctacccaagagttcttcttgattgtcaaaactttatatcacctaaagtcagaatttcaagcaataatacctgctgttaattcccacattcagtcagacttgctccggaccgttattttagaaattcctgaactcctcagtccagtggagcattacttaaagatactcaatgaacaagctgccaaagttggggataaaactgaattatttaaagacctttctgacttccctttaataaaaaagaggaaggatgaaattcaaggtgttattgacgagatccgaatgcatttgcaagaaatacgaaaaatactaaaaaatccttctgcacaatatgtgacagtatcaggacaggagtttatgatagaaataaagaactctgctgtatcttgtataccaactgattgggtaaaggttggaagcacaaaagctgtgagccgctttcactctccttttattgtagaaaattacagacatctgaatcagctccgggagcagctagtccttgactgcagtgctgaatggcttgattttctagagaaattcagtgaacattatcactccttgtgtaaagcagtgcatcacctagcaactgttgactgcattttctccctggccaaggtcgctaagcaaggagattactgcagaccaactgtacaagaagaaagaaaaattgtaataaaaaatggaaggcaccctgtgattgatgtgttgctgggagaacaggatcaatatgtcccaaataatacagatttatcagaggactcagagagagtaatgataattaccggaccaaacatgggtggaaagagctcctacataaaacaagttgcattgattaccatcatggctcagattggctcctatgttcctgcagaagaagcgacaattgggattgtggatggcattttcacaaggatgggtgctgcagacaatatatataaaggacagagtacatttatggaagaactgactgacacagcagaaataatcagaaaagcaacatcacagtccttggttatcttggatgaactaggaagagggacgagcactcatgatggaattgccattgcctatgctacacttgagtatttcatcagagatgtgaaatccttaaccctgtttgtcacccattatccgccagtttgtgaactagaaaaaaattactcacaccaggtggggaattaccacatgggattcttggtcagtgaggatgaaagcaaactggatccaggcgcagcagaacaagtccctgattttgtcaccttcctttaccaaataactagaggaattgcagcaaggagttatggattaaatgtggctaaactagcagatgttcctggagaaattttgaagaaagcagctcacaagtcaaaagagctggaaggattaataaatacgaaaagaaagagactcaagtattttgcaaagttatggacgatgcataatgcacaagacctgcagaagtggacagaggagttcaacatggaagaaacacagacttctcttcttcattaaaatgaagactacatttgtgaacaaaaaatggagaattaaaaataccaactgtacaaaataactctccagtaacagcctatctttgtgtgacatgtgagcataaaattatgaccatggtatattcctattggaaacagagaggtttttctgaagacagtctttttcaagtttctgtcttcctaacttttctacgtataaacactcttgaatagacttccactttgtaattagaaaattttatggacagtaagtccagtaaagccttaagtggcagaatataattcccaagcttttggagggtgatataaaaatttacttgatatttttatttgtttcagttcagataattggcaactgggtgaatctggcaggaatctatccattgaactaaaataattttattatgcaaccagtttatccaccaagaacataagaattttttataagtagaaagaattggccaggcatggtggctcatgcctgtaatcccagcactttgggaggccaaggtaggcagatcacctgaggtcaggagttcaagaccagcctggccaacatggcaaaaccccatctttactaaaaatataaagtacatctctactaaaaatacgaaaaaattagctgggcatggtggcgcacacctgtagtcccagctactccggaggctgaggcaggagaatctcttgaacctgggaggcggaggttgcaatgagccgagatcacgtcactgcactccagcttgggcaacagagcaagactccatctcaaaaaaaaaaaaagaaaaaagaaaagaaatagaattatcaagcttttaaaaactagagcacagaaggaataaggtcatgaaatttaaaaggttaaatattgtcataggattaagcagtttaaagattgttggatgaaattatttgtcattcattcaagtaataaatatttaatgaatacttgct

SEQ ID NO: 2619 - DNA, 3266 bp, Homo sapiens
  source 1..3266: mol_type = genomic DNA
gcgcagttctcccgcccgtttcagcggcgcagcttctgtagttgggctactggaggggtcgctcagaaacctcatacttctcgggtcagggaaggtttgggaggatgctgaggcctgagatctcatcaacctcgccttctgccccggcggtttccccgtcgtcgggagaaacccgctcacctcagggtccccgctacaatttcggactccaggagactccacagagccgcccttcggtccaggtggtctctgcatccacctgtcctggcacgtcaggagctgcgggcgaccggagcagcagcagcagcagccttccctgccccgcgccaaactcccggccagctcaaggttcatactttggaaacaaaagagcttatgcagaaaacacagttgcatcaaattttacttttggtgcaagctcatcttctgcacgagatactaattatcctcaaacacttaaaactccattgtctactggaaatcctcagagatcaggttataagagctggacaccacaagtgggatattcagcttcatcctcatctgcgatttctgcacactccccatcagttattgtagctgttgtagaagggagaggacttgccagaggtgaaataggaatggcaagtattgatttaaaaaacccccaaattatactatcccagtttgcagacaacacaacatatgcaaaggtgatcactaaacttaaaattttatcacctttggaaataataatgtcaaatactgcttgtgctgtggggaattccaccaagttgttcactctgatcacagaaaatttcaagaatgttaatttcactactatccaaaggaaatacttcaatgaaacaaaaggattagagtacattgaacagttatgcatagcagaattcagcactgtcctaatggaggttcagtccaagtattactgccttgcagctgttgcagctttgttaaaatatgttgaatttattcaaaattcagtttatgcaccaaaatcactgaagatttgtttccagggtagtgaacagacagccatgatagattcatcatcagcccaaaaccttgaattgttaattaataatcaagactataggaataatcacactctctttggtgttctaaattatactaagactcctggagggagtagacgacttcgttctaatatattagagcctctagttgatattgaaaccattaacatgagattagattgtgttcaagaactacttcaagatgaggaactattttttggacttcaatcagttatatcaagatttcttgatacagagcagcttctttctgttttagtccaaattccaaagcaagacacggtcaatgctgctgaatcaaagataacaaatttaatatacttaaaacataccttggaacttgtggatcctttaaagattgctatgaagaactgtaacacacctttattaagagcttactatggttccttggaagacaagaggtttggaatcatacttgaaaagattaaaacagtaattaatgatgatgcaagatacatgaaaggatgcctaaacatgaggactcagaagtgctatgcagtgaggtctaacataaatgaatttcttgacatagcaagaagaacatacacagagattgtagatgacatagcaggaatgatatcacaacttggagaaaaatatagtctacctttaaggacaagttttagctctgctcgaggatttttcatccagatgactacagattgtatagccctacctagtgatcaacttccttcagaatttattaagatttctaaagtgaaaaattcttacagctttacatcagcagatttaattaaaatgaatgaaagatgccaagaatctttgagagaaatctatcacatgacttatatgatagtgtgcaaactgcttagtgagatttatgaacatattcattgcttatataaactatctgacactgtgtcaatgctggatatgctactgtcatttgctcatgcctgcactctttctgactatgttcgaccagaatttactgatactttagcaatcaaacagggatggcatcctattcttgaaaaaatatctgcggaaaaacctattgccaacaatacctatgttacagaagggagtaattttttgatcataactggaccaaacatgagtggaaaatccacatatttaaaacagattgctctttgtcagattatggcccagattggatcatatgttccagcagaatattcttcctttagaattgctaaacagatttttacaagaattagtactgatgatgatatcgaaacaaattcatcaacatttatgaaagaaatgaaagagatagcatatattctacataatgctaatgacaaatcgctcatattaattgatgaacttggcagaggtactaatacggaagaaggtattggcatttgttatgctgtttgtgaatatctactgagcttaaaggcatttacactgtttgctacacatttcctggaactatgccatattgatgccctgtatcctaatgtagaaaacatgcattttgaagttcaacatgtaaagaatacctcaagaaataaagaagcaattttgtatacctacaaactttctaagggactcacagaagagaaaaattatggattaaaagctgcagaggtgtcatcacttccaccatcaattgtcttggatgccaaggaaatcacaactcaaattacgagacaaattttgcaaaaccaaaggagtacccctgagatggaaagacagagagctgtgtaccatctagccactaggcttgttcaaactgctcgaaactctcaattggatccagacagtttacgaatatatttaagtaacctcaagaagaagtacaaagaagattttcccaggactgaacaagttccagaaaagactgaagaataatcacaattctaatgtaataatatatcttaattcaaggaacctagaatttatttttctccttagagataaggaaaataacatttgccaaatttcatattttaattgaaaattacattatattaacatcacaattgtcatctatatattctatatgaaaaatatttattataacttaacaaatgagaactacttaaaggaatggtttttatgttaggagaaaatacaatacaccacttttttctcacaaaaattcacattattaagacctaagttcatttatacttacaagttatagtttaaaatattattgtaaataccctagtttaataaacacctttctttttaggtctg

SEQ ID NO: 2620 - DNA, 1046 bp, Homo sapiens
  source 1..1046: mol_type = genomic DNA
cgctccttttgcaggctcgtggcggtcggtcagcggggcgttctcccacctgtagcgactcaggttactgaaaaggcgggaaaacgctgcgatggcggcagctgggggaggaggaagataagcgcgtgaggctggggtcctggcgcgtggttggcagaggcagagacataagacgtgcacgactcgccccacagggccctcagaccccttccttccaaaggagcctccaagctcatggcctccttaggagcgaacccaaggaggacaccgcagggaccgagacctggggcggcctcctccggcttccccagcccggccccagtgccgggccccagggaggccgaggaggaggaagtcgaggaggaggaggagctggccgagatccatctgtgtgtgctgtggaattcaggatacttgggcattgcctactatgatactagtgactccactatccacttcatgccagatgccccagaccacgagagcctcaagcttctccagagagttctggatgagatcaatccccagtctgttgttacgagtgccaaacaggatgagaatatgactcgatttctgggaaagcttgcctcccaggagcacagagagcctaaaagacctgaaatcatatttttgccaagtgtggattttggtctggagataagcaaacaacgcctcctttctggaaactactccttcatcccagacgccatgactgccactgagaaaatcctcttcctctcttccattattccctttgactgcctcctcacagttcgagcacttggagggctgctgaagttcctgggtcgaagaagaatcggggttgaactggaagactataatgtcagcgtccccatcctgggctttaagaaatttatgttgactcatctggtgaacatagatcaagacacttacagtgttctacagatttttaagagtgagtctcacccctcagtgtacaaagtggccagtggactgaaggaggggctcagcctctttggaatcctcaacagatgccactgtaagtggggagagaagctgctcag

SEQ ID NO: 2621 - DNA, 867 bp, Homo sapiens
  source 1..867: mol_type = genomic DNA
gcggtcggtcagcggggcgttctcccacctgtagcgactcagagcctccaagctcatggcctccttaggagcgaacccaaggaggacaccgcagggaccgagacctggggcggcctcctccggcttccccagcccggccccagtgccgggccccagggaggccgaggaggaggaagtcgaggaggaggaggagctggccgagatccatctgtgtgtgctgtggaattcaggatacttgggcattgcctactatgatactagtgactccactatccacttcatgccagatgccccagaccacgagagcctcaagcttctccagagagttctggatgagatcaatccccagtctgttgttacgagtgccaaacaggatgagaatatgactcgatttctgggaaagcttgcctcccaggagcacagagagcctaaaagacctgaaatcatatttttgccaagtgtggattttggtctggagataagcaaacaacgcctcctttctggaaactactccttcatcccagacgccatgactgccactgagaaaatcctcttcctctcttccattattccctttgactgcctcctcacagttcgagcacttggagggctgctgaagttcctgggtcgaagaagaatcggggttgaactggaagactataatgtcagcgtccccatcctgggctttaagaaatttatgttgactcatctggtgaacatagatcaagacacttacagtgttctacagatttttaagagtgagtctcacccctcagtgtacaaagtggccagtggactgaaggaggggctcagcctctttggaatcctcaacagatgccactgtaagtggggagagaagctgctcag

SEQ ID NO: 2622 - DNA, 694 bp, Homo sapiens
  source 1..694: mol_type = genomic DNA
gcgccggcgcgctccttttgcaggctcgtggcggtcggtcagcggggcgttctcccacctgtagcgactcagggccctcagaccccttccttccaaaggagcctccaagctcatggcctccttaggagcgaacccaaggaggacaccgcagggaccgagacctggggcggcctcctccggcttccccagcccggccccagtgccgggccccagggaggccgaggaggaggaagtcgaggaggaggaggagctggccgagatccatctgtgtgtgctgtggaattcaggatacttgggcattgcctactatgatactagtgactccactatccacttcatgccagatgccccagaccacgagagcctcaagcttctccagagagttctggatgagatcaatccccagtctgttgttacgagtgccaaacaggatgagaatatgactcgatttctgggaaagcttgcctcccaggagcacagagagcctaaaagacctgaaatcatatttttgccaagtgtggattttggtctggagataagcaaacaacgcctcctttctggaaactactccttcatcccagacgccatgactgccactgagaaaatcctcttcctctcttccattattccctttgactgcctcctcacagttcgagcacttggagggctgctgaagttcctgggtcgaagaaga

SEQ ID NO: 2623 - DNA, 891 bp, Homo sapiens
  source 1..891: mol_type = genomic DNA
gcgcgctccttttgcaggctcgtggcggtcggtcagcggggcgttctcccacctgtagcgactcagagcctccaagctcatggcctccttaggagcgaacccaaggaggacaccgcagggaccgagacctggggcggcctcctccggcttccccagcccggccccagtgccgggccccagggaggccgaggaggaggaagtcgaggaggaggaggagctggccgagatccatctgtgtgtgctgtggaattcaggatacttgggcattgcctactatgatactagtgactccactatccacttcatgccagatgccccagaccacgagagcctcaagcttctccagagagttctggatgagatcaatccccagtctgttgttacgagtgccaaacaggatgagaatatgactcgatttctgggaaagcttgcctcccaggagcacagagagcctaaaagacctgaaatcatatttttgccaagtgtggattttggtctggagataagcaaacaacgcctcctttctggaaactactccttcatcccagacgccatgactgccactgagaaaatcctcttcctctcttccattattccctttgactgcctcctcacagttcgagcacttggagggctgctgaagttcctgggtcgaagaagaatcggggttgaactggaagactataatgtcagcgtccccatcctgggctttaagaaatttatgttgactcatctggtgaacatagatcaagacacttacagtgttctacagatttttaagagtgagtctcacccctcagtgtacaaagtggccagtggactgaaggaggggctcagcctctttggaatcctcaacagatgccactgtaagtggggagagaagctgctcag

SEQ ID NO: 2624 - DNA, 918 bp, Homo sapiens
  source 1..918: mol_type = genomic DNA
gcggtcggtcagcggggcgttctcccacctgtagcgactcagagcctccaagctcatggcctccttaggagcgaacccaaggaggacaccgcagggaccgagacctggggcggcctcctccggcttccccagcccggccccagtgccgggccccagggaggccgaggaggaggaagtcgaggaggaggaggagctggccgagatccatctgtgtgtgctgtggaattcaggatacttgggcattgcctactatgatactagtgactccactatccacttcatgccagatgccccagaccacgagagcctcaagcttctccagagagttctggatgagatcaatccccagtctgttgttacgagtgccaaacaggatgagaatatgactcgatttctgggaaagcttgcctcccaggagcacagagagcctaaaagacctgaaatcatatttttgccaagtgtggattttggtctggagataagcaaacaacgcctcctttctggaaactactccttcatcccagacgccatgactgccactgagaaaatcctcttcctctcttccattattccctttgactgcctcctcacacccccaggagatttaagatttaccccgattccactgctgatcccctcccaggttcgagcacttggagggctgctgaagttcctgggtcgaagaagaatcggggttgaactggaagactataatgtcagcgtccccatcctgggctttaagaaatttatgttgactcatctggtgaacatagatcaagacacttacagtgttctacagatttttaagagtgagtctcacccctcagtgtacaaagtggccagtggactgaaggaggggctcagcctctttggaatcctcaacagatgccactgtaagtggggagagaagctgctcag

SEQ ID NO: 2625 - DNA, 323 bp, Homo sapiens
  source 1..323: mol_type = genomic DNA
aaaatcctcttcctctcttccattattccctttgactgcctcctcacagttcgagcacttggagggctgctgaagttcctgggtcgaagaagaatcggggttgaactggaagactataatgtcagcgtccccatcctgggctttaagaaatttatgttgactcatctggtgaacatagatcaagacacttacagtgttctacagatttttaagagtgagtctcacccctcagtgtacaaagtggccagtggactgaaggaggggctcagcctctttggaatcctcaacagatgccactgtaagtggggagagaagctgctcag

SEQ ID NO: 2626 - DNA, 944 bp, Homo sapiens
  source 1..944: mol_type = genomic DNA
cttttgcaggctcgtggcggtcggtcagcggggcgttctcccacctgtagcgactcagagcctccaagctcatggcctccttaggagcgaacccaaggaggacaccgcagggaccgagacctggggcggcctcctccggcttccccagcccggccccagtgccgggccccagggaggccgaggaggaggaagtcgaggaggaggaggagctggccgagatccatctgtgtgtgctgtggaattcaggatacttgggcattgcctactatgatactagtgactccactatccacttcatgccagatgccccagaccacgagagcctcaagcttctccagagagttctggatgagatcaatccccagtctgttgttacgagtgccaaacaggatgagaatatgactcgatttctgggaaagcttgcctcccaggagcacagagagcctaaaagacctgaaatcatatttttgccaagtgtggattttggtctggagataagcaaacaacgcctcctttctggaaactactccttcatcccagacgccatgactgccactgagaaaatcctcttcctctcttccattattccctttgactgcctcctcacagttcgagcacttggagggctgctgaagttcctgggtcgaagaagaatcggggttgaactggaagactataatgtcagcgtccccatcctgggctttaagaaatttatgttgactcatctggtgaacatagatcaagacacttacaggctggagtgcaatggtgcgatctcggctcaatgcaacctctgcctcctgggttcaagcgattctcctgcctcagcctcctgagtaactgggattacaggcacctgccaccacgcccagctaatttttgtatttttagtagagacggggtttcaccatgttgcccaggctggtcttgaactcctgacctca

SEQ ID NO: 2627 - DNA, 4328 bp, Homo sapiens
  source 1..4328: mol_type = genomic DNA
ggcgaggcgcctgttgattggccactggggcccgggttcctccggcggagcgcgcctccccccagatttcccgccagcaggagccgcgcggtagatgcggtgcttttaggagctccgtccgacagaacggttgggccttgccggctgtcggtatgtcgcgacagagcaccctgtacagcttcttccccaagtctccggcgctgagtgatgccaacaaggcctcggccagggcctcacgcgaaggcggccgtgccgccgctgcccccggggcctctccttccccaggcggggatgcggcctggagcgaggctgggcctgggcccaggcccttggcgcgctccgcgtcaccgcccaaggcgaagaacctcaacggagggctgcggagatcggtagcgcctgctgcccccaccagttgtgacttctcaccaggagatttggtttgggccaagatggagggttacccctggtggccttgtctggtttacaaccacccctttgatggaacattcatccgcgagaaagggaaatcagtccgtgttcatgtacagttttttgatgacagcccaacaaggggctgggttagcaaaaggcttttaaagccatatacaggttcaaaatcaaaggaagcccagaagggaggtcatttttacagtgcaaagcctgaaatactgagagcaatgcaacgtgcagatgaagccttaaataaagacaagattaagaggcttgaattggcagtttgtgatgagccctcagagccagaagaggaagaagagatggaggtaggcacaacttacgtaacagataagagtgaagaagataatgaaattgagagtgaagaggaagtacagcctaagacacaaggatctaggcgaagtagccgccaaataaaaaaacgaagggtcatatcagattctgagagtgacattggtggctctgatgtggaatttaagccagacactaaggaggaaggaagcagtgatgaaataagcagtggagtgggggatagtgagagtgaaggcctgaacagccctgtcaaagttgctcgaaagcggaagagaatggtgactggaaatggctctcttaaaaggaaaagctctaggaaggaaacgccctcagccaccaaacaagcaactagcatttcatcagaaaccaagaatactttgagagctttctctgcccctcaaaattctgaatcccaagcccacgttagtggaggtggtgatgacagtagtcgccctactgtttggtatcatgaaactttagaatggcttaaggaggaaaagagaagagatgagcacaggaggaggcctgatcaccccgattttgatgcatctacactctatgtgcctgaggatttcctcaattcttgtactcctgggatgaggaagtggtggcagattaagtctcagaactttgatcttgtcatctgttacaaggtggggaaattttatgagctgtaccacatggatgctcttattggagtcagtgaactggggctggtattcatgaaaggcaactgggcccattctggctttcctgaaattgcatttggccgttattcagattccctggtgcagaagggctataaagtagcacgagtggaacagactgagactccagaaatgatggaggcacgatgtagaaagatggcacatatatccaagtatgatagagtggtgaggagggagatctgtaggatcattaccaagggtacacagacttacagtgtgctggaaggtgatccctctgagaactacagtaagtatcttcttagcctcaaagaaaaagaggaagattcttctggccatactcgtgcatatggtgtgtgctttgttgatacttcactgggaaagtttttcataggtcagttttcagatgatcgccattgttcgagatttaggactctagtggcacactatcccccagtacaagttttatttgaaaaaggaaatctctcaaaggaaactaaaacaattctaaagagttcattgtcctgttctcttcaggaaggtctgatacccggctcccagttttgggatgcatccaaaactttgagaactctccttgaggaagaatattttagggaaaagctaagtgatggcattggggtgatgttaccccaggtgcttaaaggtatgacttcagagtctgattccattgggttgacaccaggagagaaaagtgaattggccctctctgctctaggtggttgtgtcttctacctcaaaaaatgccttattgatcaggagcttttatcaatggctaattttgaagaatatattcccttggattctgacacagtcagcactacaagatctggtgctatcttcaccaaagcctatcaacgaatggtgctagatgcagtgacattaaacaacttggagatttttctgaatggaacaaatggttctactgaaggaaccctactagagagggttgatacttgccatactccttttggtaagcggctcctaaagcaatggctttgtgccccactctgtaaccattatgctattaatgatcgtctagatgccatagaagacctcatggttgtgcctgacaaaatctccgaagttgtagagcttctaaagaagcttccagatcttgagaggctactcagtaaaattcataatgttgggtctcccctgaagagtcagaaccacccagacagcagggctataatgtatgaagaaactacatacagcaagaagaagattattgattttctttctgctctggaaggattcaaagtaatgtgtaaaattatagggatcatggaagaagttgctgatggttttaagtctaaaatccttaagcaggtcatctctctgcagacaaaaaatcctgaaggtcgttttcctgatttgactgtagaattgaaccgatgggatacagcctttgaccatgaaaaggctcgaaagactggacttattactcccaaagcaggctttgactctgattatgaccaagctcttgctgacataagagaaaatgaacagagcctcctggaatacctagagaaacagcgcaacagaattggctgtaggaccatagtctattgggggattggtaggaaccgttaccagctggaaattcctgagaatttcaccactcgcaatttgccagaagaatacgagttgaaatctaccaagaagggctgtaaacgatactggaccaaaactattgaaaagaagttggctaatctcataaatgctgaagaacggagggatgtatcattgaaggactgcatgcggcgactgttctataactttgataaaaattacaaggactggcagtctgctgtagagtgtatcgcagtgttggatgttttactgtgcctggctaactatagtcgagggggtgatggtcctatgtgtcgcccagtaattctgttgccggaagataccccccccttcttagagcttaaaggatcacgccatccttgcattacgaagactttttttggagatgattttattcctaatgacattctaataggctgtgaggaagaggagcaggaaaatggcaaagcctattgtgtgcttgttactggaccaaatatggggggcaagtctacgcttatgagacaggctggcttattagctgtaatggcccagatgggttgttacgtccctgctgaagtgtgcaggctcacaccaattgatagagtgtttactagacttggtgcctcagacagaataatgtcaggtgaaagtacattttttgttgaattaagtgaaactgccagcatactcatgcatgcaacagcacattctctggtgcttgtggatgaattaggaagaggtactgcaacatttgatgggacggcaatagcaaatgcagttgttaaagaacttgctgagactataaaatgtcgtacattattttcaactcactaccattcattagtagaagattattctcaaaatgttgctgtgcgcctaggacatatggcatgcatggtagaaaatgaatgtgaagaccccagccaggagactattacgttcctctataaattcattaagggagcttgtcctaaaagctatggctttaatgcagcaaggcttgctaatctcccagaggaagttattcaaaagggacatagaaaagcaagagaatttgagaagatgaatcagtcactacgattatttcgggaagtttgcctggctagtgaaaggtcaactgtagatgctgaagctgtccataaattgctgactttgattaaggaattatagactgactacattggaagctttgagttgacttctgacaaaggtggtaaattcagacaacattatgatctaataaactttattttttaaaaatga

SEQ ID NO: 2628 - DNA, 908 bp, Homo sapiens
  source 1..908: mol_type = genomic DNA
ggcgaggcgcctgttgattggccactggggcccgggttcctccggcggagcgcgcctccccccagatttcccgccagcaggagccgcgcggtagatgcggtgcttttaggagctccgtccgacagaacggttgggccttgccggctgtcggtatgtcgcgacagagcaccctgtacagcttcttccccaagtctccggcgctgagtgatgccaacaaggcctcggccagggcctcacgcgaaggcggccgtgccgccgctgcccccggggcctctccttccccaggcggggatgcggcctggagcgaggctgggcctgggcccaggcccttggcgcgctccgcgtcaccgcccaaggcgaagaacctcaacggagggctgcggagatcggtagcgcctgctgcccccaccagttgtgacttctcaccaggagatttggtttgggccaagatggagggttacccctggtggccttgtctggtttacaaccacccctttgatggaacattcatccgcgagaaagggaaatcagtccgtgttcatgtacagttttttgatgacagcccaacaaggggctgggttagcaaaaggcttttaaagccatatacaggttcaaaatcaaaggaagcccagaagggaggtcatttttacagtgcaaagcctgaaatactgagagcaatgcaacgtgcagatgaagccttaaataaagacaagattaagaggcttgaattggcagtttgtgatgagccctcagagccagaagaggaagaagagatggaggtaggcacaacttacgtaacagataagagtgaagaagataatgaaattgagagtgaagaggaagtacagcctaagacacaaggatctaggcgaagtagccgccaaataaaaaaacgaaggaaaaagagg

SEQ ID NO: 2629 - DNA, 4055 bp, Homo sapiens
  source 1..4055: mol_type = genomic DNA
gagtccggtggtgtggggtgcgaaaggaggttcctcggccggcgcggagatagtgagttggggctccagtagtcgatcgaggtagacacttagaggtagttaagagccgcggtcgccgagacgccttggggacggtgggccttcggcctagttgtgacttctcaccaggagatttggtttgggccaagatggagggttacccctggtggccttgtctggtttacaaccacccctttgatggaacattcatccgcgagaaagggaaatcagtccgtgttcatgtacagttttttgatgacagcccaacaaggggctgggttagcaaaaggcttttaaagccatatacaggttcaaaatcaaaggaagcccagaagggaggtcatttttacagtgcaaagcctgaaatactgagagcaatgcaacgtgcagatgaagccttaaataaagacaagattaagaggcttgaattggcagtttgtgatgagccctcagagccagaagaggaagaagagatggaggcacaacttacgtaacagataagagtgaagaagataatgaaattgagagtgaagaggaagtacagcctaagacacaaggatctaggcgaagtagccgccaaataaaaaaacgaagggtcatatcagattctgagagtgacattggtggctctgatgtggaatttaagccagacactaaggaggaaggaagcagtgatgaaataagcagtggagtgggggatagtgagagtgaaggcctgaacagccctgtcaaagttgctcgaaagcggaagagaatggtgactggaaatggctctcttaaaaggaaaagctctaggaaggaaacgccctcagccaccaaacaagcaactagcatttcatcagaaaccaagaatactttgagagctttctctgcccctcaaaattctgaatcccaagcccacgttagtggaggtggtgatgacagtagtcgccctactgtttggtatcatgaaactttagaatggcttaaggaggaaaagagaagagatgagcacaggaggaggcctgatcaccccgattttgatgcatctacactctatgtgcctgaggatttcctcaattcttgtactcctgggatgaggaagtggtggcagattaagtctcagaactttgatcttgtcatctgttacaaggtggggaaattttatgagctgtaccacatggatgctcttattggagtcagtgaactggggctggtattcatgaaaggcaactgggcccattctggctttcctgaaattgcatttggccgttattcagattccctggtgcagaagggctataaagtagcacgagtggaacagactgagactccagaaatgatggaggcacgatgtagaaagatggcacatatatccaagtatgatagagtggtgaggagggagatctgtaggatcattaccaagggtacacagacttacagtgtgctggaaggtgatccctctgagaactacagtaagtatcttcttagcctcaaagaaaaagaggaagattcttctggccatactcgtgcatatggtgtgtgctttgttgatacttcactgggaaagtttttcataggtcagttttcagatgatcgccattgttcgagatttaggactctagtggcacactatcccccagtacaagttttatttgaaaaaggaaatctctcaaaggaaactaaaacaattctaaagagttcattgtcctgttctcttcaggaaggtctgatacccggctcccagttttgggatgcatccaaaactttgagaactctccttgaggaagaatattttagggaaaagctaagtgatggcattggggtgatgttaccccaggtgcttaaaggtatgacttcagagtctgattccattgggttgacaccaggagagaaaagtgaattggccctctctgctctaggtggttgtgtcttctacctcaaaaaatgccttattgatcaggagcttttatcaatggctaattttgaagaatatattcccttggattctgacacagtcagcactacaagatctggtgctatcttcaccaaagcctatcaacgaatggtgctagatgcagtgacattaaacaacttggagatttttctgaatggaacaaatggttctactgaaggaaccctactagagagggttgatacttgccatactccttttggtaagcggctcctaaagcaatggctttgtgccccactctgtaaccattatgctattaatgatcgtctagatgccatagaagacctcatggttgtgcctgacaaaatctccgaagttgtagagcttctaaagaagcttccagatcttgagaggctactcagtaaaattcataatgttgggtctcccctgaagagtcagaaccacccagacagcagggctataatgtatgaagaaactacatacagcaagaagaagattattgattttctttctgctctggaaggattcaaagtaatgtgtaaaattatagggatcatggaagaagttgctgatggttttaagtctaaaatccttaagcaggtcatctctctgcagacaaaaaatcctgaaggtcgttttcctgatttgactgtagaattgaaccgatgggatacagcctttgaccatgaaaaggctcgaaagactggacttattactcccaaagcaggctttgactctgattatgaccaagctcttgctgacataagagaaaatgaacagagcctcctggaatacctagagaaacagcgcaacagaattggctgtaggaccatagtctattgggggattggtaggaaccgttaccagctggaaattcctgagaatttcaccactcgcaatttgccagaagaatacgagttgaaatctaccaagaagggctgtaaacgatactggaccaaaactattgaaaagaagttggctaatctcataaatgctgaagaacggagggatgtatcattgaaggactgcatgcggcgactgttctataactttgataaaaattacaaggactggcagtctgctgtagagtgtatcgcagtgttggatgttttactgtgcctggctaactatagtcgagggggtgatggtcctatgtgtcgcccagtaattctgttgccggaagataccccccccttcttagagcttaaaggatcacgccatccttgcattacgaagactttttttggagatgattttattcctaatgacattctaataggctgtgaggaagaggagcaggaaaatggcaaagcctattgtgtgcttgttactggaccaaatatggggggcaagtctacgcttatgagacaggctggcttattagctgtaatggcccagatgggttgttacgtccctgctgaagtgtgcaggctcacaccaattgatagagtgtttactagacttggtgcctcagacagaataatgtcaggtgaaagtacattttttgttgaattaagtgaaactgccagcatactcatgcatgcaacagcacattctctggtgcttgtggatgaattaggaagaggtactgcaacatttgatgggacggcaatagcaaatgcagttgttaaagaacttgctgagactataaaatgtcgtacattattttcaactcactaccattcattagtagaagattattctcaaaatgttgctgtgcgcctaggacatatggcatgcatggtagaaaatgaatgtgaagaccccagccaggagactattacgttcctctataaattcattaagggagcttgtcctaaaagctatggctttaatgcagcaaggcttgctaatctcccagaggaagttattcaaaagggacatagaaaagcaagagaatttgagaagatgaatcagtcactacgattatttcgggaagtttgcctggctagtgaaaggtcaactgtagatgctgaagctgtccataaattgctgactttgattaaggaattatagactgactacattggaagctttgagttgacttctgacaaaggtggtaaattcagacaacattatgatctaataaactttatttttt

SEQ ID NO: 2630 - DNA, 3829 bp, Homo sapiens
  source 1..3829: mol_type = genomic DNA
gcttttaggagctccgtccgacagaacggttgggccttgccggctgtcggtatgtcgcgacagagcaccctgtacagcttcttccccaagtctccggcgctgagtgatgccaacaaggcctcggccagggcctcacgcgaaggcggccgtgccgccgctgcccccggggcctctccttccccaggcggggatgcggcctggagcgaggctgggcctgggcccaggcccttggcgcgctccgcgtcaccgcccaaggcgaagaacctcaacggagggctgcggagatcggtaggcacaacttacgtaacagataagagtgaagaagataatgaaattgagagtgaagaggaagtacagcctaagacacaaggatctaggcgaagtagccgccaaataaaaaaacgaagggtcatatcagattctgagagtgacattggtggctctgatgtggaatttaagccagacactaaggaggaaggaagcagtgatgaaataagcagtggagtgggggatagtgagagtgaaggcctgaacagccctgtcaaagttgctcgaaagcggaagagaatggtgactggaaatggctctcttaaaaggaaaagctctaggaaggaaacgccctcagccaccaaacaagcaactagcatttcatcagaaaccaagaatactttgagagctttctctgcccctcaaaattctgaatcccaagcccacgttagtggaggtggtgatgacagtagtcgccctactgtttggtatcatgaaactttagaatggcttaaggaggaaaagagaagagatgagcacaggaggaggcctgatcaccccgattttgatgcatctacactctatgtgcctgaggatttcctcaattcttgtactcctgggatgaggaagtggtggcagattaagtctcagaactttgatcttgtcatctgttacaaggtggggaaattttatgagctgtaccacatggatgctcttattggagtcagtgaactggggctggtattcatgaaaggcaactgggcccattctggctttcctgaaattgcatttggccgttattcagattccctggtgcagaagggctataaagtagcacgagtggaacagactgagactccagaaatgatggaggcacgatgtagaaagatggcacatatatccaagtatgatagagtggtgaggagggagatctgtaggatcattaccaagggtacacagacttacagtgtgctggaaggtgatccctctgagaactacagtaagtatcttcttagcctcaaagaaaaagaggaagattcttctggccatactcgtgcatatggtgtgtgctttgttgatacttcactgggaaagtttttcataggtcagttttcagatgatcgccattgttcgagatttaggactctagtggcacactatcccccagtacaagttttatttgaaaaaggaaatctctcaaaggaaactaaaacaattctaaagagttcattgtcctgttctcttcaggaaggtctgatacccggctcccagttttgggatgcatccaaaactttgagaactctccttgaggaagaatattttagggaaaagctaagtgatggcattggggtgatgttaccccaggtgcttaaaggtatgacttcagagtctgattccattgggttgacaccaggagagaaaagtgaattggccctctctgctctaggtggttgtgtcttctacctcaaaaaatgccttattgatcaggagcttttatcaatggctaattttgaagaatatattcccttggattctgacacagtcagcactacaagatctggtgctatcttcaccaaagcctatcaacgaatggtgctagatgcagtgacattaaacaacttggagatttttctgaatggaacaaatggttctactgaaggaaccctactagagagggttgatacttgccatactccttttggtaagcggctcctaaagcaatggctttgtgccccactctgtaaccattatgctattaatgatcgtctagatgccatagaagacctcatggttgtgcctgacaaaatctccgaagttgtagagcttctaaagaagcttccagatcttgagaggctactcagtaaaattcataatgttgggtctcccctgaagagtcagaaccacccagacagcagggctataatgtatgaagaaactacatacagcaagaagaagattattgattttctttctgctctggaaggattcaaagtaatgtgtaaaattatagggatcatggaagaagttgctgatggttttaagtctaaaatccttaagcaggtcatctctctgcagacaaaaaatcctgaaggtcgttttcctgatttgactgtagaattgaaccgatgggatacagcctttgaccatgaaaaggctcgaaagactggacttattactcccaaagcaggctttgactctgattatgaccaagctcttgctgacataagagaaaatgaacagagcctcctggaatacctagagaaacagcgcaacagaattggctgtaggaccatagtctattgggggattggtaggaaccgttaccagctggaaattcctgagaatttcaccactcgcaatttgccagaagaatacgagttgaaatctaccaagaagggctgtaaacgatactggaccaaaactattgaaaagaagttggctaatctcataaatgctgaagaacggagggatgtatcattgaaggactgcatgcggcgactgttctataactttgataaaaattacaaggactggcagtctgctgtagagtgtatcgcagtgttggatgttttactgtgcctggctaactatagtcgagggggtgatggtcctatgtgtcgcccagtaattctgttgccggaagataccccccccttcttagagcttaaaggatcacgccatccttgcattacgaagactttttttggagatgattttattcctaatgacattctaataggctgtgaggaagaggagcaggaaaatggcaaagcctattgtgtgcttgttactggaccaaatatggggggcaagtctacgcttatgagacaggctggcttattagctgtaatggcccagatgggttgttacgtccctgctgaagtgtgcaggctcacaccaattgatagagtgtttactagacttggtgcctcagacagaataatgtcaggtgaaagtacattttttgttgaattaagtgaaactgccagcatactcatgcatgcaacagcacattctctggtgcttgtggatgaattaggaagaggtactgcaacatttgatgggacggcaatagcaaatgcagttgttaaagaacttgctgagactataaaatgtcgtacattattttcaactcactaccattcattagtagaagattattctcaaaatgttgctgtgcgcctaggacatatggcatgcatggtagaaaatgaatgtgaagaccccagccaggagactattacgttcctctataaattcattaagggagcttgtcctaaaagctatggctttaatgcagcaaggcttgctaatctcccagaggaagttattcaaaagggacatagaaaagcaagagaatttgagaagatgaatcagtcactacgattatttcgggaagtttgcctggctagtgaaaggtcaactgtagatgctgaagctgtccataaattgctgactttgattaaggaattatagactgactacattggaagctttgagttgacttctgacaaaggtggtaaattcagacaacattatgatctaataaactttatttttt

SEQ ID NO: 2631 - DNA, 4308 bp, Homo sapiens
  source 1..4308: mol_type = genomic DNA
ggcgaggcgcctgttgattggccactggggcccgggttcctccggcggagcgcgcctccccccagatttcccgccagcaggagccgcgcggtagatgcggtgcttttaggagctccgtccgacagaacggttgggccttgccggctgtcggtatgtcgcgacagagcaccctgtacagcttcttccccaagtctccggcgctgagtgatgccaacaaggcctcggccagggcctcacgcgaaggcggccgtgccgccgctgcccccggggcctctccttccccaggcggggatgcggcctggagcgaggctgggcctgggcccaggcccttggcgcgctccgcgtcaccgcccaaggcgaagaacctcaacggagggctgcggagatcggtagcgcctgctgcccccaccagttgtgacttctcaccaggagatttggtttgggccaagatggagggttacccctggtggccttgtctggtttacaaccacccctttgatggaacattcatccgcgagaaagggaaatcagtccgtgttcatgtacagttttttgatgacagcccaacaaggggctgggttagcaaaaggcttttaaagccatatacaggttcaaaatcaaaggaagcccagaagggaggtcatttttacagtgcaaagcctgaaatactgagagcaatgcaacgtgcagatgaagccttaaataaagacaagattaagaggcttgaattggcagtttgtgatgagccctcagagccagaagaggaagaagagatggaggtaggcacaacttacgtaacagataagagtgaagaagataatgaaattgagagtgaagaggaagtacagcctaagacacaaggatctaggcgaagtagccgccaaataaaaaaacgaagggtcatatcagattctgagagtgacattggtggctctgatgtggaatttaagccagacactaaggaggaaggaagcagtgatgaaataagcagtggagtgggggatagtgagagtgaaggcctgaacagccctgtcaaagttgctcgaaagcggaagagaatggtgactggaaatggctctcttaaaaggaaaagctctaggaaggaaacgccctcagccaccaaacaagcaactagcatttcatcagaaaccaagaatactttgagagctttctctgcccctcaaaattctgaatcccaagcccacgttagtggaggtggtgatgacagtagtcgccctactgtttggtatcatgaaactttagaatggcttaaggaggaaaagagaagagatgagcacaggaggaggcctgatcaccccgattttgatgcatctacactctatgtgcctgaggatttcctcaattcttgtactcctgggatgaggaagtggtggcagattaagtctcagaactttgatcttgtcatctgttacaaggtggggaaattttatgagctgtaccacatggatgctcttattggagtcagtgaactggggctggtattcatgaaaggcaactgggcccattctggctttcctgaaattgcatttggccgttattcagattccctggtgcagaagggctataaagtagcacgagtggaacagactgagactccagaaatgatggaggcacgatgtagaaagatggcacatatatccaagtatgatagagtggtgaggagggagatctgtaggatcattaccaagggtacacagacttacagtgtgctggaaggtgatccctctgagaactacagtaagtatcttcttagcctcaaagaaaaagaggaagattcttctggccatactcgtgcatatggtgtgtgctttgttgatacttcactgggaaagtttttcataggtcagttttcagatgatcgccattgttcgagatttaggactctagtggcacactatcccccagtacaagttttatttgaaaaaggaaatctctcaaaggaaactaaaacaattctaaagagttcattgtcctgttctcttcaggaaggtctgatacccggctcccagttttgggatgcatccaaaactttgagaactctccttgaggaagaatattttagggaaaagctaagtgatggcattggggtgatgttaccccaggtgcttaaaggtatgacttcagagtctgattccattgggttgacaccaggagagaaaagtgaattggccctctctgctctaggtggttgtgtcttctacctcaaaaaatgccttattgatcaggagcttttatcaatggctaattttgaagaatatattcccttggattctgacacagtcagcactacaagatctggtgctatcttcaccaaagcctatcaacgaatggtgctagatgcagtgacattaaacaacttggagatttttctgaatggaacaaatggttctactgaaggaaccctactagagagggttgatacttgccatactccttttggtaagcggctcctaaagcaatggctttgtgccccactctgtaaccattatgctattaatgatcgtctagatgccatagaagacctcatggttgtgcctgacaaaatctccgaagttgtagagcttctaaagaagcttccagatcttgagaggctactcagtaaaattcataatgttgggtctcccctgaagagtcagaaccacccagacagcagggctataatgtatgaagaaactacatacagcaagaagaagattattgattttctttctgctctggaaggattcaaagtaatgtgtaaaattatagggatcatggaagaagttgctgatggttttaagtctaaaatccttaagcaggtcatctctctgcagacaaaaaatcctgaaggtcgttttcctgatttgactgtagaattgaaccgatgggatacagcctttgaccatgaaaaggctcgaaagactggacttattactcccaaagcaggctttgactctgattatgaccaagctcttgctgacataagagaaaatgaacagagcctcctggaatacctagagaaacagcgcaacagaattggctgtaggaccatagtctattgggggattggtaggaaccgttaccagctggaaattcctgagaatttcaccactcgcaatttgccagaagaatacgagttgaaatctaccaagaagggctgtaaacgatactggaccaaaactattgaaaagaagttggctaatctcataaatgctgaagaacggagggatgtatcattgaaggactgcatgcggcgactgttctataactttgataaaaattacaaggactggcagtctgctgtagagtgtatcgcagtgttggatgttttactgtgcctggctaactatagtcgagggggtgatggtcctatgtgtcgcccagtaattctgttgccggaagataccccccccttcttagagcttaaaggatcacgccatccttgcattacgaagactttttttggagatgattttattcctaatgacattctaataggctgtgaggaagaggagcaggaaaatggcaaaattgtgtgcttgttactggaccaaatatggggggcaagtctacgcatgagacaggctggcttattagctgtaatggcccagatgggttgttacgtccctgctgaagtgtgcaggctcacaccaattgatagagtgtttactagacttggtgcctcagacagaataatgtcaggtgaaagtacattttttgttgaattaagtgaaactgccagcatactcatgcatgcaacagcacattctctggtgcttgtggatgaattaggaagaggtactgcaacatttgatgggacggcaatagcaaatgcagttgttaaagaacttgctgagactataaaatgtcgtacattattttcaactcactaccatattagtagaagattattctcaaaatgttgctgtctaggacatatggcatgcatggtagaaaatgaatgtgaagaccccagccaggagactattacgttcctctataaattcattaagggagcttgtcctaaaagctatggctttaatgcagcaaggcttgctaatctcccagaggaagttattcaaaagggacatagaaaagcaagagaatttgagaagatgaatcagtcactacgattatttcgggaagtttgcctggctagtgaaaggtcaactgtagatgctgaagctgtccataaattgctgactttgattaaggaattatagactgactacattggaagctttgagttgacttctgacaaaggtggtaaattcagacaacattatgatctaataaactttatttttt

SEQ ID NO: 2632 - DNA, 3353 bp, Homo sapiens
  source 1..3353: mol_type = genomic DNA
ggcgaggcgcctgttgattggccactggggcccgggttcctccggcggagcgcgcctccccccagatttcccgccagcaggagccgcgcggtagatgcggtgcttttaggagctccgtccgacagaacggttgggccttgccggctgtcggtatgtcgcgacagagcaccctgtacagcttcttccccaagtctccggcgctgagtgatgccaacaaggcctcggccagggcctcacgcgaaggcggccgtgccgcctgcccccggggcctctccttccccaggcggggatgcggcctggagcgaggctgggcctggaggcccttggcgcgctccgcgtcaccgcccaaggcgaagaacctcaacggagggctgcggagatcggtagcgcctgctgcccccaccagttgtgacttctcaccaggagatttggtttgggccaagatggagggttacccctggtggccttgtctggtttacaaccacccctttgatggaacattcatccgcgagaaagggaaatcagtccgtgttcatgtacagttttttgatgacagcccaacaaggggctgggttagcaaaaggcttttaaagccatatacaggttcaaaatcaaaggaagcccagaagggaggtcatttttacagtgcaaagcctgaaatactgagagcaatgcaacgtgcagatgaagccttaaataaagacaagattaagaggcttgaattggcagtttgtgatgagccctcagagccagaagaggaagaagagatggaggtaggcacaacttacgtaacagataagagtgaagaagataatgaaattgagagtgaagaggaagtacagcctaagacacaaggatctaggcgaagtagccgccaaataaaaaaacgaagggtcatatcagattctgagagtgacattggtggctctgatgtggaatttaagccagacactaaggaggaaggaagcagtgatgaaataagcagtggagtgggggatagtgagagtgaaggcctgaacagccctgtcaaagttgctcgaaagcggaagagaatggtgactggaaatggctctcttaaaaggaaaagctctaggaaggaaacgccctcagccaccaaacaagcaactagcatttcatcagaaaccaagaatactttgagagctttctctgcccctcaaaattctgaatcccaagcccacgttagtggaggtggtgatgacagtagtcgccctactgtttggtatcatgaaactttagaatggcttaaggaggaaaagagaagagatgagcacaggaggaggcctgatcaccccgattttgatgcatctacactctatgtgcctgaggatttcctcaattcttgtactcctgggatgaggaagtggtggcagattaagtctcagaactttgatcttgtcatctgttacaaggtggggaaattttatgagctgtaccacatggatgctcttattggagtcagtgaactggggctggtattcatgaaaggcaactgggcccattctggctttcctgaaattgcatttggccgttattcagattccctggtgcagaagggctataaagtagcacgagtggaacagactgagactccagaaatgatggaggcacgatgtagaaagatggcacatatatccaagtatgatagagtggtgaggagggagatctgtaggatcattaccaagggtacacagacttacagtgtgctggaaggtgatccctctgagaactacagtaagtatcttcttagcctcaaagaaaaagaggaagattcttctggccatactcgtgcatatggtgtgtgctttgttgatacttcactgggaaagtttttcataggtcagttttcagatgatcgccattgttcgagatttaggactctagtggcacactatcccccagtacaagttttatttgaaaaaggaaatctctcaaaggaaactaaaacaattctaaagagttcattgtcctgttctcttcaggaaggtctgatacccggctcccagttttgggatgcatccaaaactttgagaactctccttgaggaagaatattttagggaaaagctaagtgatggcattggggtgatgttaccccaggtgcttaaaggtatgacttcagagtctgattccattgggttgacaccaggagagaaaagtgaattggccctctctgctctaggtggttgtgtcttctacctcaaaaaatgccttattgatcaggagcttttatcaatggctaattttgaagaatatattcccttggattctgacacagtcagcactacaagatctggtgctatcttcaccaaagcctatcaacgaatggtgctagatgcagtgacattaaacaacttggagatttttctgaatggaacaaatggttctactgaaggaaccctactagagagggttgatacttgccatactccttttggtaagcggctcctaaagcaatggctttgtgccccactctgtaaccattatgctattaatgatcgtctagatgccatagaagacctcatggttgtgcctgacaaaatctccgaagttgtagagcttctaaagaagcttccagatcttgagaggctactcagtaaaattcataatgttgggtctcccctgaagagtcagaaccacccagacagcagggctataatgtatgaagaaactacatacagcaagaagaagattattgattttctttctgctctggaaggattcaaagtaatgtgtaaaattatagggatcatggaagaagttgctgatggttttaagtctaaaatccttaagcaggtcatctctctgcagacaaaaaatcctgaaggtcgttttcctgatttgactgtagaattgaaccgatgggatacagcctttgaccatgaaaaggctcgaaagactggacttattactcccaaagcaggctttgactctgattatgaccaagctcttgctgacataagagaaaatgaacagagcctcctggaatacctagagaaacagcgcaacagaattggctgtaggaccatagtctattgggggattggtaggaaccgttaccagctggaaattcctgagaatttcaccactcgcaatttgccagaagaatacgagttgaaatctaccaagaagggctgtaaacgatactggaccaaaactattgaaaagaagttggctaatctcataaatgctgaagaacggagggatgtatcattgaaggactgcatgcggcgactgttctataactttgataaaaattacaaggactggcagtctgctgtagagtgtatcgcagtgttgggtaagactttgaacaagcttgttctcaggctttga

SEQ ID NO: 2633 - DNA, 1744 bp, Homo sapiens
  source 1..1744: mol_type = genomic DNA
cgctaattgcctattggcctgtgctgccggctcgcagcccgggtggacccgagccacgccccctggagtgcgccggaaagccgggcgcgctagagctcgcgggaggccatcatgaggaagccacgagcagccgtgggaagtggtcacaggaagcaggcagccagccaggaagggaggcagaagcatgctaagaacaacagtcaggccaagccttctgcctgtgatgcaggcctggccaggcagccggaagaggtggtattgcaggcctctgtctcctcataccatctattcagagacgtagctgaagtcacagccttccgagggagcctgctaagctggtacgaccaagagaaacgggacctaccatggagaagacgggcagaagatgagatggacctggacaggcgggcatatgctgtgtgggtctcagaggtcatgctgcagcagacccaggttgccactgtgatcaactactataccggatggatgcagaagtggcctacactgcaggacctggccagtgcttccctggaggaggtgaatcaactctgggctggcctgggctactattctcgtggccggcggctgcaggagggagctcggaaggtggtagaggagctagggggccacatgccacgtacagcagagaccctgcagcagctcctgcctggcgtggggcgctacacagctggggccattgcctctatcgcctttggccaggcaaccggtgtggtggatggcaacgtagcacgggtgctgtgccgtgtccgagccattggtgctgatcccagcagcacccttgtttcccagcagctctggggtctagcccagcagctggtggacccagcccggccaggagatttcaaccaagcagccatggagctaggggccacagtgtgtaccccacagcgcccactgtgcagccagtgccctgtggagagcctgtgccgggcacgccagagagtggagcaggaacagctcttagcctcagggagcctgtcgggcagtcctgacgtggaggagtgtgctcccaacactggacagtgccacctgtgcctgcctccctcggagccctgggaccagaccctgggagtggtcaacttccccagaaaggccagccgcaagccccccagggaggagagctctgccacctgtgttctggaacagcctggggcccttggggcccaaattctgctggtgcagaggcccaactcaggtctgctggcaggactgtgggagttcccgtccgtgacctgggagccctcagagcagcttcagcgcaaggccctgctgcaggaactacagcgttgggctgggcccctcccagccacgcacctccggcaccttggggaggttgtccacaccttctctcacatcaagctgacatatcaagtatatgggctggccttggaagggcagaccccagtgaccaccgtaccaccaggtgctcgctggctgacgcaggaggaatttcacaccgcagctgtttccaccgccatgaaaaaggttttccgtgtgtatcagggccaacagccagggacctgtatgggttccaaaaggtcccaggtgtcctctccgtgcagtcggaaaaagccccgcatgggccagcaagtcctggataatttctttcggtctcacatctccactgatgcacacagcctcaacagtgcagcccagtgacacctctgaaagcccccattccctgagaatcctgttgttagtaaagtgcttatttttgtagtta

SEQ ID NO: 2634 - DNA, 1776 bp, Homo sapiens
  source 1..1776: mol_type = genomic DNA
tcccgggtccggcgcggggaaggcagcctggcgcgcgctaattgcctattggcctgtgctgccggctcgcagcccgggtggacccgagccacgccccctggagtgcgccggaaagccgggcgcgctagagctcgcgggaggccatcatgaggaagccacgagcagccgtgggaagtggtcacaggaagcaggcagccagccaggaagggaggcagaagcatgctaagaacaacagtcaggccaagccttctgcctgtgatggcctggccaggcagccggaagaggtggtattgcaggcctctgtctcctcataccatctattcagagacgtagctgaagtcacagccttccgagggagcctgctaagctggtacgaccaagagaaacgggacctaccatggagaagacgggcagaagatgagatggacctggacaggcgggcatatgctgtgtgggtctcagaggtcatgctgcagcagacccaggttgccactgtgatcaactactataccggatggatgcagaagtggcctacactgcaggacctggccagtgcttccctggaggaggtgaatcaactctgggctggcctgggctactattctcgtggccggcggctgcaggagggagctcggaaggtggtagaggagctagggggccacatgccacgtacagcagagaccctgcagcagctcctgcctggcgtggggcgctacacagctggggccattgcctctatcgcctttggccaggcaaccggtgtggtggatggcaacgtagcacgggtgctgtgccgtgtccgagccattggtgctgatcccagcagcacccttgtttcccagcagctctggggtctagcccagcagctggtggacccagcccggccaggagatttcaaccaagcagccatggagctaggggccacagtgtgtaccccacagcgcccactgtgcagccagtgccctgtggagagcctgtgccgggcacgccagagagtggagcaggaacagctcttagcctcagggagcctgtcgggcagtcctgacgtggaggagtgtgctcccaacactggacagtgccacctgtgcctgcctccctcggagccctgggaccagaccctgggagtggtcaacttccccagaaaggccagccgcaagccccccagggaggagagctctgccacctgtgttctggaacagcctggggcccttggggcccaaattctgctggtgcagaggcccaactcaggtctgctggcaggactgtgggagttcccgtccgtgacctgggagccctcagagcagcttcagcgcaaggccctgctgcaggaactacagcgttgggctgggcccctcccagccacgcacctccggcaccttggggaggttgtccacaccttctctcacatcaagctgacatatcaagtatatgggctggccttggaagggcagaccccagtgaccaccgtaccaccaggtgctcgctggctgacgcaggaggaatttcacaccgcagctgtttccaccgccatgaaaaaggttttccgtgtgtatcagggccaacagccagggacctgtatgggttccaaaaggtcccaggtgtcctctccgtgcagtcggaaaaagccccgcatgggccagcaagtcctggataatttctttcggtctcacatctccactgatgcacacagcctcaacagtgcagcccagtgacacctctgaaagcccccattccctgagaatcctgttgttagtaaagtgcttatttttgtagtta

SEQ ID NO: 2635 - DNA, 1839 bp, Homo sapiens
  source 1..1839: mol_type = genomic DNA
ggagcctctagaactatgagcccgaggccttcccctctcccagagcgcagaggctttgaaggctacctctgggaagccgctcaccgtcggaagctgcgggagctgaaactgcgccatcgtcactgtcggcggccatgacaccgctcgtctcccgcctgagtcgtctgtgggccatcatgaggaagccacgagcagccgtgggaagtggtcacaggaagcaggcagccagccaggaagggaggcagaagcatgctaagaacaacagtcaggccaagccttctgcctgtgatgggatgattgctgagtgtcctggggccccagcaggcctggccaggcagccggaagaggtggtattgcaggcctctgtctcctcataccatctattcagagacgtagctgaagtcacagccttccgagggagcctgctaagctggtacgaccaagagaaacgggacctaccatggagaagacgggcagaagatgagatggacctggacaggcgggcatatgctgtgtgggtctcagaggtcatgctgcagcagacccaggttgccactgtgatcaactactataccggatggatgcagaagtggcctacactgcaggacctggccagtgcttccctggaggaggtgaatcaactctgggctggcctgggctactattctcgtggccggcggctgcaggagggagctcggaaggtggtagaggagctagggggccacatgccacgtacagcagagaccctgcagcagctcctgcctggcgtggggcgctacacagctggggccattgcctctatcgcctttggccaggcaaccggtgtggtggatggcaacgtagcacgggtgctgtgccgtgtccgagccattggtgctgatcccagcagcacccttgtttcccagcagctctggggtctagcccagcagctggtggacccagcccggccaggagatttcaaccaagcagccatggagctaggggccacagtgtgtaccccacagcgcccactgtgcagccagtgccctgtggagagcctgtgccgggcacgccagagagtggagcaggaacagctcttagcctcagggagcctgtcgggcagtcctgacgtggaggagtgtgctcccaacactggacagtgccacctgtgcctgcctccctcggagccctgggaccagaccctgggagtggtcaacttccccagaaaggccagccgcaagccccccagggaggagagctctgccacctgtgttctggaacagcctggggcccttggggcccaaattctgctggtgcagaggcccaactcaggtctgctggcaggactgtgggagttcccgtccgtgacctgggagccctcagagcagcttcagcgcaaggccctgctgcaggaactacagcgttgggctgggcccctcccagccacgcacctccggcaccttggggaggttgtccacaccttctctcacatcaagctgacatatcaagtatatgggctggccttggaagggcagaccccagtgaccaccgtaccaccaggtgctcgctggctgacgcaggaggaatttcacaccgcagctgtttccaccgccatgaaaaaggttttccgtgtgtatcagggccaacagccagggacctgtatgggttccaaaaggtcccaggtgtcctctccgtgcagtcggaaaaagccccgcatgggccagcaagtcctggataatttctttcggtctcacatctccactgatgcacacagcctcaacagtgcagcccagtgacacctctgaaagcccccattccctgagaatcctgttgttagtaaagtgcttatttttgtagtta

SEQ ID NO: 2636 - DNA, 1808 bp, Homo sapiens
  source 1..1808: mol_type = genomic DNA
tcccgggtccggcgcggggaaggcagcctggcgcgcgctaattgcctattggcctgtgctgccggctcgcagcccgggtggacccgagccacgccccctggagtgcgccggaaagccgggcgcgctagagctcgcgggaggccatcatgaggaagccacgagcagccgtgggaagtggtcacaggaagcaggcagccagccaggaagggaggcagaagcatgctaagaacaacagtcaggccaagccttctgcctgtgatgggatgattgctgagtgtcctggggccccagcaggcctggccaggcagccggaagaggtggtattgcaggcctctgtctcctcataccatctattcagagacgtagctgaagtcacagccttccgagggagcctgctaagctggtacgaccaagagaaacgggacctaccatggagaagacgggcagaagatgagatggacctggacaggcgggcatatgctgtgtgggtctcagaggtcatgctgcagcagacccaggttgccactgtgatcaactactataccggatggatgcagaagtggcctacactgcaggacctggccagtgcttccctggaggaggtgaatcaactctgggctggcctgggctactattctcgtggccggcggctgcaggagggagctcggaaggtggtagaggagctagggggccacatgccacgtacagcagagaccctgcagcagctcctgcctggcgtggggcgctacacagctggggccattgcctctatcgcctttggccaggcaaccggtgtggtggatggcaacgtagcacgggtgctgtgccgtgtccgagccattggtgctgatcccagcagcacccttgtttcccagcagctctggggtctagcccagcagctggtggacccagcccggccaggagatttcaaccaagcagccatggagctaggggccacagtgtgtaccccacagcgcccactgtgcagccagtgccctgtggagagcctgtgccgggcacgccagagagtggagcaggaacagctcttagcctcagggagcctgtcgggcagtcctgacgtggaggagtgtgctcccaacactggacagtgccacctgtgcctgcctccctcggagccctgggaccagaccctgggagtggtcaacttccccagaaaggccagccgcaagccccccagggaggagagctctgccacctgtgttctggaacagcctggggcccttggggcccaaattctgctggtgcagaggcccaactcaggtctgctggcaggactgtgggagttcccgtccgtgacctgggagccctcagagcagcttcagcgcaaggccctgctgcaggaactacagcgttgggctgggcccctcccagccacgcacctccggcaccttggggaggttgtccacaccttctctcacatcaagctgacatatcaagtatatgggctggccttggaagggcagaccccagtgaccaccgtaccaccaggtgctcgctggctgacgcaggaggaatttcacaccgcagctgtttccaccgccatgaaaaaggttttccgtgtgtatcagggccaacagccagggacctgtatgggttccaaaaggtcccaggtgtcctctccgtgcagtcggaaaaagccccgcatgggccagcaagtcctggataatttctttcggtctcacatctccactgatgcacacagcctcaacagtgcagcccagtgacacctctgaaagcccccattccctgagaatcctgttgttagtaaagtgcttatttttgtagtt

SEQ ID NO: 2637 - DNA, 1823 bp, Homo sapiens
  source 1..1823: mol_type = genomic DNA
ctccgtgttctgctgtcttcatcagcgtgggccgcgggtatctattgtgtacagtttacctggcactgactttggacacacaccaatcaacaagagaatcagtccttgcactcaagtcgttttttacagtcaaattcaggaagtacacactgatggaaagaatcaaagtaatgtaaaattacattaggccatcatgaggaagccacgagcagccgtgggaagtggtcacaggaagcaggcagccagccaggaagggaggcagaagcatgctaagaacaacagtcaggccaagccttctgcctgtgatggcctggccaggcagccggaagaggtggtattgcaggcctctgtctcctcataccatctattcagagacgtagctgaagtcacagccttccgagggagcctgctaagctggtacgaccaagagaaacgggacctaccatggagaagacgggcagaagatgagatggacctggacaggcgggcatatgctgtgtgggtctcagaggtcatgctgcagcagacccaggttgccactgtgatcaactactataccggatggatgcagaagtggcctacactgcaggacctggccagtgcttccctggaggaggtgaatcaactctgggctggcctgggctactattctcgtggccggcggctgcaggagggagctcggaaggtggtagaggagctagggggccacatgccacgtacagcagagaccctgcagcagctcctgcctggcgtggggcgctacacagctggggccattgcctctatcgcctttggccaggcaaccggtgtggtggatggcaacgtagcacgggtgctgtgccgtgtccgagccattggtgctgatcccagcagcacccttgtttcccagcagctctggggtctagcccagcagctggtggacccagcccggccaggagatttcaaccaagcagccatggagctaggggccacagtgtgtaccccacagcgcccactgtgcagccagtgccctgtggagagcctgtgccgggcacgccagagagtggagcaggaacagctcttagcctcagggagcctgtcgggcagtcctgacgtggaggagtgtgctcccaacactggacagtgccacctgtgcctgcctccctcggagccctgggaccagaccctgggagtggtcaacttccccagaaaggccagccgcaagccccccagggaggagagctctgccacctgtgttctggaacagcctggggcccttggggcccaaattctgctggtgcagaggcccaactcaggtctgctggcaggactgtgggagttcccgtccgtgacctgggagccctcagagcagcttcagcgcaaggccctgctgcaggaactacagcgttgggctgggcccctcccagccacgcacctccggcaccttggggaggttgtccacaccttctctcacatcaagctgacatatcaagtatatgggctggccttggaagggcagaccccagtgaccaccgtaccaccaggtgctcgctggctgacgcaggaggaatttcacaccgcagctgtttccaccgccatgaaaaaggttttccgtgtgtatcagggccaacagccagggacctgtatgggttccaaaaggtcccaggtgtcctctccgtgcagtcggaaaaagccccgcatgggccagcaagtcctggataatttctttcggtctcacatctccactgatgcacacagcctcaacagtgcagcccagtgacacctctgaaagcccccattccctgagaatcctgttgttagtaaagtgcttatttttgtagtta

SEQ ID NO: 2638 - DNA, 1809 bp, Homo sapiens
  source 1..1809: mol_type = genomic DNA
ggagcctctagaactatgagcccgaggccttcccctctcccagagcgcagaggctttgaaggctacctctgggaagccgctcaccgtcggaagctgcgggagctgaaactgcgccatcgtcactgtcggcggccatgacaccgctcgtctcccgcctgagtcgtctgtgggccatcatgaggaagccacgagcagccgtgggaagtggtcacaggaagcaggcagccagccaggaagggaggcagaagcatgctaagaacaacagtcaggccaagccttctgcctgtgatgcaggcctggccaggcagccggaagaggtggtattgcaggcctctgtctcctcataccatctattcagagacgtagctgaagtcacagccttccgagggagcctgctaagctggtacgaccaagagaaacgggacctaccatggagaagacgggcagaagatgagatggacctggacaggcgggcatatgctgtgtgggtctcagaggtcatgctgcagcagacccaggttgccactgtgatcaactactataccggatggatgcagaagtggcctacactgcaggacctggccagtgcttccctggaggaggtgaatcaactctgggctggcctgggctactattctcgtggccggcggctgcaggagggagctcggaaggtggtagaggagctagggggccacatgccacgtacagcagagaccctgcagcagctcctgcctggcgtggggcgctacacagctggggccattgcctctatcgcctttggccaggcaaccggtgtggtggatggcaacgtagcacgggtgctgtgccgtgtccgagccattggtgctgatcccagcagcacccttgtttcccagcagctctggggtctagcccagcagctggtggacccagcccggccaggagatttcaaccaagcagccatggagctaggggccacagtgtgtaccccacagcgcccactgtgcagccagtgccctgtggagagcctgtgccgggcacgccagagagtggagcaggaacagctcttagcctcagggagcctgtcgggcagtcctgacgtggaggagtgtgctcccaacactggacagtgccacctgtgcctgcctccctcggagccctgggaccagaccctgggagtggtcaacttccccagaaaggccagccgcaagccccccagggaggagagctctgccacctgtgttctggaacagcctggggcccttggggcccaaattctgctggtgcagaggcccaactcaggtctgctggcaggactgtgggagttcccgtccgtgacctgggagccctcagagcagcttcagcgcaaggccctgctgcaggaactacagcgttgggctgggcccctcccagccacgcacctccggcaccttggggaggttgtccacaccttctctcacatcaagctgacatatcaagtatatgggctggccttggaagggcagaccccagtgaccaccgtaccaccaggtgctcgctggctgacgcaggaggaatttcacaccgcagctgtttccaccgccatgaaaaaggttttccgtgtgtatcagggccaacagccagggacctgtatgggttccaaaaggtcccaggtgtcctctccgtgcagtcggaaaaagccccgcatgggccagcaagtcctggataatttctttcggtctcacatctccactgatgcacacagcctcaacagtgcagcccagtgacacctctgaaagcccccattccctgagaatcctgttgttagtaaagtgcttatttttgtagtta

SEQ ID NO: 2639 - DNA, 1888 bp, Homo sapiens
  source 1..1888: mol_type = genomic DNA
cagccggagccgcggtgtacaacggaacttgtagtctcctcgtggctagttcaggcggaaggagcagtcctctgaagcttgaggagcctctagaactatgagcccgaggccttcccctctcccagagcgcagaggctttgaaggctacctctgggaagccgctcaccgtcggaagctgcgggagctgaaactgcgccatcgtcactgtcggcggccatgacaccgctcgtctcccgcctgagtcgtctgtgggccatcatgaggaagccacgagcagccgtgggaagtggtcacaggaagcaggcagccagccaggaagggaggcagaagcatgctaagaacaacagtcaggccaagccttctgcctgtgatggcctggccaggcagccggaagaggtggtattgcaggcctctgtctcctcataccatctattcagagacgtagctgaagtcacagccttccgagggagcctgctaagctggtacgaccaagagaaacgggacctaccatggagaagacgggcagaagatgagatggacctggacaggcgggcatatgctgtgtgggtctcagaggtcatgctgcagcagacccaggttgccactgtgatcaactactataccggatggatgcagaagtggcctacactgcaggacctggccagtgcttccctggaggaggtgaatcaactctgggctggcctgggctactattctcgtggccggcggctgcaggagggagctcggaaggtggtagaggagctagggggccacatgccacgtacagcagagaccctgcagcagctcctgcctggcgtggggcgctacacagctggggccattgcctctatcgcctttggccaggcaaccggtgtggtggatggcaacgtagcacgggtgctgtgccgtgtccgagccattggtgctgatcccagcagcacccttgtttcccagcagctctggggtctagcccagcagctggtggacccagcccggccaggagatttcaaccaagcagccatggagctaggggccacagtgtgtaccccacagcgcccactgtgcagccagtgccctgtggagagcctgtgccgggcacgccagagagtggagcaggaacagctcttagcctcagggagcctgtcgggcagtcctgacgtggaggagtgtgctcccaacactggacagtgccacctgtgcctgcctccctcggagccctgggaccagaccctgggagtggtcaacttccccagaaaggccagccgcaagccccccagggaggagagctctgccacctgtgttctggaacagcctggggcccttggggcccaaattctgctggtgcagaggcccaactcaggtctgctggcaggactgtgggagttcccgtccgtgacctgggagccctcagagcagcttcagcgcaaggccctgctgcaggaactacagcgttgggctgggcccctcccagccacgcacctccggcaccttggggaggttgtccacaccttctctcacatcaagctgacatatcaagtatatgggctggccttggaagggcagaccccagtgaccaccgtaccaccaggtgctcgctggctgacgcaggaggaatttcacaccgcagctgtttccaccgccatgaaaaaggttttccgtgtgtatcagggccaacagccagggacctgtatgggttccaaaaggtcccaggtgtcctctccgtgcagtcggaaaaagccccgcatgggccagcaagtcctggataatttctttcggtctcacatctccactgatgcacacagcctcaacagtgcagcccagtgacacctctgaaagcccccattccctgagaatcctgttgttagtaaagtgcttatttttgtagtta

SEQ ID NO: 2640 - DNA, 904 bp, Homo sapiens
  source 1..904: mol_type = genomic DNA
ccgggcgcgctagagctcgcgggaggccatcatgaggaagccacgagcagccgtgggaagtggtcacaggaagcaggcagccagccaggaagggaggcagaagcatgctaagaacaacagtcaggccaagccttctgcctgtgatgggatgattgctgagtgtcctggggccccagcaggcctggccaggcagccggaagaggtggtattgcaggcctctgtctcctcataccatctattcagagacgtagctgaagtcacagccttccgagggagcctgctaagctggtacgaccaagagaaacgggacctaccatggagaagacgggcagaagatgagatggacctggacaggcgggcatatgctgtgtgggtctcagaggtcatgctgcagcagacccaggttgccactgtgatcaactactataccggatggatgcagaagtggcctacactgcaggacctggccagtgcttccctggaggaggtgaatcaactctgggctggcctgggctactattctcgtggccggcggctgcaggagggagctcggaaggtggtagaggagctagggggccacatgccacgtacagcagagaccctgcagcagctcctgcctggcgtggggcgctacacagctggggccattgcctctatcgcctttggccaggcaaccggtgtggtggatggcaacgtagcacgggtgctgtgccgtgtccgagccattggtgctgatcccagcagcacccttgtttcccagcagctctggggtctagcccagcagctggtggacccagcccggccaggagatttcaaccaagcagccatggagctaggggccacagtgtgtaccccacagcgcccactgtgcagccagtgccctgtggagagcctgtgccgggca

SEQ ID NO: 2641 - DNA, 1706 bp, Homo sapiens
  source 1..1706: mol_type = genomic DNA
ctccgtgttctgctgtcttcatcagcgtgggccgcgggccatcatgaggaagccacgagcagccgtgggaagtggtcacaggaagcaggcagccagccaggaagggaggcagaagcatgctaagaacaacagtcaggccaagccttctgcctgtgatgggatgattgctgagtgtcctggggccccagcaggcctggccaggcagccggaagaggtggtattgcaggcctctgtctcctcataccatctattcagagacgtagctgaagtcacagccttccgagggagcctgctaagctggtacgaccaagagaaacgggacctaccatggagaagacgggcagaagatgagatggacctggacaggcgggcatatgctgtgtgggtctcagaggtcatgctgcagcagacccaggttgccactgtgatcaactactataccggatggatgcagaagtggcctacactgcaggacctggccagtgcttccctggaggaggtgaatcaactctgggctggcctgggctactattctcgtggccggcggctgcaggagggagctcggaaggtggtagaggagctagggggccacatgccacgtacagcagagaccctgcagcagctcctgcctggcgtggggcgctacacagctggggccattgcctctatcgcctttggccaggcaaccggtgtggtggatggcaacgtagcacgggtgctgtgccgtgtccgagccattggtgctgatcccagcagcacccttgtttcccagcagctctggggtctagcccagcagctggtggacccagcccggccaggagatttcaaccaagcagccatggagctaggggccacagtgtgtaccccacagcgcccactgtgcagccagtgccctgtggagagcctgtgccgggcacgccagagagtggagcaggaacagctcttagcctcagggagcctgtcgggcagtcctgacgtggaggagtgtgctcccaacactggacagtgccacctgtgcctgcctccctcggagccctgggaccagaccctgggagtggtcaacttccccagaaaggccagccgcaagccccccagggaggagagctctgccacctgtgttctggaacagcctggggcccttggggcccaaattctgctggtgcagaggcccaactcaggtctgctggcaggactgtgggagttcccgtccgtgacctgggagccctcagagcagcttcagcgcaaggccctgctgcaggaactacagcgttgggctgggcccctcccagccacgcacctccggcaccttggggaggttgtccacaccttctctcacatcaagctgacatatcaagtatatgggctggccttggaagggcagaccccagtgaccaccgtaccaccaggtgctcgctggctgacgcaggaggaatttcacaccgcagctgtttccaccgccatgaaaaaggttttccgtgtgtatcagggccaacagccagggacctgtatgggttccaaaaggtcccaggtgtcctctccgtgcagtcggaaaaagccccgcatgggccagcaagtcctggataatttctttcggtctcacatctccactgatgcacacagcctcaacagtgcagcccagtgacacctctgaaagcccccattccctgagaatcctgttgttagtaaagtgcttatttttgtagtta

SEQ ID NO: 2642 - DNA, 1929 bp, Homo sapiens
  source 1..1929: mol_type = genomic DNA
cagccggagccgcggtgtacaacggaacttgtagtctcctcgtggctagttcaggcggaaggagcagtcctctgaagcttgaggagcctctagaactatgagcccgaggccttcccctctcccagagcgcagaggctttgaaggctacctctgggaagccgctcaccgtcggaagctgcgggagctgaaactgcgccatcgtcactgtcggcggccatgacaccgctcgtctcccgcctgagtcgtctgtgggccatcatgaggaagccacgagcagccgtgggaagtggtcacaggaagcaggcagccagccaggaagggaggcagaagcatgctaagaacaacagtcaggccaagccttctgcctgtgatgcctgtgcagggatgattgctgagtgtcctggggccccagcaggcctggccaggcagccggaagaggtggtattgcaggcctctgtctcctcataccatctattcagagacgtagctgaagtcacagccttccgagggagcctgctaagctggtacgaccaagagaaacgggacctaccatggagaagacgggcagaagatgagatggacctggacaggcgggcatatgctgtgtgggtctcagaggtcatgctgcagcagacccaggttgccactgtgatcaactactataccggatggatgcagaagtggcctacactgcaggacctggccagtgcttccctggaggaggtgaatcaactctgggctggcctgggctactattctcgtggccggcggctgcaggagggagctcggaaggtggtagaggagctagggggccacatgccacgtacagcagagaccctgcagcagctcctgcctggcgtggggcgctacacagctggggccattgcctctatcgcctttggccaggcaaccggtgtggtggatggcaacgtagcacgggtgctgtgccgtgtccgagccattggtgctgatcccagcagcacccttgtttcccagcagctctggggtctagcccagcagctggtggacccagcccggccaggagatttcaaccaagcagccatggagctaggggccacagtgtgtaccccacagcgcccactgtgcagccagtgccctgtggagagcctgtgccgggcacgccagagagtggagcaggaacagctcttagcctcagggagcctgtcgggcagtcctgacgtggaggagtgtgctcccaacactggacagtgccacctgtgcctgcctccctcggagccctgggaccagaccctgggagtggtcaacttccccagaaaggccagccgcaagccccccagggaggagagctctgccacctgtgttctggaacagcctggggcccttggggcccaaattctgctggtgcagaggcccaactcaggtctgctggcaggactgtgggagttcccgtccgtgacctgggagccctcagagcagcttcagcgcaaggccctgctgcaggaactacagcgttgggctgggcccctcccagccacgcacctccggcaccttggggaggttgtccacaccttctctcacatcaagctgacatatcaagtatatgggctggccttggaagggcagaccccagtgaccaccgtaccaccaggtgctcgctggctgacgcaggaggaatttcacaccgcagctgtttccaccgccatgaaaaaggttttccgtgtgtatcagggccaacagccagggacctgtatgggttccaaaaggtcccaggtgtcctctccgtgcagtcggaaaaagccccgcatgggccagcaagtcctggataatttctttcggtctcacatctccactgatgcacacagcctcaacagtgcagcccagtgacacctctgaaagcccccattccctgagaatcctgttgttagtaaagtgcttatttttgtagtt

SEQ ID NO: 2643 - DNA, 1692 bp, Homo sapiens
  source 1..1692: mol_type = genomic DNA
cgcggcgggaacgcggggcctccgtgttctgctgtcttcatcagcgtgggccgcgggccatcatgaggaagccacgagcagccgtgggaagtggtcacaggaagcaggcagccagccaggaagggaggcagaagcatgctaagaacaacagtcaggccaagccttctgcctgtgatggcctggccaggcagccggaagaggtggtattgcaggcctctgtctcctcataccatctattcagagacgtagctgaagtcacagccttccgagggagcctgctaagctggtacgaccaagagaaacgggacctaccatggagaagacgggcagaagatgagatggacctggacaggcgggcatatgctgtgtgggtctcagaggtcatgctgcagcagacccaggttgccactgtgatcaactactataccggatggatgcagaagtggcctacactgcaggacctggccagtgcttccctggaggaggtgaatcaactctgggctggcctgggctactattctcgtggccggcggctgcaggagggagctcggaaggtggtagaggagctagggggccacatgccacgtacagcagagaccctgcagcagctcctgcctggcgtggggcgctacacagctggggccattgcctctatcgcctttggccaggcaaccggtgtggtggatggcaacgtagcacgggtgctgtgccgtgtccgagccattggtgctgatcccagcagcacccttgtttcccagcagctctggggtctagcccagcagctggtggacccagcccggccaggagatttcaaccaagcagccatggagctaggggccacagtgtgtaccccacagcgcccactgtgcagccagtgccctgtggagagcctgtgccgggcacgccagagagtggagcaggaacagctcttagcctcagggagcctgtcgggcagtcctgacgtggaggagtgtgctcccaacactggacagtgccacctgtgcctgcctccctcggagccctgggaccagaccctgggagtggtcaacttccccagaaaggccagccgcaagccccccagggaggagagctctgccacctgtgttctggaacagcctggggcccttggggcccaaattctgctggtgcagaggcccaactcaggtctgctggcaggactgtgggagttcccgtccgtgacctgggagccctcagagcagcttcagcgcaaggccctgctgcaggaactacagcgttgggctgggcccctcccagccacgcacctccggcaccttggggaggttgtccacaccttctctcacatcaagctgacatatcaagtatatgggctggccttggaagggcagaccccagtgaccaccgtaccaccaggtgctcgctggctgacgcaggaggaatttcacaccgcagctgtttccaccgccatgaaaaaggttttccgtgtgtatcagggccaacagccagggacctgtatgggttccaaaaggtcccaggtgtcctctccgtgcagtcggaaaaagccccgcatgggccagcaagtcctggataatttctttcggtctcacatctccactgatgcacacagcctcaacagtgcagcccagtgacacctctgaaagcccccattccctgagaatcctgttgttagtaaagtgcttatttttgtagtta

SEQ ID NO: 2644 - DNA, 1245 bp, Homo sapiens
  source 1..1245: mol_type = genomic DNA
atgacaccgctcgtctcccgcctgagtcgtctgtgggaggtgaatcaactctgggctggcctgggctactattctcgtggccggcggctgcaggagggagctcggaaggtggtagaggagctagggggccacatgccacgtacagcagagaccctgcagcagctcctgcctggcgtggggcgctacacagctggggccattgcctctatcgcctttggccaggcaaccggtgtggtggatggcaacgtagcacgggtgctgtgccgtgtccgagccattggtgctgatcccagcagcacccttgtttcccagcagctctggggtctagcccagcagctggtggacccagcccggccaggagatttcaaccaagcagccatggagctaggggccacagtgtgtaccccacagcgcccactgtgcagccagtgccctgtggagagcctgtgccgggcacgccagagagtggagcaggaacagctcttagcctcagggagcctgtcgggcagtcctgacgtggaggagtgtgctcccaacactggacagtgccacctgtgcctgcctccctcggagccctgggaccagaccctgggagtggtcaacttccccagaaaggccagccgcaagccccccagggaggagagctctgccacctgtgttctggaacagcctggggcccttggggcccaaattctgctggtgcagaggcccaactcaggtctgctggcaggactgtgggagttcccgtccgtgacctgggagccctcagagcagcttcagcgcaaggccctgctgcaggaactacagcgttgggctgggcccctcccagccacgcacctccggcaccttggggaggttgtccacaccttctctcacatcaagctgacatatcaagtatatgggctggccttggaagggcagaccccagtgaccaccgtaccaccaggtgctcgctggctgacgcaggaggaatttcacaccgcagctgtttccaccgccatgaaaaaggttttccgtgtgtatcagggccaacagccagggacctgtatgggttccaaaaggtcccaggtgtcctctccgtgcagtcggaaaaagccccgcatgggccagcaagtcctggataatttctttcggtctcacatctccactgatgcacacagcctcaacagtgcagcccagtgacacctctgaaagcccccattccctgagaatcctgttgttagtaaagtgcttatttttgtagtt

SEQ ID NO: 2645 - DNA, 1029 bp, Homo sapiens
  source 1..1029: mol_type = genomic DNA
ggaacttgtagtctcctcgtggctagttcaggcggaaggagcagtcctctgaagcttgaggagcctctagaactatgagcccgaggccttcccctctcccagagcgcagaggctttgaaggctacctctgggaagccgctcaccgtcggaagctgcgggagctgaaactgcgccatcgtcactgtcggcggccatgacaccgctcgtctcccgcctgagtcgtctgtgggccatcatgaggaagccacgagcagccgtgggaagtggtcacaggaagcaggcagccagccaggaagggaggcagaagcatgctaagaacaacagtcaggccaagccttctgcctgtgatggaggtgaatcaactctgggctggcctgggctactattctcgtggccggcggctgcaggagggagctcggaaggtctgctggcaggactgtgggagttcccgtccgtgacctgggagccctcagagcagcttcagcgcaaggccctgctgcaggaactacagcgttgggctgggcccctcccagccacgcacctccggcaccttggggaggttgtccacaccttctctcacatcaagctgacatatcaagtatatgggctggccttggaagggcagaccccagtgaccaccgtaccaccaggtgctcgctggctgacgcaggaggaatttcacaccgcagctgtttccaccgccatgaaaaaggttttccgtgtgtatcagggccaacagccagggacctgtatgggttccaaaaggtcccaggtgtcctctccgtgcagtcggaaaaagccccgcatgggccagcaagtcctggataatttctttcggtctcacatctccactgatgcacacagcctcaacagtgcagcccagtgacacctctgaaagcccccattccctgagaatcctgttgttagtaaagtgcttatttttgtagttattttatgttgtatttttttgagatgggggtctcgctatgttgctcagactggtttcgaactcaggtgattctggcctca

SEQ ID NO: 2646 - DNA, 897 bp, Homo sapiens
  source 1..897: mol_type = genomic DNA
ggtggttcttgcccgtgttgtgtgtgtgtgtgagtgagagagcgagtgagtgagtgagtgagtgtgtgtgtgggggggactcggcttgttgttgtcggtgacttccccctccccttcaccccttcccctccccgccgccgctgcagtggccgctccctgggccgtaggaaatgagcgataacgatgacatcgaggtggagagcgacgaagagcaaccgaggtttcaatctgcggctgacaaacgggctcatcataatgcactggaacgaaaacgtagggaccacatcaaagacagctttcacagtttgcgggactcagtcccatcactccaaggagagaagctctatttcctcttttggaaattgtgtactcctgtccttcatcgtcaaagtttgatgcagaaatgccacaccttcatttcaagctaccaagtgcacaagaaaaaagaatgcaagatttaaaaaatgattgttttgaccccttacacaaatgtcttactcctggctttaattaagctgcttgagggctgatagctctgccttaccctggtaatcagcaaaatggtcctgtggctggggaggccctggcagcaggaagccttcaaggagccatgggtctgtgctgactctggccttacaaccttccagcctcctttgctggcattgatggggttccatttttgaatgaactagtttaatgtggatccaaatttattgtgcatattctttcgttttggttttcaaaagatggcttattcacatggaaatgtacaccagtttagccctgggccctccctttaccttcatatgtgtaaaagcttacacaggtttcagaaaataaatggtttcattttctctaaaataactagtacaaaataaaacagatgtcagttgttga

SEQ ID NO: 2647 - DNA, 3155 bp, Homo sapiens
  source 1..3155: mol_type = genomic DNA
gtgtgtgtgtgagtgagagagcgagtgagtgagtgagtgagtgtgtgtgtgggggggactcggcttgttgttgtcggtgacttccccctccccttcaccccttcccctccccgccgccgctgcagtggccgctccctgggccgtaggaaatgagcgataacgatgacatcgaggtggagagcgacgaagagcaaccgaggtttcaatctgcggctgacaaacgggctcatcataatgcactggaacgaaaacgtagggaccacatcaaagacagctttcacagtttgcgggactcagtcccatcactccaaggagagaaggcatcccgggcccaaatcctagacaaagccacagaatatatccagtatatgcgaaggaaaaaccacacacaccagcaagatattgacgacctcaagcggcagaatgctcttctggagcagcaaggtgagcacccgagctcgtggggcagctggccctgctgtgctccagccaggtcaggctttggcacctgggcctgcagagtcagagccagtcatggagtatgtgctcagtagcaggcttggtcctgcttcttggggcctgagtaactgagtgttagagccgtcctgaggaaggacctgaggcgccagtgaggagacagtggaagctaggaagttggacatctggagacttgtatcttttctggcctgacctctccccttcttggggctcaggtgctctgcctgcagtagggatcacacctggcatcaggtgtctgaaaagagctttgaggtccttggagtggaatgtgctgtgtaagtaccagagactccaggtgttcagggacagtgagccctccccattgtcaatggtagtccaatcagggcagcctatgggctaggcccatgctgttctcaatgctcacacccgccttttcctacaaccacaggggaaagcgagagctgatcaagttctttgttcctggggaattcacttctcttcctccctcatggaagatgcaagtaaaaggaaatgcaagtaaccacctgggttagaaaacctcaaataaaataaaataaaataaattaaatgggttgaccttccaggctcaagctgagctgaaccaagggatgggcagtgggtggtgtcagtgggttggttactgggccaggcagcctgcatgtaggggctatttgaaaagcccaggtattttatgtgtattggtgacttgcttccaagtgtccagcttgtcattccaagtggatcttgtacacgagagctaagccaaaactgttctttggctgatacgtcttatgtcatcctttcctgctgttgtgtggcctcacaccttgtggagcctcatgctcctgggccagcttctcctctgttattgcactgctgaatcccacagggagctcacgctccagtctctccacggggcttccacggcaggacggtgacatcacaagccttctcttcagagttgggtgggattgcagagtgtctgctggctcccaggtccagctgggaaaggcgggagggaaatgaagtgtgtgagtgaacagccacccgaagggagctacttctgagcatcttgagcctcgggggccaacaagcaagcccttaggaagaacaggctggaccctgagtctgagactcggttactccccaagtctccagaaggcagtaacacactcccttggttgccttttagtccgtgcactggagaaggcgaggtcaagtgcccaactgcagaccaactacccctcctcagacaacagcctctacaccaacgccaagggcagcaccatctctgccttcgatgggggctcggactccagctcggagtctgagcctgaagagccccaaagcaggaagaagctccggatggaggccagctaagccactcggggcaggccagcaataaaaactgtctgtctccatcgtctcatcctcctttcagttcgttggtagagccctcagaaccatttaagagactctttatttttctctttctcccttttttttttaaatttttatttttacgtagaagctcttggacaacagctctcgttctccttccccatttccactgtatattttttaatgtattcccttcagggattccctgtccccaacaggaatttttaaaccaaaacaccccaacttggcagctttttctgtggaggacagacggccggccggacctctgagcacatagtgtcctgcccaccctaccagctcctccagccctgccgggcacatgcccgggggacgcctgccctgcccaggtggcctcctggcccgccctcacctctgatagactttgtgaatctgaactgctctactttgagaagatgaccggtttggagtaatcagaatgaaccctcctcctttttaagggttttttttttttcctttttctaaaaagctatgtatcgctcctattgaaagaccagatccttagagaagtttgtggtataaaaaggaagtggggacagattcgcagcacagagtcgctggcatgtttcactcctgcttctctcagccagctgtttaagcctgcggcgccagcctcacggagggccgtgtgacactctcgtggtatgtatgggagatggcagcagtgaagcagcagccaccagggagtggccatttggggttgggacagggagggtgttttgggtggcatagaggttttgtattgagggccagtgatgatgttttgatatttatttcctgctacttaaatttgaatctgagtgaattgtacctatttctgatgatgtcggtcttgcaaagcgacagattcataaagtaatgatgaaatctttctttcttcccgtgtgtatttctaagaaatagagccaactgattttgtatgtaaataccaagagcaatttacctggtactaaacccgcaccccagtgcggacccttcccagccctcatcccacttcctttcctactgtcctggaacctgtctccattgtgtgatccagccctggttctggctgtggtcagcagatgccagtgaagggttttgtgtgtttaggcctcatttctttgtctttttcctactccgttcctggcatttgctgatttctagtgtatactctgtagtctcagttcgtgtttgattccattccatggaaataaaaagtatgttgtacatac

SEQ ID NO: 2648 - DNA, 330 bp, Homo sapiens
  source 1..330: mol_type = genomic DNA
ttcccctccccgccgccgctgcagtggccgctccctgggccgtaggaaatgagcgataacgatgacatcgaggtggagagcgacgaagagcaaccgaggtttcaatctgcggctgacaaacgggctcatcataatgcactggaacgaaaacgtagggaccacatcaaagacagctttcacagtttgcgggactcagtcccatcactccaaggagagaagggaacaaagatgaagttaaccctcccacctgtctttccttatgaacacttgccttttccaactgttttctgccatggctaatcagaaaaagtttcttaaggaaatggtggc

SEQ ID NO: 2649 - DNA, 1973 bp, Homo sapiens
  source 1..1973: mol_type = genomic DNA
ttcttgcccgtgttgtgtgtgtgtgtgagtgagagagcgagtgagtgagtgagtgagtgtgtgtgtgggggggactcggcttgttgttgtcggtgacttccccctccccttcaccccttcccctccccgccgccgctgcagtggccgctccctgggccgtaggaaatgagcgataacgatgacatcgaggtggagagcgacgctgacaaacgggctcatcataatgcactggaacgaaaacgtagggaccacatcaaagacagctttcacagtttgcgggactcagtcccatcactccaaggagagaaggcatcccgggcccaaatcctagacaaagccacagaatatatccagtatatgcgaaggaaaaaccacacacaccagcaagatattgacgacctcaagcggcagaatgctcttctggagcagcaagtccgtgcactggagaaggcgaggtcaagtgcccaactgcagaccaactacccctcctcagacaacagcctctacaccaacgccaagggcagcaccatctctgccttcgatgggggctcggactccagctcggagtctgagcctgaagagccccaaagcaggaagaagctccggatggaggccagctaagccactcggggcaggccagcaataaaaactgtctgtctccatcgtctcatcctcctttcagttcgttggtagagccctcagaaccatttaagagactctttatttttctctttctcccttttttttttaaatttttatttttacgtagaagctcttggacaacagctctcgttctccttccccatttccactgtatattttttaatgtattcccttcagggattccctgtccccaacaggaatttttaaaccaaaacaccccaacttggcagctttttctgtggaggacagacggccggccggacctctgagcacatagtgtcctgcccaccctaccagctcctccagccctgccgggcacatgcccgggggacgcctgccctgcccaggtggcctcctggcccgccctcacctctgatagactttgtgaatctgaactgctctactttgagaagatgaccggtttggagtaatcagaatgaaccctcctcctttttaagggttttttttttttcctttttctaaaaagctatgtatcgctcctattgaaagaccagatccttagagaagtttgtggtataaaaaggaagtggggacagattcgcagcacagagtcgctggcatgtttcactcctgcttctctcagccagctgtttaagcctgcggcgccagcctcacggagggccgtgtgacactctcgtggtatgtatgggagatggcagcagtgaagcagcagccaccagggagtggccatttggggttgggacagggagggtgttttgggtggcatagaggttttgtattgagggccagtgatgatgttttgatatttatttcctgctacttaaatttgaatctgagtgaattgtacctatttctgatgatgtcggtcttgcaaagcgacagattcataaagtaatgatgaaatctttctttcttcccgtgtgtatttctaagaaatagagccaactgattttgtatgtaaataccaagagcaatttacctggtactaaacccgcaccccagtgcggacccttcccagccctcatcccacttcctttcctactgtcctggaacctgtctccattgtgtgatccagccctggttctggctgtggtcagcagatgccagtgaagggttttgtgtgtttaggcctcatttctttgtctttttcctactccgttcctggcatttgctgatttctagtgtatactctgtagtctcagttcgtgtttgattccattccatggaaataaaaagtatgttgtacatactgccgaagaattgtcttgcaagttaaggcttccccctttactataagactataaataaaaacttattttatccttctt

SEQ ID NO: 2650 - DNA, 1546 bp, Homo sapiens
  source 1..1546: mol_type = genomic DNA
gagcgagtgagtgagtgagtgagtgtgtgtgtgggggggactcggcttgttgttgtcggtgacttccccctccccttcaccccttcccctccccgccgccgctgcagtggccgctccctgggccgtaggaaatgagcgataacgatgacatcgaggtggagagcgacgaagagcaaccgaggtttcaatctgcggctgacaaacgggctcatcataatgcactggaacgaaaacgtagggaccacatcaaagacagctttcacagtttgcgggactcagtcccatcactccaaggagagaaggcatcccgggcccaaatcctagacaaagccacagaatatatccagtatatgcgaaggaaaaaccacacacaccagcaagatattgacgacctcaagcggcagaatgctcttctggagcagcaagtccgtgcactggagaaggcgaggtcaagtgcccaactgcagaccaactacccctcctcagacaacagcctctacaccaacgccaagggcagcaccatctctgccttcgatgggggctcggactccagctcggagtctgagcctgaagagccccaaagcaggaagaagctccggatggaggccagctaagccactcggggcaggccagcaataaaaactgtctgtctccatcgtctcatcctcctttcagttcgttggtagagccctcagaaccatttaagagactctttatttttctctttctcccttttttttttaaatttttatttttacgtagaagctcttggacaacagctctcgttctccttccccatttccactgtatattttttaatgtattcccttcagggattccctgtccccaacaggaatttttaaaccaaaacaccccaacttggcagctttttctgtggaggacagacggccggccggacctctgagcacatagtgtcctgcccaccctaccagctcctccagccctgccgggcacatgcccgggggacgcctgccctgcccaggtggcctcctggcccgccctcacctctgatagactttgtgaatctgaactgctctactttgagaagatgaccggtttggagtaatcagaatgaaccctcctcctttttaagggttttttttttttcctttttctaaaaagctatgtatcgctcctattgaaagaccagatccttagagaagtttgtggtataaaaaggaagtggggacagattcgcagcacagagtcgctggcatgtttcactcctgcttctctcagccagctgtttaagcctgcggcgccagcctcacggagggccgtgtgacactctcgtggtatgtatgggagatggcagcagtgaagcagcagccaccagggagtggccatttggggttgggacagggagggtgttttgggtggcatagaggttttgtattgagggccagtgatgatgttttgatatttatttcctgctacttaaatttgaatctgagtgaattgtacctatttctgatgatgtcggtcttgcaaagcgacagattcataaagtaatgatgaaatcttt

SEQ ID NO: 2651 - DNA, 1090 bp, Homo sapiens
  source 1..1090: mol_type = genomic DNA
tgactccccaccctccgcttcctctgccgccggcattttctttcttattattgaatgttaagtgtaaaaataacttctatattttctatttttttttttctcttattccaggaagagcaaccgaggtttcaatctgcggctgacaaacgggctcatcataatgcactggaacgaaaacgtagggaccacatcaaagacagctttcacagtttgcgggactcagtcccatcactccaaggagagaaggcatcccgggcccaaatcctagacaaagccacagaatatatccagtatatgcgaaggaaaaaccacacacaccagcaagatattgacgacctcaagcggcagaatgctcttctggagcagcaaggtgagcacccgagctcgtggggcagctggccctgctgtgctccagccaggtcaggctttggcacctgggcctgcagagtcagagccagtcatggagtatgtgctcagtagcaggcttggtcctgcttcttggggcctgagtaactgagtgttagagccgtcctgaggaaggacctgaggcgccagtgaggagacagtggaagctaggaagttggacatctggagacttgtatcttttctggcctgacctctccccttcttggggctcaggtgctctgcctgcagtagggatcacacctggcatcaggtgtctgaaaagagctttgaggtccttggagtggaatgtgctgtgtaagtaccagagactccaggtgttcagggacagtgagccctccccattgtcaatggtagtccaatcagggcagcctatgggctaggcccatgctgttctcaatgctcacacccgccttttcctacaaccacaggggaaagcgagagctgatcaagttctttgttcctggggaattcacttctcttcctccctcatggaagatgcaagtaaaaggaaatgcaagtaaccacctgggttagaaaacctcaaataaaataaaataaaataaattaaatgggttgaccttccaggctcaagctgagctgaaccaagggatgggcagtgggtggtgtcagtgggttggttactgggccaggcagcctgcatgta

SEQ ID NO: 2652 - DNA, 615 bp, Homo sapiens
  source 1..615: mol_type = genomic DNA
agtgaggaggtggttcttgcccgtgttgtgtgtgtgtgtgagtgagagagcgagtgagtgagtgagtgagtgtgtgtgtgggggggactcggcttgttgttgtcggtgacttccccctccccttcaccccttcccctccccgccgccgctgcagtggccgctccctgggccgtaggaaatgagcgataacgatgacatcgaggtggagagcgacgaagagcaaccgaggtttcaatctgcggctgacaaacgggctcatcataatgcactggaacgaaaacgtagggaccacatcaaagacagctttcacagtttgcgggactcagtcccatcactccaaggagagaaggcatcccgggcccaaatcctagacaaagccacagaatatatccagtatatgcgaaggaaaaaccacacacaccagcaagatattgacgacctcaagcggcagaatgctcttctggagcagcaaggggaaagcgagagctgatcaagttctttgttcctggggaattcacttctcttcctccctcatggaagatgcaagtaaaaggaaatgcaagtaaccacctgggttagaaaacctcaaataaaataaaataaaataaattaaat

SEQ ID NO: 2653 - DNA, 2097 bp, Homo sapiens
  source 1..2097: mol_type = genomic DNA
gcagtgaggaggtggttcttgcccgtgttgtgtgtgtgtgtgagtgagagagcgagtgagtgagtgagtgagtgtgtgtgtgggggggactcggcttgttgttgtcggtgacttccccctccccttcaccccttcccctccccgccgccgctgcagtggccgctccctgggccgtaggaaatgagcgataacgatgacatcgaggtggagagcgacgaagagcaaccgaggtttcaatctgcggctgacaaacgggctcatcataatgcactggaacgaaaacgtagggaccacatcaaagacagctttcacagtttgcgggactcagtcccatcactccaaggagagaaggcatcccgggcccaaatcctagacaaagccacagaatatatccagtatatgcgaaggaaaaaccacacacaccagcaagatattgacgacctcaagcggcagaatgctcttctggagcagcaaggggaaagcgagagctgatcaagttctttgttcctggggaattcacttctcttcctccctcatggaagatgcaagtaaaaggaaattccgtgcactggagaaggcgaggtcaagtgcccaactgcagaccaactacccctcctcagacaacagcctctacaccaacgccaagggcagcaccatctctgccttcgatgggggctcggactccagctcggagtctgagcctgaagagccccaaagcaggaagaagctccggatggaggccagctaagccactcggggcaggccagcaataaaaactgtctgtctccatcgtctcatcctcctttcagttcgttggtagagccctcagaaccatttaagagactctttatttttctctttctcccttttttttttaaatttttatttttacgtagaagctcttggacaacagctctcgttctccttccccatttccactgtatattttttaatgtattcccttcagggattccctgtccccaacaggaatttttaaaccaaaacaccccaacttggcagctttttctgtggaggacagacggccggccggacctctgagcacatagtgtcctgcccaccctaccagctcctccagccctgccgggcacatgcccgggggacgcctgccctgcccaggtggcctcctggcccgccctcacctctgatagactttgtgaatctgaactgctctactttgagaagatgaccggtttggagtaatcagaatgaaccctcctcctttttaagggttttttttttttcctttttctaaaaagctatgtatcgctcctattgaaagaccagatccttagagaagtttgtggtataaaaaggaagtggggacagattcgcagcacagagtcgctggcatgtttcactcctgcttctctcagccagctgtttaagcctgcggcgccagcctcacggagggccgtgtgacactctcgtggtatgtatgggagatggcagcagtgaagcagcagccaccagggagtggccatttggggttgggacagggagggtgttttgggtggcatagaggttttgtattgagggccagtgatgatgttttgatatttatttcctgctacttaaatttgaatctgagtgaattgtacctatttctgatgatgtcggtcttgcaaagcgacagattcataaagtaatgatgaaatctttctttcttcccgtgtgtatttctaagaaatagagccaactgattttgtatgtaaataccaagagcaatttacctggtactaaacccgcaccccagtgcggacccttcccagccctcatcccacttcctttcctactgtcctggaacctgtctccattgtgtgatccagccctggttctggctgtggtcagcagatgccagtgaagggttttgtgtgtttaggcctcatttctttgtctttttcctactccgttcctggcatttgctgatttctagtgtatactctgtagtctcagttcgtgtttgattccattccatggaaataaaaagtatgttgtacatactgccgaagaattgtcttgcaagttaaggcttccccctttactataagactataaataaaaacttattttatcctt

SEQ ID NO: 2654 - DNA, 14735 bp, Homo sapiens
  source 1..14735: mol_type = genomic DNA
cggcggcagtggcggcaccgcctcctcctcacattcccggggtggcggggttagatgagcggccccagtagcggcgccgggggcgctgttcatgccggttcccgacggctccgtggctgctgcggggctggggctggggctacccgccgcggactcccggggtcactaccagctgctgctgtcaggccgggccctggccgaccgctaccggaggatttataccgctgcgctcaatgacagggaccaggggggcggcagcgctggacacccagcctccaggaataagaaaattttaaataagaagaaattgaaaagaaaacagaagagcaaatcaaaagtgaagacaagaagcaagtctgaaaacttagagaatacagtaatcataccagatatcaaactacatagcaatccttctgctttcaatatttactgtaatgtacgccattgcgttctggaatggcagaaaaaggaaatatcattggcagccgcatctaagaactctgtgcagagtggagaatcagatagtgatgaagaagaggaatccaaagagccccctatcaagcttccaaagattattgaggttggcctttgtgaagtttttgaattgatcaaagagacacgattttctcatccatccctgtgtctcaggagtctccaagccctgctcaacgtgctgcagggccagcagccagaaggcctccagtctgagccacctgaggtcctagagtctctcttccagcttcttttggaaatcaccgttcgaagtactgggatgaatgacagcacaggacagtccttaacagcactttcctgtgcttgcctctttagtctggtggcttcttggggagaaacaggaaggacacttcaggccatctctgctatcctcaccaacaatggaagccatgcttgccaaactattcaggtgccaacaattctaaattcgctacagagaagtgtacaagcagttttggtgggaaaaattcaaattcaggactggtttagtaatggcattaagaaagcagctttaatgcacaagtggccattaaaagaaatatctgttgatgaagatgaccaatgtctacttcagaatgatggattttttctttatctattatgcaaggatggattatataaaataggctctggatacagtggaacagttaggggccatatatacaattctacatcccgtattagaaacagaaaagaaaaaaagtcttggttagggtatgctcagggttatttattatatagagatgtgaataaccacagcatgacagccataaggataagccctgaaacactggagcaagatggtactgtgatgttaccagattgccacactgaaggtcaaaatattttattcactgatggagaatatattaatcagatagctgcttcaagagatgatggctttgttgtcagaatatttgccacaagcactgaacctgttctacagcaagaattgcaacttaaactggctagaaaatgcttacatgcctgtggtatctcactattcgatctggaaaaggacttgcatattataagtacaggatttgatgaggagtcagcaattcttggtgcaggacgagagtttgcgctaatgaaaacagcaaatggaaagatatattacactggcaaataccagagtcttggaatcaaacaaggtggtccttcagcaggaaaatgggttgagctaccaattacaaaatctccaaagatagtacacttctcagttggacacgatggctctcacgcccttttagttgcagaagatgggagcatattctttacaggatctgctagtaaaggagaagatggagaatcaactaagagcagacggcaatccaaaccttataaacctaaaaagataattaagatggaaggaaagattgtggtatatacagcctgcaataatggaagtagttctgttatttctaaagatggagaactctacatgtttggaaaagatgccatttactctgatagttcaagtttggtaactgatttgaagggccattttgtaactcaggtagctatgggcaaagctcacacttgtgttttaatgaagaatggagaggtgtggacatttggtgtaaataataaaggacagtgtggacgagatactggtgccatgaaccaaggtgggaaagggtttggagttgaaaatatggcaacagcaatggatgaagacctggaagaagaactagatgaaaaagatgagaagtctatgatgtgccctccaggcatgcacaaatggaagctggagcagtgcatggtttgcactgtctgtggagactgtacaggttatggagccagctgtgtcagtagtggacggccagacagagtccccggagggatctgtggttgtggttccggagaatctggttgtgctgtgtgtggatgttgcaaggcctgtgcaagagagttagatggtcaagaggcaagacaaagaggaattcttgatgcagtgaaagaaatgatacctttagatcttcttttagctgtcccagtgcccggggttaacattgaagaacaccttcagttacgacaagaagaaaaacggcaacgtgtaatcagaaggcacagattagaggaaggaagaggcccccttgtatttgctggtcctatttttatgaaccatcgagaacaggctctagccagactcagatcccatccagcacagctaaagcataaacgggacaagcacaaagatggaagtggagaaagaggcgaaaaggatgcaagcaaaatcacaacataccctccaggctctgtgcgatttgactgtgagctccgggcagtccaagtcagctgtggatttcaccattcagtggttttaatggaaaatggagatgtctatacatttggttatgggcagcatgggcagctaggacatggagatgtcaactccaggggatgtcccactcttgttcaagcattgccaggccctagcacacaagtcactgcaggcagcaaccatacggcagtacttttaatggatggacaggtcttcacatttggaagtttttctaaaggacaactgggcagaccaattttggatgtgccatattggaatgcaaagccagctcccatgcctaacattggatcaaaatatggaagaaaagctacttggataggtgcaagtggggaccaaacttttttacgaattgatgaagcacttattaattctcatgtacttgctacatcagaaatttttgccagtaaacacataataggcttggtacctgcttctatatcagaacctcctccatttaaatgccttctgataaataaagtggatgggagttgtaaaacttttaatgactcagaacaagaggatctgcaaggatttggtgtgtgtcttgatcctgtatatgatgtaatttggaggtttcgaccaaatactagagagctgtggtgttacaatgcggtggttgctgatgccaggcttccctctgcagcagacatgcagtccagatgtagtatcctaagtcctgaacttgccttaccaacaggatcaagggccctcactacccgatctcatgcagctttgcacattttaggttgtcttgataccttggcagctatgcaggacttaaaaatgggtgttgcaagtacagaggaagagactcaagcagtaatgaaggtttattctaaagaagattatagtgtggtaaacaggtttgaaagtcatggaggaggctggggttattctgcccattcagtagaagctatacgtttcagtgccgacactgatattttacttggtggtcttggtctgtttggaggtagaggagaatatactgctaaaattaagctgtttgaattgggtcctgatggaggagatcatgaaactgatggtgaccttcttgcagagactgatgtattggcttatgactgtgctgctagagaaaaatatgcaatgatgtttgatgagcctgttctcctgcaagctgggtggtggtatgtggcatgggcccgagtgtcaggacccagcagtgactgtggatctcatggacaggcatctattaccacagatgatggggttgttttccagttcaagagttcaaagaaatcaaataatggtacagatgttaatgcgggtcagatacctcagttattatacagacttccaaccagtgatggcagtgcttcaaaaggcaaacagcaaaccagtgaacctgtacacattttaaagaggtcttttgcaagaactgtctcagtggaatgttttgagtcattgttgagtattcttcactggagctggaccaccttagtcttaggagttgaagaacttagaggattaaaaggattccagttcacagctacactcctagatttagagagactgcgctttgtgggtacctgttgtctgaggttattgcgtgtctatacctgtgaaatttacccagtgtcagctacaggaaaagcagttgtagaagaaactagcaaattagcagagtgtattggaaaaaccagaactttgttaagaaaaattttatcagaaggagttgatcactgcatggtgaaattggataatgatcctcaaggatatctcagtcaacccttgagtcttctagaagctgtccttcaggaatgtcataatactttcactgcctgctttcattctttctacccaactcctgccttacagtgggcttgcctttgtgatctgctgaattgtttggatcaggatatccaagaagcaaacttcaagacatcaagtagccgactccttgcagctgttatgtcagctctgtgtcacacgtctgttaagctgacttccatcttcccgattgcgtatgatggagaagtattactacgatcaattgttaaacaagttagtacagagaacgactcaacactagttcatcgttttccccttttggtggcacatatggaaaaactcagccagagtgaagagaatatctcagggatgacaagcttccgtgaagttctggagaaaatgctggtcattgttgtgctaccagtcaggaacagcctgaggagagaaaatgaactcttctcctcccacctcgtctctaacacctgtggattactggccagcattgtcagtgaactgacagcgtcagccctgggatctgaggttgatggacttaattctcttcactctgtaaaagctagtgctaaccgatttacaaaaacaagtcagggcagaagttggaacactgggaacgggtcccctgatgcaatctgtttttcagtagacaaacctggaatagttgtggttggtttctctgtctatggaggaggtggaattcatgaatatgaattagaggtgttggttgatgatagtgaacatgcaggagattcaactcattcccacagatggacatctctggaattagtgaaaggaacgtacacaacggatgactcacccagtgatatagctgagatcagacttgacaaagtggttcctttaaaggaaaatgttaaatatgctgtgcgcttgaggaactatggaagccgtacagccaatggagatggaggaatgaccacagttcagtgccctgatggtgtgacattcacattcagcacgtgcagcttgagcagtaacggcacaaaccaaaccagaggacagatcccacagatactctactataggagtgaatttgatggagatttacaatcccaacttctgagtaaagccaatgaagaagataaaaactgtagcagagcattgtctgttgtaagcactgtcgttcgagcctctaaggacctcctgcacagagctcttgctgtggatgctgatgacattccagaactgctgagttcttccagtctgttttccatgctgctcccccttattatagcctacataggaccagtagctgctgctattcccaaggtggctgtagaagtctttggccttgtccaacaattgcttccgtcagttgccattttgaatcagaagtatgcaccgcctgccttcaaccctaatcagtcgacagatagcaccacaggaaaccagcctgaacagggcctctctgcttgtacaacctccagtcactatgctgtcatagagagtgagcacccgtataaacctgcctgtgtgatgcattacaaggtgacattcccagaatgtgtgaggtggatgacaatcgaatttgaccctcagtgtggtactgcacagtcagaagatgtccttcgtttgttgattcctgtcagaactgttcagaattcaggatatggaccaaaattgacatctgttcatgaaaatcttaattcatggatagaattaaagaaattttcaggatcctctgggtggcctactatggttttggtgttgccaggaaatgaggcccttttttcattggagactgcatcagattatgtgaaagatgacaaagcttctttctatggttttaagtgttttgcaattggatatgaatttagccctggacctgatgagggagtcatccaattggaaaaagaattagccaatcttggtggggtttgtgcagcagctctgatgaagaaggacctagcacttcctattggtaatgaattagaagaagaccttgaaattcttgaggaggctgcattgcaggtgtgcaaaacccattctggaattcttggaaagggtctagctctttctcattcaccaactatattagaagcacttgagggaaatttaccactccaaatccaaagcaatgaacagtcttttctggatgattttattgcctgtgtcccaggatcaagtggtggaaggcttgcaaggtggcttcagccagattcatatgcggatcctcagaaaacatctttgatcctgaataaggatgatattcgttgtggttggcctaccaccataactgttcaaacaaaagaccagtatggggatgtggtacatgttcccaatatgaaggtggaagtgaaagctgtccctgtttctcagaaaaaaatgtctttacaacaagatcaagcaaagaaacctcaaaggattcctggcagtcctgcagtaacagctgcatcttctaatactgacatgacttatggagggctggcatcaccaaagctagatgtttcatatgaaccaatgatagtgaaggaagctcgatatattgccataacaatgatgaaggtttatgaaaattattcatttgaagaactacgttttgcatcaccaactcctaagagacccagtgagaatatgctgatccgtgtcaataatgatgggacttattgtgcaaattggactccaggggctattggactctacactcttcatgttaccattgatggcattgaaatcgatgctggtctggaagtaaaagtaaaagacccaccaaaagggatgataccaccaggaactcagttggtcaaaccaaagtctgaacctcagcctaataaggttcgaaaatttgtggccaaggacagtgcggggcttcgcatccgtagccacccttcccttcagagtgagcagataggcatagtgaaagtcaatggaactatcacttttattgatgagatccataatgatgatggtgtgtggctgaggctgaatgatgagacaataaagaagtatgtccctaacatgaatggttacactgaagcctggtgcctctcttttaatcaacatcttggcaagagtcttctggtccctgttgacgaatctaaaactaatactgatgactttttcaaagacataaactcctgctgcccacaggaagcaacaatgcaagaacaagatatgccattcttgcgaggagggccaggcatgtacaaggtagtgaagacgggaccttcaggtcacaacatcagaagctgccctaaccttagaggtatcccaattggaatgttagttctgggaaacaaagtcaaagcagtgggagaggtaaccaattctgaagggacatgggtgcaactggatcagaacagcatggtagagttctgtgagagtgatgaaggagaggcatggtccttagctagagacagaggcggaaaccagtacctccgacatgaagatgaacaagctcttctggatcagaattctcaaactcctcctccaagccctttctcagtgcaagcttttaataaaggggcaagttgcagtgcccaaggatttgattatggactcggaaatagcaaaggtgatcgaggaaacatctcaacatcttctaaaccagcctctacatcaggaaaatcagagctgtcctctaaacacagcagatcgcttaaacctgatggacgtatgagccggactactgctgatcagaagaagccaaggggcacagaaagtttatctgctagtgaatccctcatcttaaaatctgatgctgcaaagttgaggtcagattcccacagtaggtcattatcccccaaccataacaccttgcagacattgaaatctgatgggaggatgccttctagctccagagctgaatccccaggaccaggttctcggttgtcatctcctaagccaaagactctcccagccaataggtctagcccatcgggtgctagttctccacgctcctcctcaccacatgataaaaatctacctcaaaaaagtactgctcctgttaagacaaagcttgatcctcctcgggaacgttctaaatcagactcttacacacttgatccagataccctccgcaagaagaaaatgcccctcacagaacctttgagaggacggtcaacgtcaccaaaaccaaaatcagtaccaaaggattctacagattcccctggatctgaaaatagagctccctctccccatgtggtacaggaaaacctccacagtgaggtggtcgaagtctgcacctcaagtactttaaaaacaaatagtctaacagacagcacctgcgatgacagcagtgaatttaagagtgtggatgaaggttcaaataaagttcattttagcattggaaaagcaccactgaaagatgaacaggaaatgagagcatctcccaaaataagtcgaaaatgtgctaatagacacaccaggcccaaaaaagaaaaatcgagttttcttttcaaaggagatggatccaagcctttagagccagccaagcaagccatgtctccttctgtggccgaatgtgccagagctgtgtttgcttccttcctctggcatgaaggcatagtacatgatgcaatggcttgttcttctttcctaaagtttcatcctgaactttccaaagaacatgctcctataaggagtagtttaaatagccaacaacctacagaggaaaaagaaaccaagttaaaaaatagacattcattagaaatatcatctgcactgaatatgtttaatattgcaccccatggaccagatatatctaagatgggtagcatcaacaaaaacaaggtattgtctatgcttaaggaaccacctctgcatgaaaaatgtgaggatgggaaaaccgagaccacttttgaaatgtccatgcataacacaatgaagtctaagtctcctcttcccttaactttacaacatttagtggctttttgggaagacatctctttggctactatcaaagctgcttcccagaatatgatttttccaagtcctggttcctgtgcagttcttaaaaagaaagagtgtgagaaagagaataagaagtccaaaaaggaaaaaaagaaaaaagaaaaggcagaagttaggcccaggggtaatttgtttggagagatggcccagctggcagtaggaggaccagagaaagataccatctgtgaactgtgtggggagtcacatccatacccggtgacctatcacatgagacaagctcacccaggttgtggccgatatgctggtggacaaggttacaatagcattgggcatttttgtggaggatgggctggtaactgtggtgatggtggcataggaggaagcacttggtatctggtatgtgatcgctgtagagaaaaatacctccgcgaaaaacaggctgctgcaagggagaaggtcaaacaatctaggagaaaaccaatgcaagtcaagacccctcgtgccttgcccaccatggaagctcaccaggtgattaaagccaatgcactcttcctgctgtccctgagcagtgcagcagaaccgagcattctgtgttaccatcctgcaaagccattccaatctcagttgcccagtgtaaaagaaggcatttctgaggatcttcctgtgaaaatgccttgtctctacctgcagacattagctaggcatcatcatgaaaattttgtgggctatcaagatgacaatctattccaggatgaaatgagatatctacgttcaacatctgtacctgccccgtatatatcagtaactcctgatgcaagtcctaatgtatttgaagagccagagagcaatatgaagtctatgccaccaagtttagaaaccagtcccataactgatactgatcttgcaaagagaactgtcttccaaagatcatactcagttgttgcttccgaatatgataaacaacactccattttacctgcacgagttaaagctattcctagaagaagagttaacagtggagacactgaagttggttcttcccttttgagacatccgtctcctgagctttctcggctaatctcagcccacagctctctttctaaaggagaacgaaatttccagtggccagttttagcttttgttatacaacatcatgatctagaaggtcttgaaatagcaatgaaacaggccctaaggaaatctgcttgtcgagtttttgctatggaggctttcaactggcttctgtgtaatgtcatccaaaccacttctctccatgatattctgtggcattttgtggcatcactgactcctgcaccagtggaaccagaggaagaagaggatgaagaaaataaaacaagcaaagaaaattcagaacaagagaaagatacaagagtatgtgaacatccactctcagacatagtgattgccggggaagctgctcatcctttaccacacacctttcaccgcttgctgcagaccatctcagaccttatgatgtctctccccagcggcagttcattacagcaaatggccctgaggtgctggagtctcaaattcaagcaatctgatcaccagttccttcatcagagcaacgtctttcatcacattaacaatattttgtcaaagtcagatgatggcgatagtgaagagagttttagcatcagtatacagtctggctttgaagctatgagtcaggaattatgcatagtaatgtgcttaaaggacttaaccagcattgttgacataaaaacttcaagccgacctgccatgattggcagtttgacagacggctccacagaaaccttttgggaatcaggagatgaagataaaaacaaaactaagaacatcaccatcaactgtgtaaaaggaatcaatgcccgctatgtgtctgttcacgtggacaattcccgagatcttgggaataaagttacctcaatgaccttcttaactggcaaagcagtagaagatttgtgcagaataaagcaggttgatctggattccaggcacattggctgggtaacaagtgaacttccaggaggggataatcacatcataaaaattgaattaaaaggcccagaaaatacactgagagttcgacaagtcaaagtcctgggctggaaagatggtgaaagcacaaaaatagctggccagatttcagccagtgtggcccagcagaggaactgtgaagctgagactctgcgagtattcagactgattacgtctcaagtatttggaaagctcatctctggagatgctgaacctacaccagaacaagaggaaaaagcactattgtcatcacctgaaggagaagaaaaagtatacaatgcaacatcagatgctgacctgaaagaacatatggttggaatcatattcagcaggagtaagctgactaacttacaaaaacaggtgtgtgctcatattgtccaagctattcgcatggaagctaccagagtccgtgaagaatgggaacatgctatatcaagcaaagaaaatgccaattctcagccaaatgatgaagatgcctcctctgatgcctactgctttgagctgctctctatggttttagcactgagtggctctaacgttggccggcaatatctggctcaacagctaaccctgcttcaggatctcttctcgctgcttcacacagcctctcctagagtccagagacaggtaacctctttactaagaagagttttgcctgaagtaacccctagtcgtctggccagcatcataggagtgaaatccctccccccagcagatatcagtgatatcattcactcaacagagaaaggagactggaataagctgggtatcttggacatgtttctaggatgcattgccaaagcactcactgtacagctaaaagccaaaggaaccaccatcactggaacagctggtaccactgtgggcaaaggagttacaacagttactcttccgatgattttcaattccagttatctccgacgaggtgaaagtcattggtggatgaagggctcaacccctacccagatctcagagatcatcattaaacttatcaaggatatggcagcaggtcatctgtcagaagcttggtcccgagtgacaaaaaatgctattgcagaaaccatcattgccttgaccaagatggaagaagaatttaggtctccagtgagatgtattgcaacaactagactctggcttgctctcgcatccctatgtgttcttgatcaggaccacgtagatcgtctctcctcggggagatggatgggaaaggatggacaacaaaaacaaatgcctatgtgtgataaccatgatgatggtgaaactgcagcaatcattttatgcaatgtctgtggaaatttatgtacagactgtgacagattccttcaccttcatcgaagaaccaaaactcatcaaagacaggtcttcaaagaagaagaagaagctataaaggttgaccttcatgaaggttgtggtagaaccaaattgttctggttgatggcactggcagattctaaaacaatgaaggcaatggtggaattccgagaacacacaggcaaacccaccacgagtagctcagaagcatgtcgcttctgtggttccaggagtggaacagagttatctgctgttggcagtgtttgttctgatgcagattgccaggaatacgctaagatagcctgtagtaagacgcatccttgtggccatccatgcgggggtgttaaaaacgaagagcactgtctgccctgtctacacggctgtgacaaaagtgccacaagcctgaagcaagacgccgatgacatgtgcatgatatgtttcaccgaagcgctctcggcagcaccagccattcagctggattgtagtcacatattccacttacagtgctgtcggcgagtattagaaaatcgatggcttggcccaaggataacatttggatttatatcttgtcccatttgcaagaacaaaattaatcacatagtactaaaagacctacttgatccaataaaagaactctatgaggatgtcagaagaaaagccttaatgagattggaatatgaaggtctgcataagagtgaagctatcacaactcctggtgtgaggttttataatgacccagctggctatgcaatgaatagatatgcatattatgtgtgctacaaatgcagaaaggcatattttggtggtgaagctcgctgcgatgctgaggctggacggggagatgattatgatcccagagagctcatttgtggtgcctgttctgatgtttccagggctcagatgtgtcccaaacatggcacagactttttggaatataaatgtcgctactgctgttcagtggctgtttttttctgttttggaacaacacatttttgtaatgcttgtcatgatgattttcaaagaatgactagcattcctaaggaagaactaccacactgtcctgcaggtcccaaaggcaagcagttagaaggaactgaatgtccactccatgttgttcatccacccactggggaagagtttgctctgggatgtggagtgtgcagaaatgcccacactttttagaacacgcagatcctttgtctacagagagaaaaattgccttcatcccccaagaggatgcggtgaagtttaaactctgctcaggataaggacgggaccatttttacatccatgaaaatgaaccattcacagtgcaagaaggataccaaataccatgtacataattcttgctatgaaaagtttccccattattttggtttatcttcttttgaacaaatgacatcaaacttgtgaggtgtttgcatgtggccattaccgtcattggcctgtgaagcattggacatttatagataattgatataaaagaatcgccatgcccatggactaagaacgatgctggctttcaagcaaaaaagaaaaataatcattgtttattgtatactgcctttttgtaatcctgtacaattgcatcacgggtggggataaaaagaggaatattctggtttatttcctagactgttatttaaaaaaaaaaaaaacattgtgttaggacagcatataaatgtaataagtatcacactgtatataaacatatcaatgtttgtcctgtataagaattactaaattacaaatgcaatttcatttaaacttctaggttaagtttgagcctgaaattttaatgaagtgcaatactgagtgtgcctcattatcttgcagctgtaaacatattggaatgtacatgtcaataaaaccactgtacatttttatacagtgataaagtcta

SEQ ID NO: 2655 - DNA, 9243 bp, Homo sapiens
  source 1..9243: mol_type = genomic DNA
ggcggcggcagtggcggcaccgcctcctcctcacattcccggggtggcggggttagatgagcggccccagtagcggcgccgggggcgctgttcatgccggttcccgacggctccgtggctgctgcggggctggggctggggctacccgccgcggactcccggggtcactaccagctgctgctgtcaggccgggccctggccgaccgctaccggaggatttataccgctgcgctcaatgacagggaccaggggggcggcagcgctggacacccagcctccaggaataagaaaattttaaataagaagaaattgaaaagaaaacagaagagcaaatcaaaagtgaagacaagaagcaagtctgaaaacttagagaatacagtaatcataccagatatcaaactacatagcaatccttctgctttcaatatttactgtaatgtacgccattgcgttctggaatggcagaaaaaggaaatatcattggcagccgcatctaagaactctgtgcagagtggagaatcagatagtgatgaagaagaggaatccaaagagccccctatcaagcttccaaagattattgaggttggcctttgtgaagtttttgaattgatcaaagagacacgattttctcatccatccctgtgtctcaggagtctccaagccctgctcaacgtgctgcagggccagcagccagaaggcctccagtctgagccacctgaggtcctagagtctctcttccagcttcttttggaaatcaccgttcgaagtactgggatgaatgacagcacaggacagtccttaacagcactttcctgtgcttgcctctttagtctggtggcttcttggggagaaacaggaaggacacttcaggccatctctgctatcctcaccaacaatggaagccatgcttgccaaactattcaggtgccaacaattctaaattcgctacagagaagtgtacaagcagttttggtgggaaaaattcaaattcaggactggtttagtaatggcattaagaaagcagctttaatgcacaagtggccattaaaagaaatatctgttgatgaagatgaccaatgtctacttcagaatgatggattttttctttatctattatgcaaggatggattatataaaataggctctggatacagtggaacagttaggggccatatatacaattctacatcccgtattagaaacagaaaagaaaaaaagtcttggttagggtatgctcagggttatttattatatagagatgtgaataaccacagcatgacagccataaggataagccctgaaacactggagcaagatggtactgtgatgttaccagattgccacactgaaggtcaaaatattttattcactgatggagaatatattaatcagatagctgcttcaagagatgatggctttgttgtcagaatatttgccacaagcactgaacctgttctacagcaagaattgcaacttaaactggctagaaaatgcttacatgcctgtggtatctcactattcgatctggaaaaggacttgcatattataagtacaggatttgatgaggagtcagcaattcttggtgcaggacgagagtttgcgctaatgaaaacagcaaatggaaagatatattacactggcaaataccagagtcttggaatcaaacaaggtggtccttcagcaggaaaatgggttgagctaccaattacaaaatctccaaagatagtacacttctcagttggacacgatggctctcacgcccttttagttgcagaagatgggagcatattctttacaggatctgctagtaaaggagaagatggagaatcaactaagagcagacggcaatccaaaccttataaacctaaaaagataattaagatggaaggaaagattgtggtatatacagcctgcaataatggaagtagttctgttatttctaaagatggagaactctacatgtttggaaaagatgccatttactctgatagttcaagtttggtaactgatttgaagggccattttgtaactcaggtagctatgggcaaagctcacacttgtgttttaatgaagaatggagaggtgtggacatttggtgtaaataataaaggacagtgtggacgagatactggtgccatgaaccaaggtgggaaagggtttggagttgaaaatatggcaacagcaatggatgaagacctggaagaagaactagatgaaaaagatgagaagtctatgatgtgccctccaggcatgcacaaatggaagctggagcagtgcatggtttgcactgtctgtggagactgtacaggttatggagccagctgtgtcagtagtggacggccagacagagtccccggagggatctgtggttgtggttccggagaatctggttgtgctgtgtgtggatgttgcaaggcctgtgcaagagagttagatggtcaagaggcaagacaaagaggaattcttgatgcagtgaaagaaatgatacctttagatcttcttttagctgtcccagtgcccggggttaacattgaagaacaccttcagttacgacaagaagaaaaacggcaacgtgtaatcagaaggcacagattagaggaaggaagaggcccccttgtatttgctggtcctatttttatgaaccatcgagaacaggctctagccagactcagatcccatccagcacagctaaagcataaacgggacaagcacaaagatggaagtggagaaagaggcgaaaaggatgcaagcaaaatcacaacataccctccaggctctgtgcgatttgactgtgagctccgggcagtccaagtcagctgtggatttcaccattcagtggttttaatggaaaatggagatgtctatacatttggttatgggcagcatgggcagctaggacatggagatgtcaactccaggggatgtcccactcttgttcaagcattgccaggccctagcacacaagtcactgcaggcagcaaccatacggcagtacttttaatggatggacaggtcttcacatttggaagtttttctaaaggacaactgggcagaccaattttggatgtgccatattggaatgcaaagccagctcccatgcctaacattggatcaaaatatggaagaaaagctacttggataggtgcaagtggggaccaaacttttttacgaattgatgaagcacttattaattctcatgtacttgctacatcagaaatttttgccagtaaacacataataggcttggtacctgcttctatatcagaacctcctccatttaaatgccttctgataaataaagtggatgggagttgtaaaacttttaatgactcagaacaagaggatctgcaaggatttggtgtgtgtcttgatcctgtatatgatgtaatttggaggtttcgaccaaatactagagagctgtggtgttacaatgcggtggttgctgatgccaggcttccctctgcagcagacatgcagtccagatgtagtatcctaagtcctgaacttgccttaccaacaggatcaagggccctcactacccgatctcatgcagctttgcacattttaggttgtcttgataccttggcagctatgcaggacttaaaaatgggtgttgcaagtacagaggaagagactcaagcagtaatgaaggtttattctaaagaagattatagtgtggtaaacaggtttgaaagtcatggaggaggctggggttattctgcccattcagtagaagctatacgtttcagtgccgacactgatattttacttggtggtcttggtctgtttggaggtagaggagaatatactgctaaaattaagctgtttgaattgggtcctgatggaggagatcatgaaactgatggtgaccttcttgcagagactgatgtattggcttatgactgtgctgctagagaaaaatatgcaatgatgtttgatgagcctgttctcctgcaagctgggtggtggtatgtggcatgggcccgagtgtcaggacccagcagtgactgtggatctcatggacaggcatctattaccacagatgatggggttgttttccagttcaagagttcaaagaaatcaaataatggtacagatgttaatgcgggtcagatacctcagttattatacagacttccaaccagtgatggcagtgcttcaaaaggcaaacagcaaaccagtgaacctgtacacattttaaagaggtcttttgcaagaactgtctcagtggaatgttttgagtcattgttgagtattcttcactggagctggaccaccttagtcttaggagttgaagaacttagaggattaaaaggattccagttcacagctacactcctagatttagagagactgcgctttgtgggtacctgttgtctgaggttattgcgtgtctatacctgtgaaatttacccagtgtcagctacaggaaaagcagttgtagaagaaactagcaaattagcagagtgtattggaaaaaccagaactttgttaagaaaaattttatcagaaggagttgatcactgcatggtgaaattggataatgatcctcaaggatatctcagtcaacccttgagtcttctagaagctgtccttcaggaatgtcataatactttcactgcctgctttcattctttctacccaactcctgccttacagtgggcttgcctttgtgatctgctgaattgtttggatcaggatatccaagaagcaaacttcaagacatcaagtagccgactccttgcagctgttatgtcagctctgtgtcacacgtctgttaagctgacttccatcttcccgattgcgtatgatggagaagtattactacgatcaattgttaaacaagttagtacagagaacgactcaacactagttcatcgttttccccttttggtggcacatatggaaaaactcagccagagtgaagagaatatctcagggatgacaagcttccgtgaagttctggagaaaatgctggtcattgttgtgctaccagtcaggaacagcctgaggagagaaaatgaactcttctcctcccacctcgtctctaacacctgtggattactggccagcattgtcagtgaactgacagcgtcagccctgggatctgaggttgatggacttaattctcttcactctgtaaaagctagtgctaaccgatttacaaaaacaagtcagggcagaagttggaacactgggaacgggtcccctgatgcaatctgtttttcagtagacaaacctggaatagttgtggttggtttctctgtctatggaggaggtggaattcatgaatatgaattagaggtgttggttgatgatagtgaacatgcaggagattcaactcattcccacagatggacatctctggaattagtgaaaggaacgtacacaacggatgactcacccagtgatatagctgagatcagacttgacaaagtggttcctttaaaggaaaatgttaaatatgctgtgcgcttgaggaactatggaagccgtacagccaatggagatggaggaatgaccacagttcagtgccctgatggtgtgacattcacattcagcacgtgcagcttgagcagtaacggcacaaaccaaaccagaggacagatcccacagatactctactataggagtgaatttgatggagatttacaatcccaacttctgagtaaagccaatgaagaagataaaaactgtagcagagcattgtctgttgtaagcactgtcgttcgagcctctaaggacctcctgcacagagctcttgctgtggatgctgatgacattccagaactgctgagttcttccagtctgttttccatgctgctcccccttattatagcctacataggaccagtagctgctgctattcccaaggtggctgtagaagtctttggccttgtccaacaattgcttccgtcagttgccattttgaatcagaagtatgcaccgcctgccttcaaccctaatcagtcgacagatagcaccacaggaaaccagcctgaacagggcctctctgcttgtacaacctccagtcactatgctgtcatagagagtgagcacccgtataaacctgcctgtgtgatgcattacaaggtgacattcccagaatgtgtgaggtggatgacaatcgaatttgaccctcagtgtggtactgcacagtcagaagatgtccttcgtttgttgattcctgtcagaactgttcagaattcaggatatggaccaaaattgacatctgttcatgaaaatcttaattcatggatagaattaaagaaattttcaggatcctctgggtggcctactatggttttggtgttgccaggaaatgaggcccttttttcattggagactgcatcagattatgtgaaagatgacaaagcttctttctatggttttaagtgttttgcaattggatatgaatttagccctggacctgatgagggagtcatccaattggaaaaagaattagccaatcttggtggggtttgtgcagcagctctgatgaagaaggacctagcacttcctattggtaatgaattagaagaagaccttgaaattcttgaggaggctgcattgcaggtgtgcaaaacccattctggaattcttggaaagggtctagctctttctcattcaccaactatattagaagcacttgagggaaatttaccactccaaatccaaagcaatgaacagtcttttctggatgattttattgcctgtgtcccaggatcaagtggtggaaggcttgcaaggtggcttcagccagattcatatgcggatcctcagaaaacatctttgatcctgaataaggatgatattcgttgtggttggcctaccaccataactgttcaaacaaaagaccagtatggggatgtggtacatgttcccaatatgaaggtggaagtgaaagctgtccctgtttctcagaaaaaaatgtctttacaacaagatcaagcaaagaaacctcaaaggattcctggcagtcctgcagtaacagctgcatcttctaatactgacatgacttatggagggctggcatcaccaaagctagatgtttcatatgaaccaatgatagtgaaggaagctcgatatattgccataacaatgatgaaggtttatgaaaattattcatttgaagaactacgttttgcatcaccaactcctaagagacccagtgagaatatgctgatccgtgtcaataatgatgggacttattgtgcaaattggactccaggggctattggactctacactcttcatgttaccattgatggcattgaaatcgatgctggtctggaagtaaaagtaaaagacccaccaaaagggatgataccaccaggaactcagttggtcaaaccaaagtctgaacctcagcctaataaggttcgaaaatttgtggccaaggacagtgcggggcttcgcatccgtagccacccttcccttcagagtgagcagataggcatagtgaaagtcaatggaactatcacttttattgatgagatccataatgatgatggtgtgtggctgaggctgaatgatgagacaataaagaagtatgtccctaacatgaatggttacactgaagcctggtgcctctcttttaatcaacatcttggcaagagtcttctggtccctgttgacgaatctaaaactaatactgatgactttttcaaagacataaactcctgctgcccacaggaagcaacaatgcaagaacaagatatgccattcttgcgaggagggccaggcatgtacaaggtagtgaagacgggaccttcaggtcacaacatcagaagctgccctaaccttagaggtatcccaattggaatgttagttctgggaaacaaagtcaaagcagtgggagaggtaaccaattctgaagggacatgggtgcaactggatcagaacagcatggtagagttctgtgagagtgatgaaggagaggcatggtccttagctagagacagaggcggaaaccagtacctccgacatgaagatgaacaagctcttctggatcagaattctcaaactcctcctccaagccctttctcagtgcaagcttttaataaaggggcaagttgcagtgcccaaggatttgattatggactcggaaatagcaaagttttgactgttttacccactgcaggtgaccaactgagtgccatattgaattccattcagtcacgacccaatctcccagctccttccatctttgatcaagctgcaaaacctccctcttccctagtacacagcccatttgtgttcggacagcccctttccttccagcagcctcagcttcagagtgatcgaggaaacatctcaacatcttctaaaccagcctctacatcaggaaaatcagagctgtcctctaaacacagcagatcgcttaaacctgatggacgtatgagccggactactgctgatcagaagaagccaaggggcacagaaagtttatctgctagtgaatccctcatcttaaaatctgatgctgcaaagttgaggtcagattcccacagtaggtcattatcccccaaccataacaccttgcagacattgaaatctgatgggaggatgccttctagctccagagctgaatccccaggaccaggttctcggttgtcatctcctaagccaaagactctcccagccaataggtctagcccatcgggtgctagttctccacgctcctcctcaccacatgataaaaatctacctcaaaaaagtactgctcctgttaagacaaagcttgatcctcctcgggaacgttctaaatcagactcttacacacttgatccagataccctccgcaagaagaaaatgcccctcacagaacctttgagaggacggtcaacgtcaccaaaaccaaaatcagtaccaaaggattctacagattcccctggatctgaaaatagagctccctctccccatgtggtacaggaaaacctccacagtgaggtggtcgaagtctgcacctcaagtactttaaaaacaaatagtctaacagacagcacctgcgatgacagcagtgaatttaagagtgtggatgaaggttcaaataaagttcattttagcattggaaaagcaccactgaaagatgaacaggaaatgagagcatctcccaaaataagtcgaaaatgtgctaatagacacaccaggcccaaaagaaaaatcgagttttcttttcaaaggagatggatccaagcctttagagccagccaagcaagccatgtctccttctgtggccga

SEQ ID NO: 2656 - DNA, 15025 bp, Homo sapiens
  source 1..15025: mol_type = genomic DNA
cggcggcagtggcggcaccgcctcctcctcacattcccggggtggcggggttagatgagcggccccagtagcggcgagggcggcgcgggggggaggaggagaagaaggaggaggagaaggaggtcgctgtctttgtagtctccctgctgcgggagccagaggccgccgccggagccgtcgtcgttggaaaagggctgtgtgtgcgcgcgcgtgtctgcccgcccggcccgcggggacgaggcggcggcggcggcggcggcggcgaggatgatgatgtgcgcagcgactgcctcccccgccgccgcctcctcggggctcggcggggacggattctacccagccgccaccttctcttcctccccggcgccgggggcgctgttcatgccggttcccgacggctccgtggctgctgcggggctggggctggggctacccgccgcggactcccggggtcactaccagctgctgctgtcaggccgggccctggccgaccgctaccggaggatttataccgctgcgctcaatgacagggaccaggggggcggcagcgctggacacccagcctccaggaataagaaaattttaaataagaagaaattgaaaagaaaacagaagagcaaatcaaaagtgaagacaagaagcaagtctgaaaacttagagaatacagtaatcataccagatatcaaactacatagcaatccttctgctttcaatatttactgtaatgtacgccattgcgttctggaatggcagaaaaaggaaatatcattggcagccgcatctaagaactctgtgcagagtggagaatcagatagtgatgaagaagaggaatccaaagagccccctatcaagcttccaaagattattgaggttggcctttgtgaagtttttgaattgatcaaagagacacgattttctcatccatccctgtgtctcaggagtctccaagccctgctcaacgtgctgcagggccagcagccagaaggcctccagtctgagccacctgaggtcctagagtctctcttccagcttcttttggaaatcaccgttcgaagtactgggatgaatgacagcacaggacagtccttaacagcactttcctgtgcttgcctctttagtctggtggcttcttggggagaaacaggaaggacacttcaggccatctctgctatcctcaccaacaatggaagccatgcttgccaaactattcaggtgccaacaattctaaattcgctacagagaagtgtacaagcagttttggtgggaaaaattcaaattcaggactggtttagtaatggcattaagaaagcagctttaatgcacaagtggccattaaaagaaatatctgttgatgaagatgaccaatgtctacttcagaatgatggattttttctttatctattatgcaaggatggattatataaaataggctctggatacagtggaacagttaggggccatatatacaattctacatcccgtattagaaacagaaaagaaaaaaagtcttggttagggtatgctcagggttatttattatatagagatgtgaataaccacagcatgacagccataaggataagccctgaaacactggagcaagatggtactgtgatgttaccagattgccacactgaaggtcaaaatattttattcactgatggagaatatattaatcagatagctgcttcaagagatgatggctttgttgtcagaatatttgccacaagcactgaacctgttctacagcaagaattgcaacttaaactggctagaaaatgcttacatgcctgtggtatctcactattcgatctggaaaaggacttgcatattataagtacaggatttgatgaggagtcagcaattcttggtgcaggacgagagtttgcgctaatgaaaacagcaaatggaaagatatattacactggcaaataccagagtcttggaatcaaacaaggtggtccttcagcaggaaaatgggttgagctaccaattacaaaatctccaaagatagtacacttctcagttggacacgatggctctcacgcccttttagttgcagaagatgggagcatattctttacaggatctgctagtaaaggagaagatggagaatcaactaagagcagacggcaatccaaaccttataaacctaaaaagataattaagatggaaggaaagattgtggtatatacagcctgcaataatggaagtagttctgttatttctaaagatggagaactctacatgtttggaaaagatgccatttactctgatagttcaagtttggtaactgatttgaagggccattttgtaactcaggtagctatgggcaaagctcacacttgtgttttaatgaagaatggagaggtgtggacatttggtgtaaataataaaggacagtgtggacgagatactggtgccatgaaccaaggtgggaaagggtttggagttgaaaatatggcaacagcaatggatgaagacctggaagaagaactagatgaaaaagatgagaagtctatgatgtgccctccaggcatgcacaaatggaagctggagcagtgcatggtttgcactgtctgtggagactgtacaggttatggagccagctgtgtcagtagtggacggccagacagagtccccggagggatctgtggttgtggttccggagaatctggttgtgctgtgtgtggatgttgcaaggcctgtgcaagagagttagatggtcaagaggcaagacaaagaggaattcttgatgcagtgaaagaaatgatacctttagatcttcttttagctgtcccagtgcccggggttaacattgaagaacaccttcagttacgacaagaagaaaaacggcaacgtgtaatcagaaggcacagattagaggaaggaagaggcccccttgtatttgctggtcctatttttatgaaccatcgagaacaggctctagccagactcagatcccatccagcacagctaaagcataaacgggacaagcacaaagatggaagtggagaaagaggcgaaaaggatgcaagcaaaatcacaacataccctccaggctctgtgcgatttgactgtgagctccgggcagtccaagtcagctgtggatttcaccattcagtggttttaatggaaaatggagatgtctatacatttggttatgggcagcatgggcagctaggacatggagatgtcaactccaggggatgtcccactcttgttcaagcattgccaggccctagcacacaagtcactgcaggcagcaaccatacggcagtacttttaatggatggacaggtcttcacatttggaagtttttctaaaggacaactgggcagaccaattttggatgtgccatattggaatgcaaagccagctcccatgcctaacattggatcaaaatatggaagaaaagctacttggataggtgcaagtggggaccaaacttttttacgaattgatgaagcacttattaattctcatgtacttgctacatcagaaatttttgccagtaaacacataataggcttggtacctgcttctatatcagaacctcctccatttaaatgccttctgataaataaagtggatgggagttgtaaaacttttaatgactcagaacaagaggatctgcaaggatttggtgtgtgtcttgatcctgtatatgatgtaatttggaggtttcgaccaaatactagagagctgtggtgttacaatgcggtggttgctgatgccaggcttccctctgcagcagacatgcagtccagatgtagtatcctaagtcctgaacttgccttaccaacaggatcaagggccctcactacccgatctcatgcagctttgcacattttaggttgtcttgataccttggcagctatgcaggacttaaaaatgggtgttgcaagtacagaggaagagactcaagcagtaatgaaggtttattctaaagaagattatagtgtggtaaacaggtttgaaagtcatggaggaggctggggttattctgcccattcagtagaagctatacgtttcagtgccgacactgatattttacttggtggtcttggtctgtttggaggtagaggagaatatactgctaaaattaagctgtttgaattgggtcctgatggaggagatcatgaaactgatggtgaccttcttgcagagactgatgtattggcttatgactgtgctgctagagaaaaatatgcaatgatgtttgatgagcctgttctcctgcaagctgggtggtggtatgtggcatgggcccgagtgtcaggacccagcagtgactgtggatctcatggacaggcatctattaccacagatgatggggttgttttccagttcaagagttcaaagaaatcaaataatggtacagatgttaatgcgggtcagatacctcagttattatacagacttccaaccagtgatggcagtgcttcaaaaggcaaacagcaaaccagtgaacctgtacacattttaaagaggtcttttgcaagaactgtctcagtggaatgttttgagtcattgttgagtattcttcactggagctggaccaccttagtcttaggagttgaagaacttagaggattaaaaggattccagttcacagctacactcctagatttagagagactgcgctttgtgggtacctgttgtctgaggttattgcgtgtctatacctgtgaaatttacccagtgtcagctacaggaaaagcagttgtagaagaaactagcaaattagcagagtgtattggaaaaaccagaactttgttaagaaaaattttatcagaaggagttgatcactgcatggtgaaattggataatgatcctcaaggatatctcagtcaacccttgagtcttctagaagctgtccttcaggaatgtcataatactttcactgcctgctttcattctttctacccaactcctgccttacagtgggcttgcctttgtgatctgctgaattgtttggatcaggatatccaagaagcaaacttcaagacatcaagtagccgactccttgcagctgttatgtcagctctgtgtcacacgtctgttaagctgacttccatcttcccgattgcgtatgatggagaagtattactacgatcaattgttaaacaagttagtacagagaacgactcaacactagttcatcgttttccccttttggtggcacatatggaaaaactcagccagagtgaagagaatatctcagggatgacaagcttccgtgaagttctggagaaaatgctggtcattgttgtgctaccagtcaggaacagcctgaggagagaaaatgaactcttctcctcccacctcgtctctaacacctgtggattactggccagcattgtcagtgaactgacagcgtcagccctgggatctgaggttgatggacttaattctcttcactctgtaaaagctagtgctaaccgatttacaaaaacaagtcagggcagaagttggaacactgggaacgggtcccctgatgcaatctgtttttcagtagacaaacctggaatagttgtggttggtttctctgtctatggaggaggtggaattcatgaatatgaattagaggtgttggttgatgatagtgaacatgcaggagattcaactcattcccacagatggacatctctggaattagtgaaaggaacgtacacaacggatgactcacccagtgatatagctgagatcagacttgacaaagtggttcctttaaaggaaaatgttaaatatgctgtgcgcttgaggaactatggaagccgtacagccaatggagatggaggaatgaccacagttcagtgccctgatggtgtgacattcacattcagcacgtgcagcttgagcagtaacggcacaaaccaaaccagaggacagatcccacagatactctactataggagtgaatttgatggagatttacaatcccaacttctgagtaaagccaatgaagaagataaaaactgtagcagagcattgtctgttgtaagcactgtcgttcgagcctctaaggacctcctgcacagagctcttgctgtggatgctgatgacattccagaactgctgagttcttccagtctgttttccatgctgctcccccttattatagcctacataggaccagtagctgctgctattcccaaggtggctgtagaagtctttggccttgtccaacaattgcttccgtcagttgccattttgaatcagaagtatgcaccgcctgccttcaaccctaatcagtcgacagatagcaccacaggaaaccagcctgaacagggcctctctgcttgtacaacctccagtcactatgctgtcatagagagtgagcacccgtataaacctgcctgtgtgatgcattacaaggtgacattcccagaatgtgtgaggtggatgacaatcgaatttgaccctcagtgtggtactgcacagtcagaagatgtccttcgtttgttgattcctgtcagaactgttcagaattcaggatatggaccaaaattgacatctgttcatgaaaatcttaattcatggatagaattaaagaaattttcaggatcctctgggtggcctactatggttttggtgttgccaggaaatgaggcccttttttcattggagactgcatcagattatgtgaaagatgacaaagcttctttctatggttttaagtgttttgcaattggatatgaatttagccctggacctgatgagggagtcatccaattggaaaaagaattagccaatcttggtggggtttgtgcagcagctctgatgaagaaggacctagcacttcctattggtaatgaattagaagaagaccttgaaattcttgaggaggctgcattgcaggtgtgcaaaacccattctggaattcttggaaagggtctagctctttctcattcaccaactatattagaagcacttgagggaaatttaccactccaaatccaaagcaatgaacagtcttttctggatgattttattgcctgtgtcccaggatcaagtggtggaaggcttgcaaggtggcttcagccagattcatatgcggatcctcagaaaacatctttgatcctgaataaggatgatattcgttgtggttggcctaccaccataactgttcaaacaaaagaccagtatggggatgtggtacatgttcccaatatgaaggtggaagtgaaagctgtccctgtttctcagaaaaaaatgtctttacaacaagatcaagcaaagaaacctcaaaggattcctggcagtcctgcagtaacagctgcatcttctaatactgacatgacttatggagggctggcatcaccaaagctagatgtttcatatgaaccaatgatagtgaaggaagctcgatatattgccataacaatgatgaaggtttatgaaaattattcatttgaagaactacgttttgcatcaccaactcctaagagacccagtgagaatatgctgatccgtgtcaataatgatgggacttattgtgcaaattggactccaggggctattggactctacactcttcatgttaccattgatggcattgaaatcgatgctggtctggaagtaaaagtaaaagacccaccaaaagggatgataccaccaggaactcagttggtcaaaccaaagtctgaacctcagcctaataaggttcgaaaatttgtggccaaggacagtgcggggcttcgcatccgtagccacccttcccttcagagtgagcagataggcatagtgaaagtcaatggaactatcacttttattgatgagatccataatgatgatggtgtgtggctgaggctgaatgatgagacaataaagaagtatgtccctaacatgaatggttacactgaagcctggtgcctctcttttaatcaacatcttggcaagagtcttctggtccctgttgacgaatctaaaactaatactgatgactttttcaaagacataaactcctgctgcccacaggaagcaacaatgcaagaacaagatatgccattcttgcgaggagggccaggcatgtacaaggtagtgaagacgggaccttcaggtcacaacatcagaagctgccctaaccttagaggtatcccaattggaatgttagttctgggaaacaaagtcaaagcagtgggagaggtaaccaattctgaagggacatgggtgcaactggatcagaacagcatggtagagttctgtgagagtgatgaaggagaggcatggtccttagctagagacagaggcggaaaccagtacctccgacatgaagatgaacaagctcttctggatcagaattctcaaactcctcctccaagccctttctcagtgcaagcttttaataaaggggcaagttgcagtgcccaaggatttgattatggactcggaaatagcaaaggtgatcgaggaaacatctcaacatcttctaaaccagcctctacatcaggaaaatcagagctgtcctctaaacacagcagatcgcttaaacctgatggacgtatgagccggactactgctgatcagaagaagccaaggggcacagaaagtttatctgctagtgaatccctcatcttaaaatctgatgctgcaaagttgaggtcagattcccacagtaggtcattatcccccaaccataacaccttgcagacattgaaatctgatgggaggatgccttctagctccagagctgaatccccaggaccaggttctcggttgtcatctcctaagccaaagactctcccagccaataggtctagcccatcgggtgctagttctccacgctcctcctcaccacatgataaaaatctacctcaaaaaagtactgctcctgttaagacaaagcttgatcctcctcgggaacgttctaaatcagactcttacacacttgatccagataccctccgcaagaagaaaatgcccctcacagaacctttgagaggacggtcaacgtcaccaaaaccaaaatcagtaccaaaggattctacagattcccctggatctgaaaatagagctccctctccccatgtggtacaggaaaacctccacagtgaggtggtcgaagtctgcacctcaagtactttaaaaacaaatagtctaacagacagcacctgcgatgacagcagtgaatttaagagtgtggatgaaggttcaaataaagttcattttagcattggaaaagcaccactgaaagatgaacaggaaatgagagcatctcccaaaataagtcgaaaatgtgctaatagacacaccaggcccaaaaaagaaaaatcgagttttcttttcaaaggagatggatccaagcctttagagccagccaagcaagccatgtctccttctgtggccgaatgtgccagagctgtgtttgcttccttcctctggcatgaaggcatagtacatgatgcaatggcttgttcttctttcctaaagtttcatcctgaactttccaaagaacatgctcctataaggagtagtttaaatagccaacaacctacagaggaaaaagaaaccaagttaaaaaatagacattcattagaaatatcatctgcactgaatatgtttaatattgcaccccatggaccagatatatctaagatgggtagcatcaacaaaaacaaggtattgtctatgcttaaggaaccacctctgcatgaaaaatgtgaggatgggaaaaccgagaccacttttgaaatgtccatgcataacacaatgaagtctaagtctcctcttcccttaactttacaacatttagtggctttttgggaagacatctctttggctactatcaaagctgcttcccagaatatgatttttccaagtcctggttcctgtgcagttcttaaaaagaaagagtgtgagaaagagaataagaagtccaaaaaggaaaaaaagaaaaaagaaaaggcagaagttaggcccaggggtaatttgtttggagagatggcccagctggcagtaggaggaccagagaaagataccatctgtgaactgtgtggggagtcacatccatacccggtgacctatcacatgagacaagctcacccaggttgtggccgatatgctggtggacaaggttacaatagcattgggcatttttgtggaggatgggctggtaactgtggtgatggtggcataggaggaagcacttggtatctggtatgtgatcgctgtagagaaaaatacctccgcgaaaaacaggctgctgcaagggagaaggtcaaacaatctaggagaaaaccaatgcaagtcaagacccctcgtgccttgcccaccatggaagctcaccaggtgattaaagccaatgcactcttcctgctgtccctgagcagtgcagcagaaccgagcattctgtgttaccatcctgcaaagccattccaatctcagttgcccagtgtaaaagaaggcatttctgaggatcttcctgtgaaaatgccttgtctctacctgcagacattagctaggcatcatcatgaaaattttgtgggctatcaagatgacaatctattccaggatgaaatgagatatctacgttcaacatctgtacctgccccgtatatatcagtaactcctgatgcaagtcctaatgtatttgaagagccagagagcaatatgaagtctatgccaccaagtttagaaaccagtcccataactgatactgatcttgcaaagagaactgtcttccaaagatcatactcagttgttgcttccgaatatgataaacaacactccattttacctgcacgagttaaagctattcctagaagaagagttaacagtggagacactgaagttggttcttcccttttgagacatccgtctcctgagctttctcggctaatctcagcccacagctctctttctaaaggagaacgaaatttccagtggccagttttagcttttgttatacaacatcatgatctagaaggtcttgaaatagcaatgaaacaggccctaaggaaatctgcttgtcgagtttttgctatggaggctttcaactggcttctgtgtaatgtcatccaaaccacttctctccatgatattctgtggcattttgtggcatcactgactcctgcaccagtggaaccagaggaagaagaggatgaagaaaataaaacaagcaaagaaaattcagaacaagagaaagatacaagagtatgtgaacatccactctcagacatagtgattgccggggaagctgctcatcctttaccacacacctttcaccgcttgctgcagaccatctcagaccttatgatgtctctccccagcggcagttcattacagcaaatggccctgaggtgctggagtctcaaattcaagcaatctgatcaccagttccttcatcagagcaacgtctttcatcacattaacaatattttgtcaaagtcagatgatggcgatagtgaagagagttttagcatcagtatacagtctggctttgaagctatgagtcaggaattatgcatagtaatgtgcttaaaggacttaaccagcattgttgacataaaaacttcaagccgacctgccatgattggcagtttgacagacggctccacagaaaccttttgggaatcaggagatgaagataaaaacaaaactaagaacatcaccatcaactgtgtaaaaggaatcaatgcccgctatgtgtctgttcacgtggacaattcccgagatcttgggaataaagttacctcaatgaccttcttaactggcaaagcagtagaagatttgtgcagaataaagcaggttgatctggattccaggcacattggctgggtaacaagtgaacttccaggaggggataatcacatcataaaaattgaattaaaaggcccagaaaatacactgagagttcgacaagtcaaagtcctgggctggaaagatggtgaaagcacaaaaatagctggccagatttcagccagtgtggcccagcagaggaactgtgaagctgagactctgcgagtattcagactgattacgtctcaagtatttggaaagctcatctctggagatgctgaacctacaccagaacaagaggaaaaagcactattgtcatcacctgaaggagaagaaaaagtatacaatgcaacatcagatgctgacctgaaagaacatatggttggaatcatattcagcaggagtaagctgactaacttacaaaaacaggtgtgtgctcatattgtccaagctattcgcatggaagctaccagagtccgtgaagaatgggaacatgctatatcaagcaaagaaaatgccaattctcagccaaatgatgaagatgcctcctctgatgcctactgctttgagctgctctctatggttttagcactgagtggctctaacgttggccggcaatatctggctcaacagctaaccctgcttcaggatctcttctcgctgcttcacacagcctctcctagagtccagagacaggtaacctctttactaagaagagttttgcctgaagtaacccctagtcgtctggccagcatcataggagtgaaatccctccccccagcagatatcagtgatatcattcactcaacagagaaaggagactggaataagctgggtatcttggacatgtttctaggatgcattgccaaagcactcactgtacagctaaaagccaaaggaaccaccatcactggaacagctggtaccactgtgggcaaaggagttacaacagttactcttccgatgattttcaattccagttatctccgacgaggtgaaagtcattggtggatgaagggctcaacccctacccagatctcagagatcatcattaaacttatcaaggatatggcagcaggtcatctgtcagaagcttggtcccgagtgacaaaaaatgctattgcagaaaccatcattgccttgaccaagatggaagaagaatttaggtctccagtgagatgtattgcaacaactagactctggcttgctctcgcatccctatgtgttcttgatcaggaccacgtagatcgtctctcctcggggagatggatgggaaaggatggacaacaaaaacaaatgcctatgtgtgataaccatgatgatggtgaaactgcagcaatcattttatgcaatgtctgtggaaatttatgtacagactgtgacagattccttcaccttcatcgaagaaccaaaactcatcaaagacaggtcttcaaagaagaagaagaagctataaaggttgaccttcatgaaggttgtggtagaaccaaattgttctggttgatggcactggcagattctaaaacaatgaaggcaatggtggaattccgagaacacacaggcaaacccaccacgagtagctcagaagcatgtcgcttctgtggttccaggagtggaacagagttatctgctgttggcagtgtttgttctgatgcagattgccaggaatacgctaagatagcctgtagtaagacgcatccttgtggccatccatgcgggggtgttaaaaacgaagagcactgtctgccctgtctacacggctgtgacaaaagtgccacaagcctgaagcaagacgccgatgacatgtgcatgatatgtttcaccgaagcgctctcggcagcaccagccattcagctggattgtagtcacatattccacttacagtgctgtcggcgagtattagaaaatcgatggcttggcccaaggataacatttggatttatatcttgtcccatttgcaagaacaaaattaatcacatagtactaaaagacctacttgatccaataaaagaactctatgaggatgtcagaagaaaagccttaatgagattggaatatgaaggtctgcataagagtgaagctatcacaactcctggtgtgaggttttataatgacccagctggctatgcaatgaatagatatgcatattatgtgtgctacaaatgcagaaaggcatattttggtggtgaagctcgctgcgatgctgaggctggacggggagatgattatgatcccagagagctcatttgtggtgcctgttctgatgtttccagggctcagatgtgtcccaaacatggcacagactttttggaatataaatgtcgctactgctgttcagtggctgtttttttctgttttggaacaacacatttttgtaatgcttgtcatgatgattttcaaagaatgactagcattcctaaggaagaactaccacactgtcctgcaggtcccaaaggcaagcagttagaaggaactgaatgtccactccatgttgttcatccacccactggggaagagtttgctctgggatgtggagtgtgcagaaatgcccacactttttagaacacgcagatcctttgtctacagagagaaaaattgccttcatcccccaagaggatgcggtgaagtttaaactctgctcaggataaggacgggaccatttttacatccatgaaaatgaaccattcacagtgcaagaaggataccaaataccatgtacataattcttgctatgaaaagtttccccattattttggtttatcttcttttgaacaaatgacatcaaacttgtgaggtgtttgcatgtggccattaccgtcattggcctgtgaagcattggacatttatagataattgatataaaagaatcgccatgcccatggactaagaacgatgctggctttcaagcaaaaaagaaaaataatcattgtttattgtatactgcctttttgtaatcctgtacaattgcatcacgggtggggataaaaagaggaatattctggtttatttcctagactgttatttaaaaaaaaaaaaaacattgtgttaggacagcatataaatgtaataagtatcacactgtatataaacatatcaatgtttgtcctgtataagaattactaaattacaaatgcaatttcatttaaacttctaggttaagtttgagcctgaaattttaatgaagtgcaatactgagtgtgcctcattatcttgcagctgtaaacatattggaatgtacatgtcaataaaaccactgtacatttttatacagtgataaagtcta

SEQ ID NO: 2657 - DNA, 15025 bp, Homo sapiens; identical to SEQ ID NO: 2656
  source 1..15025: mol_type = genomic DNA

SEQ ID NO: 2658 - DNA, 2850 bp, Homo sapiens
  source 1..2850: mol_type = genomic DNA
agattcctacttcttacgccccccacatcacccgcctcgagacctcaagggtagaggtgggcacccccgcctccgcacttttgctcggggctccagattgtagggcagggcggcgcttctcggaaagcgaaagccggcggggcggggcgggtgccgcaggagaaagaggaagcgctggcagacaatgcgacccgaccgcgctgaggctccaggaccgcccgccatggctgcaggaggtcccggcgcggggtctgcggccccggtctcctccacatcctcccttcccctggctgctctcaacatgcgagtgcggcgccgcctgtctctgttcttgaacgtgcggacacaggtggcggccgactggaccgcgctggcggaggagatggactttgagtacttggagatccggcaactggagacacaagcggaccccactggcaggctgctggacgcctggcagggacgccctggcgcctctgtaggccgactgctcgagctgcttaccaagctgggccgcgacgacgtgctgctggagctgggacccagcattgaggaggattgccaaaagtatatcttgaagcagcagcaggaggaggctgagaagcctttacaggtggccgctgtagacagcagtgtcccacggacagcagagctggcgggcatcaccacacttgatgaccccctggggcatatgcctgagcgtttcgatgccttcatctgctattgccccagcgacatccagtttgtgcaggagatgatccggcaactggaacagacaaactatcgactgaagttgtgtgtgtctgaccgcgatgtcctgcctggcacctgtgtctggtctattgctagtgagctcatcgaaaagaggtgccgccggatggtggtggttgtctctgatgattacctgcagagcaaggaatgtgacttccagaccaaatttgcactcagcctctctccaggtgcccatcagaagcgactgatccccatcaagtacaaggcaatgaagaaagagttccccagcatcctgaggttcatcactgtctgcgactacaccaacccctgcaccaaatcttggttctggactcgccttgccaaggccttgtccctgccctgaagactgttctgaggccctgggtgtgtgtgtatctgtctgcctgtccatgtacttctgccctgcctcctcctttcgttgtaggaggaatctgtgctctacttacctctcaattcctggagatgccaacttcacagacacgtctgcagcagctggacatcacatttcatgtcctgcatggaaccagtggctgtgagtggcatgtccacttgctggattatcagccaggacactatagaacaggaccagctgagactaagaaggaccagcagagccagctcagctctgagccattcacacatcttcaccctcagtttcctcacttgaggagtgggatggggagaacagagagtagctgtgtttgaatccctgtaggaaatggtgaagcatagctctgggtctcctgggggagaccaggcttggctgcgggagagctggctgttgctggactacatgctggccactgctgtgaccacgacactgctggggcagcttcttccacagtgatgcctactgatgcttcagtgcctctgcacaccgcccattccacttcctccttccccacagggcaggtggggaagcagtttggcccagcccaaggagaccccaccttgagccttatttcctaatgggtccacctctcatctgcatctttcacacctcccagcttctgcccaaccttcagcagtgacaagtccccaagagactcgcctgagcagcttgggctgcttttcatttccacctgtcaggatgcctgtggtcatgctctcagctccacctggcatgagaagggatcctggcctctggcatattcatcaagtatgagttctggggatgagtcactgtaatgatgtgagcagggagccttcctccctgggccacctgcagagagctttcccaccaactttgtaccttgattgccttacaaagttatttgtttacaaacagcgaccatataaaagcctcctgccccaaagcttgtgggcacatgggcacatacagactcacatacagacacacacatatatgtacagacatgtactctcacacacacaggcaccagcatacacacgtttttctaggtacagctcccaggaacagctaggtgggaaagtcccatcactgagggagcctaaccatgtccctgaacaaaaattgggcactcatctattccttttctcttgtgtccctactcattgaaaccaaactctggaaaggacccaatgtaccagtatttatacctctaatgaagcacagagagaggaagagagctgcttaaactcacacaacaatgaactgcagacacagctgttctctccctctctccttcccagagcaatttatactttaccctcaggctgtcctctggggagaaggtgccatggtcttaggtgtctgtgccccaggacagaccctaggaccctaaatccaatagaaaatgcatatctttgctccactttcagccaggctggagcaaggtaccttttcttaggatcttgggagggaatggatgcccctctctgcatgatcttgttgaggcatttagctgccatgcacctgtccccctttaatactgggcattttaaagccatctcaagaggcatcttctacatgttttgtacgcattaaaataatttcaaagatatctgagaaaagccgatatttgccattcttcctatatcctggaatatatcttgcatcctgagtttataataataaataatattctaccttggaaa

SEQ ID NO: 2659 - DNA, 1485 bp, Homo sapiens
  source 1..1485: mol_type = genomic DNA
atggctgcaggaggtcccggcgcggggtctgcggccccggtctcctccacatcctcccttcccctggctgctctcaacatgcgagtgcggcgccgcctgtctctgttcttgaacgtgcggacacaggtggcggccgactggaccgcgctggcggaggagatggactttgagtacttggagatccggcaactggagacacaagcggaccccactggcgcctctgtaggccgactgctcgagctgcttaccaagctgggccgcgacgacgtgctgctggagctgggacccagcattgaggaggattgccaaaagtatatcttgaagcagcagcaggaggaggctgagaagcctttacaggtggccgctgtagacagcagtgtcccacggacagcagagctggcgggcatcaccacacttgatgaccccctggggcatatgcctgagcgtttcgatgccttcatctgctattgccccagcgacatccagtttgtgcaggagatgatccggcaactggaacagacaaactatcgactgaagttgtgtgtgtctgaccgcgatgtcctgcctggcacctgtgtctggtctattgctagtgagctcatcgaaaagaggtgccgccggatggtggtggttgtctctgatgattacctgcagagcaaggaatgtgacttccagaccaaatttgcactcagcctctctccaggtgcccatcagaagcgactgatccccatcaagtacaaggcaatgaagaaagagttccccagcatcctgaggttcatcactgtctgcgactacaccaacccctgcaccaaatcttggttctggactcgccttgccaaggccttgtccctgccctgaagactgttctgaggccctgggtgtgtgtgtatctgtctgcctgtccatgtacttctgccctgcctcctcctttcgttgtaggaggaatctgtgctctacttacctctcaattcctggagatgccaacttcacagacacgtctgcagcagctggacatcacatttcatgtcctgcatggaaccagtggctgtgagtggcatgtccacttgctggattatcagccaggacactatagaacaggaccagctgagactaagaaggaccagcagagccagctcagctctgagccattcacacatcttcaccctcagtttcctcacttgaggagtgggatggggagaacagagagtagctgtgtttgaatccctgtaggaaatggtgaagcatagctctgggtctcctgggggagaccaggcttggctgcgggagagctggctgttgctggactacatgctggccactgctgtgaccacgacactgctggggcagcttcttccacagtgatgcctactgatgcttcagtgcctctgcacaccgcccattccacttcctccttccccacagggcaggtggggaagcagtttggcccagcccaaggagaccccaccttgagccttatttcctaat

SEQ ID NO: 2660 - DNA, 2871 bp, Homo sapiens
  source 1..2871: mol_type = genomic DNA
agattcctacttcttacgccccccacatcacccgcctcgagacctcaagggtagaggtgggcacccccgcctccgcacttttgctcggggctccagattgtagggcagggcggcgcttctcggaaagcgaaagccggcggggcggggcgggtgccgcaggagaaagaggaagcgctggcagacaatgcgacccgaccgcgctgaggctccaggaccgcccgccatggctgcaggaggtcccggcgcggggtctgcggccccggtctcctccacatcctcccttcccctggctgctctcaacatgcgagtgcggcgccgcctgtctctgttcttgaacgtgcggacacaggtggcggccgactggaccgcgctggcggaggagatggactttgagtacttggagatccggcaactggagacacaagcggaccccactggcaggctgctggacgcctggcagggacgccctggcgcctctgtaggccgactgctcgagctgcttaccaagctgggccgcgacgacgtgctgctggagctgggacccagcattgaggaggattgccaaaagtatatcttgaagcagcagcaggaggaggctgagaagcctttacaggtggccgctgtagacagcagtgtcccacggacagcagagctggcgggcatcaccacacttgatgaccccctggggcatatgcctgagcgtttcgatgccttcatctgctattgccccagcgacatccagtttgtgcaggagatgatccggcaactggaacagacaaactatcgactgaagttgtgtgtgtctgaccgcgatgtcctgcctggcacctgtgtctggtctattgctagtgagctcatcgaaaagaggttggctagaaggccacggggtgggtgccgccggatggtggtggttgtctctgatgattacctgcagagcaaggaatgtgacttccagaccaaatttgcactcagcctctctccaggtgcccatcagaagcgactgatccccatcaagtacaaggcaatgaagaaagagttccccagcatcctgaggttcatcactgtctgcgactacaccaacccctgcaccaaatcttggttctggactcgccttgccaaggccttgtccctgccctgaagactgttctgaggccctgggtgtgtgtgtatctgtctgcctgtccatgtacttctgccctgcctcctcctttcgttgtaggaggaatctgtgctctacttacctctcaattcctggagatgccaacttcacagacacgtctgcagcagctggacatcacatttcatgtcctgcatggaaccagtggctgtgagtggcatgtccacttgctggattatcagccaggacactatagaacaggaccagctgagactaagaaggaccagcagagccagctcagctctgagccattcacacatcttcaccctcagtttcctcacttgaggagtgggatggggagaacagagagtagctgtgtttgaatccctgtaggaaatggtgaagcatagctctgggtctcctgggggagaccaggcttggctgcgggagagctggctgttgctggactacatgctggccactgctgtgaccacgacactgctggggcagcttcttccacagtgatgcctactgatgcttcagtgcctctgcacaccgcccattccacttcctccttccccacagggcaggtggggaagcagtttggcccagcccaaggagaccccaccttgagccttatttcctaatgggtccacctctcatctgcatctttcacacctcccagcttctgcccaaccttcagcagtgacaagtccccaagagactcgcctgagcagcttgggctgcttttcatttccacctgtcaggatgcctgtggtcatgctctcagctccacctggcatgagaagggatcctggcctctggcatattcatcaagtatgagttctggggatgagtcactgtaatgatgtgagcagggagccttcctccctgggccacctgcagagagctttcccaccaactttgtaccttgattgccttacaaagttatttgtttacaaacagcgaccatataaaagcctcctgccccaaagcttgtgggcacatgggcacatacagactcacatacagacacacacatatatgtacagacatgtactctcacacacacaggcaccagcatacacacgtttttctaggtacagctcccaggaacagctaggtgggaaagtcccatcactgagggagcctaaccatgtccctgaacaaaaattgggcactcatctattccttttctcttgtgtccctactcattgaaaccaaactctggaaaggacccaatgtaccagtatttatacctctaatgaagcacagagagaggaagagagctgcttaaactcacacaacaatgaactgcagacacagctgttctctccctctctccttcccagagcaatttatactttaccctcaggctgtcctctggggagaaggtgccatggtcttaggtgtctgtgccccaggacagaccctaggaccctaaatccaatagaaaatgcatatctttgctccactttcagccaggctggagcaaggtaccttttcttaggatcttgggagggaatggatgcccctctctgcatgatcttgttgaggcatttagctgccatgcacctgtccccctttaatactgggcattttaaagccatctcaagaggcatcttctacatgttttgtacgcattaaaataatttcaaagatatctgagaaaagccgatatttgccattcttcctatatcctggaatatatcttgcatcctgagtttataataataaataatattctaccttgg

SEQ ID NO: 2661 - DNA, 2638 bp, Homo sapiens
  source 1..2638: mol_type = genomic DNA
atgcgacccgaccgcgctgaggctccaggaccgcccgccatggctgcaggaggtcccggcgcggggtctgcggccccggtctcctccacatcctcccttcccctggctgctctcaacatgcgagtgcggcgccgcctgtctctgttcttgaacgtgcggacacaggtggcggccgactggaccgcgctggcggaggagatggactttgagtacttggagatccggcaactggagacacaagcggaccccactggcaggctgctggacgcctggcagggacgccctggcgcctctgtaggccgactgctcgagctgcttaccaagctgggccgcgacgacgtgctgctggagctgggacccagcattgaggaggattgccaaaagtatatcttgaagcagcagcaggaggaggctgagaagcctttacaggtggccgctgtagacagcagtgtcccaccacacttgatgaccccctggggcatatgcctgagcgtttcgatgccttcatctgctattgccccagcgacatccagtttgtgcaggagatgatccggcaactggaacagacaaactatcgactgaagttgtgtgtgtctgaccgcgatgtcctgcctggcacctgtgtctggtctattgctagtgagctcatcgaaaagaggtgccgccggatggtggtggttgtctctgatgattacctgcagagcaaggaatgtgacttccagaccaaatttgcactcagcctctctccaggtgcccatcagaagcgactgatccccatcaagtacaaggcaatgaagaaagagttccccagcatcctgaggttcatcactgtctgcgactacaccaacccctgcaccaaatcttggttctggactcgccttgccaaggccttgtccctgccctgaagactgttctgaggccctgggtgtgtgtgtatctgtctgcctgtccatgtacttctgccctgcctcctcctttcgttgtaggaggaatctgtgctctacttacctctcaattcctggagatgccaacttcacagacacgtctgcagcagctggacatcacatttcatgtcctgcatggaaccagtggctgtgagtggcatgtccacttgctggattatcagccaggacactatagaacaggaccagctgagactaagaaggaccagcagagccagctcagctctgagccattcacacatcttcaccctcagtttcctcacttgaggagtgggatggggagaacagagagtagctgtgtttgaatccctgtaggaaatggtgaagcatagctctgggtctcctgggggagaccaggcttggctgcgggagagctggctgttgctggactacatgctggccactgctgtgaccacgacactgctggggcagcttcttccacagtgatgcctactgatgcttcagtgcctctgcacaccgcccattccacttcctccttccccacagggcaggtggggaagcagtttggcccagcccaaggagaccccaccttgagccttatttcctaatgggtccacctctcatctgcatctttcacacctcccagcttctgcccaaccttcagcagtgacaagtccccaagagactcgcctgagcagcttgggctgcttttcatttccacctgtcaggatgcctgtggtcatgctctcagctccacctggcatgagaagggatcctggcctctggcatattcatcaagtatgagttctggggatgagtcactgtaatgatgtgagcagggagccttcctccctgggccacctgcagagagctttcccaccaactttgtaccttgattgccttacaaagttatttgtttacaaacagcgaccatataaaagcctcctgccccaaagcttgtgggcacatgggcacatacagactcacatacagacacacacatatatgtacagacatgtactctcacacacacaggcaccagcatacacacgtttttctaggtacagctcccaggaacagctaggtgggaaagtcccatcactgagggagcctaaccatgtccctgaacaaaaattgggcactcatctattccttttctcttgtgtccctactcattgaaaccaaactctggaaaggacccaatgtaccagtatttatacctctaatgaagcacagagagaggaagagagctgcttaaactcacacaacaatgaactgcagacacagctgttctctccctctctccttcccagagcaatttatactttaccctcaggctgtcctctggggagaaggtgccatggtcttaggtgtctgtgccccaggacagaccctaggaccctaaatccaatagaaaatgcatatctttgctccactttcagccaggctggagcaaggtaccttttcttaggatcttgggagggaatggatgcccctctctgcatgatcttgttgaggcatttagctgccatgcacctgtccccctttaatactgggcattttaaagccatctcaagaggcatcttctacatgttttgtacgcattaaaataatttcaaagatatctgagaaaagccgatatttgccattcttcctatatcctggaatatatcttgcatcctgagtttataataataaataatattctaccttgg

SEQ ID NO: 2662 - DNA, 1801 bp, Homo sapiens
  source 1..1801: mol_type = genomic DNA
gctaggggtgaggaagccctggggcgctgccgccgctttccttaaccacaaatcaggccggacaggagagggaggggtgggggacagtgggtgggcattcagactgccagcactttgctatctacagccggggctcccgagcggcagaaagttccggccactctctgccgcttgggttgggcgaagccaggaccgtgccgcgccaccgccaggatatggagctactgtcgccaccgctccgcgacgtagacctgacggcccccgacggctctctctgctcctttgccacaacggacgacttctatgacgacccgtgtttcgactccccggacctgcgcttcttcgaagacctggacccgcgcctgatgcacgtgggcgcgctcctgaaacccgaagagcactcgcacttccccgcggcggtgcacccggccccgggcgcacgtgaggacgagcatgtgcgcgcgcccagcgggcaccaccaggcgggccgctgcctactgtgggcctgcaaggcgtgcaagcgcaagaccaccaacgccgaccgccgcaaggccgccaccatgcgcgagcggcgccgcctgagcaaagtaaatgaggcctttgagacactcaagcgctgcacgtcgagcaatccaaaccagcggttgcccaaggtggagatcctgcgcaacgccatccgctatatcgagggcctgcaggctctgctgcgcgaccaggacgccgcgccccctggcgccgcagccgccttctatgcgccgggcccgctgcccccgggccgcggcggcgagcactacagcggcgactccgacgcgtccagcccgcgctccaactgctccgacggcatgatggactacagcggccccccgagcggcgcccggcggcggaactgctacgaaggcgcctactacaacgaggcgcccagcgaacccaggcccgggaagagtgcggcggtgtcgagcctagactgcctgtccagcatcgtggagcgcatctccaccgagagccctgcggcgcccgccctcctgctggcggacgtgccttctgagtcgcctccgcgcaggcaagaggctgccgcccccagcgagggagagagcagcggcgaccccacccagtcaccggacgccgccccgcagtgccctgcgggtgcgaaccccaacccgatataccaggtgctctgaggggatggtggccgcccacccgcccgagggatggtgcccctagggtccctcgcgcccaaaagattgaacttaaatgcccccctcccaacagcgctttaaaagcgacctctcttgaggtaggagaggcgggagaactgaagtttccgcccccgccccacagggcaaggacacagcgcggttttttccacgcagcacccttctcggagacccattgcgatggccgctccgtgttcctcggtgggccagagctgaaccttgaggggctaggttcagctttctcgcgccctcccccatgggggtgagaccctcgcagacctaagccctgccccgggatgcaccggttatttgggggggcgtgagacccagtgcactccggtcccaaatgtagcaggtgtaaccgtaacccacccccaacccgtttcccggttcaggaccactttttgtaatacttttgtaatctattcctgtaaataagagttgctttgccagagcaggagcccctggggctgtatttatctctgaggcatggtgtgtggtgctacagggaatttgtacgtttataccgcaggcgggcgagccgcgggcgctcgctcaggtgatcaaaataaaggcgctaatttata

SEQ ID NO: 2663 - DNA, 5892 bp, Homo sapiens
  source 1..5892: mol_type = genomic DNA
ggtcggcagcagggcgctgagcgagctcggagcccgcgctgtgcgcctgcggccggggcgccccgccgagcgccggtgccccggctcccgggccgccttcgccgcgcgggaaggattcttcaaaattaacagaaaccaattcgggccagctgaagagaaaaaataaaggtggctcccggctgcctctgctgcagttcagagcaacttcaggagcttcccagccgagagcttcaggacgcctttcctgtcccactggcccagttgccacaacaaacaacagagaagacggtgaccatgggggatgtgaagctggttgcctcgtcacacatttccaaaacctccctcagtgtggatccctcaagagttgactccatgcccctgacagaggcccctgctttcattttgccccctcggaacctctgcatcaaagaaggagccaccgccaagttcgaagggcgggtccggggttacccagagccccaggtgacatggcacagaaacgggcaacccatcaccagcgggggccgcttcctgctggattgcggcatccgggggactttcagccttgtgattcatgctgtccatgaggaggacaggggaaagtatacctgtgaagccaccaatggcagtggtgctcgccaggtgacagtggagttgacagtagaaggaagttttgcgaagcagcttggtcagcctgttgtttccaaaaccttaggggatagattttcagctccagcagtggagacccgtcctagcatctggggggagtgcccaccaaagtttgctaccaagctgggccgagttgtggtcaaagaaggacagatgggacgattctcctgcaagatcactggccggccccaaccgcaggtcacctggctcaagggaaatgttccactgcagccgagtgcccgtgtgtctgtgtctgagaagaacggcatgcaggttctggaaatccatggagtcaaccaagatgacgtgggagtgtacacgtgcctggtggtgaacgggtcggggaaggcctcgatgtcagctgaactttccatccaaggtttggacagtgccaataggtcatttgtgagagaaacaaaagccaccaattcagatgtcaggaaagaggtgaccaatgtaatctcaaaggagtcgaagctggacagtctggaggctgcagccaaaagcaagaactgctccagcccccagagaggtggctccccaccctgggctgcaaacagccagcctcagcccccaagggagtccaagctggagtcatgcaaggactcgcccagaacggccccgcagaccccggtccttcagaagacttccagctccatcaccctgcaggccgcaagagttcagccggaaccaagagcaccaggcctgggggtcctatcaccttctggagaagagaggaagaggccagctcctccccgtccagccaccttccccaccaggcagcctggcctggggagccaagatgttgtgagcaaggctgctaacaggagaatccccatggagggccagagggattcagcattccccaaatttgagagcaagccccaaagccaggaggtcaaggaaaatcaaactgtcaagttcagatgtgaagggcttgccgtgatggaggtggccccctccttctccagtgtcctgaaggactgcgctgttattgagggccaggattttgtgctgcagtgctccgtacgggggaccccagtgccccggatcacttggctgctgaatgggcagcccatccagtacgctcgctccacctgcgaggccggcgtggctgagctccacatccaggatgccctgccggaggaccatggcacctacacctgcctagctgagaatgccttggggcaggtgtcctgcagcgcctgggtcaccgtccatgaaaagaagagtagcaggaagagtgagtaccttctgcctgtggctcccagcaagcccactgcacccatcttcctgcagggcctctctgatctcaaagtcatggatggaagccaggtcactatgactgtccaagtgtcagggaatccaccccctgaagtcatctggctgcacaatgggaatgagatccaagagtcagaggacttccactttgaacagagaggaactcagcacagcctttgtatccaggaagtgttcccggaggacacgggcacgtacacctgcgaggcctggaacagcgctggagaggtccgcacccaggccgtgctcacggtacaagagcctcacgatggcacccagccctggttcatcagtaagcctcgctcagtgacagcctccctgggccagagtgtcctcatctcctgcgccatagctggtgacccctttcctaccgtgcactggctcagagatggcaaagccctctgcaaagacactggccacttcgaggtgcttcagaatgaggacgtgttcaccctggttctaaagaaggtgcagccctggcatgccggccagtatgagatcctgctcaagaaccgggttggcgaatgcagttgccaggtgtcactgatgctacagaacagctctgccagagcccttccacgggggagggagcctgccagctgcgaggacctctgtggtggaggagttggtgctgatggtggtggtagtgaccgctatgggtccctgaggcctggctggccagcaagagggcagggttggctagaggaggaagacggcgaggacgtgcgaggggtgctgaagaggcgcgtggagacgaggcagcacactgaggaggcgatccgccagcaggaggtggagcagctggacttccgagacctcctggggaagaaggtgagtacaaagaccctatcggaagacgacctgaaggagatcccagccgagcagatggatttccgtgccaacctgcagcggcaagtgaagccaaagactgtgtctgaggaagagaggaaggtgcacagcccccagcaggtcgattttcgctctgtcctggccaagaaggggacttccaagacccccgtgcctgagaaggtgccaccgccaaaacctgccaccccggattttcgctcagtgctgggtggcaagaagaaattaccagcagagaatggcagcagcagtgccgagaccctgaatgccaaggcagtggagagttccaagcccctgagcaatgcacagccttcagggcccttgaaacccgtgggcaacgccaagcctgctgagaccctgaagccaatgggcaacgccaagcctgccgagaccctgaagcccatgggcaatgccaagcctgatgagaacctgaaatccgctagcaaagaagaactcaagaaagacgttaagaatgatgtgaactgcaagagaggccatgcagggaccacagataatgaaaagagatcagagagccaggggacagccccagccttcaagcagaagctgcaagatgttcatgtggcagagggcaagaagctgctgctccagtgccaggtgtcttctgaccccccagccaccatcatctggacgctgaacggaaagaccctcaagaccaccaagttcatcatcctctcccaggaaggctcactctgctccgtctccatcgagaaggcactgcctgaggacagaggcttatacaagtgtgtagccaagaatgacgctggccaggcggagtgctcctgccaagtcaccgtggatgatgctccagccagtgagaacaccaaggccccagagatgaaatcccggaggcccaagagctctcttcctcccgtgctaggaactgagagtgatgcgactgtgaaaaagaaacctgcccccaagacacctccgaaggcagcaatgccccctcagatcatccagttccctgaggaccagaaggtacgcgcaggagagtcagtggagctgtttggcaaagtgacaggcactcagcccatcacctgtacctggatgaagttccgaaagcagatccaggaaagcgagcacatgaaggtggagaacagcgagaatggcagcaagctcaccatcctggccgcgcgccaggagcactgcggctgctacacactgctggtggagaacaagctgggcagcaggcaggcccaggtcaacctcactgtcgtggataagccagaccccccagctggcacaccttgtgcctctgacattcggagctcctcactgaccctgtcctggtatggctcctcatatgatgggggcagtgctgtacagtcctacagcatcgagatctgggactcagccaacaagacgtggaaggaactagccacatgccgcagcacctctttcaacgtccaggacctgctgcctgaccacgaatataagttccgtgtacgtgcaatcaacgtgtatggaaccagtgagccaagccaggagtctgaactcacaacggtaggagagaaacctgaagagccgaaggatgaagtggaggtgtcagatgatgatgagaaggagcccgaggttgattaccggacagtgacaatcaatactgaacaaaaagtatctgacttctacgacattgaggagagattaggatctgggaaatttggacaggtctttcgacttgtagaaaagaaaactcgaaaagtctgggcagggaagttcttcaaggcatattcagcaaaagagaaagagaatatccggcaggagattagcatcatgaactgcctccaccaccctaagctggtccagtgtgtggatgcctttgaagaaaaggccaacatcgtcatggtcctggagatcgtgtcaggaggggagctgtttgagcgcatcattgacgaggactttgagctgacggagcgtgagtgcatcaagtacatgcggcagatctcggagggagtggagtacatccacaagcagggcatcgtgcacctggacctcaagccggagaacatcatgtgtgtcaacaagacgggcaccaggatcaagctcatcgactttggtctggccaggaggctggagaatgcggggtctctgaaggtcctctttggcaccccagaatttgtggctcctgaagtgatcaactatgagcccatcggctacgccacagacatgtggagcatcggggtcatctgctacatcctagtcagtggcctttcccccttcatgggagacaacgataacgaaaccttggccaacgttacctcagccacctgggacttcgacgacgaggcattcgatgagatctccgacgatgccaaggatttcatcagcaatctgctgaagaaagatatgaaaaaccgcctggactgcacgcagtgccttcagcatccatggctaatgaaagataccaagaacatggaggccaagaaactctccaaggaccggatgaagaagtacatggcaagaaggaaatggcagaaaacgggcaatgctgtgagagccattggaagactgtcctctatggcaatgatctcagggctcagtggcaggaaatcctcaacagggtcaccaaccagcccgctcaatgcagaaaaactagaatctgaagaagatgtgtcccaagctttccttgaggctgttgctgaggaaaagcctcatgtaaaaccctatttctctaagaccattcgcgatttagaagttgtggagggaagtgctgctagatttgactgcaagattgaaggatacccagaccccgaggttgtctggttcaaagatgaccagtcaatcagggagtcccgccacttccagatagactacgatgaggacgggaactgctctttaattattagtgatgtttgcggggatgacgatgccaagtacacctgcaaggctgtcaacagtcttggagaagccacctgcacagcagagctcattgtggaaacgatggaggaaggtgaaggggaaggggaagaggaagaagagtgaaacaaagccagagaaaagcagtttctaagtcatattaaaaggactatttctctaaaactc

SEQ ID NO: 2664 - DNA, 2337 bp, Homo sapiens
  source 1..2337: mol_type = genomic DNA
aacaaacaagtgtccgagctggcaggacgacccagcagggtcagccgtgaggaggagggagcagagcgaggtccgtgtgggagacttcctagaggagatgctccagccagtgagaacaccaaggccccagagatgaaatcccggaggcccaagagctctcttcctcccgtgctaggaactgagagtgatgcgactgtgaaaaagaaacctgcccccaagacacctccgaaggcagcaatgccccctcagatcatccagttccctgaggaccagaaggtacgcgcaggagagtcagtggagctgtttggcaaagtgacaggcactcagcccatcacctgtacctggatgaagttccgaaagcagatccaggaaagcgagcacatgaaggtggagaacagcgagaatggcagcaagctcaccatcctggccgcgcgccaggagcactgcggctgctacacactgctggtggagaacaagctgggcagcaggcaggcccaggtcaacctcactgtcgtggataagccagaccccccagctggcacaccttgtgcctctgacattcggagctcctcactgaccctgtcctggtatggctcctcatatgatgggggcagtgctgtacagtcctacagcatcgagatctgggactcagccaacaagacgtggaaggaactagccacatgccgcagcacctctttcaacgtccaggacctgctgcctgaccacgaatataagttccgtgtacgtgcaatcaacgtgtatggaaccagtgagccaagccaggagtctgaactcacaacggtaggagagaaacctgaagagccgaaggatgaagtggaggtgtcagatgatgatgagaaggagcccgaggttgattaccggacagtgacaatcaatactgaacaaaaagtatctgacttctacgacattgaggagagattaggatctgggaaatttggacaggtctttcgacttgtagaaaagaaaactcgaaaagtctgggcagggaagttcttcaaggcatattcagcaaaagagaaagagaatatccggcaggagattagcatcatgaactgcctccaccaccctaagctggtccagtgtgtggatgcctttgaagaaaaggccaacatcgtcatggtcctggagatcgtgtcaggaggggagctgtttgagcgcatcattgacgaggactttgagctgacggagcgtgagtgcatcaagtacatgcggcagatctcggagggagtggagtacatccacaagcagggcatcgtgcacctggacctcaagccggagaacatcatgtgtgtcaacaagacgggcaccaggatcaagctcatcgactttggtctggccaggaggctggagaatgcggggtctctgaaggtcctctttggcaccccagaatttgtggctcctgaagtgatcaactatgagcccatcggctacgccacagacatgtggagcatcggggtcatctgctacatcctagtcagtggcctttcccccttcatgggagacaacgataacgaaaccttggccaacgttacctcagccacctgggacttcgacgacgaggcattcgatgagatctccgacgatgccaaggatttcatcagcaatctgctgaagaaagatatgaaaaaccgcctggactgcacgcagtgccttcagcatccatggctaatgaaagataccaagaacatggaggccaagaaactctccaaggaccggatgaagaagtacatggcaagaaggaaatggcagaaaacgggcaatgctgtgagagccattggaagactgtcctctatggcaatgatctcagggctcagtggcaggaaatcctcaacagggtcaccaaccagcccgctcaatgcagaaaaactagaatctgaagaagatgtgtcccaagctttccttgaggctgttgctgaggaaaagcctcatgtaaaaccctatttctctaagaccattcgcgatttagaagttgtggagggaagtgctgctagatttgactgcaagattgaaggatacccagaccccgaggttgtctggttcaaagatgaccagtcaatcagggagtcccgccacttccagatagactacgatgaggacgggaactgctctttaattattagtgatgtttgcggggatgacgatgccaagtacacctgcaaggctgtcaacagtcttggagaagccacctgcacagcagagctcattgtggaaacgatggaggaaggtgaaggggaaggggaagaggaagaagagtgaaacaaagccagagaaaagcagtttctaagtcatattaaaaggactatttctctaaaactc

SEQ ID NO: 2665 - DNA, 7681 bp, Homo sapiens
  source 1..7681: mol_type = genomic DNA
ggcgctgagcgagctcggagcccgcgctgtgcgcctgcggccggggcgccccgccgagcgccggtgccccggctcccgggccgccttcgccgcgcgggaaggattcttcaaaattaacagaaaccaattcgggccagctgaagagaaaaaataaaggtggctcccggctgcctctgctgcagttcagagcaacttcaggagcttcccagccgagagcttcaggacgcctttcctgtcccactggcccagttgccacaacaaacaacagagaagacggtgaccatgggggatgtgaagctggttgcctcgtcacacatttccaaaacctccctcagtgtggatccctcaagagttgactccatgcccctgacagaggcccctgctttcattttgccccctcggaacctctgcatcaaagaaggagccaccgccaagttcgaagggcgggtccggggttacccagagccccaggtgacatggcacagaaacgggcaacccatcaccagcgggggccgcttcctgctggattgcggcatccgggggactttcagccttgtgattcatgctgtccatgaggaggacaggggaaagtatacctgtgaagccaccaatggcagtggtgctcgccaggtgacagtggagttgacagtagaaggaagttttgcgaagcagcttggtcagcctgttgtttccaaaaccttaggggatagattttcagctccagcagtggagacccgtcctagcatctggggggagtgcccaccaaagtttgctaccaagctgggccgagttgtggtcaaagaaggacagatgggacgattctcctgcaagatcactggccggccccaaccgcaggtcacctggctcaagggaaatgttccactgcagccgagtgcccgtgtgtctgtgtctgagaagaacggcatgcaggttctggaaatccatggagtcaaccaagatgacgtgggagtgtacacgtgcctggtggtgaacgggtcggggaaggcctcgatgtcagctgaactttccatccaaggtttggacagtgccaataggtcatttgtgagagaaacaaaagccaccaattcagatgtcaggaaagaggtgaccaatgtaatctcaaaggagtcgaagctggacagtctggaggctgcagccaaaagcaagaactgctccagcccccagagaggtggctccccaccctgggctgcaaacagccagcctcagcccccaagggagtccaagctggagtcatgcaaggactcgcccagaacggccccgcagaccccggtccttcagaagacttccagctccatcaccctgcaggccgcaagagttcagccggaaccaagagcaccaggcctgggggtcctatcaccttctggagaagagaggaagaggccagctcctccccgtccagccaccttccccaccaggcagcctggcctggggagccaagatgttgtgagcaaggctgctaacaggagaatccccatggagggccagagggattcagcattccccaaatttgagagcaagccccaaagccaggaggtcaaggaaaatcaaactgtcaagttcagatgtgaagtttccgggattccaaagcctgaagtggcctggttcctggaaggcacccccgtgaggagacaggaaggcagcattgaggtttatgaagatgctggctcccattacctctgcctgctgaaagcccggaccagggacagtgggacatacagctgcactgcttccaacgcccaaggccagctgtcctgtagctggaccctccaagtggaaaggcttgccgtgatggaggtggccccctccttctccagtgtcctgaaggactgcgctgttattgagggccaggattttgtgctgcagtgctccgtacgggggaccccagtgccccggatcacttggctgctgaatgggcagcccatccagtacgctcgctccacctgcgaggccggcgtggctgagctccacatccaggatgccctgccggaggaccatggcacctacacctgcctagctgagaatgccttggggcaggtgtcctgcagcgcctgggtcaccgtccatgaaaagaagagtagcaggaagagtgagtaccttctgcctgtggctcccagcaagcccactgcacccatcttcctgcagggcctctctgatctcaaagtcatggatggaagccaggtcactatgactgtccaagtgtcagggaatccaccccctgaagtcatctggctgcacaatgggaatgagatccaagagtcagaggacttccactttgaacagagaggaactcagcacagcctttgtatccaggaagtgttcccggaggacacgggcacgtacacctgcgaggcctggaacagcgctggagaggtccgcacccaggccgtgctcacggtacaagagcctcacgatggcacccagccctggttcatcagtaagcctcgctcagtgacagcctccctgggccagagtgtcctcatctcctgcgccatagctggtgacccctttcctaccgtgcactggctcagagatggcaaagccctctgcaaagacactggccacttcgaggtgcttcagaatgaggacgtgttcaccctggttctaaagaaggtgcagccctggcatgccggccagtatgagatcctgctcaagaaccgggttggcgaatgcagttgccaggtgtcactgatgctacagaacagctctgccagagcccttccacgggggagggagcctgccagctgcgaggacctctgtggtggaggagttggtgctgatggtggtggtagtgaccgctatgggtccctgaggcctggctggccagcaagagggcagggttggctagaggaggaagacggcgaggacgtgcgaggggtgctgaagaggcgcgtggagacgaggcagcacactgaggaggcgatccgccagcaggaggtggagcagctggacttccgagacctcctggggaagaaggtgagtacaaagaccctatcggaagacgacctgaaggagatcccagccgagcagatggatttccgtgccaacctgcagcggcaagtgaagccaaagactgtgtctgaggaagagaggaaggtgcacagcccccagcaggtcgattttcgctctgtcctggccaagaaggggacttccaagacccccgtgcctgagaaggtgccaccgccaaaacctgccaccccggattttcgctcagtgctgggtggcaagaagaaattaccagcagagaatggcagcagcagtgccgagaccctgaatgccaaggcagtggagagttccaagcccctgagcaatgcacagccttcagggcccttgaaacccgtgggcaacgccaagcctgctgagaccctgaagccaatgggcaacgccaagcctgccgagaccctgaagcccatgggcaatgccaagcctgatgagaacctgaaatccgctagcaaagaagaactcaagaaagacgttaagaatgatgtgaactgcaagagaggccatgcagggaccacagataatgaaaagagatcagagagccaggggacagccccagccttcaagcagaagctgcaagatgttcatgtggcagagggcaagaagctgctgctccagtgccaggtgtcttctgaccccccagccaccatcatctggacgctgaacggaaagaccctcaagaccaccaagttcatcatcctctcccaggaaggctcactctgctccgtctccatcgagaaggcactgcctgaggacagaggcttatacaagtgtgtagccaagaatgacgctggccaggcggagtgctcctgccaagtcaccgtggatgatgctccagccagtgagaacaccaaggccccagagatgaaatcccggaggcccaagagctctcttcctcccgtgctaggaactgagagtgatgcgactgtgaaaaagaaacctgcccccaagacacctccgaaggcagcaatgccccctcagatcatccagttccctgaggaccagaaggtacgcgcaggagagtcagtggagctgtttggcaaagtgacaggcactcagcccatcacctgtacctggatgaagttccgaaagcagatccaggaaagcgagcacatgaaggtggagaacagcgagaatggcagcaagctcaccatcctggccgcgcgccaggagcactgcggctgctacacactgctggtggagaacaagctgggcagcaggcaggcccaggtcaacctcactgtcgtggataagccagaccccccagctggcacaccttgtgcctctgacattcggagctcctcactgaccctgtcctggtatggctcctcatatgatgggggcagtgctgtacagtcctacagcatcgagatctgggactcagccaacaagacgtggaaggaactagccacatgccgcagcacctctttcaacgtccaggacctgctgcctgaccacgaatataagttccgtgtacgtgcaatcaacgtgtatggaaccagtgagccaagccaggagtctgaactcacaacggtaggagagaaacctgaagagccgaaggatgaagtggaggtgtcagatgatgatgagaaggagcccgaggttgattaccggacagtgacaatcaatactgaacaaaaagtatctgacttctacgacattgaggagagattaggatctgggaaatttggacaggtctttcgacttgtagaaaagaaaactcgaaaagtctgggcagggaagttcttcaaggcatattcagcaaaagagaaagagaatatccggcaggagattagcatcatgaactgcctccaccaccctaagctggtccagtgtgtggatgcctttgaagaaaaggccaacatcgtcatggtcctggagatcgtgtcaggaggggagctgtttgagcgcatcattgacgaggactttgagctgacggagcgtgagtgcatcaagtacatgcggcagatctcggagggagtggagtacatccacaagcagggcatcgtgcacctggacctcaagccggagaacatcatgtgtgtcaacaagacgggcaccaggatcaagctcatcgactttggtctggccaggaggctggagaatgcggggtctctgaaggtcctctttggcaccccagaatttgtggctcctgaagtgatcaactatgagcccatcggctacgccacagacatgtggagcatcggggtcatctgctacatcctaaaccgcctggactgcacgcagtgccttcagcatccatggctaatgaaagataccaagaacatggaggccaagaaactctccaaggaccggatgaagaagtacatggcaagaaggaaatggcagaaaacgggcaatgctgtgagagccattggaagactgtcctctatggcaatgatctcagggctcagtggcaggaaatcctcaacagggtcaccaaccagcccgctcaatgcagaaaaactagaatctgaagaagatgtgtcccaagctttccttgaggctgttgctgaggaaaagcctcatgtaaaaccctatttctctaagaccattcgcgatttagaagttgtggagggaagtgctgctagatttgactgcaagattgaaggatacccagaccccgaggttgtctggttcaaagatgaccagtcaatcagggagtcccgccacttccagatagactacgatgaggacgggaactgctctttaattattagtgatgtttgcggggatgacgatgccaagtacacctgcaaggctgtcaacagtcttggagaagccacctgcacagcagagctcattgtggaaacgatggaggaaggtgaaggggaaggggaagaggaagaagagtgaaacaaagccagagaaaagcagtttctaagtcatattaaaaggactatttctctaaaactcaaaaaaaaaaaaaaaactcaagatagtaaaagcacctagtgtgatagattatcggttaggtcatttgtgggttgattcttcagaaacagcagttgatacctagcagcgttattgatgggcattaatctatgttagttggcaccttaagatactagtgcagctagatttcatttagggaaatcaccagtaacttgactgaccaattgattttagagagaaagtaaccaaaccaaatatttatctgggcaaagtcataaattctccacttgaatgcgctcatgaaaaataaggccaaaacaagagttctgggccacagctcagcccagagggttcctggggatgggaggcctctctctccccaccccctgactctagagaactgggttttctcccagtactccagcaattcatttctgaaagcagttgagccactttattccaaagtacactgcagatgttcaaactctccatttctctttccccttccacctgccagttttgctgactctcaacttgtcatgagtgtaagcattaaggacattatgcttcttcgattctgaagacaggtccctgctcatggatgactctggcttccttaggaaaatatttttcttccaaaatcagtaggaaatctaaacttatcccctctttgcagatgtctagcagcttcagacatttggttaagaacccatgggaaaaaaaaaatccttgctaatgtggtttcctttgtaaaccaggattcttatttgtgctgttatagaatatcagctctgaacgtgtggtaaagatttttgtgtttgaatataggagaaatcagtttgctgaaaagttagtcttaattatctattggccacgatgaaacagatttcaactgataaagagctggagaactccatgtactttggaatctcctccaagatagccagagtttaatacatcttcattctcaacactctccaaagaacttgacctaccttatgggttccatatttttcttcttaaatgtgcatcaatcatgccttgcccccaacctttaaatatattcttagacctggtaaatgcactcagacttgcgtctttaggaatttttaactttctttcactacattggcacttaaattttttctttataaagctttttgaaggtcataaacaaagaccataattgatgatagacctaatacatttcctctgtgtgtgtgtgtaacattccaaatactttttttttcttttccactgtttgtaaggtgcaacaatttaatatttttaagggactttttaagagttccttaagaaccaatttaaaattacttcagtgcaatcctacacagtatcaacattagaattttgatattagtcttatgttatcttccattctatttttatctgctttttgctgctagtttcaaactgccagtatttttccttttgcttttaaaatagttacaatatttttcatgatagccacagtattgccacagtttattataataaagggtttttatttgatttagcgcattcaaagcttttttctatcacttttgtgttcagaatataacctttgtgtgcgtgtatgttgtgtgtgtgcatgtgtggcgtatatgtgtgttacaggttaatgccttcttggaattgtgttaatgttctcttggtttattatgccatcagaatggtaaatgagaacactacaactgtagtcagctcacaatttttaaataaaggataccacagtgcatgctgtttgttc

SEQ ID NO: 2666 - DNA, 7834 bp, Homo sapiens
  source 1..7834: mol_type = genomic DNA
ggcgctgagcgagctcggagcccgcgctgtgcgcctgcggccggggcgccccgccgagcgccggtgccccggctcccgggccgccttcgccgcgcgggaaggattcttcaaaattaacagaaaccaattcgggccagctgaagagaaaaaataaaggtggctcccggctgcctctgctgcagttcagagcaacttcaggagcttcccagccgagagcttcaggacgcctttcctgtcccactggcccagttgccacaacaaacaacagagaagacggtgaccatgggggatgtgaagctggttgcctcgtcacacatttccaaaacctccctcagtgtggatccctcaagagttgactccatgcccctgacagaggcccctgctttcattttgccccctcggaacctctgcatcaaagaaggagccaccgccaagttcgaagggcgggtccggggttacccagagccccaggtgacatggcacagaaacgggcaacccatcaccagcgggggccgcttcctgctggattgcggcatccgggggactttcagccttgtgattcatgctgtccatgaggaggacaggggaaagtatacctgtgaagccaccaatggcagtggtgctcgccaggtgacagtggagttgacagtagaaggaagttttgcgaagcagcttggtcagcctgttgtttccaaaaccttaggggatagattttcagctccagcagtggagacccgtcctagcatctggggggagtgcccaccaaagtttgctaccaagctgggccgagttgtggtcaaagaaggacagatgggacgattctcctgcaagatcactggccggccccaaccgcaggtcacctggctcaagggaaatgttccactgcagccgagtgcccgtgtgtctgtgtctgagaagaacggcatgcaggttctggaaatccatggagtcaaccaagatgacgtgggagtgtacacgtgcctggtggtgaacgggtcggggaaggcctcgatgtcagctgaactttccatccaaggtttggacagtgccaataggtcatttgtgagagaaacaaaagccaccaattcagatgtcaggaaagaggtgaccaatgtaatctcaaaggagtcgaagctggacagtctggaggctgcagccaaaagcaagaactgctccagcccccagagaggtggctccccaccctgggctgcaaacagccagcctcagcccccaagggagtccaagctggagtcatgcaaggactcgcccagaacggccccgcagaccccggtccttcagaagacttccagctccatcaccctgcaggccgcaagagttcagccggaaccaagagcaccaggcctgggggtcctatcaccttctggagaagagaggaagaggccagctcctccccgtccagccaccttccccaccaggcagcctggcctggggagccaagatgttgtgagcaaggctgctaacaggagaatccccatggagggccagagggattcagcattccccaaatttgagagcaagccccaaagccaggaggtcaaggaaaatcaaactgtcaagttcagatgtgaagtttccgggattccaaagcctgaagtggcctggttcctggaaggcacccccgtgaggagacaggaaggcagcattgaggtttatgaagatgctggctcccattacctctgcctgctgaaagcccggaccagggacagtgggacatacagctgcactgcttccaacgcccaaggccagctgtcctgtagctggaccctccaagtggaaaggcttgccgtgatggaggtggccccctccttctccagtgtcctgaaggactgcgctgttattgagggccaggattttgtgctgcagtgctccgtacgggggaccccagtgccccggatcacttggctgctgaatgggcagcccatccagtacgctcgctccacctgcgaggccggcgtggctgagctccacatccaggatgccctgccggaggaccatggcacctacacctgcctagctgagaatgccttggggcaggtgtcctgcagcgcctgggtcaccgtccatgaaaagaagagtagcaggaagagtgagtaccttctgcctgtggctcccagcaagcccactgcacccatcttcctgcagggcctctctgatctcaaagtcatggatggaagccaggtcactatgactgtccaagtgtcagggaatccaccccctgaagtcatctggctgcacaatgggaatgagatccaagagtcagaggacttccactttgaacagagaggaactcagcacagcctttgtatccaggaagtgttcccggaggacacgggcacgtacacctgcgaggcctggaacagcgctggagaggtccgcacccaggccgtgctcacggtacaagagcctcacgatggcacccagccctggttcatcagtaagcctcgctcagtgacagcctccctgggccagagtgtcctcatctcctgcgccatagctggtgacccctttcctaccgtgcactggctcagagatggcaaagccctctgcaaagacactggccacttcgaggtgcttcagaatgaggacgtgttcaccctggttctaaagaaggtgcagccctggcatgccggccagtatgagatcctgctcaagaaccgggttggcgaatgcagttgccaggtgtcactgatgctacagaacagctctgccagagcccttccacgggggagggagcctgccagctgcgaggacctctgtggtggaggagttggtgctgatggtggtggtagtgaccgctatgggtccctgaggcctggctggccagcaagagggcagggttggctagaggaggaagacggcgaggacgtgcgaggggtgctgaagaggcgcgtggagacgaggcagcacactgaggaggcgatccgccagcaggaggtggagcagctggacttccgagacctcctggggaagaaggtgagtacaaagaccctatcggaagacgacctgaaggagatcccagccgagcagatggatttccgtgccaacctgcagcggcaagtgaagccaaagactgtgtctgaggaagagaggaaggtgcacagcccccagcaggtcgattttcgctctgtcctggccaagaaggggacttccaagacccccgtgcctgagaaggtgccaccgccaaaacctgccaccccggattttcgctcagtgctgggtggcaagaagaaattaccagcagagaatggcagcagcagtgccgagaccctgaatgccaaggcagtggagagttccaagcccctgagcaatgcacagccttcagggcccttgaaacccgtgggcaacgccaagcctgctgagaccctgaagccaatgggcaacgccaagcctgccgagaccctgaagcccatgggcaatgccaagcctgatgagaacctgaaatccgctagcaaagaagaactcaagaaagacgttaagaatgatgtgaactgcaagagaggccatgcagggaccacagataatgaaaagagatcagagagccaggggacagccccagccttcaagcagaagctgcaagatgttcatgtggcagagggcaagaagctgctgctccagtgccaggtgtcttctgaccccccagccaccatcatctggacgctgaacggaaagaccctcaagaccaccaagttcatcatcctctcccaggaaggctcactctgctccgtctccatcgagaaggcactgcctgaggacagaggcttatacaagtgtgtagccaagaatgacgctggccaggcggagtgctcctgccaagtcaccgtggatgatgctccagccagtgagaacaccaaggccccagagatgaaatcccggaggcccaagagctctcttcctcccgtgctaggaactgagagtgatgcgactgtgaaaaagaaacctgcccccaagacacctccgaaggcagcaatgccccctcagatcatccagttccctgaggaccagaaggtacgcgcaggagagtcagtggagctgtttggcaaagtgacaggcactcagcccatcacctgtacctggatgaagttccgaaagcagatccaggaaagcgagcacatgaaggtggagaacagcgagaatggcagcaagctcaccatcctggccgcgcgccaggagcactgcggctgctacacactgctggtggagaacaagctgggcagcaggcaggcccaggtcaacctcactgtcgtggataagccagaccccccagctggcacaccttgtgcctctgacattcggagctcctcactgaccctgtcctggtatggctcctcatatgatgggggcagtgctgtacagtcctacagcatcgagatctgggactcagccaacaagacgtggaaggaactagccacatgccgcagcacctctttcaacgtccaggacctgctgcctgaccacgaatataagttccgtgtacgtgcaatcaacgtgtatggaaccagtgagccaagccaggagtctgaactcacaacggtaggagagaaacctgaagagccgaaggatgaagtggaggtgtcagatgatgatgagaaggagcccgaggttgattaccggacagtgacaatcaatactgaacaaaaagtatctgacttctacgacattgaggagagattaggatctgggaaatttggacaggtctttcgacttgtagaaaagaaaactcgaaaagtctgggcagggaagttcttcaaggcatattcagcaaaagagaaagagaatatccggcaggagattagcatcatgaactgcctccaccaccctaagctggtccagtgtgtggatgcctttgaagaaaaggccaacatcgtcatggtcctggagatcgtgtcaggaggggagctgtttgagcgcatcattgacgaggactttgagctgacggagcgtgagtgcatcaagtacatgcggcagatctcggagggagtggagtacatccacaagcagggcatcgtgcacctggacctcaagccggagaacatcatgtgtgtcaacaagacgggcaccaggatcaagctcatcgactttggtctggccaggaggctggagaatgcggggtctctgaaggtcctctttggcaccccagaatttgtggctcctgaagtgatcaactatgagcccatcggctacgccacagacatgtggagcatcggggtcatctgctacatcctagtcagtggcctttcccccttcatgggagacaacgataacgaaaccttggccaacgttacctcagccacctgggacttcgacgacgaggcattcgatgagatctccgacgatgccaaggatttcatcagcaatctgctgaagaaagatatgaaaaaccgcctggactgcacgcagtgccttcagcatccatggctaatgaaagataccaagaacatggaggccaagaaactctccaaggaccggatgaagaagtacatggcaagaaggaaatggcagaaaacgggcaatgctgtgagagccattggaagactgtcctctatggcaatgatctcagggctcagtggcaggaaatcctcaacagggtcaccaaccagcccgctcaatgcagaaaaactagaatctgaagaagatgtgtcccaagctttccttgaggctgttgctgaggaaaagcctcatgtaaaaccctatttctctaagaccattcgcgatttagaagttgtggagggaagtgctgctagatttgactgcaagattgaaggatacccagaccccgaggttgtctggttcaaagatgaccagtcaatcagggagtcccgccacttccagatagactacgatgaggacgggaactgctctttaattattagtgatgtttgcggggatgacgatgccaagtacacctgcaaggctgtcaacagtcttggagaagccacctgcacagcagagctcattgtggaaacgatggaggaaggtgaaggggaaggggaagaggaagaagagtgaaacaaagccagagaaaagcagtttctaagtcatattaaaaggactatttctctaaaactcaaaaaaaaaaaaaaaactcaagatagtaaaagcacctagtgtgatagattatcggttaggtcatttgtgggttgattcttcagaaacagcagttgatacctagcagcgttattgatgggcattaatctatgttagttggcaccttaagatactagtgcagctagatttcatttagggaaatcaccagtaacttgactgaccaattgattttagagagaaagtaaccaaaccaaatatttatctgggcaaagtcataaattctccacttgaatgcgctcatgaaaaataaggccaaaacaagagttctgggccacagctcagcccagagggttcctggggatgggaggcctctctctccccaccccctgactctagagaactgggttttctcccagtactccagcaattcatttctgaaagcagttgagccactttattccaaagtacactgcagatgttcaaactctccatttctctttccccttccacctgccagttttgctgactctcaacttgtcatgagtgtaagcattaaggacattatgcttcttcgattctgaagacaggtccctgctcatggatgactctggcttccttaggaaaatatttttcttccaaaatcagtaggaaatctaaacttatcccctctttgcagatgtctagcagcttcagacatttggttaagaacccatgggaaaaaaaaaatccttgctaatgtggtttcctttgtaaaccaggattcttatttgtgctgttatagaatatcagctctgaacgtgtggtaaagatttttgtgtttgaatataggagaaatcagtttgctgaaaagttagtcttaattatctattggccacgatgaaacagatttcaactgataaagagctggagaactccatgtactttggaatctcctccaagatagccagagtttaatacatcttcattctcaacactctccaaagaacttgacctaccttatgggttccatatttttcttcttaaatgtgcatcaatcatgccttgcccccaacctttaaatatattcttagacctggtaaatgcactcagacttgcgtctttaggaatttttaactttctttcactacattggcacttaaattttttctttataaagctttttgaaggtcataaacaaagaccataattgatgatagacctaatacatttcctctgtgtgtgtgtgtaacattccaaatactttttttttcttttccactgtttgtaaggtgcaacaatttaatatttttaagggactttttaagagttccttaagaaccaatttaaaattacttcagtgcaatcctacacagtatcaacattagaattttgatattagtcttatgttatcttccattctatttttatctgctttttgctgctagtttcaaactgccagtatttttccttttgcttttaaaatagttacaatatttttcatgatagccacagtattgccacagtttattataataaagggtttttatttgatttagcgcattcaaagcttttttctatcacttttgtgttcagaatataacctttgtgtgcgtgtatgttgtgtgtgtgcatgtgtggcgtatatgtgtgttacaggttaatgccttcttggaattgtgttaatgttctcttggtttattatgccatcagaatggtaaatgagaacactacaactgtagtcagctcacaatttttaaataaaggataccacagtgcatgctgtttgttc

SEQ ID NO: 2667 - DNA, 1557 bp, Homo sapiens
  source 1..1557: mol_type = genomic DNA
taaaaacctgtgagcttccacccctggctcccccaggactccattgagagcctctgcagtggcagccagaggtttcaaaggtcaccccagctgggcggattagaacaacagatctcccggaccgggtgaagttggctgctcagcggaaggcaaattgcaccatctgcgagcagagtcagaacaaaagccccttaactttttcggtctggccctgggctctgtggcgcccggcactccttcggtctccattcttggctggaccttggacaggaacctctgcagtacggtggtggtgaagtgtggctgcctcgcatcctgactcatgtgagagctgccgaggaagaagctgcggtaagaccatgggggatgtgaagctggttgcctcgtcacacatttccaaaacctccctcagtgtggatccctcaagagttgactccatgcccctgacagaggcccctgctttcattttgccccctcggaacctctgcatcaaagaaggagccaccgccaagttcgaagggcgggtccggggttacccagagccccaggtgacatggcacagaaacgggcaacccatcaccagcgggggccgcttcctgctggattgcggcatccgggggactttcagccttgtgattcatgctgtccatgaggaggacaggggaaagtatacctgtgaagccaccaatggcagtggtgctcgccaggtgacagtggagttgacagtagaaggaagttttgcgaagcagcttggtcagcctgttgtttccaaaaccttaggggatagattttcagctccagcagtggagacccgtcctagcatctggggggagtgcccaccaaagtttgctaccaagctgggccgagttgtggtcaaagaaggacagatgggacgattctcctgcaagatcactggccggccccaaccgcaggtcacctggctcaagggaaatgttccactgcagccgagtgcccgtgtgtctgtgtctgagaagaacggcatgcaggttctggaaatccatggagtcaaccaagatgacgtgggagtgtacacgtgcctggtggtgaacgggtcggggaaggcctcgatgtcagctgaactttccatccaaggtatcgaccagtggacggctagtgcagaacgatccctgcctggtgccgcaccctcctagaggagctgcttgttcactgcgcacctgtgtgtgtatacacctggcccactcacacacccaggcactccccaggggcaggtgagaacttcccaaatctcagaagatgttctcagttgcactattcaaattttaaggtcctcccaacaaacccatgaggtagatcctgtttgaattcctattttactgatggggaagtgaaagcatagagagttgttggagtgtttcatccaatatcactgcattcagcgcagagttgctgcatggccggggaggacctccctaaccaatcccccttcccctcctcctggttcagggaatccaccccctgaagtcatctggctgcacaatgggaatgagatccaagagtcagaggacttccactttg

SEQ ID NO: 2668 - DNA, 10027 bp, Homo sapiens
  source 1..10027: mol_type = genomic DNA
ggctccccgcgccgcccggtcggcagcagggcgctgagcgagctcggagcccgcgctgtgcgcctgcggccggggcgccccgccgagcgccggtgccccggctcccgggccgccttcgccgcgcgggaaggattcttcaaaattaacagaaaccaattcgggccagctgaagagaaaaaataaagcatttcttccttctgatggggcaagactctctctggaatggggctcttatgacctacagtcaaacaaggtggctcccggctgcctctgctgcagttcagagcaacttcaggagcttcccagccgagagcttcaggacgcctttcctgtcccactggcccagttgccacaacaaacaacagagaagacggtgaccatgggggatgtgaagctggttgcctcgtcacacatttccaaaacctccctcagtgtggatccctcaagagttgactccatgcccctgacagaggcccctgctttcattttgccccctcggaacctctgcatcaaagaaggagccaccgccaagttcgaagggcgggtccggggttacccagagccccaggtgacatggcacagaaacgggcaacccatcaccagcgggggccgcttcctgctggattgcggcatccgggggactttcagccttgtgattcatgctgtccatgaggaggacaggggaaagtatacctgtgaagccaccaatggcagtggtgctcgccaggtgacagtggagttgacagtagaaggaagttttgcgaagcagcttggtcagcctgttgtttccaaaaccttaggggatagattttcagctccagcagtggagacccgtcctagcatctggggggagtgcccaccaaagtttgctaccaagctgggccgagttgtggtcaaagaaggacagatgggacgattctcctgcaagatcactggccggccccaaccgcaggtcacctggctcaagggaaatgttccactgcagccgagtgcccgtgtgtctgtgtctgagaagaacggcatgcaggttctggaaatccatggagtcaaccaagatgacgtgggagtgtacacgtgcctggtggtgaacgggtcggggaaggcctcgatgtcagctgaactttccatccaaggtttggacagtgccaataggtcatttgtgagagaaacaaaagccaccaattcagatgtcaggaaagaggtgaccaatgtaatctcaaaggagtcgaagctggacagtctggaggctgcagccaaaagcaagaactgctccagcccccagagaggtggctccccaccctgggctgcaaacagccagcctcagcccccaagggagtccaagctggagtcatgcaaggactcgcccagaacggccccgcagaccccggtccttcagaagacttccagctccatcaccctgcaggccgcaagagttcagccggaaccaagagcaccaggcctgggggtcctatcaccttctggagaagagaggaagaggccagctcctccccgtccagccaccttccccaccaggcagcctggcctggggagccaagatgttgtgagcaaggctgctaacaggagaatccccatggagggccagagggattcagcattccccaaatttgagagcaagccccaaagccaggaggtcaaggaaaatcaaactgtcaagttcagatgtgaagtttccgggattccaaagcctgaagtggcctggttcctggaaggcacccccgtgaggagacaggaaggcagcattgaggtttatgaagatgctggctcccattacctctgcctgctgaaagcccggaccagggacagtgggacatacagctgcactgcttccaacgcccaaggccagctgtcctgtagctggaccctccaagtggaaaggcttgccgtgatggaggtggccccctccttctccagtgtcctgaaggactgcgctgttattgagggccaggattttgtgctgcagtgctccgtacgggggaccccagtgccccggatcacttggctgctgaatgggcagcccatccagtacgctcgctccacctgcgaggccggcgtggctgagctccacatccaggatgccctgccggaggaccatggcacctacacctgcctagctgagaatgccttggggcaggtgtcctgcagcgcctgggtcaccgtccatgaaaagaagagtagcaggaagagtgagtaccttctgcctgtggctcccagcaagcccactgcacccatcttcctgcagggcctctctgatctcaaagtcatggatggaagccaggtcactatgactgtccaagtgtcagggaatccaccccctgaagtcatctggctgcacaatgggaatgagatccaagagtcagaggacttccactttgaacagagaggaactcagcacagcctttgtatccaggaagtgttcccggaggacacgggcacgtacacctgcgaggcctggaacagcgctggagaggtccgcacccaggccgtgctcacggtacaagagcctcacgatggcacccagccctggttcatcagtaagcctcgctcagtgacagcctccctgggccagagtgtcctcatctcctgcgccatagctggtgacccctttcctaccgtgcactggctcagagatggcaaagccctctgcaaagacactggccacttcgaggtgcttcagaatgaggacgtgttcaccctggttctaaagaaggtgcagccctggcatgccggccagtatgagatcctgctcaagaaccgggttggcgaatgcagttgccaggtgtcactgatgctacagaacagctctgccagagcccttccacgggggagggagcctgccagctgcgaggacctctgtggtggaggagttggtgctgatggtggtggtagtgaccgctatgggtccctgaggcctggctggccagcaagagggcagggttggctagaggaggaagacggcgaggacgtgcgaggggtgctgaagaggcgcgtggagacgaggcagcacactgaggaggcgatccgccagcaggaggtggagcagctggacttccgagacctcctggggaagaaggtgagtacaaagaccctatcggaagacgacctgaaggagatcccagccgagcagatggatttccgtgccaacctgcagcggcaagtgaagccaaagactgtgtctgaggaagagaggaaggtgcacagcccccagcaggtcgattttcgctctgtcctggccaagaaggggacttccaagacccccgtgcctgagaaggtgccaccgccaaaacctgccaccccggattttcgctcagtgctgggtggcaagaagaaattaccagcagagaatggcagcagcagtgccgagaccctgaatgccaaggcagtggagagttccaagcccctgagcaatgcacagccttcagggcccttgaaacccgtgggcaacgccaagcctgctgagaccctgaagccaatgggcaacgccaagcctgccgagaccctgaagcccatgggcaatgccaagcctgatgagaacctgaaatccgctagcaaagaagaactcaagaaagacgttaagaatgatgtgaactgcaagagaggccatgcagggaccacagataatgaaaagagatcagagagccaggggacagccccagccttcaagcagaagctgcaagatgttcatgtggcagagggcaagaagctgctgctccagtgccaggtgtcttctgaccccccagccaccatcatctggacgctgaacggaaagaccctcaagaccaccaagttcatcatcctctcccaggaaggctcactctgctccgtctccatcgagaaggcactgcctgaggacagaggcttatacaagtgtgtagccaagaatgacgctggccaggcggagtgctcctgccaagtcaccgtggatgatgctccagccagtgagaacaccaaggccccagagatgaaatcccggaggcccaagagctctcttcctcccgtgctaggaactgagagtgatgcgactgtgaaaaagaaacctgcccccaagacacctccgaaggcagcaatgccccctcagatcatccagttccctgaggaccagaaggtacgcgcaggagagtcagtggagctgtttggcaaagtgacaggcactcagcccatcacctgtacctggatgaagttccgaaagcagatccaggaaagcgagcacatgaaggtggagaacagcgagaatggcagcaagctcaccatcctggccgcgcgccaggagcactgcggctgctacacactgctggtggagaacaagctgggcagcaggcaggcccaggtcaacctcactgtcgtggataagccagaccccccagctggcacaccttgtgcctctgacattcggagctcctcactgaccctgtcctggtatggctcctcatatgatgggggcagtgctgtacagtcctacagcatcgagatctgggactcagccaacaagacgtggaaggaactagccacatgccgcagcacctctttcaacgtccaggacctgctgcctgaccacgaatataagttccgtgtacgtgcaatcaacgtgtatggaaccagtgagccaagccaggagtctgaactcacaacggtaggagagaaacctgaagagccgaaggatgaagtggaggtgtcagatgatgatgagaaggagcccgaggttgattaccggacagtgacaatcaatactgaacaaaaagtatctgacttctacgacattgaggagagattaggatctgggaaatttggacaggtctttcgacttgtagaaaagaaaactcgaaaagtctgggcagggaagttcttcaaggcatattcagcaaaagagaaagagaatatccggcaggagattagcatcatgaactgcctccaccaccctaagctggtccagtgtgtggatgcctttgaagaaaaggccaacatcgtcatggtcctggagatcgtgtcaggaggggagctgtttgagcgcatcattgacgaggactttgagctgacggagcgtgagtgcatcaagtacatgcggcagatctcggagggagtggagtacatccacaagcagggcatcgtgcacctggacctcaagccggagaacatcatgtgtgtcaacaagacgggcaccaggatcaagctcatcgactttggtctggccaggaggctggagaatgcggggtctctgaaggtcctctttggcaccccagaatttgtggctcctgaagtgatcaactatgagcccatcggctacgccacagacatgtggagcatcggggtcatctgctacatcctaaaccgcctggactgcacgcagtgccttcagcatccatggctaatgaaagataccaagaacatggaggccaagaaactctccaaggaccggatgaagaagtacatggcaagaaggaaatggcagaaaacgggcaatgctgtgagagccattggaagactgtcctctatggcaatgatctcagggctcagtggcaggaaatcctcaacagggtcaccaaccagcccgctcaatgcagaaaaactagaatctgaagaagatgtgtcccaagctttccttgaggctgttgctgaggaaaagcctcatgtaaaaccctatttctctaagaccattcgcgatttagaagttgtggagggaagtgctgctagatttgactgcaagattgaaggatacccagaccccgaggttgtctggttcaaagatgaccagtcaatcagggagtcccgccacttccagatagactacgatgaggacgggaactgctctttaattattagtgatgtttgcggggatgacgatgccaagtacacctgcaaggctgtcaacagtcttggagaagccacctgcacagcagagctcattgtggaaacgatggaggaaggtgaaggggaaggggaagaggaagaagagtgaaacaaagccagagaaaagcagtttctaagtcatattaaaaggactatttctctaaaactcaaaaaaaaaaaaaaaactcaagatagtaaaagcacctagtgtgatagattatcggttaggtcatttgtgggttgattcttcagaaacagcagttgatacctagcagcgttattgatgggcattaatctatgttagttggcaccttaagatactagtgcagctagatttcatttagggaaatcaccagtaacttgactgaccaattgattttagagagaaagtaaccaaaccaaatatttatctgggcaaagtcataaattctccacttgaatgcgctcatgaaaaataaggccaaaacaagagttctgggccacagctcagcccagagggttcctggggatgggaggcctctctctccccaccccctgactctagagaactgggttttctcccagtactccagcaattcatttctgaaagcagttgagccactttattccaaagtacactgcagatgttcaaactctccatttctctttccccttccacctgccagttttgctgactctcaacttgtcatgagtgtaagcattaaggacattatgcttcttcgattctgaagacaggtccctgctcatggatgactctggcttccttaggaaaatatttttcttccaaaatcagtaggaaatctaaacttatcccctctttgcagatgtctagcagcttcagacatttggttaagaacccatgggaaaaaaaaaatccttgctaatgtggtttcctttgtaaaccaggattcttatttgtgctgttatagaatatcagctctgaacgtgtggtaaagatttttgtgtttgaatataggagaaatcagtttgctgaaaagttagtcttaattatctattggccacgatgaaacagatttcaactgataaagagctggagaactccatgtactttggaatctcctccaagatagccagagtttaatacatcttcattctcaacactctccaaagaacttgacctaccttatgggttccatatttttcttcttaaatgtgcatcaatcatgccttgcccccaacctttaaatatattcttagacctggtaaatgcactcagacttgcgtctttaggaatttttaactttctttcactacattggcacttaaattttttctttataaagctttttgaaggtcataaacaaagaccataattgatgatagacctaatacatttcctctgtgtgtgtgtgtaacattccaaatactttttttttcttttccactgtttgtaaggtgcaacaatttaatatttttaagggactttttaagagttccttaagaaccaatttaaaattacttcagtgcaatcctacacagtatcaacattagaattttgatattagtcttatgttatcttccattctatttttatctgctttttgctgctagtttcaaactgccagtatttttccttttgcttttaaaatagttacaatatttttcatgatagccacagtattgccacagtttattataataaagggtttttatttgatttagcgcattcaaagcttttttctatcacttttgtgttcagaatataacctttgtgtgcgtgtatgttgtgtgtgtgcatgtgtggcgtatatgtgtgttacaggttaatgccttcttggaattgtgttaatgttctcttggtttattatgccatcagaatggtaaatgagaacactacaactgtagtcagctcacaatttttaaataaaggataccacagtgcatgctgtttgttcaatctttgcagacttctctttctttccatgctaccagttgtaaaggacacagctatatcctggaaatgaaaaacaaacactgtggtgcctagatgtgaagaactggcttatgtggttgtgttttgctatggaacagaatgatttaggaagttcttgtttatataggtagccgaatttacacatttagttcaaaatttctcttgagcatcagcttagtactatatcaatcattctagaaggatatcttatagagcaggtgtccccaacccccggtaagtagcctgttaggaaccaggtcacacataaggaggttagcagtgggcaagtgagcaaagcatcatctatatttacagccgatccccattgctcgcattaccgcctgagctctgcctcctgtcagatcagcggcagcatcaggttctctcaggaacgaactctattgtgaactgctcatgtgagggatctaggtttcacgctccttatgagaatctaacacctgatgatctgtcactgtctcccatcacccctagatgggacagtctagttgcaggaaaacaagctcagggcttccactgattctacattatgatgagttgtatacttattttatattataataaaatatattattacaatgtaataataatagaaataaaatgcacaatacatgtaatgtgcttgaataatcccaaaaccaccccctctcctggtccatggaaaaactgtcttccatgaaagtggtccctggtgccaaaaaggttagggaccactgttacagagtatcaggtcctcaagatgctaaaatctatatgacatttttaacatgtgacattatcatcatcatcatcatcatcatcactgatgatactatttaccagggcatggtttgaattggtgactttggtgcagttcattattggcagccaaatgctttatccataccttcatattgaagaatttgttatcaggaaactaccagtcctgctttacaggaagtctgttatcagatatcagatggcaagttccccatgtcttcagatgttcaaacaatattgtggatggtctagaaagagtttaagacatgctgttaaatgtagggctagataattctctgattctttgatgtagtctggaaagaaacaatccattgtccagttaataaatatttagtgttttcatttttaagacactcacaatccacaaatgtccctaacaatttattatttttaaagaaaatgactttttattccttgctagtgaaaaatgtacaatttatatgctgcactgagaaaaataacagatatactttcttccattcattttcatcccaaacatataaaaaataatccattgattgttccttgcattgcatatcttattaaaagatatttcctacatgcaactaataagacatgctgactgttgtcagctctaaatttatgtaaagattttttatttttgttaaaatgtttgaaatttgctttttgctccacacctcacctgtttttgataaatctgtgctaataagtacataggaggtaataaataattgagttgtgagaaacccaattctccatttttcaagaaaacacaagtagcactactctctttatcccttgggactccttcctgtaatttgaaagggggggctaatgttggtggcagttgttgctaaggatctctgcacagagttagggcttcactctcggcttcctggttagatggggccatgtgactagtcctagtcagtgagctgtgaccagaagtgatgtatgtaccctcgggaccagagcatttatgtgctggtacaagcctctccataatgacgggcaacacatgagatggtggctgctgcagccatctgggtctctagccaacccaaaatggggacataacacaagcaagaaataaacatttgttcttataaatcaccaagattttggggttctcagtggctgcaacataacctagactatcctgatacaggcttatcaccatgttctggatgtgtggtgaccaggatggtagccactactcacaagtggctatttaaatttaagttactttaaaaaataaaataaaaaattcagttcctcagttgtatgagttacatttcaaatgctcgacagtcacatgtacatcacttttcaaattatgtgaaattaaaactgaaaagcttgtgtgaaagtctagagagtatggtctatagtttcatcaattgtattggataatatagtctcgatactcaa

SEQ ID NO: 2669 - DNA, 7282 bp, Homo sapiens
  source 1..7282: mol_type = genomic DNA
catgaaaggatgtaacacgcaccaagatgtataaactatccggatagttctccatagccatgggtgtgtatggatagaacggacctggtcgcaaccagagttggatgtgattatgaggaaatgctcccaggtgcaggagtttgaattaggtgtggaacctcagtcagaatacagagaagaggactgcacaggtggaggagaaggcacagaggtgggagccggacccattccggctgggcttggctggacaggagcagagtcttttagctggatactcaagggacccaggggcattgagactttgcctgggtggcaaagaaaagggaaatcactgtgttggaggcaactggaacactggtcatttaccacaccaggtgactaaatcacagttgcctcagaaagtagagtgtcactcagaggttgaaagagggagcaaaggcgaatgggggccacaagtgtggagtttaagtgaccaccatcctgagcacatatcagctgtgctcctccaccatggaagtcagttcctggctacacccctcatgggaaggtgggtctccaggcctccctcaagtgcaaggtgagttgaaacatctgtagctgcttaccttttggtgccactaggatctgagtagcaaatattctttttaaaaatgtgggggaggatctacaaagtcaaagtcagctgtattaataatcctgtagccagcaggtctcaaagaaatatttctggaaaggatagggaagctgatgtcagggcggggcagtcctcagagcagtgagtctaagtggatattgcttggctgaggctataggttaaggggcagccttatcacctgggaacatctgcagatgaactaaagccaggaggatgcctaaacccaggggctaggagcagagaagagatgaggaaacaggagaggaggcaaagggaatttttcagttaaatcagtcagggaatcatagtggtgctgatttttttttttttttttaaagagacagggtctcatgctgtcacccaggctggagggcaatggtacaatcatagcttactgcagtctcaacctcgtgggctcaagcaatcttctcgactcggcctcctgagtagctgggactacaggcatatgccaccagaccggctaatatttttttttctcctttggtagaaacagggtctcactatgttgcctagactagtcttgaactcctggcctcaagcgatgctgctgcgttggctgcccgaagtgttgagtgcccagcctatgctgatattttaatcaatttttttttcttcttgtttacggcattattagccatagggttttctggaagggcgggggaagaaaagggtagaattcagagaatgaaccttaattttatattttagtatagatggcgacatttggaaatgatttttccacaaaattgcacacaaaagttgtccacaaaaattccattcaacaagtagtttccctgaagagtagcttccctggtaacagctctaaccatttcatgttacgttgctccctcaggaaaacgttttctgcattttaactgcaatcaccagggccttagctccccttggaatatgagggttccctcttgcagcagccaaggttctgtgcagtggggtggagtgggctgtgggcgggggcagagggagaggggaagatcaggctcaggtggcccagaactctctgcagctgtgccagagaaggcaccttcttgttattctggtgtggttttcataaaaagccctagaaggaatgaagtgacatgggaacaaatccctacaagcaaagctaggctgggtatagatgactaatcatattactcatcttggaatcaagttattccgaaagaaggtatattttaaatttatattaaaagaattttacaaagatatgttggaaaggtgtagcaatgggggcaggtaggttgagcagattaacagggtttccgcatgcacactggaagcaaaagactagacatcagaggcccttaggtagccatctttattttctgggaaccataaagaccccagcagtatggaccaagggcattaggggagaaaacactggactcagtatagcacggagtattcttggccatcccatttggatggtatgcactgctcaggggaaactgtagtcttggggctactggtatatatggggggctttgatgggtaaccagcttgctgtatgtatgtcagggaatgtcttagtattggtgccaaaagaccctaatcctgggaaactccacaagcctgcctgggcaagccaggatggctggccccacaagctctccaaggggcagggaatttgtgctgcatgaaggaggctggtgcagatactgctcaccagcgacacaggaacccagcctgggcaattgccctcaagcaagaaaaagggagaaattacaaaatcaaaacttggcgatcttgatgttccaaaaatttccaaaggtctttggtcagtaaagcaacaaccaattgtcagctcaaaggcataaaactggaagactagaacatactgatatattcatttctagttctgacaaataacttcctcggcaattttttttcacaaatcaattcccaaatatttttctatgttttagaaattatatgctggatatctccatcttttagaaaagttctccctatgtgagacatatttatttgttaatatatttactacttcctctgaaatactataactcttttgtttcctcattctgatagcttcattttagtcattttgttatgaaataaaatctggaagaaaaaagacatcgtctcgccacaccacacaggtgaagacagtcctcatcagtcccaatcctgatgtctggaattggggagcccatgggctcaaggcgggtgttccttgctacacatttatggatataaaccagagtcgttctgtagaggtctggaactgcaggaagattagaatcttctgctcccaggctactgaggcccagagaggggaactgacttgcacaaggtctcccagcaattagggttagagaactaacctgtcccttgttgggaatgaaccctctgggtttagaggctcctagcccaggacaaaccaatctgtgttggataaagggaatggagagcagagaagggccgagtctgagaatcgggttgattaggaagcaggctggtctgacattgactacgtagggagggctgccatggctggtaccacctcttacctgttcctgagggcagggtaacctcccatgggaagagctgggtctctctctctctacactttgtctagcacaacaaacaggttgaaccagtaacatctcccagaagagcatgaaaggttgccacgtggcctgagcctgcagaggcattctccgcagggccacacggtggttctgcgcacagttaagttgttcagttttcatctctcaccatcttcccctcctcatcacctccacctggggctgcgtggattctgttcagcgacccagcctcactgtggtggcagaggccagaaacatacccacaccatacagtgtgatgtgtgtgagaagggatggccaggggacagagcaaggtgaaatgtctgtccaaagtgcatgagagcagtctgcagcaaggatggcaggaggcatgacagtaaggtcatcccgctcactgcagtaggtctcctctttaaccatacacacacgcacacaattttctgtatgtttccttagcacccagaagttattcactttcaaaatgatcagtctttttactgaagcttactggctttccaactagtcctaaattgtgaggctttactgaagtacttgagcatgtgaagtgaactgaggaggaaaatggctttgccggcagagtttgagatgcaacgagtacaagccatttgcctatgaagaggctgtttcctccctctctcagggaggacaagtagccagtctgtggtgacatctgttgtctagatgcacagcttttcgatgcctaaaaaagatgctttgggtgcaggggtggaaagacttggttgtgccttagttttcttatcttagtcattcctgttaaccttagaaaaaaggtgaaaaacttactgaaagataagaaacaataagacacaattgtacattattagggatcctatgcttggtagaattttcgcaatgtaaataaattacatctcaagttctgatccttttcagcagaaattctttcctctcccaagtctagtcactgagaagcaaagtgccgttgccttttatttcttcaatgcttctttttggtgcctgaatgcacaccaaggaagagctcctctccagagcttcactgcatcatagacttgtgcaggggccagccagagtgtttctcaaaatcttttaagtctctgaattataaacagagctaaatgggaccttggagatcatcttgtccagccccctcctagagaaggagactgaagctcagagtggttaagtgacttgcccaaggtcaacaggatgctgtgttattattattatgattatttttgcatcaggacttgtgggatctgtagtaactattctcttggccaattataatcacatcactggcattgttttacgagaaatagccccgctaggcccagtcagcaataagtctttggagctgtctcagcctgcagttgctttatataaaccatcccttttatgggagttgaagcactgtatgaaaagggtttttgtctcatgttgaccttgtttagtcacattaacgcacacatcagttccaggccccattccattctctgaacatcttctgacacactgacagtgctgagcagagcaaggttgggttcgctcctctggcagaacctcggctctcaggaggtccttgttccagggaacagctgcttctctggggctgggctctactccctgcagcccctcgcactacccagctggaaccagggacaacgcctgagtccaaccctcgtgtctattttccagaaaacgggcaatgctgtgagagccattggaagactgtcctctatggcaatgatctcagggctcagtggcaggaaatcctcaacagggtcaccaaccagcccgctcaatgcagaaaaactagaatctgaagaagatgtgtcccaagctttccttgaggctgttgctgaggaaaagcctcatgtaaaaccctatttctctaagaccattcgcgatttagaagttgtggagggaagtgctgctagatttgactgcaagattgaaggatacccagaccccgaggttgtctggttcaaagatgaccagtcaatcagggagtcccgccacttccagatagactacgatgaggacgggaactgctctttaattattagtgatgtttgcggggatgacgatgccaagtacacctgcaaggctgtcaacagtcttggagaagccacctgcacagcagagctcattgtggaaacgatggaggaaggtgaaggggaaggggaagaggaagaagagtgaaacaaagccagagaaaagcagtttctaagtcatattaaaaggactatttctctaaaactcaaaaaaaaaaaaaaaactcaagatagtaaaagcacctagtgtgatagattatcggttaggtcatttgtgggttgattcttcagaaacagcagttgatacctagcagcgttattgatgggcattaatctatgttagttggcaccttaagatactagtgcagctagatttcatttagggaaatcaccagtaacttgactgaccaattgattttagagagaaagtaaccaaaccaaatatttatctgggcaaagtcataaattctccacttgaatgcgctcatgaaaaataaggccaaaacaagagttctgggccacagctcagcccagagggttcctggggatgggaggcctctctctccccaccccctgactctagagaactgggttttctcccagtactccagcaattcatttctgaaagcagttgagccactttattccaaagtacactgcagatgttcaaactctccatttctctttccccttccacctgccagttttgctgactctcaacttgtcatgagtgtaagcattaaggacattatgcttcttcgattctgaagacaggtccctgctcatggatgactctggcttccttaggaaaatatttttcttccaaaatcagtaggaaatctaaacttatcccctctttgcagatgtctagcagcttcagacatttggttaagaacccatgggaaaaaaaaaatccttgctaatgtggtttcctttgtaaaccaggattcttatttgtgctgttatagaatatcagctctgaacgtgtggtaaagatttttgtgtttgaatataggagaaatcagtttgctgaaaagttagtcttaattatctattggccacgatgaaacagatttcaactgataaagagctggagaactccatgtactttggaatctcctccaagatagccagagtttaatacatcttcattctcaacactctccaaagaacttgacctaccttatgggttccatatttttcttcttaaatgtgcatcaatcatgccttgcccccaacctttaaatatattcttagacctggtaaatgcactcagacttgcgtctttaggaatttttaactttctttcactacattggcacttaaattttttctttataaagctttttgaaggtcataaacaaagaccataattgatgatagacctaatacatttcctctgtgtgtgtgtgtaacattccaaatactttttttttcttttccactgtttgtaaggtgcaacaatttaatatttttaagggactttttaagagttccttaagaaccaatttaaaattacttcagtgcaatcctacacagtatcaacattagaattttgatattagtcttatgttatcttccattctatttttatctgctttttgctgctagtttcaaactgccagtatttttccttttgcttttaaaatagttacaatatttttcatgatagccacagtattgccacagtttattataataaagggtttttatttgatttagcgcattcaaagcttttttctatcacttttgtgttcagaatataacctttgtgtgcgtgtatgttgtgtgtgtgcatgtgtggcgtatatgtgtgttacaggttaatgccttcttggaattgtgttaatgttctcttggtttattatgccatcagaatggtaaatgagaacactacaactgtagtcagctcacaatttttaaataaaggataccacagtgca

SEQ ID NO: 2670 - DNA, 5745 bp, Homo sapiens
  source 1..5745: mol_type = genomic DNA
atgggggatgtgaagctggttgcctcgtcacacatttccaaaacctccctcagtgtggatccctcaagagttgactccatgcccctgacagaggcccctgctttcattttgccccctcggaacctctgcatcaaagaaggagccaccgccaagttcgaagggcgggtccggggttacccagagccccaggtgacatggcacagaaacgggcaacccatcaccagcgggggccgcttcctgctggattgcggcatccgggggactttcagccttgtgattcatgctgtccatgaggaggacaggggaaagtatacctgtgaagccaccaatggcagtggtgctcgccaggtgacagtggagttgacagtagaaggaagttttgcgaagcagcttggtcagcctgttgtttccaaaaccttaggggatagattttcagctccagcagtggagacccgtcctagcatctggggggagtgcccaccaaagtttgctaccaagctgggccgagttgtggtcaaagaaggacagatgggacgattctcctgcaagatcactggccggccccaaccgcaggtcacctggctcaagggaaatgttccactgcagccgagtgcccgtgtgtctgtgtctgagaagaacggcatgcaggttctggaaatccatggagtcaaccaagatgacgtgggagtgtacacgtgcctggtggtgaacgggtcggggaaggcctcgatgtcagctgaactttccatccaaggtttggacagtgccaataggtcatttgtgagagaaacaaaagccaccaattcagatgtcaggaaagaggtgaccaatgtaatctcaaaggagtcgaagctggacagtctggaggctgcagccaaaagcaagaactgctccagcccccagagaggtggctccccaccctgggctgcaaacagccagcctcagcccccaagggagtccaagctggagtcatgcaaggactcgcccagaacggccccgcagaccccggtccttcagaagacttccagctccatcaccctgcaggccgcaagagttcagccggaaccaagagcaccaggcctgggggtcctatcaccttctggagaagagaggaagaggccagctcctccccgtccagccaccttccccaccaggcagcctggcctggggagccaagatgttgtgagcaaggctgctaacaggagaatccccatggagggccagagggattcagcattccccaaatttgagagcaagccccaaagccaggaggtcaaggaaaatcaaactgtcaagttcagatgtgaagtttccgggattccaaagcctgaagtggcctggttcctggaaggcacccccgtgaggagacaggaaggcagcattgaggtttatgaagatgctggctcccattacctctgcctgctgaaagcccggaccagggacagtgggacatacagctgcactgcttccaacgcccaaggccagctgtcctgtagctggaccctccaagtggaaaggcttgccgtgatggaggtggccccctccttctccagtgtcctgaaggactgcgctgttattgagggccaggattttgtgctgcagtgctccgtacgggggaccccagtgccccggatcacttggctgctgaatgggcagcccatccagtacgctcgctccacctgcgaggccggcgtggctgagctccacatccaggatgccctgccggaggaccatggcacctacacctgcctagctgagaatgccttggggcaggtgtcctgcagcgcctgggtcaccgtccatgaaaagaagagtagcaggaagagtgagtaccttctgcctgtggctcccagcaagcccactgcacccatcttcctgcagggcctctctgatctcaaagtcatggatggaagccaggtcactatgactgtccaagtgtcagggaatccaccccctgaagtcatctggctgcacaatgggaatgagatccaagagtcagaggacttccactttgaacagagaggaactcagcacagcctttgtatccaggaagtgttcccggaggacacgggcacgtacacctgcgaggcctggaacagcgctggagaggtccgcacccaggccgtgctcacggtacaagagcctcacgatggcacccagccctggttcatcagtaagcctcgctcagtgacagcctccctgggccagagtgtcctcatctcctgcgccatagctggtgacccctttcctaccgtgcactggctcagagatggcaaagccctctgcaaagacactggccacttcgaggtgcttcagaatgaggacgtgttcaccctggttctaaagaaggtgcagccctggcatgccggccagtatgagatcctgctcaagaaccgggttggcgaatgcagttgccaggtgtcactgatgctacagaacagctctgccagagcccttccacgggggagggagcctgccagctgcgaggacctctgtggtggaggagttggtgctgatggtggtggtagtgaccgctatgggtccctgaggcctggctggccagcaagagggcagggttggctagaggaggaagacggcgaggacgtgcgaggggtgctgaagaggcgcgtggagacgaggcagcacactgaggaggcgatccgccagcaggaggtggagcagctggacttccgagacctcctggggaagaaggtgagtacaaagaccctatcggaagacgacctgaaggagatcccagccgagcagatggatttccgtgccaacctgcagcggcaagtgaagccaaagactgtgtctgaggaagagaggaaggtgcacagcccccagcaggtcgattttcgctctgtcctggccaagaaggggacttccaagacccccgtgcctgagaaggtgccaccgccaaaacctgccaccccggattttcgctcagtgctgggtggcaagaagaaattaccagcagagaatggcagcagcagtgccgagaccctgaatgccaaggcagtggagagttccaagcccctgagcaatgcacagccttcagggcccttgaaacccgtgggcaacgccaagcctgctgagaccctgaagccaatgggcaacgccaagcctgccgagaccctgaagcccatgggcaatgccaagcctgatgagaacctgaaatccgctagcaaagaagaactcaagaaagacgttaagaatgatgtgaactgcaagagaggccatgcagggaccacagataatgaaaagagatcagagagccaggggacagccccagccttcaagcagaagctgcaagatgttcatgtggcagagggcaagaagctgctgctccagtgccaggtgtcttctgaccccccagccaccatcatctggacgctgaacggaaagaccctcaagaccaccaagttcatcatcctctcccaggaaggctcactctgctccgtctccatcgagaaggcactgcctgaggacagaggcttatacaagtgtgtagccaagaatgacgctggccaggcggagtgctcctgccaagtcaccgtggatgatgctccagccagtgagaacaccaaggccccagagatgaaatcccggaggcccaagagctctcttcctcccgtgctaggaactgagagtgatgcgactgtgaaaaagaaacctgcccccaagacacctccgaaggcagcaatgccccctcagatcatccagttccctgaggaccagaaggtacgcgcaggagagtcagtggagctgtttggcaaagtgacaggcactcagcccatcacctgtacctggatgaagttccgaaagcagatccaggaaagcgagcacatgaaggtggagaacagcgagaatggcagcaagctcaccatcctggccgcgcgccaggagcactgcggctgctacacactgctggtggagaacaagctgggcagcaggcaggcccaggtcaacctcactgtcgtggataagccagaccccccagctggcacaccttgtgcctctgacattcggagctcctcactgaccctgtcctggtatggctcctcatatgatgggggcagtgctgtacagtcctacagcatcgagatctgggactcagccaacaagacgtggaaggaactagccacatgccgcagcacctctttcaacgtccaggacctgctgcctgaccacgaatataagttccgtgtacgtgcaatcaacgtgtatggaaccagtgagccaagccaggagtctgaactcacaacggtaggagagaaacctgaagagccgaaggatgaagtggaggtgtcagatgatgatgagaaggagcccgaggttgattaccggacagtgacaatcaatactgaacaaaaagtatctgacttctacgacattgaggagagattaggatctgggaaatttggacaggtctttcgacttgtagaaaagaaaactcgaaaagtctgggcagggaagttcttcaaggcatattcagcaaaagagaaagagaatatccggcaggagattagcatcatgaactgcctccaccaccctaagctggtccagtgtgtggatgcctttgaagaaaaggccaacatcgtcatggtcctggagatcgtgtcaggaggggagctgtttgagcgcatcattgacgaggactttgagctgacggagcgtgagtgcatcaagtacatgcggcagatctcggagggagtggagtacatccacaagcagggcatcgtgcacctggacctcaagccggagaacatcatgtgtgtcaacaagacgggcaccaggatcaagctcatcgactttggtctggccaggaggctggagaatgcggggtctctgaaggtcctctttggcaccccagaatttgtggctcctgaagtgatcaactatgagcccatcggctacgccacagacatgtggagcatcggggtcatctgctacatcctagtcagtggcctttcccccttcatgggagacaacgataacgaaaccttggccaacgttacctcagccacctgggacttcgacgacgaggcattcgatgagatctccgacgatgccaaggatttcatcagcaatctgctgaagaaagatatgaaaaaccgcctggactgcacgcagtgccttcagcatccatggctaatgaaagataccaagaacatggaggccaagaaactctccaaggaccggatgaagaagtacatggcaagaaggaaatggcagaaaacgggcaatgctgtgagagccattggaagactgtcctctatggcaatgatctcagggctcagtggcaggaaatcctcaacagggtcaccaaccagcccgctcaatgcagaaaaactagaatctgaagaagatgtgtcccaagctttccttgaggctgttgctgaggaaaagcctcatgtaaaaccctatttctctaagaccattcgcgatttagaagttgtggagggaagtgctgctagatttgactgcaagattgaaggatacccagaccccgaggttgtctggttcaaagatgaccagtcaatcagggagtcccgccacttccagatagactacgatgaggacgggaactgctctttaattattagtgatgtttgcggggatgacgatgccaagtacacctgcaaggctgtcaacagtcttggagaagccacctgcacagcagagctcattgtggaaacgatggaggaaggtgaaggggaaggggaagaggaagaagagtga

SEQ ID NO: 2671 - DNA, 7669 bp, Homo sapiens
  source 1..7669: mol_type = genomic DNA
agcagtgctaaaggagcccggcggaggcagcggtgggtttgggactgaggcgctggatctgtggtcgcggctggggacgtgcgcccgcgccaccatcttcggctgaagaggcaattgcttttggatcgttccatttacaatggcgcagagaactggactcgaggatccagagaggtatctctttgtggacagggctgtcatctacaaccctgccactcaagctgattggacagctaaaaagctagtgtggattccatcagaacgccatggttttgaggcagctagtatcaaagaagaacggggagatgaagttatggtggagttggcagagaatggaaagaaagcaatggtcaacaaagatgatattcagaagatgaacccacctaagttttccaaggtggaggatatggcagaattgacatgcttgaatgaagcttccgttttacataatctgaaggatcgctactattcaggactaatctatacttattctggactcttctgtgtagttataaacccttacaagaatcttccaatttactctgagaatattattgaaatgtacagagggaagaagcgtcatgagatgcctccacacatctatgctatatctgaatctgcttacagatgcatgcttcaagatcgtgaggaccagtcaattctttgcacgggtgagtcaggtgctgggaagacagaaaatacaaagaaagttattcagtaccttgcccatgttgcttcttcacataaaggaagaaaggaccataatattcctggggaacttgaacggcagcttttgcaagcaaatccaattctggaatcatttggaaatgcgaagactgtgaaaaatgataactcatctcgttttggcaaatttattcggatcaactttgatgtaactggctatatcgttggggccaacattgaaacataccttctggaaaagtctcgtgctgttcgtcaagcaaaagatgaacgtacttttcatatcttttaccagttgttatctggagcaggagaacacctaaagtctgatttgcttcttgaaggatttaataactacaggtttctctccaatggctatattcctattccgggacagcaagacaaagataatttccaggagaccatggaagcaatgcacataatgggcttctcccatgaagagattctgtcaatgcttaaagtagtatcttcagtgctacagtttggaaatatttctttcaaaaaggagagaaatactgatcaagcttccatgccagaaaatacagttgcgcagaagctctgccatcttcttgggatgaatgtgatggagtttactcgggccatcctgactccccggatcaaggtcggccgagactatgtgcaaaaagcccagaccaaagaacaggcagattttgcagtagaagcattggcaaaagctacctatgagcggctctttcgctggctcgttcatcgcatcaataaagctctggataggaccaaacgtcagggagcatctttcattggaatcctggatattgctggatttgaaatttttgagctgaactcctttgaacaactttgcatcaactacaccaatgagaagctgcagcagctgttcaaccacaccatgtttatcctagaacaagaggaataccagcgcgaaggcatcgagtggaacttcatcgatttcgggctggatctgcagccatgcatcgacctaatagagagacctgcgaaccctcctggtgtactggcccttttggatgaagaatgctggttccctaaagccacagataaaacctttgttgaaaaactggttcaagagcaaggttcccactccaagtttcagaaacctcgacaattaaaagacaaagctgatttttgcattatacattatgcagggaaggtggactataaggcagatgagtggctgatgaagaatatggaccccctgaatgacaacgtggccacccttttgcaccagtcatcagacagatttgtggcagagctttggaaagatgtggaccgtatcgtgggtctggatcaagtcactggtatgactgagacagcttttggctccgcatataaaaccaagaagggcatgtttcgtaccgttgggcaactctacaaagaatctctcaccaagctgatggcaactctccgaaacaccaaccctaactttgttcgttgtatcattccaaatcacgagaagagggctggaaaattggatccacacctagtcctagatcagcttcgctgtaacggtgtcctggaagggatccgaatctgtcgccagggcttccctaaccgaatagttttccaggaattcagacagagatatgagatcctaactccaaatgctattcctaaaggttttatggatggtaaacaggcctgtgaacgaatgatccgggctttagaattggacccaaacttgtacagaattggacagagcaagatatttttcagagctggagttctggcacacttagaggaagaaagagatttaaaaatcaccgatatcattatcttcttccaggccgtttgcagaggttacctggccagaaaggcctttgccaagaagcagcagcaactaagtgccttaaaggtcttgcagcggaactgtgccgcgtacctgaaattacggcactggcagtggtggcgagtcttcacaaaggtgaagccgcttctacaagtgactcgccaggaggaagaacttcaggccaaagatgaagagctgttgaaggtgaaggagaagcagacgaaggtggaaggagagctggaggagatggagcggaagcaccagcagcttttagaagagaagaatatccttgcagaacaactacaagcagagactgagctctttgctgaagcagaagagatgagggcaagacttgctgctaaaaagcaggaattagaagagattctacatgacttggagtctagggttgaagaagaagaagaaagaaaccaaatcctccaaaatgaaaagaaaaaaatgcaagcacatattcaggacctggaagaacagctagacgaggaggaaggggctcggcaaaagctgcagctggaaaaggtgacagcagaggccaagatcaagaagatggaagaggagattctgcttctcgaggaccaaaattccaagttcatcaaagaaaagaaactcatggaagatcgcattgctgagtgttcctctcagctggctgaagaggaagaaaaggcgaaaaacttggccaaaatcaggaataagcaagaagtgatgatctcagatttagaagaacgcttaaagaaggaagaaaagactcgtcaggaactggaaaaggccaaaagaaaactcgacggggagacgaccgacctgcaggaccagatcgcagagctgcaggcgcagattgatgagctcaagctgcagctggccaagaaggaggaggagctgcagggcgcactggccagaggtgatgatgaaacactccataagaacaatgcccttaaagttgtgcgagagctacaagcccaaattgctgaacttcaggaagactttgaatccgagaaggcttcacggaacaaggccgaaaagcagaaaagggacttgagtgaggaactggaagctctgaaaacagagctggaggacacgctggacaccacggcagcccagcaggaactacgtacaaaacgtgaacaagaagtggcagagctgaagaaagctcttgaggaggaaactaagaaccatgaagctcaaatccaggacatgagacaaagacacgcaacagccctggaggagctctcagagcagctggaacaggccaagcggttcaaagcaaatctagagaagaacaagcagggcctggagacagataacaaggagctggcgtgtgaggtgaaggtcctgcagcaggtcaaggctgagtctgagcacaagaggaagaagctcgacgcgcaggtccaggagctccatgccaaggtctctgaaggcgacaggctcagggtggagctggcggagaaagcaagtaagctgcagaatgagctagataatgtctccacccttctggaagaagcagagaagaagggtattaaatttgctaaggatgcagctagtcttgagtctcaactacaggatacacaggagcttcttcaggaggagacacgccagaaactaaacctgagcagtcggatccggcagctggaagaggagaagaacagtcttcaggagcagcaggaggaggaggaggaggccaggaagaacctggagaagcaagtgctggccctgcagtcccagttggctgataccaagaagaaagtagatgacgacctgggaacaattgaaagtctggaagaagccaagaagaagcttctgaaggacgcggaggccctgagccagcgcctggaggagaaggcactggcgtatgacaaactggagaagaccaagaaccgcctgcagcaggagctggacgacctcacggtggacctggaccaccagcgccaggtcgcctccaacttggagaagaagcagaagaagtttgaccagctgttagcagaagagaagagcatctctgctcgctatgccgaagagcgggaccgggccgaagccgaggccagagagaaagaaaccaaagccctgtcactggcccgggccctcgaggaagccctggaggccaaggaggagtttgagaggcagaacaagcagctccgagcagacatggaagacctcatgagctccaaagatgatgtgggaaaaaacgttcacgaacttgaaaaatccaaacgggccctagagcagcaggtggaggaaatgaggacccagctggaggagctggaagacgaactccaggccacggaagatgccaagcttcgtctggaggtcaacatgcaggccatgaaggcgcagttcgagagagacctgcaaaccagggatgagcagaatgaagagaagaagcggctgctgatcaaacaggtgcgggagctcgaggcggagctggaggatgagaggaaacagcgggcgcttgctgtagcttcaaagaaaaagatggagatagacctgaaggacctcgaagcccaaatcgaggctgcgaacaaagctcgggatgaggtgattaagcagctccgcaagctccaggctcagatgaaggattaccaacgtgaattagaagaagctcgtgcatccagagatgagatttttgctcaatccaaagagagtgaaaagaaattgaagagtctggaagcagaaatccttcaattgcaggaggaacttgcctcatctgagcgagcccgccgacacgccgagcaggagagagatgagctggcggacgagatcaccaacagcgcctctggcaagtccgcgctgctggatgagaagcggcgtctggaagctcggatcgcacagctggaggaggagctggaagaggagcagagcaacatggagctgctcaacgaccgcttccgcaagaccactctacaggtggacacactgaacgccgagctagcagccgagcgcagcgccgcccagaagagtgacaatgcacgccagcaactggagcggcagaacaaggagctgaaggccaagctgcaggaactcgagggtgctgtcaagtctaagttcaaggccaccatctcagccctggaggccaagattgggcagctggaggagcagcttgagcaggaagccaaggaacgagcagccgccaacaaattagtccgtcgcactgagaagaagctgaaagaaatcttcatgcaggttgaggatgagcgtcgacacgcggaccagtataaagagcagatggagaaggccaacgctcggatgaagcagcttaaacgccagctggaggaagcagaagaagaagcgacgcgtgccaacgcatctcggcgtaaactccagcgggaactggatgatgccaccgaggccaacgagggcctgagccgcgaggtcagcaccctgaagaaccggctgaggcggggtggccccatcagcttctcttccagccgatctggccggcgccagctgcaccttgaaggagcttccctggagctctccgacgatgacacagaaagtaagaccagtgatgtcaacgagacgcagccaccccagtcagagtaaagttgcaggaagccagaggaggcaatacagtgggacagttaggaatgcacccggggcctcctgcagatttcggaaattggcaagctacgggattccttcctgaaagatcaactgtgtcttaaggctctccagcctatgcatactgtatcctgcttcagacttaggtacaattgctcccctttttatatatagacacacacaggacacatatattaaacagattgtttcatcattgcatctattttccatatagtcatcaagagaccattttataaaacatggtaagaccctttttaaaacaaactccaggcccttggttgcgggtcgctgggttattggggcagcgccgtggtcgtcactcagtcgctctgcatgctctctgtcatacagacaggtaacctagttctgtgttcacgtggcccccgactcctcagccacatcaagtctcctagaccactgtggactctaaactgcacttgtctctctcatttccttcaaataatgatcaatgctatttcagtgagcaaactgtgaaaggggctttggaaagagtaggaggggtgggctggatcggaagcaacacccatttggggttaccatgtccatcccccaaggggggccctgcccctcgagtcgatggtgtcccgcatctactcatgtgaactggccttggcgagggctggtctgtgcatagaagggatagtggccacactgcagctgaggccccaggtggcagccatggatcatgtagacttccagatggtctcccgaaccgcctggctctgccggcgccctcctcacgtcaggagcaagcagccgtggacccctaagccgagctggtggaaggcccctccccatcgccagccgggccctcatgctgaccttgcaaattcagccgctgctttgagcccaaaatgggaatattggttttgtgtccgaggcttgttccaagtttgtcaatgaggtttatggagcctccagaacagatgccatcttcctgaatgttgacatgccagtgggtgtgactccttcatttttccttctcccttccctttggacagtgttacagtgaacacttagcatcctgtttttggttggtagttaagcaaactgacattacggaaagtgccttagacactacagtactaagacaatgttgaatatatcattcgcctctataacaatttaatgtattcagttttgactgtgcttcatatcatgtacctctctagtcaaagtggtattacagacattcagtgacaatgaatcagtgttaattctaaatccttgatcctctgcaatgtgcttgaaaacacaaaccttttgggttaaaagctttaacatctattaggaagaatttgtcctgtgggtttggaatcttggattttccccctttatgaactgtactggctgttgaccaccagacacctgaccgcaaatatcttttcttgtattcccatatttctagacaatgatttttgtaagacaataaatttattcattatagatatttgcgcctgctctgtttacttgaagaaaaaagcacccgtggagaataaagagacctcaataaacaagaataatcatgtgaacgtggaa

SEQ ID NO: 2672 - DNA, 7762 bp, Homo sapiens
  source 1..7762: mol_type = genomic DNA
agcagtgctaaaggagcccggcggaggcagcggtgggtttgggactgaggcgctggatctgtggtcgcggctggggacgtgcgcccgcgccaccatcttcggctgaagaggcaattgcttttggatcgttccatttacaatggcgcagagaactggactcgaggatccagagaggtatctctttgtggacagggctgtcatctacaaccctgccactcaagctgattggacagctaaaaagctagtgtggattccatcagaacgccatggttttgaggcagctagtatcaaagaagaacggggagatgaagttatggtggagttggcagagaatggaaagaaagcaatggtcaacaaagatgatattcagaagatgaacccacctaagttttccaaggtggaggatatggcagaattgacatgcttgaatgaagcttccgttttacataatctgaaggatcgctactattcaggactaatctatacttattctggactcttctgtgtagttataaacccttacaagaatcttccaatttactctgagaatattattgaaatgtacagagggaagaagcgtcatgagatgcctccacacatctatgctatatctgaatctgcttacagatgcatgcttcaagatcgtgaggaccagtcaattctttgcacgggtgagtcaggtgctgggaagacagaaaatacaaagaaagttattcagtaccttgcccatgttgcttcttcacataaaggaagaaaggaccataatattcctcaggaatcgcctaaaccagtgaaacaccagggggaacttgaacggcagcttttgcaagcaaatccaattctggaatcatttggaaatgcgaagactgtgaaaaatgataactcatctcgttttggcaaatttattcggatcaactttgatgtaactggctatatcgttggggccaacattgaaacataccttctggaaaagtctcgtgctgttcgtcaagcaaaagatgaacgtacttttcatatcttttaccagttgttatctggagcaggagaacacctaaagtctgatttgcttcttgaaggatttaataactacaggtttctctccaatggctatattcctattccgggacagcaagacaaagataatttccaggagaccatggaagcaatgcacataatgggcttctcccatgaagagattctgtcaatgcttaaagtagtatcttcagtgctacagtttggaaatatttctttcaaaaaggagagaaatactgatcaagcttccatgccagaaaatacagttgcgcagaagctctgccatcttcttgggatgaatgtgatggagtttactcgggccatcctgactccccggatcaaggtcggccgagactatgtgcaaaaagcccagaccaaagaacaggcagattttgcagtagaagcattggcaaaagctacctatgagcggctctttcgctggctcgttcatcgcatcaataaagctctggataggaccaaacgtcagggagcatctttcattggaatcctggatattgctggatttgaaatttttgagctgaactcctttgaacaactttgcatcaactacaccaatgagaagctgcagcagctgttcaaccacaccatgtttatcctagaacaagaggaataccagcgcgaaggcatcgagtggaacttcatcgatttcgggctggatctgcagccatgcatcgacctaatagagagacctgcgaaccctcctggtgtactggcccttttggatgaagaatgctggttccctaaagccacagataaaacctttgttgaaaaactggttcaagagcaaggttcccactccaagtttcagaaacctcgacaattaaaagacaaagctgatttttgcattatacattatgcagggaaggtggactataaggcagatgagtggctgatgaagaatatggaccccctgaatgacaacgtggccacccttttgcaccagtcatcagacagatttgtggcagagctttggaaagatgagattcagaatattcagagagcttctttctatgacagtgtttctggtcttcatgagccaccagtggaccgtatcgtgggtctggatcaagtcactggtatgactgagacagcttttggctccgcatataaaaccaagaagggcatgtttcgtaccgttgggcaactctacaaagaatctctcaccaagctgatggcaactctccgaaacaccaaccctaactttgttcgttgtatcattccaaatcacgagaagagggctggaaaattggatccacacctagtcctagatcagcttcgctgtaacggtgtcctggaagggatccgaatctgtcgccagggcttccctaaccgaatagttttccaggaattcagacagagatatgagatcctaactccaaatgctattcctaaaggttttatggatggtaaacaggcctgtgaacgaatgatccgggctttagaattggacccaaacttgtacagaattggacagagcaagatatttttcagagctggagttctggcacacttagaggaagaaagagatttaaaaatcaccgatatcattatcttcttccaggccgtttgcagaggttacctggccagaaaggcctttgccaagaagcagcagcaactaagtgccttaaaggtcttgcagcggaactgtgccgcgtacctgaaattacggcactggcagtggtggcgagtcttcacaaaggtgaagccgcttctacaagtgactcgccaggaggaagaacttcaggccaaagatgaagagctgttgaaggtgaaggagaagcagacgaaggtggaaggagagctggaggagatggagcggaagcaccagcagcttttagaagagaagaatatccttgcagaacaactacaagcagagactgagctctttgctgaagcagaagagatgagggcaagacttgctgctaaaaagcaggaattagaagagattctacatgacttggagtctagggttgaagaagaagaagaaagaaaccaaatcctccaaaatgaaaagaaaaaaatgcaagcacatattcaggacctggaagaacagctagacgaggaggaaggggctcggcaaaagctgcagctggaaaaggtgacagcagaggccaagatcaagaagatggaagaggagattctgcttctcgaggaccaaaattccaagttcatcaaagaaaagaaactcatggaagatcgcattgctgagtgttcctctcagctggctgaagaggaagaaaaggcgaaaaacttggccaaaatcaggaataagcaagaagtgatgatctcagatttagaagaacgcttaaagaaggaagaaaagactcgtcaggaactggaaaaggccaaaagaaaactcgacggggagacgaccgacctgcaggaccagatcgcagagctgcaggcgcagattgatgagctcaagctgcagctggccaagaaggaggaggagctgcagggcgcactggccagaggtgatgatgaaacactccataagaacaatgcccttaaagttgtgcgagagctacaagcccaaattgctgaacttcaggaagactttgaatccgagaaggcttcacggaacaaggccgaaaagcagaaaagggacttgagtgaggaactggaagctctgaaaacagagctggaggacacgctggacaccacggcagcccagcaggaactacgtacaaaacgtgaacaagaagtggcagagctgaagaaagctcttgaggaggaaactaagaaccatgaagctcaaatccaggacatgagacaaagacacgcaacagccctggaggagctctcagagcagctggaacaggccaagcggttcaaagcaaatctagagaagaacaagcagggcctggagacagataacaaggagctggcgtgtgaggtgaaggtcctgcagcaggtcaaggctgagtctgagcacaagaggaagaagctcgacgcgcaggtccaggagctccatgccaaggtctctgaaggcgacaggctcagggtggagctggcggagaaagcaagtaagctgcagaatgagctagataatgtctccacccttctggaagaagcagagaagaagggtattaaatttgctaaggatgcagctagtcttgagtctcaactacaggatacacaggagcttcttcaggaggagacacgccagaaactaaacctgagcagtcggatccggcagctggaagaggagaagaacagtcttcaggagcagcaggaggaggaggaggaggccaggaagaacctggagaagcaagtgctggccctgcagtcccagttggctgataccaagaagaaagtagatgacgacctgggaacaattgaaagtctggaagaagccaagaagaagcttctgaaggacgcggaggccctgagccagcgcctggaggagaaggcactggcgtatgacaaactggagaagaccaagaaccgcctgcagcaggagctggacgacctcacggtggacctggaccaccagcgccaggtcgcctccaacttggagaagaagcagaagaagtttgaccagctgttagcagaagagaagagcatctctgctcgctatgccgaagagcgggaccgggccgaagccgaggccagagagaaagaaaccaaagccctgtcactggcccgggccctcgaggaagccctggaggccaaggaggagtttgagaggcagaacaagcagctccgagcagacatggaagacctcatgagctccaaagatgatgtgggaaaaaacgttcacgaacttgaaaaatccaaacgggccctagagcagcaggtggaggaaatgaggacccagctggaggagctggaagacgaactccaggccacggaagatgccaagcttcgtctggaggtcaacatgcaggccatgaaggcgcagttcgagagagacctgcaaaccagggatgagcagaatgaagagaagaagcggctgctgatcaaacaggtgcgggagctcgaggcggagctggaggatgagaggaaacagcgggcgcttgctgtagcttcaaagaaaaagatggagatagacctgaaggacctcgaagcccaaatcgaggctgcgaacaaagctcgggatgaggtgattaagcagctccgcaagctccaggctcagatgaaggattaccaacgtgaattagaagaagctcgtgcatccagagatgagatttttgctcaatccaaagagagtgaaaagaaattgaagagtctggaagcagaaatccttcaattgcaggaggaacttgcctcatctgagcgagcccgccgacacgccgagcaggagagagatgagctggcggacgagatcaccaacagcgcctctggcaagtccgcgctgctggatgagaagcggcgtctggaagctcggatcgcacagctggaggaggagctggaagaggagcagagcaacatggagctgctcaacgaccgcttccgcaagaccactctacaggtggacacactgaacgccgagctagcagccgagcgcagcgccgcccagaagagtgacaatgcacgccagcaactggagcggcagaacaaggagctgaaggccaagctgcaggaactcgagggtgctgtcaagtctaagttcaaggccaccatctcagccctggaggccaagattgggcagctggaggagcagcttgagcaggaagccaaggaacgagcagccgccaacaaattagtccgtcgcactgagaagaagctgaaagaaatcttcatgcaggttgaggatgagcgtcgacacgcggaccagtataaagagcagatggagaaggccaacgctcggatgaagcagcttaaacgccagctggaggaagcagaagaagaagcgacgcgtgccaacgcatctcggcgtaaactccagcgggaactggatgatgccaccgaggccaacgagggcctgagccgcgaggtcagcaccctgaagaaccggctgaggcggggtggccccatcagcttctcttccagccgatctggccggcgccagctgcaccttgaaggagcttccctggagctctccgacgatgacacagaaagtaagaccagtgatgtcaacgagacgcagccaccccagtcagagtaaagttgcaggaagccagaggaggcaatacagtgggacagttaggaatgcacccggggcctcctgcagatttcggaaattggcaagctacgggattccttcctgaaagatcaactgtgtcttaaggctctccagcctatgcatactgtatcctgcttcagacttaggtacaattgctcccctttttatatatagacacacacaggacacatatattaaacagattgtttcatcattgcatctattttccatatagtcatcaagagaccattttataaaacatggtaagaccctttttaaaacaaactccaggcccttggttgcgggtcgctgggttattggggcagcgccgtggtcgtcactcagtcgctctgcatgctctctgtcatacagacaggtaacctagttctgtgttcacgtggcccccgactcctcagccacatcaagtctcctagaccactgtggactctaaactgcacttgtctctctcatttccttcaaataatgatcaatgctatttcagtgagcaaactgtgaaaggggctttggaaagagtaggaggggtgggctggatcggaagcaacacccatttggggttaccatgtccatcccccaaggggggccctgcccctcgagtcgatggtgtcccgcatctactcatgtgaactggccttggcgagggctggtctgtgcatagaagggatagtggccacactgcagctgaggccccaggtggcagccatggatcatgtagacttccagatggtctcccgaaccgcctggctctgccggcgccctcctcacgtcaggagcaagcagccgtggacccctaagccgagctggtggaaggcccctccccatcgccagccgggccctcatgctgaccttgcaaattcagccgctgctttgagcccaaaatgggaatattggttttgtgtccgaggcttgttccaagtttgtcaatgaggtttatggagcctccagaacagatgccatcttcctgaatgttgacatgccagtgggtgtgactccttcatttttccttctcccttccctttggacagtgttacagtgaacacttagcatcctgtttttggttggtagttaagcaaactgacattacggaaagtgccttagacactacagtactaagacaatgttgaatatatcattcgcctctataacaatttaatgtattcagttttgactgtgcttcatatcatgtacctctctagtcaaagtggtattacagacattcagtgacaatgaatcagtgttaattctaaatccttgatcctctgcaatgtgcttgaaaacacaaaccttttgggttaaaagctttaacatctattaggaagaatttgtcctgtgggtttggaatcttggattttccccctttatgaactgtactggctgttgaccaccagacacctgaccgcaaatatcttttcttgtattcccatatttctagacaatgatttttgtaagacaataaatttattcattatagatatttgcgcctgctctgtttacttgaagaaaaaagcacccgtggagaataaagagacctcaataaacaagaataatcatgtgaacgtggaa

SEQ ID NO: 2673 - DNA, 7667 bp, Homo sapiens
  source 1..7667: mol_type = genomic DNA
actgaggcgctggatctgtggtcgcggctggggacgtgcgcccgcgccaccatcttcggctgaagaggcaattgcttttggatcgttccatttacaatggcgcagagaactggactcgaggatccagagaggtatctctttgtggacagggctgtcatctacaaccctgccactcaagctgattggacagctaaaaagctagtgtggattccatcagaacgccatggttttgaggcagctagtatcaaagaagaacggggagatgaagttatggtggagttggcagagaatggaaagaaagcaatggtcaacaaagatgatattcagaagatgaacccacctaagttttccaaggtggaggatatggcagaattgacatgcttgaatgaagcttccgttttacataatctgaaggatcgctactattcaggactaatctatacttattctggactcttctgtgtagttataaacccttacaagaatcttccaatttactctgagaatattattgaaatgtacagagggaagaagcgtcatgagatgcctccacacatctatgctatatctgaatctgcttacagatgcatgcttcaagatcgtgaggaccagtcaattctttgcacgggtgagtcaggtgctgggaagacagaaaatacaaagaaagttattcagtaccttgcccatgttgcttcttcacataaaggaagaaaggaccataatattcctcaggaatcgcctaaaccagtgaaacaccaggcaagtgctcttctttatggggaacttgaacggcagcttttgcaagcaaatccaattctggaatcatttggaaatgcgaagactgtgaaaaatgataactcatctcgttttggcaaatttattcggatcaactttgatgtaactggctatatcgttggggccaacattgaaacataccttctggaaaagtctcgtgctgttcgtcaagcaaaagatgaacgtacttttcatatcttttaccagttgttatctggagcaggagaacacctaaagtctgatttgcttcttgaaggatttaataactacaggtttctctccaatggctatattcctattccgggacagcaagacaaagataatttccaggagaccatggaagcaatgcacataatgggcttctcccatgaagagattctgtcaatgcttaaagtagtatcttcagtgctacagtttggaaatatttctttcaaaaaggagagaaatactgatcaagcttccatgccagaaaatacagttgcgcagaagctctgccatcttcttgggatgaatgtgatggagtttactcgggccatcctgactccccggatcaaggtcggccgagactatgtgcaaaaagcccagaccaaagaacaggcagattttgcagtagaagcattggcaaaagctacctatgagcggctctttcgctggctcgttcatcgcatcaataaagctctggataggaccaaacgtcagggagcatctttcattggaatcctggatattgctggatttgaaatttttgagctgaactcctttgaacaactttgcatcaactacaccaatgagaagctgcagcagctgttcaaccacaccatgtttatcctagaacaagaggaataccagcgcgaaggcatcgagtggaacttcatcgatttcgggctggatctgcagccatgcatcgacctaatagagagacctgcgaaccctcctggtgtactggcccttttggatgaagaatgctggttccctaaagccacagataaaacctttgttgaaaaactggttcaagagcaaggttcccactccaagtttcagaaacctcgacaattaaaagacaaagctgatttttgcattatacattatgcagggaaggtggactataaggcagatgagtggctgatgaagaatatggaccccctgaatgacaacgtggccacccttttgcaccagtcatcagacagatttgtggcagagctttggaaagatgtggaccgtatcgtgggtctggatcaagtcactggtatgactgagacagcttttggctccgcatataaaaccaagaagggcatgtttcgtaccgttgggcaactctacaaagaatctctcaccaagctgatggcaactctccgaaacaccaaccctaactttgttcgttgtatcattccaaatcacgagaagagggctggaaaattggatccacacctagtcctagatcagcttcgctgtaacggtgtcctggaagggatccgaatctgtcgccagggcttccctaaccgaatagttttccaggaattcagacagagatatgagatcctaactccaaatgctattcctaaaggttttatggatggtaaacaggcctgtgaacgaatgatccgggctttagaattggacccaaacttgtacagaattggacagagcaagatatttttcagagctggagttctggcacacttagaggaagaaagagatttaaaaatcaccgatatcattatcttcttccaggccgtttgcagaggttacctggccagaaaggcctttgccaagaagcagcagcaactaagtgccttaaaggtcttgcagcggaactgtgccgcgtacctgaaattacggcactggcagtggtggcgagtcttcacaaaggtgaagccgcttctacaagtgactcgccaggaggaagaacttcaggccaaagatgaagagctgttgaaggtgaaggagaagcagacgaaggtggaaggagagctggaggagatggagcggaagcaccagcagcttttagaagagaagaatatccttgcagaacaactacaagcagagactgagctctttgctgaagcagaagagatgagggcaagacttgctgctaaaaagcaggaattagaagagattctacatgacttggagtctagggttgaagaagaagaagaaagaaaccaaatcctccaaaatgaaaagaaaaaaatgcaagcacatattcaggacctggaagaacagctagacgaggaggaaggggctcggcaaaagctgcagctggaaaaggtgacagcagaggccaagatcaagaagatggaagaggagattctgcttctcgaggaccaaaattccaagttcatcaaagaaaagaaactcatggaagatcgcattgctgagtgttcctctcagctggctgaagaggaagaaaaggcgaaaaacttggccaaaatcaggaataagcaagaagtgatgatctcagatttagaagaacgcttaaagaaggaagaaaagactcgtcaggaactggaaaaggccaaaagaaaactcgacggggagacgaccgacctgcaggaccagatcgcagagctgcaggcgcagattgatgagctcaagctgcagctggccaagaaggaggaggagctgcagggcgcactggccagaggtgatgatgaaacactccataagaacaatgcccttaaagttgtgcgagagctacaagcccaaattgctgaacttcaggaagactttgaatccgagaaggcttcacggaacaaggccgaaaagcagaaaagggacttgagtgaggaactggaagctctgaaaacagagctggaggacacgctggacaccacggcagcccagcaggaactacgtacaaaacgtgaacaagaagtggcagagctgaagaaagctcttgaggaggaaactaagaaccatgaagctcaaatccaggacatgagacaaagacacgcaacagccctggaggagctctcagagcagctggaacaggccaagcggttcaaagcaaatctagagaagaacaagcagggcctggagacagataacaaggagctggcgtgtgaggtgaaggtcctgcagcaggtcaaggctgagtctgagcacaagaggaagaagctcgacgcgcaggtccaggagctccatgccaaggtctctgaaggcgacaggctcagggtggagctggcggagaaagcaagtaagctgcagaatgagctagataatgtctccacccttctggaagaagcagagaagaagggtattaaatttgctaaggatgcagctagtcttgagtctcaactacaggatacacaggagcttcttcaggaggagacacgccagaaactaaacctgagcagtcggatccggcagctggaagaggagaagaacagtcttcaggagcagcaggaggaggaggaggaggccaggaagaacctggagaagcaagtgctggccctgcagtcccagttggctgataccaagaagaaagtagatgacgacctgggaacaattgaaagtctggaagaagccaagaagaagcttctgaaggacgcggaggccctgagccagcgcctggaggagaaggcactggcgtatgacaaactggagaagaccaagaaccgcctgcagcaggagctggacgacctcacggtggacctggaccaccagcgccaggtcgcctccaacttggagaagaagcagaagaagtttgaccagctgttagcagaagagaagagcatctctgctcgctatgccgaagagcgggaccgggccgaagccgaggccagagagaaagaaaccaaagccctgtcactggcccgggccctcgaggaagccctggaggccaaggaggagtttgagaggcagaacaagcagctccgagcagacatggaagacctcatgagctccaaagatgatgtgggaaaaaacgttcacgaacttgaaaaatccaaacgggccctagagcagcaggtggaggaaatgaggacccagctggaggagctggaagacgaactccaggccacggaagatgccaagcttcgtctggaggtcaacatgcaggccatgaaggcgcagttcgagagagacctgcaaaccagggatgagcagaatgaagagaagaagcggctgctgatcaaacaggtgcgggagctcgaggcggagctggaggatgagaggaaacagcgggcgcttgctgtagcttcaaagaaaaagatggagatagacctgaaggacctcgaagcccaaatcgaggctgcgaacaaagctcgggatgaggtgattaagcagctccgcaagctccaggctcagatgaaggattaccaacgtgaattagaagaagctcgtgcatccagagatgagatttttgctcaatccaaagagagtgaaaagaaattgaagagtctggaagcagaaatccttcaattgcaggaggaacttgcctcatctgagcgagcccgccgacacgccgagcaggagagagatgagctggcggacgagatcaccaacagcgcctctggcaagtccgcgctgctggatgagaagcggcgtctggaagctcggatcgcacagctggaggaggagctggaagaggagcagagcaacatggagctgctcaacgaccgcttccgcaagaccactctacaggtggacacactgaacgccgagctagcagccgagcgcagcgccgcccagaagagtgacaatgcacgccagcaactggagcggcagaacaaggagctgaaggccaagctgcaggaactcgagggtgctgtcaagtctaagttcaaggccaccatctcagccctggaggccaagattgggcagctggaggagcagcttgagcaggaagccaaggaacgagcagccgccaacaaattagtccgtcgcactgagaagaagctgaaagaaatcttcatgcaggttgaggatgagcgtcgacacgcggaccagtataaagagcagatggagaaggccaacgctcggatgaagcagcttaaacgccagctggaggaagcagaagaagaagcgacgcgtgccaacgcatctcggcgtaaactccagcgggaactggatgatgccaccgaggccaacgagggcctgagccgcgaggtcagcaccctgaagaaccggctgaggcggggtggccccatcagcttctcttccagccgatctggccggcgccagctgcaccttgaaggagcttccctggagctctccgacgatgacacagaaagtaagaccagtgatgtcaacgagacgcagccaccccagtcagagtaaagttgcaggaagccagaggaggcaatacagtgggacagttaggaatgcacccggggcctcctgcagatttcggaaattggcaagctacgggattccttcctgaaagatcaactgtgtcttaaggctctccagcctatgcatactgtatcctgcttcagacttaggtacaattgctcccctttttatatatagacacacacaggacacatatattaaacagattgtttcatcattgcatctattttccatatagtcatcaagagaccattttataaaacatggtaagaccctttttaaaacaaactccaggcccttggttgcgggtcgctgggttattggggcagcgccgtggtcgtcactcagtcgctctgcatgctctctgtcatacagacaggtaacctagttctgtgttcacgtggcccccgactcctcagccacatcaagtctcctagaccactgtggactctaaactgcacttgtctctctcatttccttcaaataatgatcaatgctatttcagtgagcaaactgtgaaaggggctttggaaagagtaggaggggtgggctggatcggaagcaacacccatttggggttaccatgtccatcccccaaggggggccctgcccctcgagtcgatggtgtcccgcatctactcatgtgaactggccttggcgagggctggtctgtgcatagaagggatagtggccacactgcagctgaggccccaggtggcagccatggatcatgtagacttccagatggtctcccgaaccgcctggctctgccggcgccctcctcacgtcaggagcaagcagccgtggacccctaagccgagctggtggaaggcccctccccatcgccagccgggccctcatgctgaccttgcaaattcagccgctgctttgagcccaaaatgggaatattggttttgtgtccgaggcttgttccaagtttgtcaatgaggtttatggagcctccagaacagatgccatcttcctgaatgttgacatgccagtgggtgtgactccttcatttttccttctcccttccctttggacagtgttacagtgaacacttagcatcctgtttttggttggtagttaagcaaactgacattacggaaagtgccttagacactacagtactaagacaatgttgaatatatcattcgcctctataacaatttaatgtattcagttttgactgtgcttcatatcatgtacctctctagtcaaagtggtattacagacattcagtgacaatgaatcagtgttaattctaaatccttgatcctctgcaatgtgcttgaaaacacaaaccttttgggttaaaagctttaacatctattaggaagaatttgtcctgtgggtttggaatcttggattttccccctttatgaactgtactggctgttgaccaccagacacctgaccgcaaatatcttttcttgtattcccatatttctagacaatgatttttgtaagacaataaatttattcattatagatatttgcgcctgctctgtttacttgaagaaaaaagcacccgtggagaataaagagacctcaataaacaagaataatcatgtgaa

SEQ ID NO: 2674 - DNA, 7682 bp, Homo sapiens
  source 1..7682: mol_type = genomic DNA
actgaggcgctggatctgtggtcgcggctggggacgtgcgcccgcgccaccatcttcggctgaagaggcaattgcttttggatcgttccatttacaatggcgcagagaactggactcgaggatccagagaggtatctctttgtggacagggctgtcatctacaaccctgccactcaagctgattggacagctaaaaagctagtgtggattccatcagaacgccatggttttgaggcagctagtatcaaagaagaacggggagatgaagttatggtggagttggcagagaatggaaagaaagcaatggtcaacaaagatgatattcagaagatgaacccacctaagttttccaaggtggaggatatggcagaattgacatgcttgaatgaagcttccgttttacataatctgaaggatcgctactattcaggactaatctatacttattctggactcttctgtgtagttataaacccttacaagaatcttccaatttactctgagaatattattgaaatgtacagagggaagaagcgtcatgagatgcctccacacatctatgctatatctgaatctgcttacagatgcatgcttcaagatcgtgaggaccagtcaattctttgcacgggtgagtcaggtgctgggaagacagaaaatacaaagaaagttattcagtaccttgcccatgttgcttcttcacataaaggaagaaaggaccataatattcctggggaacttgaacggcagcttttgcaagcaaatccaattctggaatcatttggaaatgcgaagactgtgaaaaatgataactcatctcgttttggcaaatttattcggatcaactttgatgtaactggctatatcgttggggccaacattgaaacataccttctggaaaagtctcgtgctgttcgtcaagcaaaagatgaacgtacttttcatatcttttaccagttgttatctggagcaggagaacacctaaagtctgatttgcttcttgaaggatttaataactacaggtttctctccaatggctatattcctattccgggacagcaagacaaagataatttccaggagaccatggaagcaatgcacataatgggcttctcccatgaagagattctgtcaatgcttaaagtagtatcttcagtgctacagtttggaaatatttctttcaaaaaggagagaaatactgatcaagcttccatgccagaaaatacagttgcgcagaagctctgccatcttcttgggatgaatgtgatggagtttactcgggccatcctgactccccggatcaaggtcggccgagactatgtgcaaaaagcccagaccaaagaacaggcagattttgcagtagaagcattggcaaaagctacctatgagcggctctttcgctggctcgttcatcgcatcaataaagctctggataggaccaaacgtcagggagcatctttcattggaatcctggatattgctggatttgaaatttttgagctgaactcctttgaacaactttgcatcaactacaccaatgagaagctgcagcagctgttcaaccacaccatgtttatcctagaacaagaggaataccagcgcgaaggcatcgagtggaacttcatcgatttcgggctggatctgcagccatgcatcgacctaatagagagacctgcgaaccctcctggtgtactggcccttttggatgaagaatgctggttccctaaagccacagataaaacctttgttgaaaaactggttcaagagcaaggttcccactccaagtttcagaaacctcgacaattaaaagacaaagctgatttttgcattatacattatgcagggaaggtggactataaggcagatgagtggctgatgaagaatatggaccccctgaatgacaacgtggccacccttttgcaccagtcatcagacagatttgtggcagagctttggaaagatgagattcagaatattcagagagcttctttctatgacagtgtttctggtcttcatgagccaccagtggaccgtatcgtgggtctggatcaagtcactggtatgactgagacagcttttggctccgcatataaaaccaagaagggcatgtttcgtaccgttgggcaactctacaaagaatctctcaccaagctgatggcaactctccgaaacaccaaccctaactttgttcgttgtatcattccaaatcacgagaagagggctggaaaattggatccacacctagtcctagatcagcttcgctgtaacggtgtcctggaagggatccgaatctgtcgccagggcttccctaaccgaatagttttccaggaattcagacagagatatgagatcctaactccaaatgctattcctaaaggttttatggatggtaaacaggcctgtgaacgaatgatccgggctttagaattggacccaaacttgtacagaattggacagagcaagatatttttcagagctggagttctggcacacttagaggaagaaagagatttaaaaatcaccgatatcattatcttcttccaggccgtttgcagaggttacctggccagaaaggcctttgccaagaagcagcagcaactaagtgccttaaaggtcttgcagcggaactgtgccgcgtacctgaaattacggcactggcagtggtggcgagtcttcacaaaggtgaagccgcttctacaagtgactcgccaggaggaagaacttcaggccaaagatgaagagctgttgaaggtgaaggagaagcagacgaaggtggaaggagagctggaggagatggagcggaagcaccagcagcttttagaagagaagaatatccttgcagaacaactacaagcagagactgagctctttgctgaagcagaagagatgagggcaagacttgctgctaaaaagcaggaattagaagagattctacatgacttggagtctagggttgaagaagaagaagaaagaaaccaaatcctccaaaatgaaaagaaaaaaatgcaagcacatattcaggacctggaagaacagctagacgaggaggaaggggctcggcaaaagctgcagctggaaaaggtgacagcagaggccaagatcaagaagatggaagaggagattctgcttctcgaggaccaaaattccaagttcatcaaagaaaagaaactcatggaagatcgcattgctgagtgttcctctcagctggctgaagaggaagaaaaggcgaaaaacttggccaaaatcaggaataagcaagaagtgatgatctcagatttagaagaacgcttaaagaaggaagaaaagactcgtcaggaactggaaaaggccaaaagaaaactcgacggggagacgaccgacctgcaggaccagatcgcagagctgcaggcgcagattgatgagctcaagctgcagctggccaagaaggaggaggagctgcagggcgcactggccagaggtgatgatgaaacactccataagaacaatgcccttaaagttgtgcgagagctacaagcccaaattgctgaacttcaggaagactttgaatccgagaaggcttcacggaacaaggccgaaaagcagaaaagggacttgagtgaggaactggaagctctgaaaacagagctggaggacacgctggacaccacggcagcccagcaggaactacgtacaaaacgtgaacaagaagtggcagagctgaagaaagctcttgaggaggaaactaagaaccatgaagctcaaatccaggacatgagacaaagacacgcaacagccctggaggagctctcagagcagctggaacaggccaagcggttcaaagcaaatctagagaagaacaagcagggcctggagacagataacaaggagctggcgtgtgaggtgaaggtcctgcagcaggtcaaggctgagtctgagcacaagaggaagaagctcgacgcgcaggtccaggagctccatgccaaggtctctgaaggcgacaggctcagggtggagctggcggagaaagcaagtaagctgcagaatgagctagataatgtctccacccttctggaagaagcagagaagaagggtattaaatttgctaaggatgcagctagtcttgagtctcaactacaggatacacaggagcttcttcaggaggagacacgccagaaactaaacctgagcagtcggatccggcagctggaagaggagaagaacagtcttcaggagcagcaggaggaggaggaggaggccaggaagaacctggagaagcaagtgctggccctgcagtcccagttggctgataccaagaagaaagtagatgacgacctgggaacaattgaaagtctggaagaagccaagaagaagcttctgaaggacgcggaggccctgagccagcgcctggaggagaaggcactggcgtatgacaaactggagaagaccaagaaccgcctgcagcaggagctggacgacctcacggtggacctggaccaccagcgccaggtcgcctccaacttggagaagaagcagaagaagtttgaccagctgttagcagaagagaagagcatctctgctcgctatgccgaagagcgggaccgggccgaagccgaggccagagagaaagaaaccaaagccctgtcactggcccgggccctcgaggaagccctggaggccaaggaggagtttgagaggcagaacaagcagctccgagcagacatggaagacctcatgagctccaaagatgatgtgggaaaaaacgttcacgaacttgaaaaatccaaacgggccctagagcagcaggtggaggaaatgaggacccagctggaggagctggaagacgaactccaggccacggaagatgccaagcttcgtctggaggtcaacatgcaggccatgaaggcgcagttcgagagagacctgcaaaccagggatgagcagaatgaagagaagaagcggctgctgatcaaacaggtgcgggagctcgaggcggagctggaggatgagaggaaacagcgggcgcttgctgtagcttcaaagaaaaagatggagatagacctgaaggacctcgaagcccaaatcgaggctgcgaacaaagctcgggatgaggtgattaagcagctccgcaagctccaggctcagatgaaggattaccaacgtgaattagaagaagctcgtgcatccagagatgagatttttgctcaatccaaagagagtgaaaagaaattgaagagtctggaagcagaaatccttcaattgcaggaggaacttgcctcatctgagcgagcccgccgacacgccgagcaggagagagatgagctggcggacgagatcaccaacagcgcctctggcaagtccgcgctgctggatgagaagcggcgtctggaagctcggatcgcacagctggaggaggagctggaagaggagcagagcaacatggagctgctcaacgaccgcttccgcaagaccactctacaggtggacacactgaacgccgagctagcagccgagcgcagcgccgcccagaagagtgacaatgcacgccagcaactggagcggcagaacaaggagctgaaggccaagctgcaggaactcgagggtgctgtcaagtctaagttcaaggccaccatctcagccctggaggccaagattgggcagctggaggagcagcttgagcaggaagccaaggaacgagcagccgccaacaaattagtccgtcgcactgagaagaagctgaaagaaatcttcatgcaggttgaggatgagcgtcgacacgcggaccagtataaagagcagatggagaaggccaacgctcggatgaagcagcttaaacgccagctggaggaagcagaagaagaagcgacgcgtgccaacgcatctcggcgtaaactccagcgggaactggatgatgccaccgaggccaacgagggcctgagccgcgaggtcagcaccctgaagaaccggctgaggcggggtggccccatcagcttctcttccagccgatctggccggcgccagctgcaccttgaaggagcttccctggagctctccgacgatgacacagaaagtaagaccagtgatgtcaacgagacgcagccaccccagtcagagtaaagttgcaggaagccagaggaggcaatacagtgggacagttaggaatgcacccggggcctcctgcagatttcggaaattggcaagctacgggattccttcctgaaagatcaactgtgtcttaaggctctccagcctatgcatactgtatcctgcttcagacttaggtacaattgctcccctttttatatatagacacacacaggacacatatattaaacagattgtttcatcattgcatctattttccatatagtcatcaagagaccattttataaaacatggtaagaccctttttaaaacaaactccaggcccttggttgcgggtcgctgggttattggggcagcgccgtggtcgtcactcagtcgctctgcatgctctctgtcatacagacaggtaacctagttctgtgttcacgtggcccccgactcctcagccacatcaagtctcctagaccactgtggactctaaactgcacttgtctctctcatttccttcaaataatgatcaatgctatttcagtgagcaaactgtgaaaggggctttggaaagagtaggaggggtgggctggatcggaagcaacacccatttggggttaccatgtccatcccccaaggggggccctgcccctcgagtcgatggtgtcccgcatctactcatgtgaactggccttggcgagggctggtctgtgcatagaagggatagtggccacactgcagctgaggccccaggtggcagccatggatcatgtagacttccagatggtctcccgaaccgcctggctctgccggcgccctcctcacgtcaggagcaagcagccgtggacccctaagccgagctggtggaaggcccctccccatcgccagccgggccctcatgctgaccttgcaaattcagccgctgctttgagcccaaaatgggaatattggttttgtgtccgaggcttgttccaagtttgtcaatgaggtttatggagcctccagaacagatgccatcttcctgaatgttgacatgccagtgggtgtgactccttcatttttccttctcccttccctttggacagtgttacagtgaacacttagcatcctgtttttggttggtagttaagcaaactgacattacggaaagtgccttagacactacagtactaagacaatgttgaatatatcattcgcctctataacaatttaatgtattcagttttgactgtgcttcatatcatgtacctctctagtcaaagtggtattacagacattcagtgacaatgaatcagtgttaattctaaatccttgatcctctgcaatgtgcttgaaaacacaaaccttttgggttaaaagctttaacatctattaggaagaatttgtcctgtgggtttggaatcttggattttccccctttatgaactgtactggctgttgaccaccagacacctgaccgcaaatatcttttcttgtattcccatatttctagacaatgatttttgtaagacaataaatttattcattatagatatttgcgcctgctctgtttacttgaagaaaaaagcacccgtggagaataaagagacctcaataaacaagaataatcatgtgaa

SEQ ID NO: 2675 - DNA, 732 bp, Homo sapiens
  source 1..732: mol_type = genomic DNA
ctgaggcgctggatctgtggtcgcggctggggacgtgcgcccgcgccaccatcttcggctgaagtaactgagggcaaacccatcagacaaccagagccataatttgtggtcaccgctgaaatttaccttggaaactcgaggcaattgcttttggatcgttccatttacaatggcgcagagaactggactcgaggatccagagaggtatctctttgtggacagggctgtcatctacaaccctgccactcaagctgattggacagctaaaaagctagtgtggattccatcagaacgccatggttttgaggcagctagtatcaaagaagaacggggagatgaagttatggtggagttggcagagaatggaaagaaagcaatggtcaacaaagatgatattcagaagatgaacccacctaagttttccaaggtggaggatatggcagaattgacatgcttgaatgaagcttccgttttacataatctgaaggatcgctactattcaggactaatctatacttattctggactcttctgtgtagttataaacccttacaagaatcttccaatttactctgagaatattattgaaatgtacagagggaagaagcgtcatgagatgcctccacacatctatgctatatctgaatctgcttacagatgcatgcttcaagatcgtgaggaccagtcaattctttgcacgggtgagtcaggtgctgggaagacagaaaatac

SEQ ID NO: 2676 - DNA, 7501 bp, Homo sapiens
  source 1..7501: mol_type = genomic DNA
gagggcggggcgggaaggcggcgaggagccgagctgggtgcggtgaggcgcgcagatcaccgcggttcctgggcagggcacggaaggctaagcaaggctgacctgctgcagctcccgcctcgtgcgctcgccccacccggccgccgcccgagcgctcgagaaagtcctctcgggagaagcagcgcctgttcccggggcagatccaggttcaggtcctggctataagtcaccatggcacagcaagctgccgataagtatctctatgtggataaaaacttcatcaacaatccgctggcccaggccgactgggctgccaagaagctggtatgggtgccttccgacaagagtggctttgagccagccagcctcaaggaggaggtgggcgaagaggccatcgtggagctggtggagaatgggaagaaggtgaaggtgaacaaggatgacatccagaagatgaacccgcccaagttctccaaggtggaggacatggcagagctcacgtgcctcaacgaagcctcggtgctgcacaacctcaaggagcgttactactcagggctcatctacacctattcaggcctgttctgtgtggtcatcaatccttacaagaacctgcccatctactctgaagagattgtggaaatgtacaagggcaagaagaggcacgagatgccccctcacatctatgccatcacagacaccgcctacaggagtatgatgcaagaccgagaagatcaatccatcttgtgcactggtgaatctggagctggcaagacggagaacaccaagaaggtcatccagtatctggcgtacgtggcgtcctcgcacaagagcaagaaggaccagggcgagctggagcggcagctgctgcaggccaaccccatcctggaggccttcgggaacgccaagaccgtgaagaatgacaactcctcccgcttcggcaaattcattcgcatcaactttgatgtcaatggctacattgttggagccaacattgagacttatcttttggagaaatctcgtgctatccgccaagccaaggaagaacggaccttccacatcttctattatctcctgtctggggctggagagcacctgaagaccgatctcctgttggagccgtacaacaaataccgcttcctgtccaatggacacgtcaccatccccgggcagcaggacaaggacatgttccaggagaccatggaggccatgaggattatgggcatcccagaagaggagcaaatgggcctgctgcgggtcatctcaggggttcttcagctcggcaacatcgtcttcaagaaggagcggaacactgaccaggcgtccatgcccgacaacacagctgcccaaaaggtgtcccatctcttgggtatcaatgtgaccgatttcaccagaggaatcctcaccccgcgcatcaaggtgggacgggattacgtccagaaggcgcagactaaagagcaggctgactttgccatcgaggccttggccaaggcgacctatgagcggatgttccgctggctggtgctgcgcatcaacaaggctctggacaagaccaagaggcagggcgcctccttcatcgggatcctggacattgccggcttcgagatctttgatctgaactcgtttgagcagctgtgcatcaattacaccaatgagaagctgcagcagctcttcaaccacaccatgttcatcctggagcaggaggagtaccagcgcgagggcatcgagtggaacttcatcgactttggcctcgacctgcagccctgcatcgacctcattgagaagccagcaggccccccgggcattctggccctgctggacgaggagtgctggttccccaaagccaccgacaagagcttcgtggagaaggtgatgcaggagcagggcacccaccccaagttccagaagcccaagcagctgaaggacaaagctgatttctgcattatccactatgccggcaaggtggattacaaagctgacgagtggctgatgaagaacatggatcccctgaatgacaacatcgccacactgctccaccagtcctctgacaagtttgtctcggagctgtggaaggatgtggaccgcatcatcggcctggaccaggtggccggcatgtcggagaccgcactgcccggggccttcaagacgcggaagggcatgttccgcactgtggggcagctttacaaggagcagctggccaagctgatggctacgctgaggaacacgaaccccaactttgtccgctgcatcatccccaaccacgagaagaaggccggcaagctggacccgcatctcgtgctggaccagctgcgctgcaacggtgttctcgagggcatccgtatctgccgccagggcttccccaacagggtggtcttccaggagtttcggcagagatatgagatcctgactccaaactccattcccaagggtttcatggacgggaagcaggcgtgcgtgctcatgataaaagccctggagctcgacagcaatctgtaccgcattggccagagcaaagtcttcttccgtgccggtgtgctggcccacctggaggaggagcgagacctgaagatcaccgacgtcatcatagggttccaggcctgctgcaggggctacctggccaggaaagcatttgccaagcggcagcagcagcttaccgccatgaaggtcctccagcggaactgcgctgcctacctgaagctgcggaactggcagtggtggcggctcttcaccaaggtcaagccgctgctgcaggtgagccggcaggaggaggagatgatggccaaggaggaggagctggtgaaggtcagagagaagcagctggctgcggagaacaggctcacggagatggagacgctgcagtctcagctcatggcagagaaattgcagctgcaggagcagctccaggcagaaaccgagctgtgtgccgaggctgaggagctccgggcccgcctgaccgccaagaagcaggaattagaagagatctgccatgacctagaggccagggtggaggaggaggaggagcgctgccagcacctgcaggcggagaagaagaagatgcagcagaacatccaggagcttgaggagcagctggaggaggaggagagcgcccggcagaagctgcagctggagaaggtgaccaccgaggcgaagctgaaaaagctggaggaggagcagatcatcctggaggaccagaactgcaagctggccaaggaaaagaaactgctggaagacagaatagctgagttcaccaccaacctcacagaagaggaggagaaatctaagagcctcgccaagctcaagaacaagcatgaggcaatgatcactgacttggaagagcgcctccgcagggaggagaagcagcgacaggagctggagaagacccgccggaagctggagggagactccacagacctcagcgaccagatcgccgagctccaggcccagatcgcggagctcaagatgcagctggccaagaaagaggaggagctccaggccgccctggccagagtggaagaggaagctgcccagaagaacatggccctcaagaagatccgggagctggaatctcagatctctgaactccaggaagacctggagtctgagcgtgcttccaggaataaagctgagaagcagaaacgggaccttggggaagagctagaggctctgaaaacagagttggaggacacgctggattccacagctgcccagcaggagctcaggtcaaaacgtgagcaggaggtgaacatcctgaagaagaccctggaggaggaggccaagacccacgaggcccagatccaggagatgaggcagaagcactcacaggccgtggaggagctggcggagcagctggagcagacgaagcgggtgaaagcaaacctcgagaaggcaaagcagactctggagaacgagcggggggagctggccaacgaggtgaaggtgctgctgcagggcaaaggggactcggagcacaagcgcaagaaagtggaggcgcagctgcaggagctgcaggtcaagttcaacgagggagagcgcgtgcgcacagagctggccgacaaggtcaccaagctgcaggtggagctggacaacgtgaccgggcttctcagccagtccgacagcaagtccagcaagctcaccaaggacttctccgcgctggagtcccagctgcaggacactcaggagctgctgcaggaggagaaccggcagaagctgagcctgagcaccaagctcaagcaggtggaggacgagaagaattccttccgggagcagctggaggaggaggaggaggccaagcacaacctggagaagcagatcgccaccctccatgcccaggtggccgacatgaaaaagaagatggaggacagtgtggggtgcctggaaactgctgaggaggtgaagaggaagctccagaaggacctggagggcctgagccagcggcacgaggagaaggtggccgcctacgacaagctggagaagaccaagacgcggctgcagcaggagctggacgacctgctggtggacctggaccaccagcgccagagcgcgtgcaacctggagaagaagcagaagaagtttgaccagctcctggcggaggagaagaccatctctgccaagtatgcagaggagcgcgaccgggctgaggcggaggcccgagagaaggagaccaaggctctgtcgctggcccgggccctggaggaagccatggagcagaaggcggagctggagcggctcaacaagcagttccgcacggagatggaggaccttatgagctccaaggatgatgtgggcaagagtgtccacgagctggagaagtccaagcgggccctagagcagcaggtggaggagatgaagacgcagctggaagagctggaggacgagctgcaggccaccgaagatgccaagctgcggttggaggtcaacctgcaggccatgaaggcccagttcgagcgggacctgcagggccgggacgagcagagcgaggagaagaagaagcagctggtcagacaggtgcgggagatggaggcagagctggaggacgagaggaagcagcgctcgatggcagtggccgcccggaagaagctggagatggacctgaaggacctggaggcgcacatcgactcggccaacaagaaccgggacgaagccatcaaacagctgcggaagctgcaggcccagatgaaggactgcatgcgcgagctggatgacacccgcgcctctcgtgaggagatcctggcccaggccaaagagaacgagaagaagctgaagagcatggaggccgagatgatccagttgcaggaggaactggcagccgcggagcgtgccaagcgccaggcccagcaggagcgggatgagctggctgacgagatcgccaacagcagcggcaaaggagccctggcgttagaggagaagcggcgtctggaggcccgcatcgcccagctggaggaggagctggaggaggagcagggcaacacggagctgatcaacgaccggctgaagaaggccaacctgcagatcgaccagatcaacaccgacctgaacctggagcgcagccacgcccagaagaacgagaatgctcggcagcagctggaacgccagaacaaggagcttaaggtcaagctgcaggagatggagggcactgtcaagtccaagtacaaggcctccatcaccgccctcgaggccaagattgcacagctggaggagcagctggacaacgagaccaaggagcgccaggcagcctgcaaacaggtgcgtcggaccgagaagaagctgaaggatgtgctgctgcaggtggatgacgagcggaggaacgccgagcagtacaaggaccaggccgacaaggcatctacccgcctgaagcagctcaagcggcagctggaggaggccgaagaggaggcccagcgggccaacgcctcccgccggaaactgcagcgcgagctggaggacgccactgagacggccgatgccatgaaccgcgaagtcagctccctaaagaacaagctcaggcgcggggacctgccgtttgtcgtgccccgccgaatggcccggaaaggcgccggggatggctccgacgaagaggtagatggcaaagcggatggggctgaggccaaacctgccgaataagcctcttctcctgcagcctgagatggatggacagacagacaccacagcctccccttcccagaccccgcagcacgcctctccccaccttcttgggactgctgtgaacatgcctcctcctgccctccgccccgtccccccatcccgtttccctccaggtgttgttgagggcatttggcttcctctgctgcatccccttccagctccctcccctgctcagaatctgataccaaagagacagggcccgggcccaggcagagagcgaccagcaggctcctcagccctctcttgccaaaaagcacaagatgttgaggcgagcagggcaggcccccggggaggggccagagttttctatgaatctatttttcttcagactgaggccttttggtagtcggagcccccgcagtcgtcagcctccctgacgtctgccaccagcgcccccactcctcctcctttctttgctgtttgcaatcacacgtggtgacctcacacacctctgccccttgggcctcccactcccatggctctgggcggtccagaaggagcaggccctgggcctccacctctgtgcagggcacagaaggctggggtggggggaggagtggattcctccccaccctgtcccaggcagcgccactgtccgctgtctccctcctgattctaaaatgtctcaagtgcaatgccccctcccctcctttaccgaggacagcctgcctctgccacagcaaggctgtcggggtcaagctggaaaggccagcagccttccagtggcttctcccaacactcttggggaccaaatatatttaatggttaagggacttgtcccaagtctgacagccagagcgttagaggggccagcggccctcccaggcgatcttgtgtctactctaggactgggcccgagggtggtttacctgcaccgttgactcagtatagtttaaaaatctgccacctgcacaggtatttttgaaagcaaaataaggttttcttttttcccctttcttgtaataaatgataaaattccgagtctttctcactgcctttgtttagaagagagtagctcgtcctcactggtctacactggttgccgaatttacttgtattcctaactgttttgtatatgctgcattgagacttacggcaagaaggcattttttttttttaaaggaaacaaactctcaaatcatgaagtgatataaaagctgcatatgcctacaaagctctgaattcaggtcccagttgctgtcacaaaggagtgagtgaaactcccaccctacccccttttttatataataaaagtgccttagcatgtgttgcagctgtcaccactacagtaagctggtttacagatgttttccactgagcatcacaataaagagaaccatgtgct

SEQ ID NO: 2677 - DNA, 6179 bp, Homo sapiens
  source 1..6179: mol_type = genomic DNA
gagggcggggcgggaaggcggcgaggagccgagctgggtgcggtgaggcgcgcagatcaccgcggttcctgggcagggcacggaaggctaagcaaggctgacctgctgcagctcccgcctcgtgcgctcgccccacccggccgccgcccgagcgctcgagaaagtcctctcgggagaagcagcgcctgttcccggggcagatccaggttcaggtcctggctataagtcaccatggcacagcaagctgccgataagtatctctatgtggataaaaacttcatcaacaatccgctggcccaggccgactgggctgccaagaagctggtatgggtgccttccgacaagagtggctttgagccagccagcctcaaggaggaggtgggcgaagaggccatcgtggagctggtggagaatgggaagaaggtgaaggtgaacaaggatgacatccagaagatgaacccgcccaagttctccaaggtggaggacatggcagagctcacgtgcctcaacgaagcctcggtgctgcacaacctcaaggagcgttactactcagggctcatctacacctattcaggcctgttctgtgtggtcatcaatccttacaagaacctgcccatctactctgaagagattgtggaaatgtacaagggcaagaagaggcacgagatgccccctcacatctatgccatcacagacaccgcctacaggagtatgatgcaagaccgagaagatcaatccatcttgtgcactggtgaatctggagctggcaagacggagaacaccaagaaggtcatccagtatctggcgtacgtggcgtcctcgcacaagagcaagaaggaccagggcgagctggagcggcagctgctgcaggccaaccccatcctggaggccttcgggaacgccaagaccgtgaagaatgacaactcctcccgcttcggcaaattcattcgcatcaactttgatgtcaatggctacattgttggagccaacattgagacttatcttttggagaaatctcgtgctatccgccaagccaaggaagaacggaccttccacatcttctattatctcctgtctggggctggagagcacctgaagaccgatctcctgttggagccgtacaacaaataccgcttcctgtccaatggacacgtcaccatccccgggcagcaggacaaggacatgttccaggagaccatggaggccatgaggattatgggcatcccagaagaggagcaaatgggcctgctgcgggtcatctcaggggttcttcagctcggcaacatcgtcttcaagaaggagcggaacactgaccaggcgtccatgcccgacaacacagctgcccaaaaggtgtcccatctcttgggtatcaatgtgaccgatttcaccagaggaatcctcaccccgcgcatcaaggtgggacgggattacgtccagaaggcgcagactaaagagcaggctgactttgccatcgaggccttggccaaggcgacctatgagcggatgttccgctggctggtgctgcgcatcaacaaggctctggacaagaccaagaggcagggcgcctccttcatcgggatcctggacattgccggcttcgagatctttgatctgaactcgtttgagcagctgtgcatcaattacaccaatgagaagctgcagcagctcttcaaccacaccatgttcatcctggagcaggaggagtaccagcgcgagggcatcgagtggaacttcatcgactttggcctcgacctgcagccctgcatcgacctcattgagaagccagcaggccccccgggcattctggccctgctggacgaggagtgctggttccccaaagccaccgacaagagcttcgtggagaaggtgatgcaggagcagggcacccaccccaagttccagaagcccaagcagctgaaggacaaagctgatttctgcattatccactatgccggcaaggtggattacaaagctgacgagtggctgatgaagaacatggatcccctgaatgacaacatcgccacactgctccaccagtcctctgacaagtttgtctcggagctgtggaaggatgtggaccgcatcatcggcctggaccaggtggccggcatgtcggagaccgcactgcccggggccttcaagacgcggaagggcatgttccgcactgtggggcagctttacaaggagcagctggccaagctgatggctacgctgaggaacacgaaccccaactttgtccgctgcatcatccccaaccacgagaagaaggccggcaagctggacccgcatctcgtgctggaccagctgcgctgcaacggtgttctcgagggcatccgtatctgccgccagggcttccccaacagggtggtcttccaggagtttcggcagagatatgagatcctgactccaaactccattcccaagggtttcatggacgggaagcaggcgtgcgtgctcatgataaaagccctggagctcgacagcaatctgtaccgcattggccagagcaaagtcttcttccgtgccggtgtgctggcccacctggaggaggagcgagacctgaagatcaccgacgtcatcatagggttccaggcctgctgcaggggctacctggccaggaaagcatttgccaagcggcagcagcagcttaccgccatgaaggtcctccagcggaactgcgctgcctacctgaagctgcggaactggcagtggtggcggctcttcaccaaggtcaagccgctgctgcaggtgagccggcaggaggaggagatgatggccaaggaggaggagctggtgaaggtcagagagaagcagctggctgcggagaacaggctcacggagatggagacgctgcagtctcagctcatggcagagaaattgcagctgcaggagcagctccaggcagaaaccgagctgtgtgccgaggctgaggagctccgggcccgcctgaccgccaagaagcaggaattagaagagatctgccatgacctagaggccagggtggaggaggaggaggagcgctgccagcacctgcaggcggagaagaagaagatgcagcagaacatccaggagcttgaggagcagctggaggaggaggagagcgcccggcagaagctgcagctggagaaggtgaccaccgaggcgaagctgaaaaagctggaggaggagctggacgacctgctggtggacctggaccaccagcgccagagcgcgtgcaacctggagaagaagcagaagaagtttgaccagctcctggcggaggagaagaccatctctgccaagtatgcagaggagcgcgaccgggctgaggcggaggcccgagagaaggagaccaaggctctgtcgctggcccgggccctggaggaagccatggagcagaaggcggagctggagcggctcaacaagcagttccgcacggagatggaggaccttatgagctccaaggatgatgtgggcaagagtgtccacgagctggagaagtccaagcgggccctagagcagcaggtggaggagatgaagacgcagctggaagagctggaggacgagctgcaggccaccgaagatgccaagctgcggttggaggtcaacctgcaggccatgaaggcccagttcgagcgggacctgcagggccgggacgagcagagcgaggagaagaagaagcagctggtcagacaggtgcgggagatggaggcagagctggaggacgagaggaagcagcgctcgatggcagtggccgcccggaagaagctggagatggacctgaaggacctggaggcgcacatcgactcggccaacaagaaccgggacgaagccatcaaacagctgcggaagctgcaggcccagatgaaggactgcatgcgcgagctggatgacacccgcgcctctcgtgaggagatcctggcccaggccaaagagaacgagaagaagctgaagagcatggaggccgagatgatccagttgcaggaggaactggcagccgcggagcgtgccaagcgccaggcccagcaggagcgggatgagctggctgacgagatcgccaacagcagcggcaaaggagccctggcgttagaggagaagcggcgtctggaggcccgcatcgcccagctggaggaggagctggaggaggagcagggcaacacggagctgatcaacgaccggctgaagaaggccaacctgcagatcgaccagatcaacaccgacctgaacctggagcgcagccacgcccagaagaacgagaatgctcggcagcagctggaacgccagaacaaggagcttaaggtcaagctgcaggagatggagggcactgtcaagtccaagtacaaggcctccatcaccgccctcgaggccaagattgcacagctggaggagcagctggacaacgagaccaaggagcgccaggcagcctgcaaacaggtgcgtcggaccgagaagaagctgaaggatgtgctgctgcaggtggatgacgagcggaggaacgccgagcagtacaaggaccaggccgacaaggcatctacccgcctgaagcagctcaagcggcagctggaggaggccgaagaggaggcccagcgggccaacgcctcccgccggaaactgcagcgcgagctggaggacgccactgagacggccgatgccatgaaccgcgaagtcagctccctaaagaacaagctcaggcgcggggacctgccgtttgtcgtgccccgccgaatggcccggaaaggcgccggggatggctccgacgaagaggtagatggcaaagcggatggggctgaggccaaacctgccgaataagcctcttctcctgcagcctgagatggatggacagacagacaccacagcctccccttcccagaccccgcagcacgcctctccccaccttcttgggactgctgtgaacatgcctcctcctgccctccgccccgtccccccatcccgtttccctccaggtgttgttgagggcatttggcttcctctgctgcatccccttccagctccctcccctgctcagaatctgataccaaagagacagggcccgggcccaggcagagagcgaccagcaggctcctcagccctctcttgccaaaaagcacaagatgttgaggcgagcagggcaggcccccggggaggggccagagttttctatgaatctatttttcttcagactgaggccttttggtagtcggagcccccgcagtcgtcagcctccctgacgtctgccaccagcgcccccactcctcctcctttctttgctgtttgcaatcacacgtggtgacctcacacacctctgccccttgggcctcccactcccatggctctgggcggtccagaaggagcaggccctgggcctccacctctgtgcagggcacagaaggctggggtggggggaggagtggattcctccccaccctgtcccaggcagcgccactgtccgctgtctccctcctgattctaaaatgtctcaagtgcaatgccccctcccctcctttaccgaggacagcctgcctctgccacagcaaggctgtcggggtcaagctggaaaggccagcagccttccagtggcttctcccaacactcttggggaccaaatatatttaatggttaagggacttgtcccaagtctgacagccagagcgttagaggggccagcggccctcccaggcgatcttgtgtctactctaggactgggcccgagggtggtttacctgcaccgttgactcagtatagtttaaaaatctgccacctgcacaggtatttttgaaagcaaaataaggttttcttttttcccctttcttgtaataaatgataaaattccgagtctttctcactgcctttgtttagaagagagtagctcgtcctcactggtctacactggttgccgaatttacttgtattcctaactgttttgtatatgctgcattgagacttacggcaagaaggcattttttttttttaaaggaaacaaactctcaaatcatgaagtgatataaaagctgcatatgcctacaaagctctgaattcaggtcccagttgctgtcacaaaggagtgagtgaaactcccaccctacccccttttttatataataaaagtgccttagcatgtgttgcagctgtcaccactacagtaagctggtttacagatgttttccactgagcatcacaataaagagaaccatgtgctacga

SEQ ID NO: 2678 - DNA, 7503 bp, Homo sapiens
  source 1..7503: mol_type = genomic DNA
gagggcggggcgggaaggcggcgaggagccgagctgggtgcggtgaggcgcgcagatcaccgcggttcctgggcagggcacggaaggctaagcaaggctgacctgctgcagctcccgcctcgtgcgctcgccccacccggccgccgcccgagcgctcgagaaagtcctctcgggagaagcagcgcctgttcccggggcagatccaggttcaggtcctggctataagtcaccatggcacagcaagctgccgataagtatctctatgtggataaaaacttcatcaacaatccgctggcccaggccgactgggctgccaagaagctggtatgggtgccttccgacaagagtggctttgagccagccagcctcaaggaggaggtgggcgaagaggccatcgtggagctggtggagaatgggaagaaggtgaaggtgaacaaggatgacatccagaagatgaacccgcccaagttctccaaggtggaggacatggcagagctcacgtgcctcaacgaagcctcggtgctgcacaacctcaaggagcgttactactcagggctcatctacacctattcaggcctgttctgtgtggtcatcaatccttacaagaacctgcccatctactctgaagagattgtggaaatgtacaagggcaagaagaggcacgagatgccccctcacatctatgccatcacagacaccgcctacaggagtatgatgcaagaccgagaagatcaatccatcttgtgcactggtgaatctggagctggcaagacggagaacaccaagaaggtcatccagtatctggcgtacgtggcgtcctcgcacaagagcaagaaggaccagggcgagctggagcggcagctgctgcaggccaaccccatcctggaggccttcgggaacgccaagaccgtgaagaatgacaactcctcccgcttcggcaaattcattcgcatcaactttgatgtcaatggctacattgttggagccaacattgagacttatcttttggagaaatctcgtgctatccgccaagccaaggaagaacggaccttccacatcttctattatctcctgtctggggctggagagcacctgaagaccgatctcctgttggagccgtacaacaaataccgcttcctgtccaatggacacgtcaccatccccgggcagcaggacaaggacatgttccaggagaccatggaggccatgaggattatgggcatcccagaagaggagcaaatgggcctgctgcgggtcatctcaggggttcttcagctcggcaacatcgtcttcaagaaggagcggaacactgaccaggcgtccatgcccgacaacacagctgcccaaaaggtgtcccatctcttgggtatcaatgtgaccgatttcaccagaggaatcctcaccccgcgcatcaaggtgggacgggattacgtccagaaggcgcagactaaagagcaggctgactttgccatcgaggccttggccaaggcgacctatgagcggatgttccgctggctggtgctgcgcatcaacaaggctctggacaagaccaagaggcagggcgcctccttcatcgggatcctggacattgccggcttcgagatctttgatctgaactcgtttgagcagctgtgcatcaattacaccaatgagaagctgcagcagctcttcaaccacaccatgttcatcctggagcaggaggagtaccagcgcgagggcatcgagtggaacttcatcgactttggcctcgacctgcagccctgcatcgacctcattgagaagccagcaggccccccgggcattctggccctgctggacgaggagtgctggttccccaaagccaccgacaagagcttcgtggagaaggtgatgcaggagcagggcacccaccccaagttccagaagcccaagcagctgaaggacaaagctgatttctgcattatccactatgccggcaaggtggattacaaagctgacgagtggctgatgaagaacatggatcccctgaatgacaacatcgccacactgctccaccagtcctctgacaagtttgtctcggagctgtggaaggatgtggaccgcatcatcggcctggaccaggtggccggcatgtcggagaccgcactgcccggggccttcaagacgcggaagggcatgttccgcactgtggggcagctttacaaggagcagctggccaagctgatggctacgctgaggaacacgaaccccaactttgtccgctgcatcatccccaaccacgagaagaaggccggcaagctggacccgcatctcgtgctggaccagctgcgctgcaacggtgttctcgagggcatccgtatctgccgccagggcttccccaacagggtggtcttccaggagtttcggcagagatatgagatcctgactccaaactccattcccaagggtttcatggacgggaagcaggcgtgcgtgctcatgataaaagccctggagctcgacagcaatctgtaccgcattggccagagcaaagtcttcttccgtgccggtgtgctggcccacctggaggaggagcgagacctgaagatcaccgacgtcatcatagggttccaggcctgctgcaggggctacctggccaggaaagcatttgccaagcggcagcagcagcttaccgccatgaaggtcctccagcggaactgcgctgcctacctgaagctgcggaactggcagtggtggcggctcttcaccaaggtcaagccgctgctgcaggtgagccggcaggaggaggagatgatggccaaggaggaggagctggtgaaggtcagagagaagcagctggctgcggagaacaggctcacggagatggagacgctgcagtctcagctcatggcagagaaattgcagctgcaggagcagctccaggcagaaaccgagctgtgtgccgaggctgaggagctccgggcccgcctgaccgccaagaagcaggaattagaagagatctgccatgacctagaggccagggtggaggaggaggaggagcgctgccagcacctgcaggcggagaagaagaagatgcagcagaacatccaggagcttgaggagcagctggaggaggaggagagcgcccggcagaagctgcagctggagaaggtgaccaccgaggcgaagctgaaaaagctggaggaggagcagatcatcctggaggaccagaactgcaagctggccaaggaaaagaaactgctggaagacagaatagctgagttcaccaccaacctcacagaagaggaggagaaatctaagagcctcgccaagctcaagaacaagcatgaggcaatgatcactgacttggaagagcgcctccgcagggaggagaagcagcgacaggagctggagaagacccgccggaagctggagggagactccacagacctcagcgaccagatcgccgagctccaggcccagatcgcggagctcaagatgcagctggccaagaaagaggaggagctccaggccgccctggccagagtggaagaggaagctgcccagaagaacatggccctcaagaagatccgggagctggaatctcagatctctgaactccaggaagacctggagtctgagcgtgcttccaggaataaagctgagaagcagaaacgggaccttggggaagagctagaggctctgaaaacagagttggaggacacgctggattccacagctgcccagcaggagctcaggtcaaaacgtgagcaggaggtgaacatcctgaagaagaccctggaggaggaggccaagacccacgaggcccagatccaggagatgaggcagaagcactcacaggccgtggaggagctggcggagcagctggagcagacgaagcgggtgaaagcaaacctcgagaaggcaaagcagactctggagaacgagcggggggagctggccaacgaggtgaaggtgctgctgcagggcaaaggggactcggagcacaagcgcaagaaagtggaggcgcagctgcaggagctgcaggtcaagttcaacgagggagagcgcgtgcgcacagagctggccgacaaggtcaccaagctgcaggtggagctggacaacgtgaccgggcttctcagccagtccgacagcaagtccagcaagctcaccaaggacttctccgcgctggagtcccagctgcaggacactcaggagctgctgcaggaggagaaccggcagaagctgagcctgagcaccaagctcaagcaggtggaggacgagaagaattccttccgggagcagctggaggaggaggaggaggccaagcacaacctggagaagcagatcgccaccctccatgcccaggtggccgacatgaaaaagaagatggaggacagtgtggggtgcctggaaactgctgaggaggtgaagaggaagctccagaaggacctggagggcctgagccagcggcacgaggagaaggtggccgcctacgacaagctggagaagaccaagacgcggctgcagcaggagctggacgacctgctggtggacctggaccaccagcgccagagcgcgtgcaacctggagaagaagcagaagaagtttgaccagctcctggcggaggagaagaccatctctgccaagtatgcagaggagcgcgaccgggctgaggcggaggcccgagagaaggagaccaaggctctgtcgctggcccgggcccgaggaagccatggagcagaaggcggagctggagcggctcaacaagcagttccgcacggagatggaggaccttatgagctccaaggatgatgtgggcaagagtgtccacgagctggagaagtccaagcgggccctagagcagcaggtggaggagatgaagacgcagctggaagagctggaggacgagctgcaggccaccgaagatgccaagctgcggttggaggtcaacctgcaggccatgaaggcccagttcgagcgggacctgcagggccgggacgagcagagcgaggagaagaagaagcagctggtcagacaggtgcgggagatggaggcagagctggaggacgagaggaagcagcgctcgatggcagtggccgcccggaagaagctggagatggacctgaaggacctggaggcgcacatcgactcggccaacaagaaccgggacgaagccatcaaacagctgcggaagctgcaggcccagatgaaggactgcatgcgcgagctggatgacacccgcgcctctcgtgaggagatcctggcccaggccaaagagaacgagaagaagctgaagagcatggaggccgagatgatccagttgcaggaggaactggcagccgcggagcgtgccaagcgccaggcccagcaggagcgggatgagctggctgacgagatcgccaacagcagcggcaaaggagccctggcgttagaggagaagcggcgtctggaggcccgcatcgcccagctggaggaggagctggaggaggagcagggcaacacggagctgatcaacgaccggctgaagaaggccaacctgcagatcgaccagatcaacaccgacctgaacctggagcgcagccacgcccagaagaacgagaatgctcggcagcagctggaacgccagaacaaggagcttaaggtcaagctgcaggagatggagggcactgtcaagtccaagtacaaggcctccatcaccgccctcgaggccaagattgcacagctggaggagcagctggacaacgagaccaaggagcgccaggcagcctgcaaacaggtgcgtcggaccgagaagaagctgaaggatgtgctgctgcaggtggatgacgagcggaggaacgccgagcagtacaaggaccaggccgacaaggcatctacccgcctgaagcagctcaagcggcagctggaggaggccgaagaggaggcccagcgggccaacgcctcccgccggaaactgcagcgcgagctggaggacgccactgagacggccgatgccatgaaccgcgaagtcagctccctaaagaacaagctcaggcgcggggacctgccgtttgtcgtgccccgccgaatggcccggaaaggcgccggggatggctccgacgaagaggtagatggcaaagcggatggggctgaggccaaacctgccgaataagcctcttctcctgcagcctgagatggatggacagacagacaccacagcctccccttcccagaccccgcagcacgcctctccccaccttcttgggactgctgtgaacatgcctcctcctgccctccgccccgtccccccatcccgtttccctccaggtgttgttgagggcatttggcttcctctgctgcatccccttccagctccctcccctgctcagaatctgataccaaagagacagggcccgggcccaggcagagagcgaccagcaggctcctcagccctctcttgccaaaaagcacaagatgttgaggcgagcagggcaggcccccggggaggggccagagttttctatgaatctatttttcttcagactgaggccttttggtagtcggagcccccgcagtcgtcagcctccctgacgtctgccaccagcgcccccactcctcctcctttctttgctgtttgcaatcacacgtggtgacctcacacacctctgccccttgggcctcccactcccatggctctgggcggtccagaaggagcaggccctgggcctccacctctgtgcagggcacagaaggctggggtggggggaggagtggattcctccccaccctgtcccaggcagcgccactgtccgctgtctccctcctgattctaaaatgtctcaagtgcaatgccccctcccctcctttaccgaggacagcctgcctctgccacagcaaggctgtcggggtcaagctggaaaggccagcagccttccagtggcttctcccaacactcttggggaccaaatatatttaatggttaagggacttgtcccaagtctgacagccagagcgttagaggggccagcggccctcccaggcgatcttgtgtctactctaggactgggcccgagggtggtttacctgcaccgttgactcagtatagtttaaaaatctgccacctgcacaggtatttttgaaagcaaaataaggttttcttttttcccctttcttgtaataaatgataaaattccgagtctttctcactgcctttgtttagaagagagtagctcgtcctcactggtctacactggttgccgaatttacttgtattcctaactgttttgtatatgctgcattgagacttacggcaagaaggcattttttttttttaaaggaaacaaactctcaaatcatgaagtgatataaaagctgcatatgcctacaaagctctgaattcaggtcccagttgctgtcacaaaggagtgagtgaaactcccaccctacccccttttttatataataaaagtgccttagcatgtgttgcagctgtcaccactacagtaagctggtttacagatgttttccactgagcatcacaataaagagaaccatgtgctacga

SEQ ID NO: 2679 - DNA, 789 bp, Homo sapiens
  source 1..789: mol_type = genomic DNA
aggggctggtgttcggggctgccccgagcccagctctgggagcttattttgtcatcacagtggcactgtcctggctataagtcaccatggcacagcaagctgccgataagtatctctatgtggataaaaacttcatcaacaatccgctggcccaggccgactgggctgccaagaagctggtatgggtgccttccgacaagagtggctttgagccagccagcctcaaggaggaggtgggcgaagaggccatcgtggagctggtggagaatgggaagaaggtgaaggtgaacaaggatgacatccagaagatgaacccgcccaagttctccaaggtggaggacatggcagagctcacgtgcctcaacgaagcctcggtgctgcacaacctcaaggagcgttactactcagggctcatctacacctattcaggcctgttctgtgtggtcatcaatccttacaagaacctgcccatctactctgaagagattgtggaaatgtacaagggcaagaagaggcacgagatgccccctcacatctatgccatcacagacaccgcctacaggagtatgatgcaagaccgagaagatcaatccatcttgtgcactggtgaatctggagctggcaagacggagaacaccaagaaggtcatccagtatctggcgtacgtggcgtcctcgcacaagagcaagaaggaccaggaggcctattttaaaaacagagctgtgaggttaggagttctctagctgtgcttttccatctctgaatttgcagtaaaatccatttcccaag

SEQ ID NO: 2680 - DNA, 449 bp, Homo sapiens
  source 1..449: mol_type = genomic DNA
ggggctggtgttcggggctgccccgagcccagctctgggagcttattttgtcatcacagtggcactgcagcctgtctacctcctggctgcggctcgtcctcagatgccttctgtgaaggctgtcctggctataagtcaccatggcacagcaagctgccgataagtatctctatgtggataaaaacttcatcaacaatccgctggcccaggccgactgggctgccaagaagctggtatgggtgccttccgacaagagtggctttgagccagccagcctcaaggaggaggtgggcgaagaggccatcgtggagctggtggagaatgggaagaaggtgaaggtgaacaaggatgacatccagaagatgaacccgcccaagttctccaaggtggaggacatggcagagctcacgtgcctcaacgaagcctcggtgctgcacaacctcaaggag

SEQ ID NO: 2681 - DNA, 1199 bp, Homo sapiens
  source 1..1199: mol_type = genomic DNA
gcccccgcctggagtccagacccgacggccggcccagttccacgcacccagcgagcccaagcgccttctccgcaccagggaagccccacccaccagaagccaagatgtccagcaagcgggccaaagccaagaccaccaagaagcggccacagcgggccacatccaatgtcttcgcaatgtttgaccagtcccagatccaggagtttaaggaggctttcaacatgattgaccagaaccgtgatggcttcattgacaaggaggacctgcacgacatgctggcctcgctggggaagaaccccacagacgaatacctggagggcatgatgagcgaggccccggggcccatcaacttcaccatgttcctcaccatgtttggggagaagctgaacggcacggaccccgaggatgtgattcgcaacgcctttgcctgcttcgacgaggaagcctcaggtttcatccatgaggaccacctccgggagctgctcaccaccatgggtgaccgcttcacagatgaggaagtggacgagatgtaccgggaggcacccattgataagaaaggcaacttcaactacgtggagttcacccgcatcctcaaacatggcgccaaggataaagacgactaggccaccccagccccctgacaccccagcccccgccagtcacccctccccgcacacacccgtccataccagctccctgcccatgaccctcgctcagggatccccctttgaggggttagggtcccagttcccagtggaagaaacaggccaggagaagtgcgtgccgagctgaggcagatgttcccacagtgaccccagagccctgggctatagtctctgacccctccaaggaaagaccaccttctggggacatgggctggagggcaggacctagaggcaccaagggaaggccccattccggggctgttccccgaggaggaagggaaggggctctgtgtgccccccaggaggaagaggccctgagtcctgggatcagacaccccttcacgtgtatccccacacaaatgcaagctcaccaaggtcccctctcagtccccttccctacaccctgaccggccactgccgcacacccacccagagcacgccacccgccatgggagtgtgctcaggagtcgcgggcagcgtggacatctgtcccagagggggcagaatctccaatagaggactgagcactgcttc

SEQ ID NO: 2682 - DNA, 1024 bp, Homo sapiens
  source 1..1024: mol_type = genomic DNA
gtccagacccgacggccggcccagttccacgcacccagcgagcccaagcgccttctccgcaccagggaagccccacccaccagaagccaagatgtccagcaagcgggccaaagccaagaccaccaagaagcggccacagcgggccacatccaatgtcttcgcaatgtttgaccagtcccagatccaggagtttaaggaggctttcaacatgattgaccagaaccgtgatggcttcattgacaaggaggacctgcacgacatgctggcctcgctgggtttcatccatgaggaccacctccgggagctgctcaccaccatgggtgaccgcttcacagatgaggaagtggacgagatgtaccgggaggcacccattgataagaaaggcaacttcaactacgtggagttcacccgcatcctcaaacatggcgccaaggataaagacgactaggccaccccagccccctgacaccccagcccccgccagtcacccctccccgcacacacccgtccataccagctccctgcccatgaccctcgctcagggatccccctttgaggggttagggtcccagttcccagtggaagaaacaggccaggagaagtgcgtgccgagctgaggcagatgttcccacagtgaccccagagccctgggctatagtctctgacccctccaaggaaagaccaccttctggggacatgggctggagggcaggacctagaggcaccaagggaaggccccattccggggctgttccccgaggaggaagggaaggggctctgtgtgccccccaggaggaagaggccctgagtcctgggatcagacaccccttcacgtgtatccccacacaaatgcaagctcaccaaggtcccctctcagtccccttccctacaccctgaccggccactgccgcacacccacccagagcacgccacccgccatgggagtgtgctcaggagtcgcgggcagcgtggacatctgtcccagagggggcagaatctccaatagaggactgagcactgcttc

SEQ ID NO: 2683 - DNA, 1330 bp, Homo sapiens
  source 1..1330: mol_type = genomic DNA
aggggcgggttctaagcggcgacgcgcgggtgctgggaggccttagaacgccgtggcgtgccgcaggacgcgacggctgcagaacatccgccgcaccgctgggggccaacgttgtcggaccgaggagtccgaggtggcgactgagtgagatacccagctgtgcggagctaggacgcggaacatcccagaggccagcatcaacatgcaagagctgactctgagccctggcccagccaagctgacccctacactagaccctacacaccggatggagctgatcctgagtaccagcccagctgagctgactctggatcctgcgtgccagccaaagctgcccctggattccacatgccaaccagagatgaccttcaatcctggtccaactgagcttaccctggatcctgaacaccagccagaggagaccccagctcctagcctggctgagttgaccctggagcctgtgcaccgccgacccgagctcctggatgcttgtgctgacctcatcaatgatcagtggccccgcagccgcacctcccgcctgcactccctgggccagtcctcagatgccttccccctctgcctgatgctgctaagcccccaccccacacttgaagcagcacccgttgtggtgggccatgcccgcctgtcacgggtgctgaaccagccccagagcctcttagtggagacagtggtggtggcccgggccctgaggggccgtggctttggccgccgcctcatggagggcctggaggtctttgctcgggcccggggcttccgcaagctgcatctcaccacccatgaccaggtgcacttctatacccacctgggctaccagctgggtgagcctgtgcagggcctggtcttcaccagcagacggctgcctgccaccctgcttaatgccttccccacagccccctctccccggccacccaggaaggccccaaacctgactgcccaagctgccccaaggggtcccaagggacctccattgccaccaccccctcccctacctgagtgcctgaccatctcacccccagttccatcagggcccccttcaaaaagcctgctggagacacaatatcaaaatgtgagggggcgccccatattctggatggaaaaagacatctgaggccatccagggcaaggaactgtctttctggttcaatagactgccccgacagtctacaagcctcagcccactgaccatacctcagcccctagcccctggggggcagctttaacctgggcatgtttcctgggtaccagtggggccaggaggtggctctggctcagagccgtcagtgtggctgaataaaggctctcttgggta

SEQ ID NO: 2684 - DNA, 1163 bp, Homo sapiens
  source 1..1163: mol_type = genomic DNA
gaccaaagggtgcggctgctgcagaggtggctgatgcaggcaagagctgactctgagccctggcccagccaagctgacccctacactagaccctacacaccggatggagctgatcctgagtaccagcccagctgagctgactctggatcctgcgtgccagccaaagctgcccctggattccacatgccaaccagagatgaccttcaatcctggtccaactgagcttaccctggatcctgaacaccagccagaggagaccccagctcctagcctggctgagttgaccctggagcctgtgcaccgccgacccgagctcctggatgcttgtgctgacctcatcaatgatcagtggccccgcagccgcacctcccgcctgcactccctgggccagtcctcagatgccttccccctctgcctgatgctgctaagcccccaccccacacttgaagcagcacccgttgtggtgggccatgcccgcctgtcacgggtgctgaaccagccccagagcctcttagtggagacagtggtggtggcccgggccctgaggggccgtggctttggccgccgcctcatggagggcctggaggtctttgctcgggcccggggcttccgcaagctgcatctcaccacccatgaccaggtgcacttctatacccacctgggctaccagctgggtgagcctgtgcagggcctggtcttcaccagcagacggctgcctgccaccctgcttaatgccttccccacagccccctctccccggccacccaggaaggccccaaacctgactgcccaagctgccccaaggggtcccaagggacctccattgccaccaccccctcccctacctgagtgcctgaccatctcacccccagttccatcagggcccccttcaaaaagcctgctggagacacaatatcaaaatgtgagggggcgccccatattctggatggaaaaagacatctgaggccatccagggcaaggaactgtctttctggttcaatagactgccccgacagtctacaagcctcagcccactgaccatacctcagcccctagcccctggggggcagctttaacctgggcatgtttcctgggtaccagtggggccaggaggtggctctggctcagagccgtcagtgtggctgaataaaggctctcttggg

SEQ ID NO: 2685 - DNA, 860 bp, Homo sapiens
  source 1..860: mol_type = genomic DNA
aggggcggatcctggggcttcctccctctagaccaaagggtgcggctgctgcagaggtggctgatgcagtggtggactaggaggactactggaagacagaaggccagcaagtagattgggtcggctgttttatagacctggtggttacagaccccctgtgaggggaggtcctgaggaggacaaatttgtagccagagcaggctggggccaggactcctaggttctgccccagccttaagcagctcatccatcactcccagcctccctccaatgtggggtagacacctggatctatctgccctgctctataggggatgggtctcttccaggtcacctgtgctatcaggtgagtgtgggacaaagtgcagcccaccactccccagttccagtatgcatggtcccccctgcactctgtcagcccttccctgctccaaccccaccctccctcctggcacagcccagcatggctgttatctacaggaggagagccactgtggtctgaagagatgctactgcctggagactggggtcttaacctccagcctggcactgagccacctgcaacctagcagcaggtgaccttggctcccagcctgactcagctgaacctggatcctgtgcataggcaagagctgactctgagccctggcccagccaagctgacccctacactagaccctacacaccggatggagctgatcctgagtaccagcccagctgagctgactctggatcctgcgtgccagccaaagctgcccctggattccacatgccaaccagagatgaccttcaatcctggtccaactgagcttaccctggatcctgaacaccagccagaggagaccccagctcctagcctg

SEQ ID NO: 2686 - DNA, 1464 bp, Homo sapiens
  source 1..1464: mol_type = genomic DNA
aaaccaggggcgggttctaagcggcgacgcgcgggtgctgggaggccttagaacgccgtggcgtgccgcaggacgcgacggctgcagaacatccgccgcaccgctgggggccaacgttgtcggaccgaggagtccgaggtggcgactgagtgagatacccagctgtgcggagctaggacgcggaacatcccagaggccagcatcaacatgaggagagccactgtggtctgaagagatgctactgcctggagactggggtcttaacctccagcctggcactgagccacctgcaacctagcagcaggtgaccttggctcccagcctgactcagctgaacctggatcctgtgcataggcaagagctgactctgagccctggcccagccaagctgacccctacactagaccctacacaccggatggagctgatcctgagtaccagcccagctgagctgactctggatcctgcgtgccagccaaagctgcccctggattccacatgccaaccagagatgaccttcaatcctggtccaactgagcttaccctggatcctgaacaccagccagaggagaccccagctcctagcctggctgagttgaccctggagcctgtgcaccgccgacccgagctcctggatgcttgtgctgacctcatcaatgatcagtggccccgcagccgcacctcccgcctgcactccctgggccagtcctcagatgccttccccctctgcctgatgctgctaagcccccaccccacacttgaagcagcacccgttgtggtgggccatgcccgcctgtcacgggtgctgaaccagccccagagcctcttagtggagacagtggtggtggcccgggccctgaggggccgtggctttggccgccgcctcatggagggcctggaggtctttgctcgggcccggggcttccgcaagctgcatctcaccacccatgaccaggtgcacttctatacccacctgggctaccagctgggtgagcctgtgcagggcctggtcttcaccagcagacggctgcctgccaccctgcttaatgccttccccacagccccctctccccggccacccaggaaggccccaaacctgactgcccaagctgccccaaggggtcccaagggacctccattgccaccaccccctcccctacctgagtgcctgaccatctcacccccagttccatcagggcccccttcaaaaagcctgctggagacacaatatcaaaatgtgagggggcgccccatattctggatggaaaaagacatctgaggccatccagggcaaggaactgtctttctggttcaatagactgccccgacagtctacaagcctcagcccactgaccatacctcagcccctagcccctggggggcagctttaacctgggcatgtttcctgggtaccagtggggccaggaggtggctctggctcagagccgtcagtgtggctgaata

SEQ ID NO: 2687 - DNA, 1820 bp, Homo sapiens
  source 1..1820: mol_type = genomic DNA
cggcgacgcgcgggtgctgggaggccttagaacgccgtggcgtgccgcaggacgcgacggctgcagaacatccgccgcaccgctgggggccaacgttgtcggaccgaggagtccgaggtggcgactgagtgagatacccagctgtgcggagctaggacgcggaacatcccagaggccagcatcaacattggtggactaggaggactactggaagacagaaggccagcaagtagattgggtcggctgttttatagacctggtggttacagaccccctgtgaggggaggtcctgaggaggacaaatttgtagccagagcaggctggggccaggactcctaggttctgccccagccttaagcagctcatccatcactcccagcctccctccaatgtggggtagacacctggatctatctgccctgctctataggggatgggtctcttccaggtcacctgtgctatcaggtgagtgtgggacaaagtgcagcccaccactccccagttccagtatgcatggtcccccctgcactctgtcagcccttccctgctccaaccccaccctccctcctggcacagcccagcatggctgttatctacaggaggagagccactgtggtctgaagagatgctactgcctggagactggggtcttaacctccagcctggcactgagccacctgcaacctagcagcaggtgaccttggctcccagcctgactcagctgaacctggatcctgtgcataggcaagagctgactctgagccctggcccagccaagctgacccctacactagaccctacacaccggatggagctgatcctgagtaccagcccagctgagctgactctggatcctgcgtgccagccaaagctgcccctggattccacatgccaaccagagatgaccttcaatcctggtccaactgagcttaccctggatcctgaacaccagccagaggagaccccagctcctagcctggctgagttgaccctggagcctgtgcaccgccgacccgagctcctggatgcttgtgctgacctcatcaatgatcagtggccccgcagccgcacctcccgcctgcactccctgggccagtcctcagatgccttccccctctgcctgatgctgctaagcccccaccccacacttgaagcagcacccgttgtggtgggccatgcccgcctgtcacgggtgctgaaccagccccagagcctcttagtggagacagtggtggtggcccgggccctgaggggccgtggctttggccgccgcctcatggagggcctggaggtctttgctcgggcccggggcttccgcaagctgcatctcaccacccatgaccaggtgcacttctatacccacctgggctaccagctgggtgagcctgtgcagggcctggtcttcaccagcagacggctgcctgccaccctgcttaatgccttccccacagccccctctccccggccacccaggaaggccccaaacctgactgcccaagctgccccaaggggtcccaagggacctccattgccaccaccccctcccctacctgagtgcctgaccatctcacccccagttccatcagggcccccttcaaaaagcctgctggagacacaatatcaaaatgtgagggggcgccccatattctggatggaaaaagacatctgaggccatccagggcaaggaactgtctttctggttcaatagactgccccgacagtctacaagcctcagcccactgaccatacctcagcccctagcccctggggggcagctttaacctgggcatgtttcctgggtaccagtggggccaggaggt

SEQ ID NO: 2688 - DNA, 765 bp, Homo sapiens
  source 1..765: mol_type = genomic DNA
agtcgttcgtttccagaccatgccgagccacacctgcccacagagtcgagctctcgaagtcctcattcccaaaagctccacagcctgtgacccactaggagggagggggaaaccgaggcccgggagagacggagaagccactctctgaggaccccggagccccgcccacagtgggtggggtcggcactgaaggggttaaggccgcggggaagccccgggctcagccctaggggcggatcctggggcttcctccctctagaccaaagggtgcggctgctgcagaggtggctgatgcaggaggagagccactgtggtctgaagagatgctactgcctggagactggggtcttaacctccagcctggcactgagccacctgcaacctagcagcaggtgaccttggctcccagcctgactcagctgaacctggatcctgtgcataggcaagagctgactctgagccctggcccagccaagctgacccctacactagaccctacacaccggatggagctgatcctgagtaccagcccagctgagctgactctggatcctgcgtgccagccaaagctgcccctggattccacatgccaaccagagatgaccttcaatcctggtccaactgagcttaccctggatcctgaacaccagccagaggagaccccagctcctagcctggctgagttgaccctggagcctgtgcaccgccgacccgagctcctggatgcttgtgctgacctcatcaatgatcagtggccccgcagcc

SEQ ID NO: 2689 - DNA, 583 bp, Homo sapiens
  source 1..583: mol_type = genomic DNA
aggggcggatcctggggcttcctccctctagaccaaagggtgcggctgctgcagaggtggctgatgcagtggtggactaggaggactactggaagacagaaggccagcaagtagattgggtcggctgttttatagacctggtggttacagaccccctgtgaggggaggtcctgaggaggacaaatttgtagccagagcaggctggggccaggactcctaggttctgccccagccttaagcagctcatccatcactcccagcctccctccaatgtggggtagacacctggatctatctgccctgctctataggggatgggtctcttccaggtcacctgtgctatcaggaggagagccactgtggtctgaagagatgctactgcctggagactggggtcttaacctccagcctggcactgagccacctgcaacctagcagcaggtgaccttggctcccagcctgactcagctgaacctggatcctgtgcataggcaagagctgactctgagccctggcccagccaagctgacccctacactagaccctacacaccggatggagctgatcctgagtaccagcccag

SEQ ID NO: 2690 - DNA, 1784 bp, Homo sapiens
  source 1..1784: mol_type = genomic DNA
tgccaggccaccatggcggagctgcaggaggtgcagatcacagaggagaagccactgttgccaggacagacgcctgaggcggccaagactcactctgtggagacaccatacggctctgtcactttcactgtctatggcacccccaaacccaaacgcccagcgatccttacctaccacgatgtgggactcaactataaatcttgcttccagccactgtttcagttcgaggacatgcaggaaatcattcagaactttgtgcgggttcatgtggatgcccctggaatggaagagggagcccctgtgttccctttgggatatcagtacccatctctggaccagcttgcagacatgatcccttgcgtcctgcagtacctaaatttctctacaataattggagttggtgttggagctggagcctacatcctggcgagatatgctctaacaggcctcacctcttccattccggagatgatccttggacatcttttcagccaggaagagctctctggaaattctgagttgatacaaaagtacagaaatatcattacacatgcacccaacctggataacattgaattgtactggaacagctacaacaaccgccgagacctgaactttgagcgtggaggtgatatcaccctcaggtgtcctgtgatgctggtggtaggagaccaagcacctcatgaagatgcagtggtggaatgtaactcaaaactggaccccacccagacctcgttcctcaagatggctgactccggaggtcagccccagctgactcagccaggcaagctgaccgaggccttcaagtacttcctgcaaggcatgggctacatggcctcatcctgcatgactcgcctgtcccggtctcgtacagcctctctgaccagtgcagcatccgttgatggcaaccggtcccgctctcgcaccctgtcccagagcagcgagtctggaactctttcttcggggcccccggggcacaccatggaggtctcctgttgaatggcccttgttgccctagagtgggacccagccctcacctcccccagagctaacctgggaggtgctgaaggggcattgggccaccgtaagcaagggaaaaagggcagatcatgcggggagatgaccttgatctttgattgctaccctaaccttgacctttaacccgtgattccccccagctcctggaagagatgtcctaatatctcttagggacccagacccctaaattctcctcctcccccattttgatgttaaggtggagagggcatatgcatcctctgtcctgatctaggtgtctatagctgaggggtaagaggttgttgtagttgtcctggtgcctccatcagactctccctacttgtcccatatttgcaaggggaggggatttggggctggggctccattcaccaaagctgaggtggcttctcattaaccctttaggactctgaagggtatggacctacgtgaatgtgtgtcagggggagacttgctggtgggttagtggtcctcaggatgtgatagaaacatccagtgtaaaaaggaagttggaatgggagttggcgggcagtgaacgagtgtggggaaggattggtgctggggcaacaggaaggggcctggggccgtttggctgcactaactttggtagctcagtgtgcatctagagtgggactggggagggagctaagcttgggctgggctgcttggggcttggcatagggtggaaagggctaccctggggctctgaccacactgtagtatgtgtggagggtgccctcccgtctccc

SEQ ID NO: 2691 - DNA, 2122 bp, Homo sapiens
  source 1..2122: mol_type = genomic DNA
cggccccccgcattccccgcccccacctccccgccttgttgtccaacttctcccggagcagccggagagcaggcgtcgggacgcagcaaagagaggagagaccccagagtcagaaggagtgagaaccctgacccctaatcccactgcatccagccaataggagcccagccaccatggcggagctgcaggaggtgcagatcacagaggagaagccactgttgccaggacagacgcctgaggcggccaaggaggctgagttagctgcccgaatcctcctggaccagggacagactcactctgtggagacaccatacggctctgtcactttcactgtctatggcacccccaaacccaaacgcccagcgatccttacctaccacgatgtgggactcaactataaatcttgcttccagccactgtttcagttcgaggacatgcaggaaatcattcagaactttgtgcgggttcatgtggatgcccctggaatggaagagggagcccctgtgttccctttgggatatcagtacccatctctggaccagcttgcagacatgatcccttgcgtcctgcagtacctaaatttctctacaataattggagttggtgttggagctggagcctacatcctggcgagatatgctcttaaccacccggacactgttgaaggtcttgtcctcatcaacattgatcccaatgccaagggttggatggattgggcagcccacaagctaacaggcctcacctcttccattccggagatgatccttggacatcttttcagccaggaagagctctctggaaattctgagttgatacaaaagtacagaaatatcattacacatgcacccaacctggataacattgaattgtactggaacagctacaacaaccgccgagacctgaactttgagcgtggaggtgatatcaccctcaggtgtcctgtgatgctggtggtaggagaccaagcacctcatgaagatgcagtggtggaatgtaactcaaaactggaccccacccagacctcgttcctcaagatggctgactccggaggtcagccccagctgactcagccaggcaagctgaccgaggccttcaagtacttcctgcaaggcatgggctacatggcctcatcctgcatgactcgcctgtcccggtctcgtacagcctctctgaccagtgcagcatccgttgatggcaaccggtcccgctctcgcaccctgtcccagagcagcgagtctggaactctttcttcggggcccccggggcacaccatggaggtctcctgttgaatggcccttgttgccctagagtgggacccagccctcacctcccccagagctaacctgggaggtgctgaaggggcattgggccaccgtaagcaagggaaaaagggcagatcatgcggggagatgaccttgatctttgattgctaccctaaccttgacctttaacccgtgattccccccagctcctggaagagatgtcctaatatctcttagggacccagacccctaaattctcctcctcccccattttgatgttaaggtggagagggcatatgcatcctctgtcctgatctaggtgtctatagctgaggggtaagaggttgttgtagttgtcctggtgcctccatcagactctccctacttgtcccatatttgcaaggggaggggatttggggctggggctccattcaccaaagctgaggtggcttctcattaaccctttaggactctgaagggtatggacctacgtgaatgtgtgtcagggggagacttgctggtgggttagtggtcctcaggatgtgatagaaacatccagtgtaaaaaggaagttggaatgggagttggcgggcagtgaacgagtgtggggaaggattggtgctggggcaacaggaaggggcctggggccgtttggctgcactaactttggtagctcagtgtgcatctagagtgggactggggagggagctaagcttgggctgggctgcttggggcttggcatagggtggaaagggctaccctggggctctgaccacactgtagtatgtgtggagggtgccctcccgtctcccacaacttctgctataacaataaactgtagaggaatctgagtaccgtta

SEQ ID NO: 2692 - DNA, 2127 bp, Homo sapiens
  source 1..2127: mol_type = genomic DNA
atcctctccccaccccccgcctgcccgcgatcgccctctatttatagcggccccccgcattccccgcccccacctccccgccttgttgtccaacttctcccggagcagccggagagcaggcgtcgggacgcagcaaagagaggagagaccccagagtcagaaggagtgagaaccctgacccctaatcccactgcatccagccaataggagcccagccaccatggcggagctgcaggaggtgcagatcacagaggagaagccactgttgccaggacagacgcctgaggcggccaagactcactctgtggagacaccatacggctctgtcactttcactgtctatggcacccccaaacccaaacgcccagcgatccttacctaccacgatgtgggactcaactataaatcttgcttccagccactgtttcagttcgaggacatgcaggaaatcattcagaactttgtgcgggttcatgtggatgcccctggaatggaagagggagcccctgtgttccctttgggatatcagtacccatctctggaccagcttgcagacatgatcccttgcgtcctgcagtacctaaatttctctacaataattggagttggtgttggagctggagcctacatcctggcgagatatgctcttaaccacccggacactgttgaaggtcttgtcctcatcaacattgatcccaatgccaagggttggatggattgggcagcccacaagctaacaggcctcacctcttccattccggagatgatccttggacatcttttcagccaggaagagctctctggaaattctgagttgatacaaaagtacagaaatatcattacacatgcacccaacctggataacattgaattgtactggaacagctacaacaaccgccgagacctgaactttgagcgtggaggtgatatcaccctcaggtgtcctgtgatgctggtggtaggagaccaagcacctcatgaagatgcagtggtggaatgtaactcaaaactggaccccacccagacctcgttcctcaagatggctgactccggaggtcagccccagctgactcagccaggcaagctgaccgaggccttcaagtacttcctgcaaggcatgggctacatggcctcatcctgcatgactcgcctgtcccggtctcgtacagcctctctgaccagtgcagcatccgttgatggcaaccggtcccgctctcgcaccctgtcccagagcagcgagtctggaactctttcttcggggcccccggggcacaccatggaggtctcctgttgaatggcccttgttgccctagagtgggacccagccctcacctcccccagagctaacctgggaggtgctgaaggggcattgggccaccgtaagcaagggaaaaagggcagatcatgcggggagatgaccttgatctttgattgctaccctaaccttgacctttaacccgtgattccccccagctcctggaagagatgtcctaatatctcttagggacccagacccctaaattctcctcctcccccattttgatgttaaggtggagagggcatatgcatcctctgtcctgatctaggtgtctatagctgaggggtaagaggttgttgtagttgtcctggtgcctccatcagactctccctacttgtcccatatttgcaaggggaggggatttggggctggggctccattcaccaaagctgaggtggcttctcattaaccctttaggactctgaagggtatggacctacgtgaatgtgtgtcagggggagacttgctggtgggttagtggtcctcaggatgtgatagaaacatccagtgtaaaaaggaagttggaatgggagttggcgggcagtgaacgagtgtggggaaggattggtgctggggcaacaggaaggggcctggggccgtttggctgcactaactttggtagctcagtgtgcatctagagtgggactggggagggagctaagcttgggctgggctgcttggggcttggcatagggtggaaagggctaccctggggctctgaccacactgtagtatgtgtggagggtgccctcccgtctcccacaacttctgctataacaataaactgtagaggaatctgagtaccgtta

SEQ ID NO: 2693 - DNA, 2047 bp, Homo sapiens
  source 1..2047: mol_type = genomic DNA
tctccccaccccccgcctgcccgcgatcgccctctatttatagcggccccccgcattccccgcccccacctccccgccttgttgtccaacttctcccggagcagccggagagcaggcgtcgggacgcagcaaagagaggagaggccaccatggcggagctgcaggaggtgcagatcacagaggagaagccactgttgccaggacagacgcctgaggcggccaagactcactctgtggagacaccatacggctctgtcactttcactgtctatggcacccccaaacccaaacgcccagcgatccttacctaccacgatgtgggactcaactataaatcttgcttccagccactgtttcagttcgaggacatgcaggaaatcattcagaactttgtgcgggttcatgtggatgcccctggaatggaagagggagcccctgtgttccctttgggatatcagtacccatctctggaccagcttgcagacatgatcccttgcgtcctgcagtacctaaatttctctacaataattggagttggtgttggagctggagcctacatcctggcgagatatgctcttaaccacccggacactgttgaaggtcttgtcctcatcaacattgatcccaatgccaagggttggatggattgggcagcccacaagctaacaggcctcacctcttccattccggagatgatccttggacatcttttcagccaggaagagctctctggaaattctgagttgatacaaaagtacagaaatatcattacacatgcacccaacctggataacattgaattgtactggaacagctacaacaaccgccgagacctgaactttgagcgtggaggtgatatcaccctcaggtgtcctgtgatgctggtggtaggagaccaagcacctcatgaagatgcagtggtggaatgtaactcaaaactggaccccacccagacctcgttcctcaagatggctgactccggaggtcagccccagctgactcagccaggcaagctgaccgaggccttcaagtacttcctgcaaggcatgggctacatggcctcatcctgcatgactcgcctgtcccggtctcgtacagcctctctgaccagtgcagcatccgttgatggcaaccggtcccgctctcgcaccctgtcccagagcagcgagtctggaactctttcttcggggcccccggggcacaccatggaggtctcctgttgaatggcccttgttgccctagagtgggacccagccctcacctcccccagagctaacctgggaggtgctgaaggggcattgggccaccgtaagcaagggaaaaagggcagatcatgcggggagatgaccttgatctttgattgctaccctaaccttgacctttaacccgtgattccccccagctcctggaagagatgtcctaatatctcttagggacccagacccctaaattctcctcctcccccattttgatgttaaggtggagagggcatatgcatcctctgtcctgatctaggtgtctatagctgaggggtaagaggttgttgtagttgtcctggtgcctccatcagactctccctacttgtcccatatttgcaaggggaggggatttggggctggggctccattcaccaaagctgaggtggcttctcattaaccctttaggactctgaagggtatggacctacgtgaatgtgtgtcagggggagacttgctggtgggttagtggtcctcaggatgtgatagaaacatccagtgtaaaaaggaagttggaatgggagttggcgggcagtgaacgagtgtggggaaggattggtgctggggcaacaggaaggggcctggggccgtttggctgcactaactttggtagctcagtgtgcatctagagtgggactggggagggagctaagcttgggctgggctgcttggggcttggcatagggtggaaagggctaccctggggctctgaccacactgtagtatgtgtggagggtgccctcccgtctcccacaacttctgctataacaataaactgtagaggaatctga

SEQ ID NO: 2694 - DNA, 2096 bp, Homo sapiens
  source 1..2096: mol_type = genomic DNA
actcctgcgccctcgacgttcccccgtgccccctttcggcgccagcacacctgcccctgccagccggcgagacccccgcctcctcagcggcggtcccgcccacctcctcctttcttaatctagttctctgtgttcgggcggggggagtcgaactcgtggggtgtcagtatcccgggttcgtctccccactaccggttcccaccactgagtctgggggcgaaggaaggagccagagtgcaattgcagatccagaccccagagtcagaaggagtgagaaccctgacccctaatcccactgcatccagccaataggagcccagccaccatggcggagctgcaggaggtgcagatcacagaggagaagccactgttgccaggacagacgcctgaggcggccaagactcactctgtggagacaccatacggctctgtcactttcactgtctatggcacccccaaacccaaacgcccagcgatccttacctaccacgatgtgggactcaactataaatcttgcttccagccactgtttcagttcgaggacatgcaggaaatcattcagaactttgtgcgggttcatgtggatgcccctggaatggaagagggagcccctgtgttccctttgggatatcagtacccatctctggaccagcttgcagacatgatcccttgcgtcctgcagtacctaaatttctctacaataattggagttggtgttggagctggagcctacatcctggcgagatatgctcttaaccacccggacactgttgaaggtcttgtcctcatcaacattgatcccaatgccaagggttggatggattgggcagcccacaagctaacaggcctcacctcttccattccggagatgatccttggacatcttttcagccaggaagagctctctggaaattctgagttgatacaaaagtacagaaatatcattacacatgcacccaacctggataacattgaattgtactggaacagctacaacaaccgccgagacctgaactttgagcgtggaggtgatatcaccctcaggtgtcctgtgatgctggtggtaggagaccaagcacctcatgaagatgcagtgatggctgactccggaggtcagccccagctgactcagccaggcaagctgaccgaggccttcaagtacttcctgcaaggcatgggctacatggcctcatcctgcatgactcgcctgtcccggtctcgtacagcctctctgaccagtgcagcatccgttgatggcaaccggtcccgctctcgcaccctgtcccagagcagcgagtctggaactctttcttcggggcccccggggcacaccatggaggtctcctgttgaatggcccttgttgccctagagtgggacccagccctcacctcccccagagctaacctgggaggtgctgaaggggcattgggccaccgtaagcaagggaaaaagggcagatcatgcggggagatgaccttgatctttgattgctaccctaaccttgacctttaacccgtgattccccccagctcctggaagagatgtcctaatatctcttagggacccagacccctaaattctcctcctcccccattttgatgttaaggtggagagggcatatgcatcctctgtcctgatctaggtgtctatagctgaggggtaagaggttgttgtagttgtcctggtgcctccatcagactctccctacttgtcccatatttgcaaggggaggggatttggggctggggctccattcaccaaagctgaggtggcttctcattaaccctttaggactctgaagggtatggacctacgtgaatgtgtgtcagggggagacttgctggtgggttagtggtcctcaggatgtgatagaaacatccagtgtaaaaaggaagttggaatgggagttggcgggcagtgaacgagtgtggggaaggattggtgctggggcaacaggaaggggcctggggccgtttggctgcactaactttggtagctcagtgtgcatctagagtgggactggggagggagctaagcttgggctgggctgcttggggcttggcatagggtggaaagggctaccctggggctctga

SEQ ID NO: 2695 - DNA, 2084 bp, Homo sapiens
  source 1..2084: mol_type = genomic DNA
attgaccccagagtccctgttggccatcctctccccaccccccgcctgcccgcgatcgccctctatttatagcggccccccgcattccccgcccccacctccccgccttgttgtccaacttctcccggagcagccggagagcaggcgtcgggacgcagcaaagagaggagaggccaccatggcggagctgcaggaggtgcagatcacagaggagaagccactgttgccaggacagacgcctgaggcggccaaggaggctgagttagctgcccgaatcctcctggaccagggacagactcactctgtggagacaccatacggctctgtcactttcactgtctatggcacccccaaacccaaacgcccagcgatccttacctaccacgatgtgggactcaactataaatcttgcttccagccactgtttcagttcgaggacatgcaggaaatcattcagaactttgtgcgggttcatgtggatgcccctggaatggaagagggagcccctgtgttccctttgggatatcagtacccatctctggaccagcttgcagacatgatcccttgcgtcctgcagtacctaaatttctctacaataattggagttggtgttggagctggagcctacatcctggcgagatatgctcttaaccacccggacactgttgaaggtcttgtcctcatcaacattgatcccaatgccaagggttggatggattgggcagcccacaagctaacaggcctcacctcttccattccggagatgatccttggacatcttttcagccaggaagagctctctggaaattctgagttgatacaaaagtacagaaatatcattacacatgcacccaacctggataacattgaattgtactggaacagctacaacaaccgccgagacctgaactttgagcgtggaggtgatatcaccctcaggtgtcctgtgatgctggtggtggaatgtaactcaaaactggaccccacccagacctcgttcctcaagatggctgactccggaggtcagccccagctgactcagccaggcaagctgaccgaggccttcaagtacttcctgcaaggcatgggctacatggcctcatcctgcatgactcgcctgtcccggtctcgtacagcctctctgaccagtgcagcatccgttgatggcaaccggtcccgctctcgcaccctgtcccagagcagcgagtctggaactctttcttcggggcccccggggcacaccatggaggtctcctgttgaatggcccttgttgccctagagtgggacccagccctcacctcccccagagctaacctgggaggtgctgaaggggcattgggccaccgtaagcaagggaaaaagggcagatcatgcggggagatgaccttgatctttgattgctaccctaaccttgacctttaacccgtgattccccccagctcctggaagagatgtcctaatatctcttagggacccagacccctaaattctcctcctcccccattttgatgttaaggtggagagggcatatgcatcctctgtcctgatctaggtgtctatagctgaggggtaagaggttgttgtagttgtcctggtgcctccatcagactctccctacttgtcccatatttgcaaggggaggggatttggggctggggctccattcaccaaagctgaggtggcttctcattaaccctttaggactctgaagggtatggacctacgtgaatgtgtgtcagggggagacttgctggtgggttagtggtcctcaggatgtgatagaaacatccagtgtaaaaaggaagttggaatgggagttggcgggcagtgaacgagtgtggggaaggattggtgctggggcaacaggaaggggcctggggccgtttggctgcactaactttggtagctcagtgtgcatctagagtgggactggggagggagctaagcttgggctgggctgcttggggcttggcatagggtggaaagggctaccctggggctctgaccacactgtagtatgtgtggagggtgccctcccgtctcccacaacttctgctataacaataaactgtagaggaatctg

SEQ ID NO: 2696 - DNA, 2022 bp, Homo sapiens
  source 1..2022: mol_type = genomic DNA
gggtctgcgggaagcccgagccggggcgggcccgagtcaaaggcaagtgaaggtggaagcggccgcggcggcagcaggccaccatggcggagctgcaggaggtgcagatcacagaggagaagccactgttgccaggacagacgcctgaggcggccaaggaggctgagttagctgcccgaatcctcctggaccagggacagactcactctgtggagacaccatacggctctgtcactttcactgtctatggcacccccaaacccaaacgcccagcgatccttacctaccacgatgtgggactcaactataaatcttgcttccagccactgtttcagttcgaggacatgcaggaaatcattcagaactttgtgcgggttcatgtggatgcccctggaatggaagagggagcccctgtgttccctttgggatatcagtacccatctctggaccagcttgcagacatgatcccttgcgtcctgcagtacctaaatttctctacaataattggagttggtgttggagctggagcctacatcctggcgagatatgctcttaaccacccggacactgttgaaggtcttgtcctcatcaacattgatcccaatgccaagggttggatggattgggcagcccacaagctaacaggcctcacctcttccattccggagatgatccttggacatcttttcagccaggaagagctctctggaaattctgagttgatacaaaagtacagaaatatcattacacatgcacccaacctggataacattgaattgtactggaacagctacaacaaccgccgagacctgaactttgagcgtggaggtgatatcaccctcaggtgtcctgtgatgctggtggtaggagaccaagcacctcatgaagatgcagtggtggaatgtaactcaaaactggaccccacccagacctcgttcctcaagatggctgactccggaggtcagccccagctgactcagccaggcaagctgaccgaggccttcaagtacttcctgcaaggcatgggctacatggcctcatcctgcatgactcgcctgtcccggtctcgtacagcctctctgaccagtgcagcatccgttgatggcaaccggtcccgctctcgcaccctgtcccagagcagcgagtctggaactctttcttcggggcccccggggcacaccatggaggtctcctgttgaatggcccttgttgccctagagtgggacccagccctcacctcccccagagctaacctgggaggtgctgaaggggcattgggccaccgtaagcaagggaaaaagggcagatcatgcggggagatgaccttgatctttgattgctaccctaaccttgacctttaacccgtgattccccccagctcctggaagagatgtcctaatatctcttagggacccagacccctaaattctcctcctcccccattttgatgttaaggtggagagggcatatgcatcctctgtcctgatctaggtgtctatagctgaggggtaagaggttgttgtagttgtcctggtgcctccatcagactctccctacttgtcccatatttgcaaggggaggggatttggggctggggctccattcaccaaagctgaggtggcttctcattaaccctttaggactctgaagggtatggacctacgtgaatgtgtgtcagggggagacttgctggtgggttagtggtcctcaggatgtgatagaaacatccagtgtaaaaaggaagttggaatgggagttggcgggcagtgaacgagtgtggggaaggattggtgctggggcaacaggaaggggcctggggccgtttggctgcactaactttggtagctcagtgtgcatctagagtgggactggggagggagctaagcttgggctgggctgcttggggcttggcatagggtggaaagggctaccctggggctctgaccacactgtagtatgtgtggagggtgccctcccgtctcccacaacttctgctataacaataaactgtagaggaatctg

SEQ ID NO: 2697 - DNA, 2079 bp, Homo sapiens
  source 1..2079: mol_type = genomic DNA
aagcccgagccggggcgggcccgagtcaaaggcaagtgaaggtggaagcggccgcggcggcagcagaccccagagtcagaaggagtgagaaccctgacccctaatcccactgcatccagccaataggagcccagccaccatggcggagctgcaggaggtgcagatcacagaggagaagccactgttgccaggacagacgcctgaggcggccaaggaggctgagttagctgcccgaatcctcctggaccagggacagactcactctgtggagacaccatacggctctgtcactttcactgtctatggcacccccaaacccaaacgcccagcgatccttacctaccacgatgtgggactcaactataaatcttgcttccagccactgtttcagttcgaggacatgcaggaaatcattcagaactttgtgcgggttcatgtggatgcccctggaatggaagagggagcccctgtgttccctttgggatatcagtacccatctctggaccagcttgcagacatgatcccttgcgtcctgcagtacctaaatttctctacaataattggagttggtgttggagctggagcctacatcctggcgagatatgctcttaaccacccggacactgttgaaggtcttgtcctcatcaacattgatcccaatgccaagggttggatggattgggcagcccacaagctaacaggcctcacctcttccattccggagatgatccttggacatcttttcagccaggaagagctctctggaaattctgagttgatacaaaagtacagaaatatcattacacatgcacccaacctggataacattgaattgtactggaacagctacaacaaccgccgagacctgaactttgagcgtggaggtgatatcaccctcaggtgtcctgtgatgctggtggtaggagaccaagcacctcatgaagatgcagtggtggaatgtaactcaaaactggaccccacccagacctcgttcctcaagatggctgactccggaggtcagccccagctgactcagccaggcaagctgaccgaggccttcaagtacttcctgcaaggcatgggctacatggcctcatcctgcatgactcgcctgtcccggtctcgtacagcctctctgaccagtgcagcatccgttgatggcaaccggtcccgctctcgcaccctgtcccagagcagcgagtctggaactctttcttcggggcccccggggcacaccatggaggtctcctgttgaatggcccttgttgccctagagtgggacccagccctcacctcccccagagctaacctgggaggtgctgaaggggcattgggccaccgtaagcaagggaaaaagggcagatcatgcggggagatgaccttgatctttgattgctaccctaaccttgacctttaacccgtgattccccccagctcctggaagagatgtcctaatatctcttagggacccagacccctaaattctcctcctcccccattttgatgttaaggtggagagggcatatgcatcctctgtcctgatctaggtgtctatagctgaggggtaagaggttgttgtagttgtcctggtgcctccatcagactctccctacttgtcccatatttgcaaggggaggggatttggggctggggctccattcaccaaagctgaggtggcttctcattaaccctttaggactctgaagggtatggacctacgtgaatgtgtgtcagggggagacttgctggtgggttagtggtcctcaggatgtgatagaaacatccagtgtaaaaaggaagttggaatgggagttggcgggcagtgaacgagtgtggggaaggattggtgctggggcaacaggaaggggcctggggccgtttggctgcactaactttggtagctcagtgtgcatctagagtgggactggggagggagctaagcttgggctgggctgcttggggcttggcatagggtggaaagggctaccctggggctctgaccacactgtagtatgtgtggagggtgccctcccgtctcccacaacttctgctataacaataaactgtagaggaatctga

SEQ ID NO: 2698 - DNA, 1915 bp, Homo sapiens
  source 1..1915: mol_type = genomic DNA
agtgaaggtggaagcggccgcggcggcagcagaccccagagtcagaaggagtgagaaccctgacccctaatcccactgcatccagccaataggagcccagccaccatggcggagctgcaggaggtgcagatcacagaggagaagccactgttgccaggacagacgcctgaggcggccaagactcactctgtggagacaccatacggctctgtcactttcactgtctatggcacccccaaacccaaacgcccagcgatccttacctaccacgatgtgggactcaactataaatcttgcttccagccactgtttcagttcgaggacatgcaggaaatcattcagaactttgtgcgggttcatgtggatgcccctggaatggaagagggagcccctgtgttccctttgggatatcagtacccatctctggaccagcttgcagacatgatcccttgcgtcctgcagtacctaaatttctctacaataattggagttggtgttggagctggagcctacatcctggcgagatatgctctaacaggcctcacctcttccattccggagatgatccttggacatcttttcagccaggaagagctctctggaaattctgagttgatacaaaagtacagaaatatcattacacatgcacccaacctggataacattgaattgtactggaacagctacaacaaccgccgagacctgaactttgagcgtggaggtgatatcaccctcaggtgtcctgtgatgctggtggtaggagaccaagcacctcatgaagatgcagtggtggaatgtaactcaaaactggaccccacccagacctcgttcctcaagatggctgactccggaggtcagccccagctgactcagccaggcaagctgaccgaggccttcaagtacttcctgcaaggcatgggctacatggcctcatcctgcatgactcgcctgtcccggtctcgtacagcctctctgaccagtgcagcatccgttgatggcaaccggtcccgctctcgcaccctgtcccagagcagcgagtctggaactctttcttcggggcccccggggcacaccatggaggtctcctgttgaatggcccttgttgccctagagtgggacccagccctcacctcccccagagctaacctgggaggtgctgaaggggcattgggccaccgtaagcaagggaaaaagggcagatcatgcggggagatgaccttgatctttgattgctaccctaaccttgacctttaacccgtgattccccccagctcctggaagagatgtcctaatatctcttagggacccagacccctaaattctcctcctcccccattttgatgttaaggtggagagggcatatgcatcctctgtcctgatctaggtgtctatagctgaggggtaagaggttgttgtagttgtcctggtgcctccatcagactctccctacttgtcccatatttgcaaggggaggggatttggggctggggctccattcaccaaagctgaggtggcttctcattaaccctttaggactctgaagggtatggacctacgtgaatgtgtgtcagggggagacttgctggtgggttagtggtcctcaggatgtgatagaaacatccagtgtaaaaaggaagttggaatgggagttggcgggcagtgaacgagtgtggggaaggattggtgctggggcaacaggaaggggcctggggccgtttggctgcactaactttggtagctcagtgtgcatctagagtgggactggggagggagctaagcttgggctgggctgcttggggcttggcatagggtggaaagggctaccctggggctctgaccacactgtagtatgtgtggagggtgccctcccgtctcccacaacttctgctataacaataaactgtagaggaatctg

SEQ ID NO: 2699 - DNA, 1954 bp, Homo sapiens
  source 1..1954: mol_type = genomic DNA
agtgaaggtggaagcggccgcggcggcagcagaccccagagtcagaaggagtgagaaccctgacccctaatcccactgcatccagccaataggagcccagccaccatggcggagctgcaggaggtgcagatcacagaggagaagccactgttgccaggacagacgcctgaggcggccaagactcactctgtggagacaccatacggctctgtcactttcactgtctatggcacccccaaacccaaacgcccagcgatccttacctaccacgatgtgggactcaactataaatcttgcttccagccactgtttcagttcgaggacatgcaggaaatcattcagaactttgtgcgggttcatgtggatgcccctggaatggaagagggagcccctgtgttccctttgggatatcagtacccatctctggaccagcttgcagacatgatcccttgcgtcctgcagtacctaaatttctctacaataattggagttggtgttggagctggagcctacatcctggcgagatatgctcttaaccacccggacactgttgaaggtcttgtcctcatcaacattgatcccaatgccaagggttggatggattgggcagcccacaagctaacaggcctcacctcttccattccggagatgatccttggacatcttttcagccaggaagagctctctggaaattctgagttgatacaaaagtacagaaatatcattacacatgcacccaacctggataacattgaattgtactggaacagctacaacaaccgccgagacctgaactttgagcgtggaggtgatatcaccctcaggtgtcctgtgatgctggtggtaggagaccaagcacctcatgaagatgcagtgatggctgactccggaggtcagccccagctgactcagccaggcaagctgaccgaggccttcaagtacttcctgcaaggcatgggctacatggcctcatcctgcatgactcgcctgtcccggtctcgtacagcctctctgaccagtgcagcatccgttgatggcaaccggtcccgctctcgcaccctgtcccagagcagcgagtctggaactctttcttcggggcccccggggcacaccatggaggtctcctgttgaatggcccttgttgccctagagtgggacccagccctcacctcccccagagctaacctgggaggtgctgaaggggcattgggccaccgtaagcaagggaaaaagggcagatcatgcggggagatgaccttgatctttgattgctaccctaaccttgacctttaacccgtgattccccccagctcctggaagagatgtcctaatatctcttagggacccagacccctaaattctcctcctcccccattttgatgttaaggtggagagggcatatgcatcctctgtcctgatctaggtgtctatagctgaggggtaagaggttgttgtagttgtcctggtgcctccatcagactctccctacttgtcccatatttgcaaggggaggggatttggggctggggctccattcaccaaagctgaggtggcttctcattaaccctttaggactctgaagggtatggacctacgtgaatgtgtgtcagggggagacttgctggtgggttagtggtcctcaggatgtgatagaaacatccagtgtaaaaaggaagttggaatgggagttggcgggcagtgaacgagtgtggggaaggattggtgctggggcaacaggaaggggcctggggccgtttggctgcactaactttggtagctcagtgtgcatctagagtgggactggggagggagctaagcttgggctgggctgcttggggcttggcatagggtggaaagggctaccctggggctctgaccacactgtagtatgtgtggagggtgccctcccgtctcccacaacttctgctataacaataaactgtagaggaatctg

SEQ ID NO: 2700 - DNA, 2054 bp, Homo sapiens
  source 1..2054: mol_type = genomic DNA
cggccccccgcattccccgcccccacctccccgccttgttgtccaacttctcccggagcagccggagagcaggcgtcgggacgcagcaaagagaggagaggccaccatggcggagctgcaggaggtgcagatcacagaggagaagccactgttgccaggacagacgcctgaggcggccaaggaggctgagttagctgcccgaatcctcctggaccagggacagactcactctgtggagacaccatacggctctgtcactttcactgtctatggcacccccaaacccaaacgcccagcgatccttacctaccacgatgtgggactcaactataaatcttgcttccagccactgtttcagttcgaggacatgcaggaaatcattcagaactttgtgcgggttcatgtggatgcccctggaatggaagagggagcccctgtgttccctttgggatatcagtacccatctctggaccagcttgcagacatgatcccttgcgtcctgcagtacctaaatttctctacaataattggagttggtgttggagctggagcctacatcctggcgagatatgctcttaaccacccggacactgttgaaggtcttgtcctcatcaacattgatcccaatgccaagggttggatggattgggcagcccacaagctaacaggcctcacctcttccattccggagatgatccttggacatcttttcagccaggaagagctctctggaaattctgagttgatacaaaagtacagaaatatcattacacatgcacccaacctggataacattgaattgtactggaacagctacaacaaccgccgagacctgaactttgagcgtggaggtgatatcaccctcaggtgtcctgtgatgctggtggtaggagaccaagcacctcatgaagatgcagtggtggaatgtaactcaaaactggaccccacccagacctcgttcctcaagatggctgactccggaggtcagccccagctgactcagccaggcaagctgaccgaggccttcaagtacttcctgcaaggcatgggctacatggcctcatcctgcatgactcgcctgtcccggtctcgtacagcctctctgaccagtgcagcatccgttgatggcaaccggtcccgctctcgcaccctgtcccagagcagcgagtctggaactctttcttcggggcccccggggcacaccatggaggtctcctgttgaatggcccttgttgccctagagtgggacccagccctcacctcccccagagctaacctgggaggtgctgaaggggcattgggccaccgtaagcaagggaaaaagggcagatcatgcggggagatgaccttgatctttgattgctaccctaaccttgacctttaacccgtgattccccccagctcctggaagagatgtcctaatatctcttagggacccagacccctaaattctcctcctcccccattttgatgttaaggtggagagggcatatgcatcctctgtcctgatctaggtgtctatagctgaggggtaagaggttgttgtagttgtcctggtgcctccatcagactctccctacttgtcccatatttgcaaggggaggggatttggggctggggctccattcaccaaagctgaggtggcttctcattaaccctttaggactctgaagggtatggacctacgtgaatgtgtgtcagggggagacttgctggtgggttagtggtcctcaggatgtgatagaaacatccagtgtaaaaaggaagttggaatgggagttggcgggcagtgaacgagtgtggggaaggattggtgctggggcaacaggaaggggcctggggccgtttggctgcactaactttggtagctcagtgtgcatctagagtgggactggggagggagctaagcttgggctgggctgcttggggcttggcatagggtggaaagggctaccctggggctctgaccacactgtagtatgtgtggagggtgccctcccgtctcccacaacttctgctataacaataaactgtagaggaatctgagtaccgtt

SEQ ID NO: 2701 - DNA, 1500 bp, Homo sapiens
  source 1..1500: mol_type = genomic DNA
ctcaccgggttggggacagggatggaaaatggtggttccatgcaggccaccatggcggagctgcaggaggtgcagatcacagaggagaagccactgttgccaggacagacgcctgaggcggccaagactcactctgtggagacaccatacggctctgtcactttcactgtctatggcacccccaaacccaaacgcccagcgatccttacctaccacgatgtgggactcaactataaatcttgcttccagccactgtttcagttcgaggacatgcaggaaatcattcagaactttgtgcgggttcatgtggatgcccctggaatggaagagggagcccctgtgttccctttgggatatcagtacccatctctggaccagcttgcagacatgatcccttgcgtcctgcagtacctaaatttctctacaataattggagttggtgttggagctggagcctacatcctggcgagatatgctcttaaccacccggacactgttgaaggtcttgtcctcatcaacattgatcccaatgccaagggttggatggattgggcagcccacaagctaacaggcctcacctcttccattccggagatgatccttggacatcttttcagccaggaagagctctctggaaattctgagttgatacaaaagtacagaaatatcattacacatgcacccaacctggataacattgaattgtactggaacagctacaacaaccgccgagacctgaactttgagcgtggaggtgatatcaccctcaggtgtcctgtgatgctggtggtaggagaccaagcacctcatgaagatgcagtggtggaatgtaactcaaaactggaccccacccagacctcgttcctcaagatggctgactccggaggtcagccccagctgactcagccaggcaagctgaccgaggccttcaagtacttcctgcaaggcatgggctacatggcctcatcctgcatgactcgcctgtcccggtctcgtacagcctctctgaccagtgcagcatccgttgatggcaaccggtcccgctctcgcaccctgtcccagagcagcgagtctggaactctttcttcggggcccccggggcacaccatggaggtctcctgttgaatggcccttgttgccctagagtgggacccagccctcacctcccccagagctaacctgggaggtgctgaaggggcattgggccaccgtaagcaagggaaaaagggcagatcatgcggggagatgaccttgatctttgattgctaccctaaccttgacctttaacccgtgattccccccagctcctggaagagatgtcctaatatctcttagggacccagacccctaaattctcctcctcccccattttgatgttaaggtggagagggcatatgcatcctctgtcctgatctaggtgtctatagctgaggggtaagaggttgttgtagttgtcctggtgcctccatcagactctccctacttgtcccatatttgcaa

SEQ ID NO: 2702 - DNA, 639 bp, Homo sapiens
  source 1..639: mol_type = genomic DNA
gtggggtgtcagtatcccggaccccagagtcagaaggagtgagaaccctgacccctaatcccactgcatccagccaataggagcccagtaagtgaccccaccccgcaggctgcaggctccttcctgtgcaggccaccatggcggagctgcaggaggtgcagatcacagaggagaagccactgttgccaggacagacgcctgaggcggccaagactcactctgtggagacaccatacggctctgtcactttcactgtctatggcacccccaaacccaaacgcccagcgatccttacctaccacgatgtgggactcaactataaatcttgcttccagccactgtttcagttcgaggacatgcaggaaatcattcagaactttgtgcgggttcatgtggatgcccctggaatggaagagggagcccctgtgttccctttgggatatcagtacccatctctggaccagcttgcagacatgatcccttgcgtcctgcagtacctaaatttctctacaataattggagttggtgttggagctggagcctacatcctggcgagatatgctcttaaccacccggacactgttgaaggtcttgtcctcatcaacattgatcccaatgccaagggttggatggattggg

SEQ ID NO: 2703 - DNA, 2162 bp, Homo sapiens
  source 1..2162: mol_type = genomic DNA
ggcggcagcaggtagggggaggggcaggcgaggggccgtagggcctggaaggcgccagccgggccggcgggcggtgtgattgatccgcgtcccctggagctggaggctcgggggaaagggccagcacggagcgggcgctcggttgctgcgcacaaaggctgaggctccaagagctgcagggcgtgtttgggaccccagagtcagaaggagtgagaaccctgacccctaatcccactgcatccagccaataggagcccagccaccatggcggagctgcaggaggtgcagatcacagaggagaagccactgttgccaggacagacgcctgaggcggccaagactcactctgtggagacaccatacggctctgtcactttcactgtctatggcacccccaaacccaaacgcccagcgatccttacctaccacgatgtgggactcaactataaatcttgcttccagccactgtttcagttcgaggacatgcaggaaatcattcagaactttgtgcgggttcatgtggatgcccctggaatggaagagggagcccctgtgttccctttgggatatcagtacccatctctggaccagcttgcagacatgatcccttgcgtcctgcagtacctaaatttctctacaataattggagttggtgttggagctggagcctacatcctggcgagatatgctcttaaccacccggacactgttgaaggtcttgtcctcatcaacattgatcccaatgccaagggttggatggattgggcagcccacaagctaacaggcctcacctcttccattccggagatgatccttggacatcttttcagccaggaagagctctctggaaattctgagttgatacaaaagtacagaaatatcattacacatgcacccaacctggataacattgaattgtactggaacagctacaacaaccgccgagacctgaactttgagcgtggaggtgatatcaccctcaggtgtcctgtgatgctggtggtaggagaccaagcacctcatgaagatgcagtggtggaatgtaactcaaaactggaccccacccagacctcgttcctcaagatggctgactccggaggtcagccccagctgactcagccaggcaagctgaccgaggccttcaagtacttcctgcaaggcatgggctacatggcctcatcctgcatgactcgcctgtcccggtctcgtacagcctctctgaccagtgcagcatccgttgatggcaaccggtcccgctctcgcaccctgtcccagagcagcgagtctggaactctttcttcggggcccccggggcacaccatggaggtctcctgttgaatggcccttgttgccctagagtgggacccagccctcacctcccccagagctaacctgggaggtgctgaaggggcattgggccaccgtaagcaagggaaaaagggcagatcatgcggggagatgaccttgatctttgattgctaccctaaccttgacctttaacccgtgattccccccagctcctggaagagatgtcctaatatctcttagggacccagacccctaaattctcctcctcccccattttgatgttaaggtggagagggcatatgcatcctctgtcctgatctaggtgtctatagctgaggggtaagaggttgttgtagttgtcctggtgcctccatcagactctccctacttgtcccatatttgcaaggggaggggatttggggctggggctccattcaccaaagctgaggtggcttctcattaaccctttaggactctgaagggtatggacctacgtgaatgtgtgtcagggggagacttgctggtgggttagtggtcctcaggatgtgatagaaacatccagtgtaaaaaggaagttggaatgggagttggcgggcagtgaacgagtgtggggaaggattggtgctggggcaacaggaaggggcctggggccgtttggctgcactaactttggtagctcagtgtgcatctagagtgggactggggagggagctaagcttgggctgggctgcttggggcttggcatagggtggaaagggctaccctggggctctgaccacactgtagtatgtgtggagggtgccctcccgtctcccacaacttctgctataacaataaactgtagaggaatctga

SEQ ID NO: 2704 - DNA, 943 bp, Homo sapiens
  source 1..943: mol_type = genomic DNA
ttttggtaccctgtcctttagaatactcagtcactgagctacaagtttcactccctacctgagagtgtggggtggcccctaaatatagcccgagaaatctgagctacacttctgccccaccctggtattttggtccagggcagaggagggaggggtctggaggtgtggtgttgagggtggcagtggggatggtgagtatcaagagaagggctgtcctgattcctcttccaaagcttccaccgatcagcctggaaacggagctgggggcaggaaaggccctctgtgtgttctagagtagtcttcaacccctgggtccctctgttccctgcatcttcctgtgctgagagaggaagcctggtgtttgaggcgatgtggggatgtagagacaacttcccagtctcatttcctcatcctgccaggccaccatggcggagctgcaggaggtgcagatcacagaggagaagccactgttgccaggacagacgcctgaggcggccaaggaggctgagttagctgcccgaatcctcctggaccagggacagactcactctgtggagacaccatacggctctgtcactttcactgtctatggcacccccaaacccaaacgcccagcgatccttacctaccacgatgtgggactcaactataaatcttgcttccagccactgtttcagttcgaggacatgcaggaaatcattcagaactttgtgcgggttcatgtggatgcccctggaatggaagagggagcccctgtgttccctttgggatatcagtacccatctctggaccagcttgcagacatgatcccttgcgtcctgcagtacctaaatttctctacaataattggagttggtgttggagctggagcctacatcctggcgagatatgctcttaaccacccggacactgttgaaggtcttgtcctcatcaacattgatcc

SEQ ID NO: 2705 - DNA, 848 bp, Homo sapiens
  source 1..848: mol_type = genomic DNA
gcggccgcggcggcagcagaccccagagtcagaaggagtgagaaccctgacccctaatcccactgcatccagccaataggagcccagccaccatggcggagctgcaggaggtgcagatcacagaggagaagccactgttgccaggacagacgcctgaggcggccaaggaggctgagttagctgcccgaatcctcctggaccagggacagactcactctgtggagacaccatacggctctgtcactttcactgtctatggcacccccaaacccaaacgcccagcgatccttacctaccacgatgtgggactcaactataaatcttgcttccagccactgtttcagttcgaggacatgcaggaaatcattcagaactttgtgcgggttcatgtggatgcccctggaatggaagagggagcccctgtgttccctttgggatatcagtacccatctctggaccagcttgcagacatgatcccttgcgtcctgcagtacctaaatttctctacaataattggagttggtgttggagctggagcctacatcctggcgagatatgctcttaaccacccggacactgttgaaggtcttgtcctcatcaacattgatcccaatgccaagggttggatggattgggcagcccacaagctaacaggcctcacctcttccattccggagatgatccttggacatcttttcagccaggaagagctctctggaaattctgagttgatacaaaagtacagaaatatcattacacatgcacccaacctggataacattgaattgtactggaacagctacaacaaccgccgagacctgaactttgagcgtggaggtgatatcacc

SEQ ID NO: 2706 - DNA, 595 bp, Homo sapiens
  source 1..595: mol_type = genomic DNA
aatgttgaacttgcggagtttattcagagttgggaggaagggtcttgggaggaagggaggcattgggccaccatggcggagctgcaggaggtgcagatcacagaggagaagccactgttgccaggacagacgcctgaggcggccaagactcactctgtggagacaccatacggctctgtcactttcactgtctatggcacccccaaacccaaacgcccagcgatccttacctaccacgatgtgggactcaactataaatcttgcttccagccactgtttcagttcgaggacatgcaggaaatcattcagaactttgtgcgggttcatgtggatgcccctggaatggaagagggagcccctgtgttccctttgggatatcagtacccatctctggaccagcttgcagacatgatcccttgcgtcctgcagtacctaaatttctctacaataattggagttggtgttggagctggagcctacatcctggcgagatatgctcttaaccacccggacactgttgaaggtcttgtcctcatcaacattgatcccaatgccaagggttggatggattgggcagcccacaagctaacaggcc

SEQ ID NO: 2707 - DNA, 1980 bp, Homo sapiens
  source 1..1980: mol_type = genomic DNA
gggtctgcgggaagcccgagccggggcgggcccgagtcaaaggcaagtgaaggtggaagcggccgcggcggcagcaggccaccatggcggagctgcaggaggtgcagatcacagaggagaagccactgttgccaggacagacgcctgaggcggccaagactcactctgtggagacaccatacggctctgtcactttcactgtctatggcacccccaaacccaaacgcccagcgatccttacctaccacgatgtgggactcaactataaatcttgcttccagccactgtttcagttcgaggacatgcaggaaatcattcagaactttgtgcgggttcatgtggatgcccctggaatggaagagggagcccctgtgttccctttgggatatcagtacccatctctggaccagcttgcagacatgatcccttgcgtcctgcagtacctaaatttctctacaataattggagttggtgttggagctggagcctacatcctggcgagatatgctcttaaccacccggacactgttgaaggtcttgtcctcatcaacattgatcccaatgccaagggttggatggattgggcagcccacaagctaacaggcctcacctcttccattccggagatgatccttggacatcttttcagccaggaagagctctctggaaattctgagttgatacaaaagtacagaaatatcattacacatgcacccaacctggataacattgaattgtactggaacagctacaacaaccgccgagacctgaactttgagcgtggaggtgatatcaccctcaggtgtcctgtgatgctggtggtaggagaccaagcacctcatgaagatgcagtggtggaatgtaactcaaaactggaccccacccagacctcgttcctcaagatggctgactccggaggtcagccccagctgactcagccaggcaagctgaccgaggccttcaagtacttcctgcaaggcatgggctacatggcctcatcctgcatgactcgcctgtcccggtctcgtacagcctctctgaccagtgcagcatccgttgatggcaaccggtcccgctctcgcaccctgtcccagagcagcgagtctggaactctttcttcggggcccccggggcacaccatggaggtctcctgttgaatggcccttgttgccctagagtgggacccagccctcacctcccccagagctaacctgggaggtgctgaaggggcattgggccaccgtaagcaagggaaaaagggcagatcatgcggggagatgaccttgatctttgattgctaccctaaccttgacctttaacccgtgattccccccagctcctggaagagatgtcctaatatctcttagggacccagacccctaaattctcctcctcccccattttgatgttaaggtggagagggcatatgcatcctctgtcctgatctaggtgtctatagctgaggggtaagaggttgttgtagttgtcctggtgcctccatcagactctccctacttgtcccatatttgcaaggggaggggatttggggctggggctccattcaccaaagctgaggtggcttctcattaaccctttaggactctgaagggtatggacctacgtgaatgtgtgtcagggggagacttgctggtgggttagtggtcctcaggatgtgatagaaacatccagtgtaaaaaggaagttggaatgggagttggcgggcagtgaacgagtgtggggaaggattggtgctggggcaacaggaaggggcctggggccgtttggctgcactaactttggtagctcagtgtgcatctagagtgggactggggagggagctaagcttgggctgggctgcttggggcttggcatagggtggaaagggctaccctggggctctgaccacactgtagtatgtgtggagggtgccctcccgtctcccacaacttctgctataacaataaactgtagaggaatctg

SEQ ID NO: 2708 - DNA, 565 bp, Homo sapiens
  source 1..565: mol_type = genomic DNA
accccagagtcagaaggagtgagaaccctgacccctaatcccactgcatccagccaataggagcccagtaagtgaccccaccccgcaggctgcaggctccttcctgtgcaggccaccatggcggagctgcaggaggtgcagatcacagaggagaagccactgttgccaggacagacgcctgaggcggccaaggaggctgagttagctgcccgaatcctcctggaccagggacagactcactctgtggagacaccatacggctctgtcactttcactgtctatggcacccccaaacccaaacgcccagcgatccttacctaccacgatgtgggactcaactataaatcttgcttccagccactgtttcagttcgaggacatgcaggaaatcattcagaactttgtgcgggttcatgtggatgcccctggaatggaagagggagcccctgtgttccctttgggatatcagtacccatctctggaccagcttgcagacatgatcccttgcgtcctgcagtacctaaatttctctacaataattggagttggtgttggagctggagcct

SEQ ID NO: 2709 - DNA, 554 bp, Homo sapiens
  source 1..554: mol_type = genomic DNA
agcaaagagaggagaggtaccaggactctgggcacgagggagtcggaactcctgcgccctcgacgttcccccgtgccccctttcggcgccagcacacctgcccctgccagccggcgagacccccgcctcctcagcggcggtcccgcccacctcctcctttcttaatctagttctctgtgttcgggcggggggagtcgaactcgtggggtgtcagtatcccggaccccagagtcagaaggagtgagaaccctgacccctaatcccactgcatccagccaataggagcccagccaccatggcggagctgcaggaggtgcagatcacagaggagaagccactgttgccaggacagacgcctgaggcggccaaggaggctgagttagctgcccgaatcctcctggaccagggacagactcactctgtggagacaccatacggctctgtcactttcactgtctatggcacccccaaacccaaacgcccagcgatccttacctaccacgatgtgggactcaactataaatcttgcttccagccactgtttcagttcgagg

SEQ ID NO: 2710 - DNA, 583 bp, Homo sapiens
  source 1..583: mol_type = genomic DNA
cccacctccccgccttgttgtccaacttctcccggagcagccggagagcaggcgtcgggacgcagcaaagagaggagagaccccagagtcagaaggagtgagaaccctgacccctaatcccactgcatccagccaataggagcccagtaagtgaccccaccccgcaggctgcaggctccttcctgtgcaggccaccatggcggagctgcaggaggtgcagatcacagaggagaagccactgttgccaggacagacgcctgaggcggccaaggaggctgagttagctgcccgaatcctcctggaccagggacagactcactctgtggagacaccatacggctctgtcactttcactgtctatggcacccccaaacccaaacgcccagcgatccttacctaccacgatgtgggactcaactataaatcttgcttccagccactgtttcagttcgaggacatgcaggaaatcattcagaactttgtgcgggttcatgtggatgcccctggaatggaagagggagcccctgtgttccctttgggatatcagtacccatctctggaccagcttgcagacatgatccct

SEQ ID NO: 2711 - DNA, 587 bp, Homo sapiens
  source 1..587: mol_type = genomic DNA
atattgattccggctcgagcctagagaggacgtgttctctggacttaggggtagacagacactggggaggaccccagagtcagaaggagtgagaaccctgacccctaatcccactgcatccagccaataggagcccagccaccatggcggagctgcaggaggtgcagatcacagaggagaagccactgttgccaggacagacgcctgaggcggccaaggaggctgagttagctgcccgaatcctcctggaccagggacagactcactctgtggagacaccatacggctctgtcactttcactgtctatggcacccccaaacccaaacgcccagcgatccttacctaccacgatgtgggactcaactataaatcttgcttccagccactgtttcagttcgaggacatgcaggaaatcattcagaactttgtgcgggttcatgtggatgcccctggaatggaagagggagcccctgtgttccctttgggatatcagtacccatctctggaccagcttgcagacatgatcccttgcgtcctgcagtacctaaatttctctacaataattggagttggtgttggagctgga

SEQ ID NO: 2712 - DNA, 561 bp, Homo sapiens
  source 1..561: mol_type = genomic DNA
aagtgaaggtggaagcggccgcggcggcagcagaccccagagtcagaaggagtgagaaccctgacccctaatcccactgcatccagccaataggagcccagtaagtgaccccaccccgcaggctgcaggctccttcctgtgcaggtctgtccaggccaccatggcggagctgcaggaggtgcagatcacagaggagaagccactgttgccaggacagacgcctgaggcggccaagactcactctgtggagacaccatacggctctgtcactttcactgtctatggcacccccaaacccaaacgcccagcgatccttacctaccacgatgtgggactcaactataaatcttgcttccagccactgtttcagttcgaggacatgcaggaaatcattcagaactttgtgcgggttcatgtggatgcccctggaatggaagagggagcccctgtgttccctttgggatatcagtacccatctctggaccagcttgcagacatgatcccttgcgtcctgcagtacctaaatttctctacaataattggagttggtgttggagctgg

SEQ ID NO: 2713 - DNA, 573 bp, Homo sapiens
  source 1..573: mol_type = genomic DNA
agggcctggaaggcgccagccgggccggcgggcggtgtgattgatccgcgtcccctggagctggaggctcgggggaaagggccagcacggagcgggcgctcggttgctgcgcacaaaggctgaggctccaagagctgcagggcgtgtttggggtgcgcgcgaggttgtgtgcaagaccccagagtcagaaggagtgagaaccctgacccctaatcccactgcatccagccaataggagcccagccaccatggcggagctgcaggaggtgcagatcacagaggagaagccactgttgccaggacagacgcctgaggcggccaagactcactctgtggagacaccatacggctctgtcactttcactgtctatggcacccccaaacccaaacgcccagcgatccttacctaccacgatgtgggactcaactataaatcttgcttccagccactgtttcagttcgaggacatgcaggaaatcattcagaactttgtgcgggttcatgtggatgcccctggaatggaagagggagcccctgtgttccctttgggatatcagtacccatctctggacc

SEQ ID NO: 2714 - DNA, 632 bp, Homo sapiens
  source 1..632: mol_type = genomic DNA
cttgtagcctatattgattccggctcgagcctagagaggacgtgttctctggacttaggggtagacagacactggggagggttagtgacccgaggaggttgatgaccctgggagtctgggtcttggctgaggctttccgtccctgaaagaccccaggtctgtctcccatgtcattcacctcgttgctgtgttttctcagaccccagagtcagaaggagtgagaaccctgacccctaatcccactgcatccagccaataggagcccagccaccatggcggagctgcaggaggtgcagatcacagaggagaagccactgttgccaggacagacgcctgaggcggccaagactcactctgtggagacaccatacggctctgtcactttcactgtctatggcacccccaaacccaaacgcccagcgatccttacctaccacgatgtgggactcaactataaatcttgcttccagccactgtttcagttcgaggacatgcaggaaatcattcagaactttgtgcgggttcatgtggatgcccctggaatggaagagggagcccctgtgttccctttgggatatcagtacccatctctggaccagcttgcagacatgatcccttgcgtcctgcagtac

SEQ ID NO: 2715 - DNA, 571 bp, Homo sapiens
  source 1..571: mol_type = genomic DNA
agggggaggggcaggcgaggggccgtagggcctggaaggcgccagccgggccggcgggcggtgtgattgatccgcgtcccctggagctggaggctcgggggaaagggccagcacggagcgggcgctcggttgctgcgcacaaaggctgaggctccaagagctgcagggcgtgtttggggtgcgcgcgaggttgtgtgcaagaccccagagtcagaaggagtgagaaccctgacccctaatcccactgcatccagccaataggagcccagccaccatggcggagctgcaggaggtgcagatcacagaggagaagccactgttgccaggacagacgcctgaggcggccaaggaggctgagttagctgcccgaatcctcctggaccagggacagactcactctgtggagacaccatacggctctgtcactttcactgtctatggcacccccaaacccaaacgcccagcgatccttacctaccacgatgtgggactcaactataaatcttgcttccagccactgtttcagttcgaggacatgcaggaaatcattcagaactttgtgcgggttcat

SEQ ID NO: 2716 - DNA, 578 bp, Homo sapiens
  source 1..578: mol_type = genomic DNA
agcaggtagggggaggggcaggcgaggggccgtagggcctggaaggcgccagccgggccggcgggcggtgtgattgatccgcgtcccctggagctggaggctcgggggaaagggccagcacggagcgggcgctcggttgctgcgcacaaaggctgaggctccaagagctgcagggcgtgtttgggaccccagagtcagaaggagtgagaaccctgacccctaatcccactgcatccagccaataggagcccagtaagtgaccccaccccgcaggctgcaggctccttcctgtgcaggccaccatggcggagctgcaggaggtgcagatcacagaggagaagccactgttgccaggacagacgcctgaggcggccaagactcactctgtggagacaccatacggctctgtcactttcactgtctatggcacccccaaacccaaacgcccagcgatccttacctaccacgatgtgggactcaactataaatcttgcttccagccactgtttcagttcgaggacatgcaggaaatcattcagaactttgtgcgggttcatgtggatgcccctggaatggaa

SEQ ID NO: 2717 - DNA, 609 bp, Homo sapiens
  source 1..609: mol_type = genomic DNA
agcgcccgtgggcgggctggggcgggccgggggcgggtctgcgggaagcccgagccggggcgggcccgagtcaaagaccccagagtcagaaggagtgagaaccctgacccctaatcccactgcatccagccaataggagcccagccaccatggcggagctgcaggaggtgcagatcacagaggagaagccactgttgccaggacagacgcctgaggcggccaagactcactctgtggagacaccatacggctctgtcactttcactgtctatggcacccccaaacccaaacgcccagcgatccttacctaccacgatgtgggactcaactataaatcttgcttccagccactgtttcagttcgaggacatgcaggaaatcattcagaactttgtgcgggttcatgtggatgcccctggaatggaagagggagcccctgtgttccctttgggatatcagtacccatctctggaccagcttgcagacatgatcccttgcgtcctgcagtacctaaatttctctacaataattggagttggtgttggagctggagcctacatcctggcgagatatgctcttaaccacccggacactgttgaaggtcttgtcc

SEQ ID NO: 2718 - DNA, 2216 bp, Homo sapiens
  source 1..2216: mol_type = genomic DNA
agggggaggggcaggcgaggggccgtagggcctggaaggcgccagccgggccggcgggcggtgtgattgatccgcgtcccctggagctggaggctcgggggaaagggccagcacggagcgggcgctcggttgctgcgcacaaaggctgaggctccaagagctgcagggcgtgtttggggtgcgcgcgaggttgtgtgcaagaccccagagtcagaaggagtgagaaccctgacccctaatcccactgcatccagccaataggagcccagtaagtgaccccaccccgcaggctgcaggctccttcctgtgcaggccaccatggcggagctgcaggaggtgcagatcacagaggagaagccactgttgccaggacagacgcctgaggcggccaagactcactctgtggagacaccatacggctctgtcactttcactgtctatggcacccccaaacccaaacgcccagcgatccttacctaccacgatgtgggactcaactataaatcttgcttccagccactgtttcagttcgaggacatgcaggaaatcattcagaactttgtgcgggttcatgtggatgcccctggaatggaagagggagcccctgtgttccctttgggatatcagtacccatctctggaccagcttgcagacatgatcccttgcgtcctgcagtacctaaatttctctacaataattggagttggtgttggagctggagcctacatcctggcgagatatgctcttaaccacccggacactgttgaaggtcttgtcctcatcaacattgatcccaatgccaagggttggatggattgggcagcccacaagctaacaggcctcacctcttccattccggagatgatccttggacatcttttcagccaggaagagctctctggaaattctgagttgatacaaaagtacagaaatatcattacacatgcacccaacctggataacattgaattgtactggaacagctacaacaaccgccgagacctgaactttgagcgtggaggtgatatcaccctcaggtgtcctgtgatgctggtggtaggagaccaagcacctcatgaagatgcagtggtggaatgtaactcaaaactggaccccacccagacctcgttcctcaagatggctgactccggaggtcagccccagctgactcagccaggcaagctgaccgaggccttcaagtacttcctgcaaggcatgggctacatggcctcatcctgcatgactcgcctgtcccggtctcgtacagcctctctgaccagtgcagcatccgttgatggcaaccggtcccgctctcgcaccctgtcccagagcagcgagtctggaactctttcttcggggcccccggggcacaccatggaggtctcctgttgaatggcccttgttgccctagagtgggacccagccctcacctcccccagagctaacctgggaggtgctgaaggggcattgggccaccgtaagcaagggaaaaagggcagatcatgcggggagatgaccttgatctttgattgctaccctaaccttgacctttaacccgtgattccccccagctcctggaagagatgtcctaatatctcttagggacccagacccctaaattctcctcctcccccattttgatgttaaggtggagagggcatatgcatcctctgtcctgatctaggtgtctatagctgaggggtaagaggttgttgtagttgtcctggtgcctccatcagactctccctacttgtcccatatttgcaaggggaggggatttggggctggggctccattcaccaaagctgaggtggcttctcattaaccctttaggactctgaagggtatggacctacgtgaatgtgtgtcagggggagacttgctggtgggttagtggtcctcaggatgtgatagaaacatccagtgtaaaaaggaagttggaatgggagttggcgggcagtgaacgagtgtggggaaggattggtgctggggcaacaggaaggggcctggggccgtttggctgcactaactttggtagctcagtgtgcatctagagtgggactggggagggagctaagcttgggctgggctgcttggggcttggcatagggtggaaagggctaccctggggctctgaccacactgtagtatgtgtggagggtgccctcccgtctcccacaacttctgctataacaataaactgtagaggaatctga

SEQ ID NO: 2719 - DNA, 775 bp, Homo sapiens
  source 1..775: mol_type = genomic DNA
agcaggtagggggaggggcaggcgaggggccgtagggcctggaaggcgccagccgggccggcgggcggtgtgattgatccgcgtcccctggagctggaggctcgggggaaagggccagcacggagcgggcgctcggttgctgcgcacaaaggctgaggctccaagagctgcagggcgtgtttggggccaccatggcggagctgcaggaggtgcagatcacagaggagaagccactgttgccaggacagacgcctgaggcggccaaggaggctgagttagctgcccgaatcctcctggaccagggacagactcactctgtggagacaccatacggctctgtcactttcactgtctatggcacccccaaacccaaacgcccagcgatccttacctaccacgatgtgggactcaactataaatcttgcttccagccactgtttcagttcgaggacatgcaggaaatcattcagaactttgtgcgggttcatgtggatgcccctggaatggaagagggagcccctgtgttccctttgggatatcagtacccatctctggaccagcttgcagacatgatcccttgcgtcctgcagtacctaaatttctctacaataattggagttggtgttggagctggagcctacatcctggcgagatatgctcttaaccacccggacactgttgaaggtcttgtcctcatcaacattgatcccaatgccaagggttggatggattgggcagcccacaagctaacaggcctcacctcttccattccgga

SEQ ID NO: 2720 - DNA, 578 bp, Homo sapiens
  source 1..578: mol_type = genomic DNA
aggcgaggggccgtagggcctggaaggcgccagccgggccggcgggcggtgtgattgatccgcgtcccctggagctggaggctcgggggaaagggccagcacggagcgggcgctcggttgctgcgcacaaaggctgaggctccaagagctgcagggcgtgtttggggtgcgcgcgaggttgtgtgcaaggccaccatggcggagctgcaggaggtgcagatcacagaggagaagccactgttgccaggacagacgcctgaggcggccaagactcactctgtggagacaccatacggctctgtcactttcactgtctatggcacccccaaacccaaacgcccagcgatccttacctaccacgatgtgggactcaactataaatcttgcttccagccactgtttcagttcgaggacatgcaggaaatcattcagaactttgtgcgggttcatgtggatgcccctggaatggaagagggagcccctgtgttccctttgggatatcagtacccatctctggaccagcttgcagacatgatcccttgcgtcctgcagtacctaaatttctctacaataattgg

SEQ ID NO: 2721 - DNA, 924 bp, Homo sapiens
  source 1..924: mol_type = genomic DNA
cgcggcggcagcaggtagggggaggggcaggcgaggggccgtagggcctggaaggcgccagccgggccggcgggcggtgtgattgatccgcgtcccctggagctggaggctcgggggaaagggccagcacggagcgggcgctcggttgctgcgcacaaaggctgaggctccaagagctgcagggcgtgtttgggaccccagagtcagaaggagtgagaaccctgacccctaatcccactgcatccagccaataggagcccagccaccatggcggagctgcaggaggtgcagatcacagaggagaagccactgttgccaggacagacgcctgaggcggccaaggaggctgagttagctgcccgaatcctcctggaccagggacagactcactctgtggagacaccatacggctctgtcactttcactgtctatggcacccccaaacccaaacgcccagcgatccttacctaccacgatgtgggactcaactataaatcttgcttccagccactgtttcagttcgaggacatgcaggaaatcattcagaactttgtgcgggttcatgtggatgcccctggaatggaagagggagcccctgtgttccctttgggatatcagtacccatctctggaccagcttgcagacatgatcccttgcgtcctgcagtacctaaatttctctacaataattggagttggtgttggagctggagcctacatcctggcgagatatgctcttaaccacccggacactgttgaaggtcttgtcctcatcaacattgatcccaatgccaagggttggatggattgggcagcccacaagctaacaggcctcacctcttccattccggagatgatccttggacatcttttcagccaggaagagctctctggaaattctgagttgatacaaaagtacagaaat

SEQ ID NO: 2722 - DNA, 871 bp, Homo sapiens
  source 1..871: mol_type = genomic DNA
ctagttctctgtgttcgggcggggggagtcgaactcgtggggtgtcagtatcccgggttcgtctccccactaccggttcccaccactgagtctgggggcgaaggaaggagccagagtgcaattgcagatccagaccccagagtcagaaggagtgagaaccctgacccctaatcccactgcatccagccaataggagcccagccaccatggcggagctgcaggaggtgcagatcacagaggagaagccactgttgccaggacagacgcctgaggcggccaagactcactctgtggagacaccatacggctctgtcactttcactgtctatggcacccccaaacccaaacgcccagcgatccttacctaccacgatgtgggactcaactataaatcttgcttccagccactgtttcagttcgaggacatgcaggaaatcattcagaactttgtgcgggttcatgtggatgcccctggaatggaagagggagcccctgtgttccctttgggatatcagtacccatctctggaccagcttgcagacatgatcccttgcgtcctgcagtacctaaatttctctacaataattggagttggtgttggagctggagcctacatcctggcgagatatgctcttaaccacccggacactgttgaaggtcttgtcctcatcaacattgatcccaatgccaagggttggatggattgggcagcccacaagctaacaggcctcacctcttccattccggagatgatccttggacatcttttcagccaggaagagctctctggaaattctgagttgatacaaaagtacagaaatatcattacacatgcacccaacctggataacattgaattgtactggaacag

SEQ ID NO: 2723 - DNA, 2880 bp, Homo sapiens
  source 1..2880: mol_type = genomic DNA
gtgattgatccgcgtcccctggagctggaggctcgggggaaagggccagcacggagcgggcgctcggttgctgcgcacaaaggctgaggctccaagagctgcagggcgtgtttggggtgcgcgcgaggttgtgtgcaaggtccggggcgcttggcaccggccacgcaagggtgtcagtctccacgcggacgggctgcgtagggactcgtagggacgggttccgggtgctgggcccggccggtctcctctgtcctacccatcccttcccgatggcgcttgccttcgcgggccgtcgggggagaacgggagaagattgtgggaccgctctcctctccctttctccactcgtgggacctacacggagactgagtagaggagagaagcgacggcaccaatctttgtgtttgtttttaaattgtggagggaaacagccatgctctgctaccctcctcttactggagagctgtcaaaaattttggggatcccctattcccccgcgtttagtccccctgcagatagaaaattgaggccaaatgtagtaactaactggggcaaggtcacactgggagtggcagagccgggattcgaatccggaggttctgacagggccaccctcttacctccacatcagcacttccttctctcctccgcgcagcctgaactgatgcccttgtagcctatattgattccggctcgagcctagagaggacgtgttctctggacttaggggtagacagacactggggagggttagtgacccgaggaggttgatgaccctgggagtctgggtcttggctgaggctttccgtccctgaaagaccccaggtctgtctcccatgtcattcacctcgttgctgtgttttctcagaccccagagtcagaaggagtgagaaccctgacccctaatcccactgcatccagccaataggagcccagccaccatggcggagctgcaggaggtgcagatcacagaggagaagccactgttgccaggacagacgcctgaggcggccaaggaggctgagttagctgcccgaatcctcctggaccagggacagactcactctgtggagacaccatacggctctgtcactttcactgtctatggcacccccaaacccaaacgcccagcgatccttacctaccacgatgtgggactcaactataaatcttgcttccagccactgtttcagttcgaggacatgcaggaaatcattcagaactttgtgcgggttcatgtggatgcccctggaatggaagagggagcccctgtgttccctttgggatatcagtacccatctctggaccagcttgcagacatgatcccttgcgtcctgcagtacctaaatttctctacaataattggagttggtgttggagctggagcctacatcctggcgagatatgctcttaaccacccggacactgttgaaggtcttgtcctcatcaacattgatcccaatgccaagggttggatggattgggcagcccacaagctaacaggcctcacctcttccattccggagatgatccttggacatcttttcagccaggaagagctctctggaaattctgagttgatacaaaagtacagaaatatcattacacatgcacccaacctggataacattgaattgtactggaacagctacaacaaccgccgagacctgaactttgagcgtggaggtgatatcaccctcaggtgtcctgtgatgctggtggtaggagaccaagcacctcatgaagatgcagtggtggaatgtaactcaaaactggaccccacccagacctcgttcctcaagatggctgactccggaggtcagccccagctgactcagccaggcaagctgaccgaggccttcaagtacttcctgcaaggcatgggctacatggcctcatcctgcatgactcgcctgtcccggtctcgtacagcctctctgaccagtgcagcatccgttgatggcaaccggtcccgctctcgcaccctgtcccagagcagcgagtctggaactctttcttcggggcccccggggcacaccatggaggtctcctgttgaatggcccttgttgccctagagtgggacccagccctcacctcccccagagctaacctgggaggtgctgaaggggcattgggccaccgtaagcaagggaaaaagggcagatcatgcggggagatgaccttgatctttgattgctaccctaaccttgacctttaacccgtgattccccccagctcctggaagagatgtcctaatatctcttagggacccagacccctaaattctcctcctcccccattttgatgttaaggtggagagggcatatgcatcctctgtcctgatctaggtgtctatagctgaggggtaagaggttgttgtagttgtcctggtgcctccatcagactctccctacttgtcccatatttgcaaggggaggggatttggggctggggctccattcaccaaagctgaggtggcttctcattaaccctttaggactctgaagggtatggacctacgtgaatgtgtgtcagggggagacttgctggtgggttagtggtcctcaggatgtgatagaaacatccagtgtaaaaaggaagttggaatgggagttggcgggcagtgaacgagtgtggggaaggattggtgctggggcaacaggaaggggcctggggccgtttggctgcactaactttggtagctcagtgtgcatctagagtgggactggggagggagctaagcttgggctgggctgcttggggcttggcatagggtggaaagggctaccctggggctctgaccacactgtagtatgtgtggagggtgccctcccgtctcccacaacttctgctataacaataaactgtagaggaatctg

SEQ ID NO: 2724 - DNA, 611 bp, Homo sapiens
  source 1..611: mol_type = genomic DNA
aagcccgagccggggcgggcccgagtcaaaggcaagtgaaggtggaagcggccgcggcggcagcagaccccagagtcagaaggagtgagaaccctgacccctaatcccactgcatccagccaataggagcccagtaagtgaccccaccccgcaggctgcaggctccttcctgtgcaggccaccatggcggagctgcaggaggtgcagatcacagaggagaagccactgttgccaggacagacgcctgaggcggccaagactcactctgtggagacaccatacggctctgtcactttcactgtctatggcacccccaaacccaaacgcccagcgatccttacctaccacgatgtgggactcaactataaatcttgcttccagccactgtttcagttcgaggacatgcaggaaatcattcagaactttgtgcgggttcatgtggatgcccctggaatggaagagggagcccctgtgttccctttgggatatcagtacccatctctggaccagcttgcagacatgatcccttgcgtcctgcagtacctaaatttctctacaataattggagttggtgttggagctggagcctacatcctggcgagatatgctct

SEQ ID NO: 2725 - DNA, 671 bp, Homo sapiens
  source 1..671: mol_type = genomic DNA
agcaggtagggggaggggcaggcgaggggccgtagggcctggaaggcgccagccgggccggcgggcggtgtgattgatccgcgtcccctggagctggaggctcgggggaaagggccagcacggagcgggcgctcggttgctgcgcacaaaggctgaggctccaagagctgcagggcgtgtttggggccaccatggcggagctgcaggaggtgcagatcacagaggagaagccactgttgccaggacagacgcctgaggcggccaagactcactctgtggagacaccatacggctctgtcactttcactgtctatggcacccccaaacccaaacgcccagcgatccttacctaccacgatgtgggactcaactataaatcttgcttccagccactgtttcagttcgaggacatgcaggaaatcattcagaactttgtgcgggttcatgtggatgcccctggaatggaagagggagcccctgtgttccctttgggatatcagtacccatctctggaccagcttgcagacatgatcccttgcgtcctgcagtacctaaatttctctacaataattggagttggtgttggagctggagcctacatcctggcgagatatgctcttaaccacccggacactgttgaaggtcttgtcctcatcaacattgatcccaat

SEQ ID NO: 2726 - DNA, 635 bp, Homo sapiens
  source 1..635: mol_type = genomic DNA
cttaatctagttctctgtgttcgggcggggggagtcgaactcgtggggtgtcagtatcccgggttcgtctccccactaccggttcccaccactgagtctgggggcgaaggaaggagccagagtgcaattgcagatccagaccccagagtcagaaggagtgagaaccctgacccctaatcccactgcatccagccaataggagcccagccaccatggcggagctgcaggaggtgcagatcacagaggagaagccactgttgccaggacagacgcctgaggcggccaaggaggctgagttagctgcccgaatcctcctggaccagggacagactcactctgtggagacaccatacggctctgtcactttcactgtctatggcacccccaaacccaaacgcccagcgatccttacctaccacgatgtgggactcaactataaatcttgcttccagccactgtttcagttcgaggacatgcaggaaatcattcagaactttgtgcgggttcatgtggatgcccctggaatggaagagggagcccctgtgttccctttgggatatcagtacccatctctggaccagcttgcagacatgatcccttgcgtcctgcagtacctaaatttctctacaataatt

SEQ ID NO: 2727 - DNA, 580 bp, Homo sapiens
  source 1..580: mol_type = genomic DNA
gtcctacccatcccttcccgatggcgcttgccttcgcgggccgtcgggggagaacgggagaagattgtgggaccgctctcctctccctttctccactcgtgggacctacacggagactgagtagaggagagaagcgacggcaccaatctttgtaccccagagtcagaaggagtgagaaccctgacccctaatcccactgcatccagccaataggagcccagccaccatggcggagctgcaggaggtgcagatcacagaggagaagccactgttgccaggacagacgcctgaggcggccaaggaggctgagttagctgcccgaatcctcctggaccagggacagactcactctgtggagacaccatacggctctgtcactttcactgtctatggcacccccaaacccaaacgcccagcgatccttacctaccacgatgtgggactcaactataaatcttgcttccagccactgtttcagttcgaggacatgcaggaaatcattcagaactttgtgcgggttcatgtggatgcccctggaatggaagagggagcccctgtgttccctttgggatatcagtac

SEQ ID NO: 2728 - DNA, 583 bp, Homo sapiens
  source 1..583: mol_type = genomic DNA
gagtcaaaggcaagtgaaggtggaagcggccgcggcggcagcagaccccagagtcagaaggagtgagaaccctgacccctaatcccactgcatccagccaataggagcccagtaagtgaccccaccccgcaggctgcaggctccttcctgtgcaggccaccatggcggagctgcaggaggtgcagatcacagaggagaagccactgttgccaggacagacgcctgaggcggccaaggaggctgagttagctgcccgaatcctcctggaccagggacagactcactctgtggagacaccatacggctctgtcactttcactgtctatggcacccccaaacccaaacgcccagcgatccttacctaccacgatgtgggactcaactataaatcttgcttccagccactgtttcagttcgaggacatgcaggaaatcattcagaactttgtgcgggttcatgtggatgcccctggaatggaagagggagcccctgtgttccctttgggatatcagtacccatctctggaccagcttgcagacatgatcccttgcgtcctgcagtacctaaatttctctacaataat

SEQ ID NO: 2729 - DNA, 603 bp, Homo sapiens
  source 1..603: mol_type = genomic DNA
gttttggtgagccgagcagagcctggaagcgtccagccgcccgcccctcgccccccggccccagcacaaccctttcctgagcggcagtctgggcgggaccccagagtcagaaggagtgagaaccctgacccctaatcccactgcatccagccaataggagcccagccaccatggcggagctgcaggaggtgcagatcacagaggagaagccactgttgccaggacagacgcctgaggcggccaagactcactctgtggagacaccatacggctctgtcactttcactgtctatggcacccccaaacccaaacgcccagcgatccttacctaccacgatgtgggactcaactataaatcttgcttccagccactgtttcagttcgaggacatgcaggaaatcattcagaactttgtgcgggttcatgtggatgcccctggaatggaagagggagcccctgtgttccctttgggatatcagtacccatctctggaccagcttgcagacatgatcccttgcgtcctgcagtacctaaatttctctacaataattggagttggtgttggagctggagcctacatcctggcgagatatgctcttaacc

SEQ ID NO: 2730 - DNA, 583 bp, Homo sapiens
  source 1..583: mol_type = genomic DNA
atattgattccggctcgagcctagagaggacgtgttctctggacttagggaccccagagtcagaaggagtgagaaccctgacccctaatcccactgcatccagccaataggagcccagccaccatggcggagctgcaggaggtgcagatcacagaggagaagccactgttgccaggacagacgcctgaggcggccaagactcactctgtggagacaccatacggctctgtcactttcactgtctatggcacccccaaacccaaacgcccagcgatccttacctaccacgatgtgggactcaactataaatcttgcttccagccactgtttcagttcgaggacatgcaggaaatcattcagaactttgtgcgggttcatgtggatgcccctggaatggaagagggagcccctgtgttccctttgggatatcagtacccatctctggaccagcttgcagacatgatcccttgcgtcctgcagtacctaaatttctctacaataattggagttggtgttggagctggagcctacatcctggcgagatatgctcttaaccacccggacactgttgaaggtcttgtcc

SEQ ID NO: 2731 - DNA, 851 bp, Homo sapiens
  source 1..851: mol_type = genomic DNA
ctggaaacggagctgggggcaggaaaggccctctgtgtgttctagagtagtcttcaacccctgggtccctctgttccctgcatcttcctgtgctgagagaggaagcctggtgtttgaggcgatgtggggatgtagagacaacttcccagtctcatttcctcatcctgccaggccaccatggcggagctgcaggaggtgcagatcacagaggagaagccactgttgccaggacagacgcctgaggcggccaagactcactctgtggagacaccatacggctctgtcactttcactgtctatggcacccccaaacccaaacgcccagcgatccttacctaccacgatgtgggactcaactataaatcttgcttccagccactgtttcagttcgaggacatgcaggaaatcattcagaactttgtgcgggttcatgtggatgcccctggaatggaagagggagcccctgtgttccctttgggatatcagtacccatctctggaccagcttgcagacatgatcccttgcgtcctgcagtacctaaatttctctacaataattggagttggtgttggagctggagcctacatcctggcgagatatgctcttaaccacccggacactgttgaaggtcttgtcctcatcaacattgatcccaatgccaagggttggatggattgggcagcccacaagctaacaggcctcacctcttccattccggagatgatccttggacatcttttcagccaggaagagctctctggaaattctgagttgatacaaaagtacagaaatatcattacacatgcacccaacctggataacattgaattgtactggaacagctacaacaa

SEQ ID NO: 2732 - DNA, 593 bp, Homo sapiens
  source 1..593: mol_type = genomic DNA
atattgattccggctcgagcctagagaggacgtgttctctggacttaggggtagacagacactggggaggaccccagagtcagaaggagtgagaaccctgacccctaatcccactgcatccagccaataggagcccagccaccatggcggagctgcaggaggtgcagatcacagaggagaagccactgttgccaggacagacgcctgaggcggccaagactcactctgtggagacaccatacggctctgtcactttcactgtctatggcacccccaaacccaaacgcccagcgatccttacctaccacgatgtgggactcaactataaatcttgcttccagccactgtttcagttcgaggacatgcaggaaatcattcagaactttgtgcgggttcatgtggatgcccctggaatggaagagggagcccctgtgttccctttgggatatcagtacccatctctggaccagcttgcagacatgatcccttgcgtcctgcagtacctaaatttctctacaataattggagttggtgttggagctggagcctacatcctggcgagatatgctcttaaccacccggacactgttgaa

SEQ ID NO: 2733 - DNA, 571 bp, Homo sapiens
  source 1..571: mol_type = genomic DNA
gaggggcaggcgaggggccgtagggcctggaaggcgccagccgggccggcgggcggtgtgattgatccgcgtcccctggagctggaggctcgggggaaagggccagcacggagcgggcgctcggttgctgcgcacaaaggctgaggctccaagagctgcagggcgtgtttggggtgcgcgcgaggccaccatggcggagctgcaggaggtgcagatcacagaggagaagccactgttgccaggacagacgcctgaggcggccaagactcactctgtggagacaccatacggctctgtcactttcactgtctatggcacccccaaacccaaacgcccagcgatccttacctaccacgatgtgggactcaactataaatcttgcttccagccactgtttcagttcgaggacatgcaggaaatcattcagaactttgtgcgggttcatgtggatgcccctggaatggaagagggagcccctgtgttccctttgggatatcagtacccatctctggaccagcttgcagacatgatcccttgcgtcctgcagtacctaaatttctctacaataatt

SEQ ID NO: 2734 - DNA, 633 bp, Homo sapiens
  source 1..633: mol_type = genomic DNA
tagcgcccgtgggcgggctggggcgggccgggggcgggtctgcgggaagcccgagccggggcgggcccgagtcaaaggcaagtgaaggtggaagcggccgcggcggcagcagaccccagagtcagaaggagtgagaaccctgacccctaatcccactgcatccagccaataggagcccagccaccatggcggagctgcaggaggtgcagatcacagaggagaagccactgttgccaggacagacgcctgaggcggccaagactcactctgtggagacaccatacggctctgtcactttcactgtctatggcacccccaaacccaaacgcccagcgatccttacctaccacgatgtgggactcaactataaatcttgcttccagccactgtttcagttcgaggacatgcaggaaatcattcagaactttgtgcgggttcatgtggatgcccctggaatggaagagggagcccctgtgttccctttgggatatcagtacccatctctggaccagcttgcagacatgatcccttgcgtcctgcagtacctaaatttctctacaataattggagttggtgttggagctggagcctacatcctggcgagatatgctcttaaccacccggacactgttg

SEQ ID NO: 2735 - DNA, 2964 bp, Homo sapiens
  source 1..2964: mol_type = genomic DNA
gctgctgcactgacggcgggtgcccgcgcctcagagttactgatttattcttgagattcctctactctcgttatctgacctcatggatgaacttcaggatgttcagctcacagagatcaaaccacttctaaatgataagaatggtacaagaaacttccaggactttgactgtcaggaacatgatatagaaacaactcatggtgtggtccacgtcactataagaggcttacccaaaggaaacagaccagttatactaacatatcatgacattggcctcaaccataaatcctgtttcaatgcattctttaactttgaggatatgcaagagatcacccagcactttgctgtctgtcatgtggatgccccaggccagcaggaaggtgcaccctctttcccaacagggtatcagtaccccacaatggatgagctggctgaaatgctgcctcctgttcttacccacctaagcctgaaaagcatcattggaattggagttggagctggagcttacatcctcagcagatttgcactcaaccatccagagcttgtggaaggccttgtgctcattaatgttgacccttgcgctaaaggctggattgactgggcagcttccaaactctctggcctgacaaccaatgttgtggacattattttggctcatcactttgggcaggaagagttacaggccaacctggacctgatccaaacctacagaatgcatattgcccaagacatcaaccaagacaacctgcagctcttcttgaattcctacaatggacgcagagacctggagatcgaaagacccatactgggccaaaatgataacaaatcaaaaacattaaagtgttctactttactggtggtaggggacaattcgcctgcagttgaggctgtggtcgaatgcaattcccgcctgaaccctataaatacaactttgctaaagatggcggactgtgggggactgccccaggtagttcagcctgggaagctcaccgaggccttcaagtactttttgcagggaatgggctacataccatctgccagcatgactcggctcgcccgatcacgaacccactcaacctcgagtagcctcggctctggagaaagtcccttcagccggtctgtcaccagcaatcagtcagatggaactcaagaatcctgtgagtcccctgatgtcctggacagacaccagaccatggaggtgtcctgctaagcagatgctcctcccctggaccattgcaagtccatccttcaaatgaccactccataatataacatttcatccagtaaactggcctctactatctttaactcatgcatggccactgaacctctctctagtagcctggatttatcattctctctgcctgcccacccccttttttgtatagcccaagaaccacttccatgccatactgtaacattccaacatctttagctgatcagatctctccatatcctctcttgccagctttttcccgtgctcccccaactatgtatcagataagattctttgatcccgactctgtgtgtgcgagcacgcgtgtctgtgtttgtgtgtgcatagttctgtggttttagacacgctttcttgtagtgcttctgcaaaaaacaaaaaagggacttattttgcattctcaatggtgtttttaagggaattaggcagaacagatttctaggttgggtaggccactgcattctcttttgtttgcaaattggtcaacaaaatttgcaaagtgatttcaggagagagcagctttgaggaatgtggaaaatcataattgccgtctggaccattgattgattgtgaccagtagcagaagggtgcctgttacatagagaggctccttctgtccaaatgaatttctgtatactcttctataaataaaagggaggaatatattctgctggaagcccatgaaccatcgctgaggttctgatacaacatagagttttttccaaggagtgaatgtggtttaattactggactctcttagcacaggaaggtggaaacaaaatgccaggcctctgctctgaagagcaaaactgctgtcgctgcagtatctgataccagacatccacatatccacaagaagtgcctcttaggtctgtgacagagagtgtgtctccattcctcagttcccagaaaggggagaggtttggcctaaaaagcatgtagatgggggagaaatgggtggggggagaggaacagccattaacacagtatcatgtttaacaagtatagccttgatttcagtagatgtaatggaagccaaattaaattgatacagaacccatttctcagagtctttttttttttttgagacagagtctcgctgttacccaggctggagtgcaatggcgcaaacttggctcactgcaacctctgccccctgggttcaagcgattctcctgcctcagcctcccgagtagctgagactacaggcacctgccaccatacccagctaagttatgtatttttagtagagatggagtttcaccatgttggccaggctggtctcaaactcctgacctcaggtgatccacctgcctcagcctcccaaagtgctgggattacaggcatgagtcattgctcccagccattagaaagattgttaatcctatgaactcccttttgtaggagagaaagggccaatctgtaggggtagccctgtccaggtaaagttgttttcagcctcatgtctactgttaggtgagggagtcacagccagacagagagtattgctggagggtgagagaattgtggagaccaactaccacatagcaagagcccagctcttgggagcattgagatgtaagctcagggttacacagttccaaatcttgggaaggggcttttcagacagactgtttgctttctgctgagataaggaatgcatcactctgccagagtatgactttttacagattattaaataaagctgcatatgtctcattgttacctga

SEQ ID NO: 2736 - DNA, 2917 bp, Homo sapiens
  source 1..2917: mol_type = genomic DNA
gacggcgggtgcccgcgcctcagagttactgatttattcttgagattcctctactctcgttatctgacctcatggatgaacttcaggatgttcagctcacagagatcaaaccacttctaaatgataaggaacatgatatagaaacaactcatggtgtggtccacgtcactataagaggcttacccaaaggaaacagaccagttatactaacatatcatgacattggcctcaaccataaatcctgtttcaatgcattctttaactttgaggatatgcaagagatcacccagcactttgctgtctgtcatgtggatgccccaggccagcaggaaggtgcaccctctttcccaacagggtatcagtaccccacaatggatgagctggctgaaatgctgcctcctgttcttacccacctaagcctgaaaagcatcattggaattggagttggagctggagcttacatcctcagcagatttgcactcaaccatccagagcttgtggaaggccttgtgctcattaatgttgacccttgcgctaaaggctggattgactgggcagcttccaaactctctggcctgacaaccaatgttgtggacattattttggctcatcactttgggcaggaagagttacaggccaacctggacctgatccaaacctacagaatgcatattgcccaagacatcaaccaagacaacctgcagctcttcttgaattcctacaatggacgcagagacctggagatcgaaagacccatactgggccaaaatgataacaaatcaaaaacattaaagtgttctactttactggtggtaggggacaattcgcctgcagttgaggctgtggtcgaatgcaattcccgcctgaaccctataaatacaactttgctaaagatggcggactgtgggggactgccccaggtagttcagcctgggaagctcaccgaggccttcaagtactttttgcagggaatgggctacataccatctgccagcatgactcggctcgcccgatcacgaacccactcaacctcgagtagcctcggctctggagaaagtcccttcagccggtctgtcaccagcaatcagtcagatggaactcaagaatcctgtgagtcccctgatgtcctggacagacaccagaccatggaggtgtcctgctaagcagatgctcctcccctggaccattgcaagtccatccttcaaatgaccactccataatataacatttcatccagtaaactggcctctactatctttaactcatgcatggccactgaacctctctctagtagcctggatttatcattctctctgcctgcccacccccttttttgtatagcccaagaaccacttccatgccatactgtaacattccaacatctttagctgatcagatctctccatatcctctcttgccagctttttcccgtgctcccccaactatgtatcagataagattctttgatcccgactctgtgtgtgcgagcacgcgtgtctgtgtttgtgtgtgcatagttctgtggttttagacacgctttcttgtagtgcttctgcaaaaaacaaaaaagggacttattttgcattctcaatggtgtttttaagggaattaggcagaacagatttctaggttgggtaggccactgcattctcttttgtttgcaaattggtcaacaaaatttgcaaagtgatttcaggagagagcagctttgaggaatgtggaaaatcataattgccgtctggaccattgattgattgtgaccagtagcagaagggtgcctgttacatagagaggctccttctgtccaaatgaatttctgtatactcttctataaataaaagggaggaatatattctgctggaagcccatgaaccatcgctgaggttctgatacaacatagagttttttccaaggagtgaatgtggtttaattactggactctcttagcacaggaaggtggaaacaaaatgccaggcctctgctctgaagagcaaaactgctgtcgctgcagtatctgataccagacatccacatatccacaagaagtgcctcttaggtctgtgacagagagtgtgtctccattcctcagttcccagaaaggggagaggtttggcctaaaaagcatgtagatgggggagaaatgggtggggggagaggaacagccattaacacagtatcatgtttaacaagtatagccttgatttcagtagatgtaatggaagccaaattaaattgatacagaacccatttctcagagtctttttttttttttgagacagagtctcgctgttacccaggctggagtgcaatggcgcaaacttggctcactgcaacctctgccccctgggttcaagcgattctcctgcctcagcctcccgagtagctgagactacaggcacctgccaccatacccagctaagttatgtatttttagtagagatggagtttcaccatgttggccaggctggtctcaaactcctgacctcaggtgatccacctgcctcagcctcccaaagtgctgggattacaggcatgagtcattgctcccagccattagaaagattgttaatcctatgaactcccttttgtaggagagaaagggccaatctgtaggggtagccctgtccaggtaaagttgttttcagcctcatgtctactgttaggtgagggagtcacagccagacagagagtattgctggagggtgagagaattgtggagaccaactaccacatagcaagagcccagctcttgggagcattgagatgtaagctcagggttacacagttccaaatcttgggaaggggcttttcagacagactgtttgctttctgctgagataaggaatgcatcactctgccagagtatgactttttacagattattaaataaagctgcatatgtctcattgttacctga

SEQ ID NO: 2737 - DNA, 2098 bp, Homo sapiens
  source 1..2098: mol_type = genomic DNA
tcagagttactgatttattcttgagattcctctactctcgttatctgacctcatggatgaacttcaggatgttcagctcacagagatcaaaccacttctaaatgataagaatggtacaagaaacttccaggactttgactgtcaggtatcagtaccccacaatggatgagctggctgaaatgctgcctcctgttcttacccacctaagcctgaaaagcatcattggaattggagttggagctggagcttacatcctcagcagatttgcactcaaccatccagagcttgtggaaggccttgtgctcattaatgttgacccttgcgctaaaggctggattgactgggcagcttccaaactctctggcctgacaaccaatgttgtggacattattttggctcatcactttgggcaggaagagttacaggccaacctggacctgatccaaacctacagaatgcatattgcccaagacatcaaccaagacaacctgcagctcttcttgaattcctacaatggacgcagagacctggagatcgaaagacccatactgggccaaaatgataacaaatcaaaaacattaaagtgttctactttactggtggtaggggacaattcgcctgcagttgaggctgtggtcgaatgcaattcccgcctgaaccctataaatacaactttgctaaagatggcggactgtgggggactgccccaggtagttcagcctgggaagctcaccgaggccttcaagtactttttgcagggaatgggctacataccatctgccagcatgactcggctcgcccgatcacgaacccactcaacctcgagtagcctcggctctggagaaagtcccttcagccggtctgtcaccagcaatcagtcagatggaactcaagaatcctgtgagtcccctgatgtcctggacagacaccagaccatggaggtgtcctgctaagcagatgctcctcccctggaccattgcaagtccatccttcaaatgaccactccataatataacatttcatccagtaaactggcctctactatctttaactcatgcatggccactgaacctctctctagtagcctggatttatcattctctctgcctgcccacccccttttttgtatagcccaagaaccacttccatgccatactgtaacattccaacatctttagctgatcagatctctccatatcctctcttgccagctttttcccgtgctcccccaactatgtatcagataagattctttgatcccgactctgtgtgtgcgagcacgcgtgtctgtgtttgtgtgtgcatagttctgtggttttagacacgctttcttgtagtgcttctgcaaaaaacaaaaaagggacttattttgcattctcaatggtgtttttaagggaattaggcagaacagatttctaggttgggtaggccactgcattctcttttgtttgcaaattggtcaacaaaatttgcaaagtgatttcaggagagagcagctttgaggaatgtggaaaatcataattgccgtctggaccattgattgattgtgaccagtagcagaagggtgcctgttacatagagaggctccttctgtccaaatgaatttctgtatactcttctataaataaaagggaggaatatattctgctggaagcccatgaaccatcgctgaggttctgatacaacatagagttttttccaaggagtgaatgtggtttaattactggactctcttagcacaggaaggtggaaacaaaatgccaggcctctgctctgaagagcaaaactgctgtcgctgcagtatctgataccagacatccacatatccacaagaagtgcctcttaggtctgtgacagagagtgtgtctccattcctcagttcccagaaaggggagaggtttggcctaaaaagcatgtagatgggggagaaatgggtggggggagaggaacagccattaacacagtatcatgtttaacaagtatagccttgatttcagtagatgtaatggaagccaaattaaattgatacagaacccatttctcagagtctttttttttttttgagacagagtctcgctgttacccaggctggagtgca

SEQ ID NO: 2738 - DNA, 1332 bp, Homo sapiens
  source 1..1332: mol_type = genomic DNA
actgacggcgggtgcccgcgcctcagagttactgatttattcttgagattcctctactctcgttatctgacctcatggatgaacttcaggatgttcagctcacagagatcaaaccacttctaaatgataaggtatcagtaccccacaatggatgagctggctgaaatgctgcctcctgttcttacccacctaagcctgaaaagcatcattggaattggagttggagctggagcttacatcctcagcagatttgcactcaaccatccagagcttgtggaaggccttgtgctcattaatgttgacccttgcgctaaaggctggattgactgggcagcttccaaactctctggcctgacaaccaatgttgtggacattattttggctcatcactttgggcaggaagagttacaggccaacctggacctgatccaaacctacagaatgcatattgcccaagacatcaaccaagacaacctgcagctcttcttgaattcctacaatggacgcagagacctggagatcgaaagacccatactgggccaaaatgataacaaatcaaaaacattaaagtgttctactttactggtggtaggggacaattcgcctgcagttgaggctgtggtcgaatgcaattcccgcctgaaccctataaatacaactttgctaaagatggcggactgtgggggactgccccaggtagttcagcctgggaagctcaccgaggccttcaagtactttttgcagggaatgggctacataccatctgccagcatgactcggctcgcccgatcacgaacccactcaacctcgagtagcctcggctctggagaaagtcccttcagccggtctgtcaccagcaatcagtcagatggaactcaagaatcctgtgagtcccctgatgtcctggacagacaccagaccatggaggtgtcctgctaagcagatgctcctcccctggaccattgcaagtccatccttcaaatgaccactccataatataacatttcatccagtaaactggcctctactatctttaactcatgcatggccactgaacctctctctagtagcctggatttatcattctctctgcctgcccacccccttttttgtatagcccaagaaccacttccatgccatactgtaacattccaacatctttagctgatcagatctctccatatcctctcttgccagctttttcccgtgctcccccaactatgtatcagataagattctttgatcccgactctgtgtgtgcgagcacgcgtgtctgtgtttgtgtgtgcatagttctgtggttttagacacgctttcttgtagtgcttctgc

SEQ ID NO: 2739 - DNA, 1340 bp, Homo sapiens
  source 1..1340: mol_type = genomic DNA
atgcctgagggccccgagctgcacctggccagccagtttgtgaatgaggcctgcagggcgctggtgttcggcggctgcgtggagaagtcctctgtcagccgcaaccctgaggtgccctttgagagcagtgcctaccgcatctcagcttcagcccgcggcaaggagctgcgcctgatactgagccctctgcctggggcccagccccaacaggagccacgtgccccgcgaggagctgccacgccatgcccacctgcgcttttacacggccccgcctggcccccggctcgccctatgtttcgtggacatccgccggttcggccgctgggaccttgggggaaagtggcagccgggccgcgggccctgtgtcttgcaggagtaccagcagttcagggagaatgtgctacgaaacctagcggataaggcctttgaccggcccatctgcgaggccctcctggaccagaggttcttcaatggcattggcaactatctgcgggcagagatcctgtaccggctgaagatccccccctttgagaaggcccgctcggtcctggaggccctgcagcagcacaggccgagcccggagctgaccctgagccagaagataaggaccaagctgcagaatccagacctgctggagctatgtcactcagtgcccaaggaagtggtccagttggggggcaaaggctacgggtcagagagcggggaggaggactttgctgcctttcgagcctggctgcgctgctatggcatgccaggcatgagctccctgcaggaccggcatggccgtaccatctggttccagggggatcctggaccgttggcacccaaagggcgcaagtcccgcaaaaagaaatccaaggccacacagctgagtcctgaggacagagtggaggacgctttgcctccaagcaaggccccttccaggacacgaagggcaaagagagaccttcctaagaggactgcaacccagcggcctgaggggaccagcctccagcaggacccagaagctcccacagtgcccaagaaggggaggaggaaggggcgacaggcagcctctggccactgcagaccccggaaggtcaaggctgacatcccatccttggaaccagaggggacctcagcctcttagcaggaggctctccttgcttgcactcaccctttcttattgtcttgccctgcatctgggggtctgaatttttgggagcaggcaatatctgaaggtgcaaacaggccctacggctgttccctgcacaactctcatggttttaattgtaccccatcttccacatctttaaagctcatgtgaaaaatgctgcatttttaataaactgatacatttg

SEQ ID NO: 2740 - DNA, 1896 bp, Homo sapiens
  source 1..1896: mol_type = genomic DNA
ctctttctcgcctcagggcctttgtactggcggttccttccgccggacacgtcgggtttcctcgtttttgcggactggcgctttctgatttcagagactctccgcaacagaaccatctcaagtgggtctacctcctcgcctttttttgttgttgttgttgcttggctgcgcttctgacagggcaggccgtgatgatgtttgtttatgagttaggtctgactgttcgttggtgcttaagatccccaccgggtccctagggcctgtgcgtaccgcgcacctgtgcacgtcctgcgcgcagctgcaggcgactccgctctggctcgtcgctgctgtttcctgctgggggtgccgaccctgtcccacgctagctgggtgacttcccccaaccgcagagacagcggcgacccggggcctcagacctgcccccgcatctcgccggcgccaggcagtgggaagtcaggttcttccgccacctcccagccaggactctgccaccctccctcaggatgcctgagggccccgagctgcacctggccagccagtttgtgaatgaggcctgcagggcgctggtgttcggcggctgcgtggagaagtcctctgtcagccgcaaccctgaggtgccctttgagagcagtgcctaccgcatctcagcttcagcccgcggcaaggagctgcgcctgatactgagccctctgcctggggcccagccccaacaggagccactggccctggtcttccgcttcggcatgtccggctcttttcagctggtgccccgcgaggagctgccacgccatgcccacctgcgcttttacacggccccgcctggcccccggctcgccctatgtttcgtggacatccgccggttcggccgctgggaccttgggggaaagtggcagccgggccgcgggccctgtgtcttgcaggagtaccagcagttcagggagaatgtgctacgaaacctagcggataaggcctttgaccggcccatctgcgaggccctcctggaccagaggttcttcaatggcattggcaactatctgcgggcagagatcctgtaccggctgaagatccccccctttgagaaggcccgctcggtcctggaggccctgcagcagcacaggccgagcccggagctgaccctgagccagaagataaggaccaagctgcagaatccagacctgctggagctatgtcactcagtgcccaaggaagtggtccagttggggggcaaaggctacgggtcagagagcggggaggaggactttgctgcctttcgagcctggctgcgctgctatggcatgccaggcatgagctccctgcaggaccggcatggccgtaccatctggttccagggggatcctggaccgttggcacccaaagggcgcaagtcccgcaaaaagaaatccaaggccacacagctgagtcctgaggacagagtggaggacgctttgcctccaagcaaggccccttccaggacacgaagggcaaagagagaccttcctaagaggactgcaacccagcggcctgaggggaccagcctccagcaggacccagaagctcccacagtgcccaagaaggggaggaggaaggggcgacaggcagcctctggccactgcagaccccggaaggtcaaggctgacatcccatccttggaaccagaggggacctcagcctcttagcaggaggctctccttgcttgcactcaccctttcttattgtcttgccctgcatctgggggtctgaatttttgggagcaggcaatatctgaaggtgcaaacaggccctacggctgttccctgcacaactctcatggttttaattgtaccccatcttccacatctttaaagctcatgtgaaaaatgctgcatttttaataaactgatacatttgaacttc

SEQ ID NO: 2741 - DNA, 1797 bp, Homo sapiens
  source 1..1797: mol_type = genomic DNA
cgacgagcggaacggagtgcgggttcccggggagggggcgtgcaggatcgggttgtggggggtgcgctgtagggctaaggagaagatgagctttggggggccctgaggaggaggggagtcaggattaaccgaggacagggtcgcagcgggggcatggggaggacgggcccgagagcgccgctcctccccaaaactaggatttggagcctcacgttctcccgcaaaacgagccctgtgggtgccaggccaggggcggctcccaggtgtggagggggcaaggtacgggcgtctgccgtcgctaagtgcccccttccacttaaggcacaccttcgcctccgattccgaaccgcccggggacagaggcaagtggcaaagcagggagggcggaggactctgccaccctccctcaggatgcctgagggccccgagctgcacctggccagccagtttgtgaatgaggcctgcagggcgctggtgttcggcggctgcgtggagaagtcctctgtcagccgcaaccctgaggtgccctttgagagcagtgcctaccgcatctcagcttcagcccgcggcaaggagctgcgcctgatactgagccctctgcctggggcccagccccaacaggagccactggccctggtcttccgcttcggcatgtccggctcttttcagctggtgccccgcgaggagctgccacgccatgcccacctgcgcttttacacggccccgcctggcccccggctcgccctatgtttcgtggacatccgccggttcggccgctgggaccttgggggaaagtggcagccgggccgcgggccctgtgtcttgcaggagtaccagcagttcagggagaatgtgctacgaaacctagcggataaggcctttgaccggcccatctgcgaggccctcctggaccagaggttcttcaatggcattggcaactatctgcgggcagagatcctgtaccggctgaagatccccccctttgagaaggcccgctcggtcctggaggccctgcagcagcacaggccgagcccggagctgaccctgagccagaagataaggaccaagctgcagaatccagacctgctggagctatgtcactcagtgcccaaggaagtggtccagttggggggcaaaggctacgggtcagagagcggggaggaggactttgctgcctttcgagcctggctgcgctgctatggcatgccaggcatgagctccctgcaggaccggcatggccgtaccatctggttccagggggatcctggaccgttggcacccaaagggcgcaagtcccgcaaaaagaaatccaaggccacacagctgagtcctgaggacagagtggaggacgctttgcctccaagcaaggccccttccaggacacgaagggcaaagagagaccttcctaagaggactgcaacccagcggcctgaggggaccagcctccagcaggacccagaagctcccacagtgcccaagaaggggaggaggaaggggcgacaggcagcctctggccactgcagaccccggaaggtcaaggctgacatcccatccttggaaccagaggggacctcagcctcttagcaggaggctctccttgcttgcactcaccctttcttattgtcttgccctgcatctgggggtctgaatttttgggagcaggcaatatctgaaggtgcaaacaggccctacggctgttccctgcacaactctcatggttttaattgtaccccatcttccacatctttaaagctcatgtgaaaaatgctgcatttttaataaactgatacatttgaa

SEQ ID NO: 2742 - DNA, 2671 bp, Homo sapiens
  source 1..2671: mol_type = genomic DNA
gcgggctgcgtagcggtgctgggtcgggccgacgtgccacccacccggagccggtgagtgcagccgcccgccctccggtagatctgcggcctggcggagaagtcgggaggggacaggaagggagggcgggccccgggccctcctccgtctcagccgcctgcggaggtgctgcccacgcctggaggcccccactgaccctcagacccgcgtctgcgcccctctccccgcaccccgaggcagagttgggaaagcagtggtcttagaccccccacctcgggcactcggaagagaacggcggagacaacccctcctcttccctggctggcgcagcgccagcctcgagctcctcggtagcccccgggcagggagggccggagggtgggcgcggcatcttcagcgactcttcgaagtcccttccgcgtctcatctttcaaggctgttgcagaggcggcttgcttcccacctgtccatctccataaaaatccctaaacgaaacatgcccacgtgtccggagattttcaggacttggtgcatttcagatgaaggcttttccagaagcttccccgtagaagaggatcaggcatccaactggttaagggatgccagaagggccgttggtgaggaaatttcaccatttggtctccccctttgtgggtcagcaggtggtcaagacagggggcagcagtaagaagctacagcccgccagcctgcagtctctgtggctccaggacacccaggtccatggaaagaaattattccttagatttgatctagatgaagaaatggggccccctggcagcagcccaacaccagagcctccacaaaaagaagtgcagaaggaaggggctgcggacccaaagcaggtcggggagcccagcgggcagaagacccttgatggatcctcacggtctgcagagctcgtcccccagggcgaggatgattctgagtatttggagagagacgcccctgcaggagatgctgggaggtggctgcgtgtcagctttggtttgtttggcagcgtttgggtgaacgatttctccagagccaagaaagccaacaagaggggggactggagggacccttccccgaggttggtcctgcactttggtggtggtggcttcctggcattttataattgtcagttgtcttggagctcttccccagtggtcacacccacctgtgacatcctgtctgagaagttccatcgaggacaagccttagaagctctaggccaggctcagcctgtctgctatacactgctggaccagagatacttctcagggctagggaacatcattaagaatgaagccttgtacagagctgggatccatcccctttctctcggttcagtcctgagtgcctcgcgtcgggaggtcctggtggatcacgtggtggagttcagtacagcctggctgcagggcaagttccaaggcagaccgcagcacacacaggtctaccagaaagaacagtgccctgctggccaccaggtcatgaaggaggcgtttgggcccgaagatgggttacagaggctcacctggtggtgcccgcagtgccagccccagttgtcagaggagccagagcagtgccagttctcctaaggagctggtggtgctcctcacggaaccttgccgcttggggaacctgacgtctaagtgtccagaaaggaggatgtgggcagggacggggtacagaggatagtgtgggtcagaggtgccagtagtataatattcgtctccctggagttatgttgaaggcagagttttcatagggttagattttttttatccttttctagttcagttaattcatcctgttgaattgcaccatcgtgaaagatgggaaaaatcgtgatgatgggtaaggggaaaacttcccggaaggcaatggggcaaggaaaaagaaagcctatgggaaatggctgtgctcccaacatagctttgcagatgatgtgggttttttttttttttttggttgtttgttttgagagagagtcttgctctgtctccctggctagggtgtggtggtgtgatcttggctcacggcagccttgccctccctggctcaagcagtcttcatctcagcctccagagtagctgggactacaggcatgtgatatgatgctcggctgatttttgtttactttttagagagatggggtcttgccatatttgccaggctggtttgaactcctacaactcaagcattcctcccaccttggtctcccaaaatgttgggaccacgggtgtgagccaccgcgcccagctagctcctgtgttttgtttttgttttgtaactttggttgatgttaaggccctccattttggaaagcaggaaaacaggatttttttttttttatcttgttccctggaggatccagggatgaggatagagtggcctgagagcagtgcttggattcagcctcctgctgggtccttctgctggatacaggcaccaagaggcggtcgtggagcagggagctgcgccttcctggggtgcccggtggtgtgtagagaaaagctgcttgtttactccttaagtcaatgtattggtgactgttgatttgttgaacaattcaggaatcaagggctgtggagaaactccctcatgttgttggcaacaggtgaatgaacctagagcggtgacatgaaaataaagctcactgttactcgct

SEQ ID NO: 2743 - DNA, 2026 bp, Homo sapiens
  source 1..2026: mol_type = genomic DNA
atgccagaagggccgttggtgaggaaatttcaccatttggtctccccctttgtgggtcagcaggtggtcaagacagggggcagcagtaagaagctacagcccgccagcctgcagtctctgtggctccaggacacccaggtccatggaaagaaattattccttagatttgatctagatgaagaaatggggccccctggcagcagcccaacaccagagcctccacaaaaagaagtgcagaagaagacccttgatggatcctcacggtctgcagagctcgtcccccagggcgaggatgattctgagtatttggagagagacgcccctgcaggagatgctgggaggtggctgcgtgtcagctttggtttgtttggcagcgtttgggtgaacgatttctccagagccaagaaagccaacaagaggggggactggagggacccttccccgaggttggtcctgcactttggtggtggtggcttcctggcattttataattgtcagttgtcttggagctcttccccagtggtcacacccacctgtgacatcctgtctgagaagttccatcgaggacaagccttagaagctctaggccaggctcagcctgtctgctatacactgctggaccagagatacttctcagggctagggaacatcattaagaatgaagccttgtacagagctgggatccatcccctttctctcggttcagtcctgagtgcctcgcgtcgggaggtcctggtggatcacgtggtggagttcagtacagcctggctgcagggcaagttccaaggcagaccgcagcacacacaggtctaccagaaagaacagtgccctgctggccaccaggtcatgaaggaggcgtttgggcccgaagatgggttacagaggctcacctggtggtgcccgcagtgccagccccagttgtcagaggagccagagcagtgccagttctcctaaggagctggtggtgctcctcacggaaccttgccgcttggggaacctgacgtctaagtgtccagaaaggaggatgtgggcagggacggggtacagaggatagtgtgggtcagaggtgccagtagtataatattcgtctccctggagttatgttgaaggcagagttttcatagggttagattttttttatccttttctagttcagttaattcatcctgttgaattgcaccatcgtgaaagatgggaaaaatcgtgatgatgggtaaggggaaaacttcccggaaggcaatggggcaaggaaaaagaaagcctatgggaaatggctgtgctcccaacatagctttgcagatgatgtgggttttttttttttttttggttgtttgttttgagagagagtcttgctctgtctccctggctagggtgtggtggtgtgatcttggctcacggcagccttgccctccctggctcaagcagtcttcatctcagcctccagagtagctgggactacaggcatgtgatatgatgctcggctgatttttgtttactttttagagagatggggtcttgccatatttgccaggctggtttgaactcctacaactcaagcattcctcccaccttggtctcccaaaatgttgggaccacgggtgtgagccaccgcgcccagctagctcctgtgttttgtttttgttttgtaactttggttgatgttaaggccctccattttggaaagcaggaaaacaggatttttttttttttatcttgttccctggaggatccagggatgaggatagagtggcctgagagcagtgcttggattcagcctcctgctgggtccttctgctggatacaggcaccaagaggcggtcgtggagcagggagctgcgccttcctggggtgcccggtggtgtgtagagaaaagctgcttgtttactccttaagtcaatgtattggtgactgttgatttgttgaacaattcaggaatcaagggctgtggagaaactccctcatgttgttggcaacaggtgaatgaacctagagcggtgacatgaaaataaagctcactgttactcgc

SEQ ID NO: 2744 - DNA, 2016 bp, Homo sapiens
  source 1..2016: mol_type = genomic DNA
gaaatctccgcccccagctggagcggctgtgcgggctgcgtagcggtgctgggtcgggccgacgtgccacccacccggagccggtccatggaaagaaattattccttagatttgatctagatgaagaaatggggccccctggcagcagcccaacaccagagcctccacaaaaagaagtgcagaaggaaggggctgcggacccaaagcaggtcggggagcccagcgggcagaagacccttgatggatcctcacggtctgcagagctcgtcccccagggcgaggatgattctgagtatttggagagagacgcccctgcaggagatgctgggaggtggctgcgtgtcagctttggtttgtttggcagcgtttgggtgaacgatttctccagagccaagaaagccaacaagaggggggactggagggacccttccccgaggttggtcctgcactttggtggtggtggcttcctggcattttataattgtcagttgtcttggagctcttccccagtggtcacacccacctgtgacatcctgtctgagaagttccatcgaggacaagccttagaagctctaggccaggctcagcctgtctgctatacactgctggaccagagatacttctcagggctagggaacatcattaagaatgaagccttgtacagagctgggatccatcccctttctctcggttcagtcctgagtgcctcgcgtcgggaggtcctggtggatcacgtggtggagttcagtacagcctggctgcagggcaagttccaaggcagaccgcagcacacacaggtctaccagaaagaacagtgccctgctggccaccaggtcatgaaggaggcgtttgggcccgaagatgggttacagaggctcacctggtggtgcccgcagtgccagccccagttgtcagaggagccagagcagtgccagttctcctaaggagctggtggtgctcctcacggaaccttgccgcttggggaacctgacgtctaagtgtccagaaaggaggatgtgggcagggacggggtacagaggatagtgtgggtcagaggtgccagtagtataatattcgtctccctggagttatgttgaaggcagagttttcatagggttagattttttttatccttttctagttcagttaattcatcctgttgaattgcaccatcgtgaaagatgggaaaaatcgtgatgatgggtaaggggaaaacttcccggaaggcaatggggcaaggaaaaagaaagcctatgggaaatggctgtgctcccaacatagctttgcagatgatgtgggttttttttttttttttggttgtttgttttgagagagagtcttgctctgtctccctggctagggtgtggtggtgtgatcttggctcacggcagccttgccctccctggctcaagcagtcttcatctcagcctccagagtagctgggactacaggcatgtgatatgatgctcggctgatttttgtttactttttagagagatggggtcttgccatatttgccaggctggtttgaactcctacaactcaagcattcctcccaccttggtctcccaaaatgttgggaccacgggtgtgagccaccgcgcccagctagctcctgtgttttgtttttgttttgtaactttggttgatgttaaggccctccattttggaaagcaggaaaacaggatttttttttttttatcttgttccctggaggatccagggatgaggatagagtggcctgagagcagtgcttggattcagcctcctgctgggtccttctgctggatacaggcaccaagaggcggtcgtggagcagggagctgcgccttcctggggtgcccggtggtgtgtagagaaaagctgcttgtttactccttaagtcaatgtattggtgactgttgatttgttgaacaattcaggaatcaagggctgtggagaaactccctcatgttgttggcaacaggtgaatgaacctagagcggtgacatgaaaataaagctcactgttactcgc

SEQ ID NO: 2745 - DNA, 2128 bp, Homo sapiens
  source 1..2128: mol_type = genomic DNA
gtgcgggctgcgtagcggtgctgggtcgggccgacgtgccacccacccggagccgggatgccagaagggccgttggtgaggaaatttcaccatttggtctccccctttgtgggtcagcaggtggtcaagacagggggcagcagtaagaagctacagcccgccagcctgcagtctctgtggctccaggacacccaggtccatggaaagaaattattccttagatttgatctagatgaagaaatggggccccctggcagcagcccaacaccagagcctccacaaaaagaagtgcagaaggaaggggctgcggacccaaagcaggtcggggagcccagcgggcagaagacccttgatggatcctcacggtctgcagagctcgtcccccagggcgaggatgattctgagtatttggagagagacgcccctgcaggagatgctgggaggtggctgcgtgtcagctttggtttgtttggcagcgtttgggtgaacgatttctccagagccaagaaagccaacaagaggggggactggagggacccttccccgaggttggtcctgcactttggtggtggtggcttcctggcattttataattgtcagttgtcttggagctcttccccagtggtcacacccacctgtgacatcctgtctgagaagttccatcgaggacaagccttagaagctctaggccaggctcagcctgtctgctatacactgctggaccagagatacttctcagggctagggaacatcattaagaatgaagccttgtacagagctgggatccatcccctttctctcggttcagtcctgagtgcctcgcgtcgggaggtcctggtggatcacgtggtggagttcagtacagcctggctgcagggcaagttccaaggcagaccgcagcacacacaggtctaccagaaagaacagtgccctgctggccaccaggtcatgaaggaggcgtttgggcccgaagatgggttacagaggctcacctggtggtgcccgcagtgccagccccagttgtcagaggagccagagcagtgccagttctcctaaggagctggtggtgctcctcacggaaccttgccgcttggggaacctgacgtctaagtgtccagaaaggaggatgtgggcagggacggggtacagaggatagtgtgggtcagaggtgccagtagtataatattcgtctccctggagttatgttgaaggcagagttttcatagggttagattttttttatccttttctagttcagttaattcatcctgttgaattgcaccatcgtgaaagatgggaaaaatcgtgatgatgggtaaggggaaaacttcccggaaggcaatggggcaaggaaaaagaaagcctatgggaaatggctgtgctcccaacatagctttgcagatgatgtgggttttttttttttttttggttgtttgttttgagagagagtcttgctctgtctccctggctagggtgtggtggtgtgatcttggctcacggcagccttgccctccctggctcaagcagtcttcatctcagcctccagagtagctgggactacaggcatgtgatatgatgctcggctgatttttgtttactttttagagagatggggtcttgccatatttgccaggctggtttgaactcctacaactcaagcattcctcccaccttggtctcccaaaatgttgggaccacgggtgtgagccaccgcgcccagctagctcctgtgttttgtttttgttttgtaactttggttgatgttaaggccctccattttggaaagcaggaaaacaggatttttttttttttatcttgttccctggaggatccagggatgaggatagagtggcctgagagcagtgcttggattcagcctcctgctgggtccttctgctggatacaggcaccaagaggcggtcgtggagcagggagctgcgccttcctggggtgcccggtggtgtgtagagaaaagctgcttgtttactccttaagtcaatgtattggtgactgttgatttgttgaacaattcaggaatcaagggctgtggagaaactccctcatgttgttggcaacaggtgaatgaacctagagcggtgacatgaaaataaagctcactgttactcgc

SEQ ID NO: 2746 - DNA, 2323 bp, Homo sapiens
  source 1..2323: mol_type = genomic DNA
gccgagccgggaaatctccgcccccagctggagcggctgtgcgggctgcgtagcggtgctgggtcgggccgacgtgccacccacccggagccggctgttgcagaggcggcttgcttcccacctgtccatctccataaaaatccctaaacgaaacatgcccacgtgtccggagattttcaggacttggtgcatttcagatgaaggcttttccagaagcttccccgtagaagaggatcaggcatccaactggttaagggatgccagaagggccgttggtgaggaaatttcaccatttggtctccccctttgtgggtcagcaggtggtcaagacagggggcagcagtaagaagctacagcccgccagcctgcagtctctgtggctccaggacacccaggtccatggaaagaaattattccttagatttgatctagatgaagaaatggggccccctggcagcagcccaacaccagagcctccacaaaaagaagtgcagaaggaaggggctgcggacccaaagcaggtcggggagcccagcgggcagaagacccttgatggatcctcacggtctgcagagctcgtcccccagggcgaggatgattctgagtatttggagagagacgcccctgcaggagatgctgggaggtggctgcgtgtcagctttggtttgtttggcagcgtttgggtgaacgatttctccagagccaagaaagccaacaagaggggggactggagggacccttccccgaggttggtcctgcactttggtggtggtggcttcctggcattttataattgtcagttgtcttggagctcttccccagtggtcacacccacctgtgacatcctgtctgagaagttccatcgaggacaagccttagaagctctaggccaggctcagcctgtctgctatacactgctggaccagagatacttctcagggctagggaacatcattaagaatgaagccttgtacagagctgggatccatcccctttctctcggttcagtcctgagtgcctcgcgtcgggaggtcctggtggatcacgtggtggagttcagtacagcctggctgcagggcaagttccaaggcagaccgcagcacacacaggtctaccagaaagaacagtgccctgctggccaccaggtcatgaaggaggcgtttgggcccgaagatgggttacagaggctcacctggtggtgcccgcagtgccagccccagttgtcagaggagccagagcagtgccagttctcctaaggagctggtggtgctcctcacggaaccttgccgcttggggaacctgacgtctaagtgtccagaaaggaggatgtgggcagggacggggtacagaggatagtgtgggtcagaggtgccagtagtataatattcgtctccctggagttatgttgaaggcagagttttcatagggttagattttttttatccttttctagttcagttaattcatcctgttgaattgcaccatcgtgaaagatgggaaaaatcgtgatgatgggtaaggggaaaacttcccggaaggcaatggggcaaggaaaaagaaagcctatgggaaatggctgtgctcccaacatagctttgcagatgatgtgggttttttttttttttttggttgtttgttttgagagagagtcttgctctgtctccctggctagggtgtggtggtgtgatcttggctcacggcagccttgccctccctggctcaagcagtcttcatctcagcctccagagtagctgggactacaggcatgtgatatgatgctcggctgatttttgtttactttttagagagatggggtcttgccatatttgccaggctggtttgaactcctacaactcaagcattcctcccaccttggtctcccaaaatgttgggaccacgggtgtgagccaccgcgcccagctagctcctgtgttttgtttttgttttgtaactttggttgatgttaaggccctccattttggaaagcaggaaaacaggatttttttttttttatcttgttccctggaggatccagggatgaggatagagtggcctgagagcagtgcttggattcagcctcctgctgggtccttctgctggatacaggcaccaagaggcggtcgtggagcagggagctgcgccttcctggggtgcccggtggtgtgtagagaaaagctgcttgtttactccttaagtcaatgtattggtgactgttgatttgttgaacaattcaggaatcaagggctgtggagaaactccctcatgttgttggcaacaggtgaatgaacctagagcggtgacatgaaaataaagctcactgtta

SEQ ID NO: 2747 - DNA, 998 bp, Homo sapiens
  source 1..998: mol_type = genomic DNA
aaatctccgcccccagctggagcggctgtgcgggctgcgtagcggtgctgggtcgggccgacgtgccacccacccggagccggctgttgcagaggcggcttgcttcccacctgtccatctccataaaaatccctaaacgaaacatgcccacgtgtccggagattttcaggacttggtgcatttcagatgaaggcttttccagaagcttccccgtagaagaggatcaggcatccaactggttaagggatgccagaagggccgttggtgaggaaatttcaccatttggtctccccctttgtgggtcagcaggtggtcaagacagggggcagcagtaagaagctacagcccgccagcctgcagtctctgtggctccaggacacccaggtgaggttggtcctgcactttggtggtggtggcttcctggcattttataattgtcagttgtcttggagctcttccccagtggtcacacccacctgtgacatcctgtctgagaagttccatcgaggacaagccttagaagctctaggccaggctcagcctgtctgctatacactgctggaccagagatacttctcagggctagggaacatcattaagaatgaagccttgtacagagctgggatccatcccctttctctcggttcagtcctgagtgcctcgcgtcgggaggtcctggtggatcacgtggtggagttcagtacagcctggctgcagggcaagttccaaggcagaccgcagcacacacaggtctaccagaaagaacagtgccctgctggccaccaggtcatgaaggaggcgtttgggcccgaagatgggttacagaggctcacctggtggtgcccgcagtgccagccccagttgtcagaggagccagagcagtgccagttctcctaaggagctggtggtgctcctcacggaaccttgccgcttggggaacctgacgtctaagtgtccagaaaggaggatgtgggcagggacggggtacagaggatagt

SEQ ID NO: 2748 - DNA, 2408 bp, Homo sapiens
  source 1..2408: mol_type = genomic DNA
agacgcgcgcgagatttgaatttcctctgcgtgcggtcagtgcccgcgcagcgttgagttgcacagcggtattctcaccaggccctgcaatcggtgggccacagtgccggccacagagatggtggaaggaccaggctgtactctgaatggagagaagattcgcgcgcgggtgctcccgggccaggcggtgaccggcgtgcggggaagcgctctgcggagtctgcagggccgcgccttgcggctcgcagcctccacggttgtggtctccccgcaggctgctgcactgaataatgattccagccagaatgtcttgagcctgtttaatggatatgtttacagtggcgtggaaactttggggaaggagctctttatgtactttggaccaaaagctttacggattcatttcggaatgaaaggcttcatcatgattaatccacttgagtataaatataaaaatggagcttctcctgttttggaagtgcagctcaccaaagatttgatttgtttctttgactcatcagtagaactcagaaactcaatggaaagccaacagagaataagaatgatgaaagaattagatgtatgttcacctgaatttagtttcttgagagcagaaagtgaagttaaaaaacagaaaggccggatgctaggtgatgtgctaatggatcagaacgtattgcctggagtagggaacatcatcaaaaatgaagctctctttgacagtggtctccacccagctgttaaagtttgtcaattaacagatgaacagatccatcacctcatgaaaatgatacgtgatttcagcattctcttttacaggtgccgtaaagcaggacttgctctctctaaacactataaggtttacaagcgtcctaattgtggtcagtgccactgcagaataactgtgtgccgctttggggacaataacagaatgacatatttctgtcctcactgtcaaaaagaaaatcctcaacatgttgacatatgcaagctaccgactagaaatactataatcagttggacatctagcagggtggatcatgttatggactccgtggctcggaagtcggaagagcactggacctgtgtggtgtgtactttaatcaataagccctcttctaaggcatgtgatgcttgcttgacctcaaggcctattgattcagtgctcaagagtgaagaaaattctactgtctttagccacttaatgaagtacccgtgtaatacttttggaaaacctcatacagaagtcaagatcaacagaaaaactgcatttggaactacaactcttgtcttgactgattttagcaataaatccagtactttggaaagaaaaacaaagcaaaaccagatactagatgaggagtttcaaaactctcctcctgctagtgtttgtttgaatgatatacagcacccctccaagaagacaacaaacgatataactcaaccatccagcaaagtaaacatatcacctacaatcagttcagaatctaaattatttagtccagcacataaaaaaccgaaaacagcccaatactcatcaccagagcttaaaagctgcaaccctggatattctaacagtgaacttcaaattaatatgacagatggccctcgtaccttaaatcctgacagccctcgctgcagtaaacacaaccgcctctgcattctccgagttgtggggaaggatggggaaaacaagggcaggcagttttatgcctgtcctctacctagagaagcacaatgtggattttttgaatgggcagatttgtccttcccattctgcaaccatggcaagcgttccaccatgaaaacagtattgaagattggacctaacaatggaaagaatttttttgtgtgtcctcttgggaaggaaaaacaatgcaattttttccagtgggcagaaaatgggccaggaataaaaattattcctggatgctaatatctgtagattctctggcatttagtctcttcaaactgtgtataatgtttggtcctcctctgtttcatagaaaagtcatagaatatctatgatacattgaaaagttactgcaatatttgagaactgttctttttttttcttgtgtgtgccatctttccattgttggctacgtcttttcttttgccttgatgaacgttctatgtatttcatcggatatacagcatattccatttaggatgtgtatttaatgcatttagtaatgacgataaagtgtttttagtatgcttttagtctcttgtaactggggagaagcagtgttttttttttaggaaaggattatgcgacacaataaaataagatattctgtctgtagtgaatacatttctcatgtactaacactatttataatatatgattaaagatatttcttgttttattaaataataagaaataagatctcctttatgaacaa

SEQ ID NO: 2749 - DNA, 1986 bp, Homo sapiens
  source 1..1986: mol_type = genomic DNA
gaggacgcgccaacatccccgctgctgtgctgggcccggggcgtgcccgccgctgctcccacctctgggccgggctggggccgcccgggggccctgttcctcggcattgcgggcctggtgggcagagccgcggagagggcttcttttccccaagggcagcgtcttggggcccggccactggctgacccgcagcggctccggccatgcctggctggccctgggggctgctgctgacggcaggcacgctcttcgccgccctgagtcctgggccgccggcgcccgccgacccctgccacgatgaggggggtgcgccccgcggctgcgtgccaggactggtgaacgccgccctgggccgcgaggtgctggcttccagcacgtgcgggcggccggccactcgggcctgcgacgcctccgacccgcgacgggcacactcccccgccctccttacttccccagggggcacggccagccctctgtgctggcgctcggagtccctgcctcgggcgcccctcaacgtgactctcacggtgcccctgggcaaggcttttgagctggtcttcgtgagcctgcgcttctgctcagctcccccagcctccgtggccctgctcaagtctcaggaccatggccgcagctgggccccgctgggcttcttctcctcccactgtgacctggactatggccgtctgcctgcccctgccaatggcccagctggcccagggcctgaggccctgtgcttccccgcacccctggcccagcctgatggcagcggccttctggccttcagcatgcaggacagcagccccccaggcctggacctggacagcagcccagtgctccaagactgggtgaccgccaccgacgtccgtgtagtgctcacaaggcctagcacggcaggtgaccccagggacatggaggccgtcgtcccttactcctacgcagccaccgacctccaggtgggcgggcgctgcaagtgcaatggacatgcctcacggtgcctgctggacacacagggccacctgatctgcgactgtcggcatggcaccgagggccctgactgcggccgctgcaagcccttctactgcgacaggccatggcagcgggccactgcccgggaatcccacgcctgcctcgcttgctcctgcaacggccatgcccgccgctgccgcttcaacatggagctgtaccgactgtccggccgccgcagcgggggtgtctgtctcaactgccggcacaacaccgccggccgccactgccactactgccgggagggcttctatcgagaccctggccgtgccctgagtgaccgtcgggcttgcagggcctgcgactgtcacccggttggtgctgctggcaagacctgcaaccagaccacaggccagtgtccctgcaaggatggcgtcactggcctcacctgcaaccgctgcgcgcctggcttccagcaaagccgctccccagtggcgccctgtgttaagacccctatccctggacccactgaggacagcagccctgtgcagccccaggactgtgactcgcactgcaaacctgcccgtggcagctaccgcatcagcctaaagaagttctgcaagaaggactatgcggtgcaggtggcggtgggtgcgcgcggcgaggcgcgcggcgcgtggacacgcttcccggtggcggtgctcgccgtgttccggagcggagaggagcgcgcgcggcgcgggagtagcgcgctgtgggtgcccgccggggatgcggcctgcggctgcccgcgcctgctccccggccgccgctacctcctgctggggggcgggcctggagccgcggctgggggcgcggggggccgggggcccgggctcatcgccgcccgcggaagcctcgtgctaccctggagggacgcgtggacgcggcgcctgcggaggctgcagcgacgcgaacggcgggggcgctgcagcgccgcctgagcccgccggctgggcagggcggccgctgctcccacatcta

SEQ ID NO: 2750 - DNA, 5571 bp, Homo sapiens
  source 1..5571: mol_type = genomic DNA
ttgttttgttttgttttttcagtttctctgcaggtggatattgttcccagccagggggagatcagcgttggagagtccaaattcttcttatgccaagtggcaggagatgccaaagataaagacatctcctggttctcccccaatggagaaaagctcaccccaaaccagcagcggatctcagtggtgtggaatgatgattcctcctccaccctcaccatctataacgccaacatcgacgacgccggcatttacaagtgtgtggttacaggcgaggatggcagtgagtcagaggccaccgtcaacgtgaagatctttcagaagctcatgttcaagaatgcgccaaccccacaggagttccgggagggggaagatgccgtgattgtgtgtgatgtggtcagctccctcccaccaaccatcatctggaaacacaaaggccgagatgtcatcctgaaaaaagatgtccgattcatagtcctgtccaacaactacctgcagatccggggcatcaagaaaacagatgagggcacttatcgctgtgagggcagaatcctggcacggggggagatcaacttcaaggacattcaggtcattgtgaatgtgccacctaccatccaggccaggcagaatattgtgaatgccaccgccaacctcggccagtccgtcaccctggtgtgcgatgccgaaggcttcccagagcccaccatgagctggacaaaggatggggaacagatagagcaagaggaagacgatgagaagtacatcttcagcgacgatagttcccagctgaccatcaaaaaggtggataagaacgacgaggctgagtacatctgcattgctgagaacaaggctggcgagcaggatgcgaccatccacctcaaagtctttgcaaaacccaaaatcacatatgtagagaaccagactgccatggaattagaggagcaggtcactcttacctgtgaagcctccggagaccccattccctccatcacctggaggacttctacccggaacatcagcagcgaagaaaaggcttcgtggactcgaccagagaagcaagagactctggatgggcacatggtggtgcgtagccatgcccgtgtgtcgtcgctgaccctgaagagcatccagtacactgatgccggagagtacatctgcaccgccagcaacaccatcggccaggactcccagtccatgtaccttgaagtgcaatatgccccaaagctacagggccctgtggctgtgtacacttgggaggggaaccaggtgaacatcacctgcgaggtatttgcctatcccagtgccacgatctcatggtttcgggatggccagctgctgccaagctccaattacagcaatatcaagatctacaacaccccctctgccagctatctggaggtgaccccagactctgagaatgattttgggaactacaactgtactgcagtgaaccgcattgggcaggagtccttggaattcatccttgttcaagcagacaccccctcttcaccatccatcgaccaggtggagccatactccagcacagcccaggtgcagtttgatgaaccagaggccacaggtggggtgcccatcctcaaatacaaagctgagtggagagcagttggtgaagaagtatggcattccaagtggtatgatgccaaggaagccagcatggagggcatcgtcaccatcgtgggcctgaagcccgaaacaacgtacgccgtaaggctggcggcgctcaatggcaaagggctgggtgagatcagcgcggcctccgagttcaagacgcagccagtcccaggggaacccagtgcacctaagctcgaagggcagatgggagaggatggaaactctattaaagtgaacctgatcaagcaggatgacggcggctcccccatcagacactatctggtcaggtaccgagcgctctcctccgagtggaaaccagagatcaggctcccgtctggcagtgaccacgtcatgctgaagtccctggactggaatgctgagtatgaggtctacgtggtggctgagaaccagcaaggaaaatccaaggcggctcattttgtgttcaggacctcggcccagcccacagccatcccagccaacggcagccccacctcaggcctgagcaccggggccatcgtgggcatcctcatcgtcatcttcgtcctgctcctggtggttgtggacatcacctgctacttcctgaacaagtgtggcctgttcatgtgcattgcggtcaacctgtgtggaaaagccgggcccggggccaagggcaaggacatggaggagggcaaggccgccttctcgaaagatgagtccaaggagcccatcgtggaggttcgaacggaggaggagaggaccccaaaccatgatggagggaaacacacagagcccaacgagaccacgccactgacggagcccgagaagggccccgtagaagcaaagccagagtgccaggagacagaaacgaagccagcgccagccgaagtcaagacggtccccaatgacgccacacagacaaaggagaacgagagcaaagcatgatgggtgaagagaaccgagcaaagatcaaaataaaaagtgacacagcagcttcaccagagcatttccaacaccacagacacacacacgcacgcacacacacaaacacacatgcacacacacacatctcatttctctagtgtcttttgcctttaaaaaaaactaaacagataaaacatgggaatctcctttttgtaggtttatagaaagggtccctttgttgcacactcacttgtaagaaaatgagacaaaaaggttaaacccacagccaaactaggacactccgttccctgaaaccgttaaaaaatcaaacaaaaggaccccaaattaagaatctaggaagctcagaaacgaaatctaggttcaggaagaccacacttggtgttacccgattggcacagaccagtttcagagaaatactttcaggcactaagactaatcgaatgaacaaagtccacagtttatttttatactttcagtcaagtttgaactctgtaaaacctcataaataagttataatttctgttcactttgtatttgttcagtatgcaaagtgtgtcaccctttctagctgaattcaattcccacgtagactcttattttataggacgaatgccaaattgcagcttctgggggtagatctcaatttgcagtattcagacttctttttctttcttttacattcttttttctttctttctttctgccaactttgttttccagtgtttacaaggtgacaaatgtttgactttggttgtgtttaaatgtccgtgtaaaatagctgccttttattttttaaggtaacaaataccacctagaggtaggtaggatcatcccacgcttgctttagcacaggacaactttacaaaacatgattgtttacagctgctcttcccctcttttctgatctgcagtttttgcctgggtcccactcaggtgaaaatccatctcattctggaatggttttgcttttgaatttttggttatttttgtgtttctttgggggttagaccactttctgattagccgccacctgcctgcatctgtgaaaagggatctgctcccaggcgttctcacccttcttttgaaggactccttaggctttgttgaatgaagcagagaagattgtatagttggggctggtcttggtgaacacacattattaccccacacatcccctttgtgtagaaagccaaataaaatctatacataccatttccttttgagcccagaatctagatttgagcggaagagcatgtgtgcttcagggaattagtgtctttttttggaaatctgttgaagtaaagtaacatcggccttctgttcacttaggcagcatttatagaaacaaaagaagaaagaaacaacctactgtctggagtcataacacaactttcctggattggaaaccaagtgggggaaaaaatacagaaactttaagggggatgggaggggggggagaagggaaaagccagccctttgtatagaaattttgcttttttttccctcattctactttagaactgcaagcttgtgcactgtggatgcgtgaatattttagtgtgaaacgtgtttttgtcatagtattgaaataaaacttcaacatagtttggttgtggaaggtatagcagatagttcagaaaaaatattcaggaaacaaaaatcactcaaacggaatcgaagccttttaacaaagaaaatgaaatacagatgatgatgatgatgatgaagatgatgctaagtaaacagaaatcagtactccgcatgcgctcctctcctaaggtacaaagcagcaagaggttagggtggcaaggctgcctctgggtccattctgtgggccactctccccaacgttctgacacttctgcagtctgatcagtggcgatgctagattataatttcaaactgtgaagaataatggtcttgtcatttgctcaatgtggggttatgttgcattttctcagctcctggggatggaaatggaggatcccagaacacacagccctggcccctttgattctagggcctgcacagatctctggttcaaatgcacaggccctcagaatagaggaacatgaagagagatcttagagcacacagtagaatgtgagagcctgggtgtctgagaccgggagggcccagcagtgaggggcaggctcttctggtcaccaggctgttcagtggactcagttcttcatcttgtaatgtcgatggctttgccacaccaggccaagcccatgccataccttgtcaagactgtcaaagtggttgtggttaggtcaaactggttttggttctgatggttaggaagaaacaggtcagccctcagatcacctggcccgggacagctgaccccctagaaccctggctctgccattagctaggacctaagactctgcccacattttggtctgttctctcccattacacataggtttgtctcagcatgcaagagtttttcctttaaaaaaaaaaaaaaaaaaaaaaaaaaagcaatgctttctctaaaatcaaagagggagtcattttattccaagatgttttatcttttatgttaagagatcaaagcttataattttcttttttaatttttgaaggagggatcaactccagtttccaatgtctatgtgtctatgtgtgtatgtgccatacatatgtattcacatgaagaccggcatggccaagttctgctggaggagcactcaagtgtgacgagcagggccactggaccctgcagggctgtggtgtatatagtgcagctttggaggtggaactctattttcacacttttctatggagccttccgagtcccaggttttcacttgaggctgtctgtctggatggcggttttcagacctccattaacatccctacccagcattctgtacttcgggggccttctctcttgttataaaactttttaccaagtgaaacatcgataccacctttgtttccattctcactggtgtaaatactgagtactaactgagaattttgactttgcattctgtcggaatacttgtgttc

SEQ ID NO: 2751 - DNA, 1995 bp, Homo sapiens
  source 1..1995: mol_type = genomic DNA
attacaattcgtgatgagatttgggttttgttttgttttgttttttcagtttctctgcaggtggatattgttcccagccagggggagatcagcgttggagagtccaaattcttcttatgccaagtggcaggagatgccaaagataaagacatctcctggttctcccccaatggagaaaagctcaccccaaaccagcagcggatctcagtggtgtggaatgatgattcctcctccaccctcaccatctataacgccaacatcgacgacgccggcatttacaagtgtgtggttacaggcgaggatggcagtgagtcagaggccaccgtcaacgtgaagatctttcagaagctcatgttcaagaatgcgccaaccccacaggagttccgggagggggaagatgccgtgattgtgtgtgatgtggtcagctccctcccaccaaccatcatctggaaacacaaaggccgagatgtcatcctgaaaaaagatgtccgattcatagtcctgtccaacaactacctgcagatccggggcatcaagaaaacagatgagggcacttatcgctgtgagggcagaatcctggcacggggggagatcaacttcaaggacattcaggtcattgtgaatgtgccacctaccatccaggccaggcagaatattgtgaatgccaccgccaacctcggccagtccgtcaccctggtgtgcgatgccgaaggcttcccagagcccaccatgagctggacaaaggatggggaacagatagagcaagaggaagacgatgagaagtacatcttcagcgacgatagttcccagctgaccatcaaaaaggtggataagaacgacgaggctgagtacatctgcattgctgagaacaaggctggcgagcaggatgcgaccatccacctcaaagtctttgcaaaacccaaaatcacatatgtagagaaccagactgccatggaattagaggagcaggtcactcttacctgtgaagcctccggagaccccattccctccatcacctggaggacttctacccggaacatcagcagcgaagaaaaggcttcgtggactcgaccagagaagcaagagactctggatgggcacatggtggtgcgtagccatgcccgtgtgtcgtcgctgaccctgaagagcatccagtacactgatgccggagagtacatctgcaccgccagcaacaccatcggccaggactcccagtccatgtaccttgaagtgcaatatgccccaaagctacagggccctgtggctgtgtacacttgggaggggaaccaggtgaacatcacctgcgaggtatttgcctatcccagtgccacgatctcatggtttcgggatggccagctgctgccaagctccaattacagcaatatcaagatctacaacaccccctctgccagctatctggaggtgaccccagactctgagaatgattttgggaactacaactgtactgcagtgaaccgcattgggcaggagtccttggaattcatccttgttcaagcagacaccccctcttcaccatccatcgaccaggtggagccatactccagcacagcccaggtgcagtttgatgaaccagaggccacaggtggggtgcccatcctcaaatacaaagctgagtggagagcagttggtgaagaagtatggcattccaagtggtatgatgccaaggaagccagcatggagggcatcgtcaccatcgtgggcctgaagcccgaaacaacgtacgccgtaaggctggcggcgctcaatggcaaagggctgggtgagatcagcgcggcctccgagttcaagacgcagccagtccaggccccacctcctacggcatctgctagctcgtctacccctgttccattgtctccaccagatacaacttggcctcttcctgcccttgcaaccacagaaccagctaaaaacattgcacagaatcactgctgtaacatgttccaagctggtcttcataatgctctaatgaagtaa

SEQ ID NO: 2752 - DNA, 1182 bp, Homo sapiens
  source 1..1182: mol_type = genomic DNA
cagacaccccctcttcaccatccatcgaccaggtggagccatactccagcacagcccaggtgcagtttgatgaaccagaggccacaggtggggtgcccatcctcaaatacaaagctgagtggagagcagttggtgaagaagtatggcattccaagtggtatgatgccaaggaagccagcatggagggcatcgtcaccatcgtgggcctgaagcccgaaacaacgtacgccgtaaggctggcggcgctcaatggcaaagggctgggtgagatcagcgcggcctccgagttcaagacgcagccagtccatagccctcctccaccggcatctgctagctcgtctacccctgttccattgtctccaccagatacaggggaacccagtgcacctaagctcgaagggcagatgggagaggatggaaactctattaaagtgaacctgatcaagcaggatgacggcggctcccccatcagacactatctggtcaggtaccgagcgctctcctccgagtggaaaccagagatcaggctcccgtctggcagtgaccacgtcatgctgaagtccctggactggaatgctgagtatgaggtctacgtggtggctgagaaccagcaaggaaaatccaaggcggctcattttgtgttcaggacctcggcccagcccacagccatcccagccaacggcagccccacctcaggcctgagcaccggggccatcgtgggcatcctcatcgtcatcttcgtcctgctcctggtggttgtggacatcacctgctacttcctgaacaagtgtggcctgttcatgtgcattgcggtcaacctgtgtggaaaagccgggcccggggccaagggcaaggacatggaggagggcaaggccgccttctcgaaagatgagtccaaggagcccatcgtggaggttcgaacggaggaggagaggaccccaaaccatgatggagggaaacacacagagcccaacgagaccacgccactgacggagcccgagaagggccccgtagaagcaaagccagagtgccaggagacagaaacgaagccagcgccagccgaagtcaagacggtccccaatgacgccacacagacaaaggagaacgagagcaaagcatgatgggtgaagagaaccgagcaaagatcaaaataaaaagtgacacagcagcttcaccagagca

SEQ ID NO: 2753 - DNA, 4449 bp, Homo sapiens
  source 1..4449: mol_type = genomic DNA
gaaacgtcccgtgtgggaggggcgggtctgggtgcggcctgccgcatgactcgtggttcggaggcccacgtggccggggcggggactcaggcgcctggggcgccgactgattacgtagcgggcggggccggaagtgccgctccttggtgggggctgttcatggcggttccggggtctccaacatttttcccggctgtggtcctaaatctgtccaaagcagaggcagtggagcttgaggttcttgctggtgtgaaatgactgagtacaaactggtggtggttggagcaggtggtgttgggaaaagcgcactgacaatccagctaatccagaaccactttgtagatgaatatgatcccaccatagaggattcttacagaaaacaagtggttatagatggtgaaacctgtttgttggacatactggatacagctggacaagaagagtacagtgccatgagagaccaatacatgaggacaggcgaaggcttcctctgtgtatttgccatcaataatagcaagtcatttgcggatattaacctctacagggagcagattaagcgagtaaaagactcggatgatgtacctatggtgctagtgggaaacaagtgtgatttgccaacaaggacagttgatacaaaacaagcccacgaactggccaagagttacgggattccattcattgaaacctcagccaagaccagacagggtgttgaagatgctttttacacactggtaagagaaatacgccagtaccgaatgaaaaaactcaacagcagtgatgatgggactcagggttgtatgggattgccatgtgtggtgatgtaacaagatacttttaaagttttgtcagaaaagagccactttcaagctgcactgacaccctggtcctgacttccctggaggagaagtattcctgttgctgtcttcagtctcacagagaagctcctgctacttccccagctctcagtagtttagtacaataatctctatttgagaagttctcagaataactacctcctcacttggctgtctgaccagagaatgcacctcttgttactccctgttatttttctgccctgggttcttccacagcacaaacacacctctgccaccccaggtttttcatctgaaaagcagttcatgtctgaaacagagaaccaaaccgcaaacgtgaaattctattgaaaacagtgtcttgagctctaaagtagcaactgctggtgattttttttttctttttactgttgaacttagaactatgctaatttttggagaaatgtcataaattactgttttgccaagaatatagttattattgctgtttggtttgtttataatgttatcggctctattctctaaactggcatctgctctagattcataaatacaaaaatgaatactgaattttgagtctatcctagtcttcacaactttgacgtaattaaatccaactttcacagtgaagtgcctttttcctagaagtggtttgtagacttcctttataatatttcagtggaatagatgtctcaaaaatccttatgcatgaaatgaatgtctgagatacgtctgtgacttatctaccattgaaggaaagctatatctatttgagagcagatgccattttgtacatgtatgaaattggttttccagaggcctgttttggggctttcccaggagaaagatgaaactgaaagcacatgaataatttcacttaataatttttacctaatctccacttttttcataggttactacctatacaatgtatgtaatttgtttcccctagcttactgataaacctaatattcaatgaacttccatttgtattcaaatttgtgtcataccagaaagctctacatttgcagatgttcaaatattgtaaaactttggtgcattgttatttaatagctgtgatcagtgattttcaaacctcaaatatagtatattaacaaattacattttcactgtatatcatggtatcttaatgatgtatataattgccttcaatccccttctcaccccaccctctacagcttcccccacagcaataggggcttgattatttcagttgagtaaagcatggtgctaatggaccagggtcacagtttcaaaacttgaacaatccagttagcatcacagagaaagaaattcttctgcatttgctcattgcaccagtaactccagctagtaattttgctaggtagctgcagttagccctgcaaggaaagaagaggtcagttagcacaaaccctttaccatgactggaaaactcagtatcacgtatttaaacatttttttttcttttagccatgtagaaactctaaattaagccaatattctcatttgagaatgaggatgtctcagctgagaaacgttttaaattctctttattcataatgttctttgaagggtttaaaacaagatgttgataaatctaagctgatgagtttgctcaaaacaggaagttgaaattgttgagacaggaatggaaaatataattaattgatacctatgaggatttggaggcttggcattttaatttgcagataataccctggtaattctcatgaaaaatagacttggataacttttgataaaagactaattccaaaatggccactttgttcctgtctttaatatctaaatacttactgaggtcctccatcttctatattatgaattttcatttattaagcaaatgtcatattaccttgaaattcagaagagaagaaacatatactgtgtccagagtataatgaacctgcagagttgtgcttcttactgctaattctgggagctttcacagtactgtcatcatttgtaaatggaaattctgcttttctgtttctgctccttctggagcagtgctactctgtaattttcctgaggcttatcacctcagtcatttcttttttaaatgtctgtgactggcagtgattctttttcttaaaaatctattaaatttgatgtcaaattagggagaaagatagttactcatcttgggctcttgtgccaatagcccttgtatgtatgtacttagagttttccaagtatgttctaagcacagaagtttctaaatggggccaaaattcagacttgagtatgttctttgaataccttaagaagttacaattagccgggcatggtggcccgtgcctgtagtcccagctacttgagaggctgaggcaggagaatcacttcaacccaggaggtggaggttacagtgagcagagatcgtgccactgcactccagcctgggtgacaagagagacttgtctccaaaaaaaaagttacacctaggtgtgaattttggcacaaaggagtgacaaacttatagttaaaagctgaataacttcagtgtggtataaaacgtggtttttaggctatgtttgtgattgctgaaaagaattctagtttacctcaaaatccttctctttccccaaattaagtgcctggccagctgtcataaattacatattccttttggtttttttaaaggttacatgttcaagagtgaaaataagatgttctgtctgaaggctaccatgccggatctgtaaatgaacctgttaaatgctgtatttgctccaacggcttactatagaatgttacttaatacaatatcatacttattacaatttttactataggagtgtaataggtaaaattaatctctattttagtgggcccatgtttagtctttcaccatcctttaaactgctgtgaatttttttgtcatgacttgaaagcaaggatagagaaacactttagagatatgtggggtttttttaccattccagagcttgtgagcataatcatatttgctttatatttatagtcatgaactcctaagttggcagctacaaccaagaaccaaaaaatggtgcgttctgcttcttgtaattcatctctgctaataaattataagaagcaaggaaaattagggaaaatattttatttggatggtttctataaacaagggactataattcttgtacattatttttcatctttgctgtttctttgagcagtctaatgtgccacacaattatctaaggtatttgttttctataagaattgttttaaaagtattcttgttaccagagtagttgtattatatttcaaaacgtaagatgatttttaaaagcctgagtactgacctaagatggaattgtatgaactctgctctggagggaggggaggatgtccgtggaagttgtaagacttttatttttttgtgccatcaaatataggtaaaaataattgtgcaattctgctgtttaaacaggaactattggcctccttggccctaaatggaagggccgatattttaagttgattattttattgtaaattaatccaacctagttctttttaatttggttgaatgttttttcttgttaaatgatgtttaaaaaataaaaactggaagttcttggcttagtcataa

SEQ ID NO: 2754 - DNA, 731 bp, Homo sapiens
  source 1..731: mol_type = genomic DNA
gatgcaggctgggtgtggagggtgcgagtaggctggagtacaccagggagttcccagcaggccactaggagccacccaggatgcccggcaacctcatgagtcagacaagcagggctgtgtctatctggaagtttccagccaagctaggtaaaacacatggacacagggctctggaggccacgggcatgatgcttcgggtcctggtgggggctgtcctccctgccatgctactggctgccccaccacccatcaacaagctggcactgttcccagataagagtgcctggtgcgaagccaagaacatcacccagatcgtgggccacagcggctgtgaggccaagtccatccagaacagggcgtgcctaggacagtgcttcagctacagcgtccccaacaccttcccacagtccacagagtccctggttcactgtgactcctgcatgccagcccagtccatgtgggagattgtgacgctggagtgcccgggccacgaggaggtgcccagggtggacaagctggtggagaagatcctgcactgtagctgccaggcctgcggcaaggagcctagtcacgaggggctgagcgtctatgtgcagggcgaggacgggccgggatcccagcccggcacccaccctcacccccatccccacccccatcctggcgggcagacccctgagcccgaggacccccctggggccccccacacagaggaagagggggctgaggactga

SEQ ID NO: 2755 - DNA, 2172 bp, Homo sapiens
  source 1..2172: mol_type = genomic DNA
tcctgcgcacccggagggagaggccgcgcgcgcccgcccgctctttctgcgcgcggccctccccgctgcccccgccctcgcgccctgtttggagggagccaccctgacgtcggagccgctcccccgcgccgcgcgcccgcccggggccgcagacagcgcgcagcgcagcccagccgagcgtcgcggggccgccccccgccctgccggccgcctcgccgagcctcctggggcgcccgggcccgcgacccccgcacccagctccgcaggaccggcgggcgcgcgcgggctctggaggccacgggcatgatgcttcgggtcctggtgggggctgtcctccctgccatgctactggctgccccaccacccatcaacaagctggcactgttcccagataagagtgcctggtgcgaagccaagaacatcacccagatcgtgggccacagcggctgtgaggccaagtccatccagaacagggcgtgcctaggacagtgcttcagctacagcgtccccaacaccttcccacagtccacagagtccctggttcactgtgactcctgcatgccagcccagtccatgtgggagattgtgacgctggagtgcccgggccacgaggaggtgcccagggtggacaagctggtggagaagatcctgcactgtagctgccaggcctgcggcaaggagcctagtcacgaggggctgagcgtctatgtgcagggcgaggacgggccgggatcccagcccggcacccaccctcacccccatccccacccccatcctggcgggcagacccctgagcccgaggacccccctggggccccccacacagaggaagagggggctgaggactgaggcccccccaactcttcctcccctctcatccccctgtggaatgttgggtctcactctctggggaagtcaggggagaagctgaagcccccctttggcactggatggacttggcttcagactcggacttgaatgctgcccggttgccatggagatctgaaggggcggggttagagccaagctgcacaatttaatatattcaagagtggggggaggaagcagaggtcttcagggctctttttttggggggggtggtctcttcctgtctggcttctagagatgtgcctgtgggagggggaggaagttggctgagccattgagtgctgggggaggccatccaagatggcatgaatcgggctaaggtccctgggggtgcagatggtactgctgaggtcccgggcttagtgtgagcatcttgccagcctcaggcttgagggagggctgggctagaaagaccactggcagaaacaggaggctccggcccacaggtttccccaaggcctctcaccccacttcccatctccagggaagcgtcgccccagtggcactgaagtggccctccctcagcggaggggtttgggagtcaggcctgggcaggaccctgctgactcgtggcgcgggagctgggagccaggctctccgggcctttctctggcttccttggcttgcctggtgggggaaggggaggaggggaagaaggaaagggaagagtcttccaaggccagaaggagggggacaaccccccaagaccatccctgaagacgagcatccccctcctctccctgttagaaatgttagtgccccgcactgtgccccaagttctaggccccccagaaagctgccagagccggccgccttctcccctctcccagggatgctctttgtaaatatcggatgggtgtgggagtgaggggttacctccctcgccccaaggttccagaggccctaggcgggatgggctcgctgaacctcgaggaactccaggacgaggaggacatgggacttgcgtggacagtcagggttcacttgggctctctctagctccccaattctgcctgcctcctccctcccagctgcactttaaccctagaaggtggggacctggggggagggacagggcaggcgggcccatgaagaaagcccctcgttgcccagcactgtctgcgtctgctcttctgtgcccagggtggctgccagcccactgcctcctgcctggggtggcctggccctcctggctgttgcgacgcgggcttctggagcttgtcaccattggacagtctccctgatggaccctcagtcttctcatgaataaattccttcaacgcc

SEQ ID NO: 2756 - DNA, 528 bp, Homo sapiens
  source 1..528: mol_type = genomic DNA
gtttacaagcggcggcaaagggggcagccgcctgccttggcgtggccggaggttggcgggcatcaagggagaaagccacacttccaggctttcggaggccctcgctccccaagctggacgccaccagcctgtaactaggggcaccccaggaaaacagagggctctggaggccacgggcatgatgcttcgggtcctggtgggggctgtcctccctgccatgctactggctgccccaccacccatcaacaagctggcactgttcccagataagagtgcctggtgcgaagccaagaacatcacccagatcgtgggccacagcggctgtgaggccaagtccatccagaacagggcgtgcctaggacagtgcttcagctacagcgtccccaacaccttcccacagtccacagagtccctggttcactgtgactcctgcatgccagcccagtccatgtgggagattgtgacgctggagtgcccgggccacgaggaggtgcccagggtggacaagctggtggagaagatcctgca

SEQ ID NO: 2757 - DNA, 573 bp, Homo sapiens
  source 1..573: mol_type = genomic DNA
caaacgctgcgtgctcgttgtgcatgcggactgtggtgtcacctgaatgctgagcccacagggctctggaggccacgggcatgatgcttcgggtcctggtgggggctgtcctccctgccatgctactggctgccccaccacccatcaacaagctggcactgttcccagataagagtgcctggtgcgaagccaagaacatcacccagatcgtgggccacagcggctgtgaggccaagtccatccagaacagggcgtgcctaggacagtgcttcagctacagcgtccccaacaccttcccacagtccacagagtccctggttcactgtgactcctgcatgccagcccagtccatgtgggagattgtgacgctggagtgcccgggccacgaggaggtgcccagggtggacaagctggtggagaagatcctgcactgtagctgccaggcctgcggcaaggagcctagtcacgaggggctgagcgtctatgtgcagggcgaggacgggccgggatcccagcccggcacccaccctcacccccatccccacccccatcctggcgggcagacccctgagc

SEQ ID NO: 2758 - DNA, 546 bp, Homo sapiens
  source 1..546: mol_type = genomic DNA
cttttgcttgttttcattctatttctccagcgagagtgcagaggtttggacccccgttgaggccagactgacaggattagaggaaacagctgggctgagtccgtgccctgcaggagggagctcacattcccggactctgggagagagcagctccccacagctcagtcacattccagggctctggaggccacgggcatgatgcttcgggtcctggtgggggctgtcctccctgccatgctactggctgccccaccacccatcaacaagctggcactgttcccagataagagtgcctggtgcgaagccaagaacatcacccagatcgtgggccacagcggctgtgaggccaagtccatccagaacagggcgtgcctaggacagtgcttcagctacagcgtccccaacaccttcccacagtccacagagtccctggttcactgtgactcctgcatgccagcccagtccatgtgggagattgtgacgctggagtgcccgggccacgaggaggtgcccagggtggacaagctggtggagaagatcctgcac

SEQ ID NO: 2759 - DNA, 588 bp, Homo sapiens
  source 1..588: mol_type = genomic DNA
actaggataacactaggcaaggctgagcaacccaggctaccaacagcacggacttgaaccgggtcgcatgccggagcggacgggatgaggtgcaccgcagaactggggactcctggtgccgggacgcggcgggctggggcgccccactctcggggcaagtctgcaatgcccggtgcccacaaaaaggacacatccatctttgtcaccccgaggcctggcacggcctgacggcccaggctcgggctctggaggccacgggcatgatgcttcgggtcctggtgggggctgtcctccctgccatgctactggctgccccaccacccatcaacaagctggcactgttcccagataagagtgcctggtgcgaagccaagaacatcacccagatcgtgggccacagcggctgtgaggccaagtccatccagaacagggcgtgcctaggacagtgcttcagctacagcgtccccaacaccttcccacagtccacagagtccctggttcactgtgactcctgcatgccagcccagtccatgtgggagattgtgacgctggagtgcccgggccacgaggaggtgcccagggtggaca

SEQ ID NO: 2760 - DNA, 622 bp, Homo sapiens
  source 1..622: mol_type = genomic DNA
gtaaagcaaaatccccaagtcctacaatcgtgtcccagtggtgtccctgggccaccactttccagaagcaaagttattttctcaccccgttgttaagcacacagaatagagaaggtacggccgcaatccacccaagtgcccactgattagataggaacccccgaggtgaggctggaagctggggccaggagctccactcttcccaggagtcagagaaggctctggaggccacgggcatgatgcttcgggtcctggtgggggctgtcctccctgccatgctactggctgccccaccacccatcaacaagctggcactgttcccagataagagtgcctggtgcgaagccaagaacatcacccagatcgtgggccacagcggctgtgaggccaagtccatccagaacagggcgtgcctaggacagtgcttcagctacagcgtccccaacaccttcccacagtccacagagtccctggttcactgtgactcctgcatgccagcccagtccatgtgggagattgtgacgctggagtgcccgggccacgaggaggtgcccagggtggacaagctggtggagaagatcctgcactgtagctgccaggcctgcggcaaggagcctagtca

SEQ ID NO: 2761 - DNA, 2021 bp, Homo sapiens
  source 1..2021: mol_type = genomic DNA
gacagcgcgcagcgcagcccagccgagcgtcgcggggccgccccccgccctgccggccgcctcgccgagcctcctggggcgcccgggcccgcgacccccgcacccagctccgcaggaccggcgggcgcgcgcgggctctggaggccacgggcatgatgcttcgggtcctggtgggggctgtcctccctgccatgctactggctgccccaccacccatcaacaagctggcactgttcccagataagagtgcctggtgcgaagccaagaacatcacccagatcgtgggccacagcggctgtgaggccaagtccatccagaacagggcgtgcctaggacagtgcttcagctacagcgtccccaacaccttcccacagtccacagagtccctggttcactgtgactcctgcatgccagcccagtccatgtgggagattgtgacgctggagtgcccgggccacgaggaggtgcccagggtggacaagctggtggagaagatcctgcactgtagctgccaggcctgcggcaaggagcctagtcacgaggggctgagcgtctatgtgcagggcgaggacgggccgggatcccagcccggcacccaccctcacccccatccccacccccatcctggcgggcagacccctgagcccgaggacccccctggggccccccacacagaggaagagggggctgaggactgaggcccccccaactcttcctcccctctcatccccctgtggaatgttgggtctcactctctggggaagtcaggggagaagctgaagcccccctttggcactggatggacttggcttcagactcggacttgaatgctgcccggttgccatggagatctgaaggggcggggttagagccaagctgcacaatttaatatattcaagagtggggggaggaagcagaggtcttcagggctctttttttggggggggtggtctcttcctgtctggcttctagagatgtgcctgtgggagggggaggaagttggctgagccattgagtgctgggggaggccatccaagatggcatgaatcgggctaaggtccctgggggtgcagatggtactgctgaggtcccgggcttagtgtgagcatcttgccagcctcaggcttgagggagggctgggctagaaagaccactggcagaaacaggaggctccggcccacaggtttccccaaggcctctcaccccacttcccatctccagggaagcgtcgccccagtggcactgaagtggccctccctcagcggaggggtttgggagtcaggcctgggcaggaccctgctgactcgtggcgcgggagctgggagccaggctctccgggcctttctctggcttccttggcttgcctggtgggggaaggggaggaggggaagaaggaaagggaagagtcttccaaggccagaaggagggggacaaccccccaagaccatccctgaagacgagcatccccctcctctccctgttagaaatgttagtgccccgcactgtgccccaagttctaggccccccagaaagctgccagagccggccgccttctcccctctcccagggatgctctttgtaaatatcggatgggtgtgggagtgaggggttacctccctcgccccaaggttccagaggccctaggcgggatgggctcgctgaacctcgaggaactccaggacgaggaggacatgggacttgcgtggacagtcagggttcacttgggctctctctagctccccaattctgcctgcctcctccctcccagctgcactttaaccctagaaggtggggacctggggggagggacagggcaggcgggcccatgaagaaagcccctcgttgcccagcactgtctgcgtctgctcttctgtgcccagggtggctgccagcccactgcctcctgcctggggtggcctggccctcctggctgttgcgacgcgggcttctggagcttgtcaccattggacagtctccctgatggaccctcagtcttctcatgaataaattccttcaacgcc

SEQ ID NO: 2762 - DNA, 12362 bp, Homo sapiens
  source 1..12362: mol_type = genomic DNA
aatctctagctcgctcgcgctccctctccccgggccgtggaaaggatcccacttccggtggggtgtcatggcggcgtctcggactgtgatggctgtggggagacggcgctagtggggagagcgaccaagaggccccctcccctccccgggtccccttcccctatccccctccccccagcctccttgccaacgccccctttccctctccccctcccgctcggcgctgaccccccatccccacccccgtgggaacactgggagcctgcactccacagaccctctccttgcctcttccctcacctcagcctccgctccccgccctcttcccggcccagggcgccggcccacccttccctccgccgccccccggccgcggggaggacatggccgcgcacaggccggtggaatgggtccaggccgtggtcagccgcttcgacgagcagcttccaataaaaacaggacagcagaacacacataccaaagtcagtactgagcacaacaaggaatgtctaatcaatatttccaaatacaagttttctttggttataagcggcctcactactattttaaagaatgttaacaatatgagaatatttggagaagctgctgaaaaaaatttatatctctctcagttgattatattggatacactggaaaaatgtcttgctgggcaaccaaaggacacaatgagattagatgaaacgatgctggtcaaacagttgctgccagaaatctgccattttcttcacacctgtcgtgaaggaaaccagcatgcagctgaacttcggaattctgcctctggggttttattttctctcagctgcaacaacttcaatgcagtctttagtcgcatttctaccaggttacaggaattaactgtttgttcagaagacaatgttgatgttcatgatatagaattgttacagtatatcaatgtggattgtgcaaaattaaaacgactcctgaaggaaacagcatttaaatttaaagccctaaagaaggttgcgcagttagcagttataaatagcctggaaaaggcattttggaactgggtagaaaattatccagatgaatttacaaaactgtaccagatcccacagactgatatggctgaatgtgcagaaaagctatttgacttggtggatggttttgctgaaagcaccaaacgtaaagcagcagtttggccactacaaatcattctccttatcttgtgtccagaaataatccaggatatatccaaagacgtggttgatgaaaacaacatgaataagaagttatttctggacagtctacgaaaagctcttgctggccatggaggaagtaggcagctgacagaaagtgctgcaattgcctgtgtcaaactgtgtaaagcaagtacttacatcaattgggaagataactctgtcattttcctacttgttcagtccatggtggttgatcttaagaacctgctttttaatccaagtaagccattctcaagaggcagtcagcctgcagatgtggatctaatgattgactgccttgtttcttgctttcgtataagccctcacaacaaccaacactttaagatctgcctggctcagaattcaccttctacatttcactatgtgctggtaaattcactccatcgaatcatcaccaattccgcattggattggtggcctaagattgatgctgtgtattgtcactcggttgaacttcgaaatatgtttggtgaaacacttcataaagcagtgcaaggttgtggagcacacccagcaatacgaatggcaccgagtcttacatttaaagaaaaagtaacaagccttaaatttaaagaaaaacctacagacctggagacaagaagctataagtatcttctcttgtccatggtgaaactaattcatgcagatccaaagctcttgctttgtaatccaagaaaacaggggcccgaaacccaaggcagtacagcagaattaattacagggctcgtccaactggtccctcagtcacacatgccagagattgctcaggaagcaatggaggctctgctggttcttcatcagttagatagcattgatttgtggaatcctgatgctcctgtagaaacattttgggagattagctcacaaatgcttttttacatctgcaagaaattaactagtcatcaaatgcttagtagcacagaaattctcaagtggttgcgggaaatattgatctgcaggaataaatttcttcttaaaaataagcaggcagatagaagttcctgtcactttctccttttttacggggtaggatgtgatattccttctagtggaaataccagtcaaatgtccatggatcatgaagaattactacgtactcctggagcctctctccggaagggaaaagggaactcctctatggatagtgcagcaggatgcagcggaacccccccgatttgccgacaagcccagaccaaactagaagtggccctgtacatgtttctgtggaaccctgacactgaagctgttctggttgccatgtcctgtttccgccacctctgtgaggaagcagatatccggtgtggggtggatgaagtgtcagtgcataacctcttgcccaactataacacattcatggagtttgcctctgtcagcaatatgatgtcaacaggaagagcagcacttcagaaaagagtgatggcactgctgaggcgcattgagcatcccactgcaggaaacactgaggcttgggaagatacacatgcaaaatgggaacaagcaacaaagctaatccttaactatccaaaagccaaaatggaagatggccaggctgctgaaagccttcacaagaccattgttaagaggcgaatgtcccatgtgagtggaggaggatccatagatttgtctgacacagactccctacaggaatggatcaacatgactggcttcctttgtgcccttgggggagtgtgcctccagcagagaagcaattctggcctggcaacctatagcccacccatgggtccagtcagtgaacgtaagggttctatgatttcagtgatgtcttcagagggaaacgcagatacacctgtcagcaaatttatggatcggctgttgtccttaatggtgtgtaaccatgagaaagtgggacttcaaatacggaccaatgttaaggatctggtgggtctagaattgagtcctgctctgtatccaatgctatttaacaaattgaagaataccatcagcaagttttttgactcccaaggacaggttttattgactgataccaatactcaatttgtagaacaaaccatagctataatgaagaacttgctagataatcatactgaaggcagctctgaacatctagggcaagctagcattgaaacaatgatgttaaatctggtcaggtatgttcgtgtgcttgggaatatggtccatgcaattcaaataaaaacgaaactgtgtcaattagttgaagtaatgatggcaaggagagatgacctctcattttgccaagagatgaaatttaggaataagatggtagaatacctgacagactgggttatgggaacatcaaaccaagcagcagatgatgatgtaaaatgtcttacaagagatttggaccaggcaagcatggaagcagtagtttcacttctagctggtctccctctgcagcctgaagaaggagatggtgtggaattgatggaagccaaatcacagttatttcttaaatacttcacattatttatgaaccttttgaatgactgcagtgaagttgaagatgaaagtgcgcaaacaggtggcaggaaacgtggcatgtctcggaggctggcatcactgaggcactgtacggtccttgcaatgtcaaacttactcaatgccaacgtagacagtggtctcatgcactccataggcttaggttaccacaaggatctccagacaagagctacatttatggaagttctgacaaaaatccttcaacaaggcacagaatttgacacacttgcagaaacagtattggctgatcggtttgagagattggtggaactggtcacaatgatgggtgatcaaggagaactccctatagcgatggctctggccaatgtggttccttgttctcagtgggatgaactagctcgagttctggttactctgtttgattctcggcatttactctaccaactgctctggaacatgttttctaaagaagtagaattggcagactccatgcagactctcttccgaggcaacagcttggccagtaaaataatgacattctgtttcaaggtatatggtgctacctatctacaaaaactcctggatcctttattacgaattgtgatcacatcctctgattggcaacatgttagctttgaagtggatcctaccaggttagaaccatcagagagccttgaggaaaaccagcggaacctccttcagatgactgaaaagttcttccatgccatcatcagttcctcctcagaattcccccctcaacttcgaagtgtgtgccactgtttataccaggtggttagccagcgtttccctcagaacagcatcggtgcagtaggaagtgccatgttcctcagatttatcaatcctgccattgtctcaccgtatgaagcagggattttagataaaaagccaccacctagaatcgaaaggggcttgaagttaatgtcaaagatacttcagagtattgccaatcatgttctcttcacaaaagaagaacatatgcggcctttcaatgattttgtgaaaagcaactttgatgcagcacgcaggtttttccttgatatagcatctgattgtcctacaagtgatgcagtaaatcatagtctttccttcataagtgacggcaatgtgcttgctttacatcgtctactctggaacaatcaggagaaaattgggcagtatctttccagcaacagggatcataaagctgttggaagacgaccttttgataagatggcaacacttcttgcatacctgggtcctccagagcacaaacctgtggcagatacacactggtccagccttaaccttaccagttcaaagtttgaggaatttatgactaggcatcaggtacatgaaaaagaagaattcaaggctttgaaaacgttaagtattttctaccaagctgggacttccaaagctgggaatcctattttttattatgttgcacggaggttcaaaactggtcaaatcaatggtgatttgctgatataccatgtcttactgactttaaagccatattatgcaaagccatatgaaattgtagtggaccttacccataccgggcctagcaatcgctttaaaacagactttctctctaagtggtttgttgtttttcctggctttgcttacgacaacgtctccgcagtctatatctataactgtaactcctgggtcagggagtacaccaagtatcatgagcggctgctgactggcctcaaaggtagcaaaaggcttgttttcatagactgtcctgggaaactggctgagcacatagagcatgaacaacagaaactacctgctgccaccttggctttagaagaggacctgaaggtattccacaatgctctcaagctagctcacaaagacaccaaagtttctattaaagttggttctactgctgtccaagtaacttcagcagagcgaacaaaagtcctagggcaatcagtctttctaaatgacatttattatgcttcggaaattgaagaaatctgcctagtagatgagaaccagttcaccttaaccattgcaaaccagggcacgccgctcaccttcatgcaccaggagtgtgaagccattgtccagtctatcattcatatccggacccgctgggaactgtcacagcccgactctatcccccaacacaccaagattcggccaaaagatgtccctgggacactgctcaatatcgcattacttaatttaggcagttctgacccgagtttacggtcagctgcctataatcttctgtgtgccttaacttgtacctttaatttaaaaatcgagggccagttactagagacatcaggtttatgtatccctgccaacaacaccctctttattgtctctattagtaagacactggcagccaatgagccacacctcacgttagaatttttggaagagtgtatttctggatttagcaaatctagtattgaattgaaacacctttgtttggaatacatgactccatggctgtcaaatctagttcgtttttgcaagcataatgatgatgccaaacgacaaagagttactgctattcttgacaagctgataacaatgaccatcaatgaaaaacagatgtacccatctattcaagcaaaaatatggggaagccttgggcagattacagatctgcttgatgttgtactagacagtttcatcaaaaccagtgcaacaggtggcttgggatcaataaaagctgaggtgatggcagatactgctgtagctttggcttctggaaatgtgaaattggtttcaagcaaggttattggaaggatgtgcaaaataattgacaagacatgcttatctccaactcctactttagaacaacatcttatgtgggatgatattgctattttagcacgctacatgctgatgctgtccttcaacaattcccttgatgtggcagctcatcttccctacctcttccacgttgttactttcttagtagccacaggtccgctctcccttagagcttccacacatggactggtcattaatatcattcactctctgtgtacttgttcacagcttcattttagtgaagagaccaagcaagttttgagactcagtctgacagagttctcattacccaaattttacttgctgtttggcattagcaaagtcaagtcagctgctgtcattgccttccgttccagttaccgggacaggtcattctctcctggctcctatgagagagagacttttgctttgacatccttggaaacagtcacagaagctttgttggagatcatggaggcatgcatgagagatattccaacgtgcaagtggctggaccagtggacagaactagctcaaagatttgcattccaatataatccatccctgcaaccaagagctcttgttgtctttgggtgtattagcaaacgagtgtctcatgggcagataaagcagataatccgtattcttagcaaggcacttgagagttgcttaaaaggacctgacacttacaacagtcaagttctgatagaagctacagtaatagcactaaccaaattacagccacttcttaataaggactcgcctctgcacaaagccctcttttgggtagctgtggctgtgctgcagcttgatgaggtcaacttgtattcagcaggtaccgcacttcttgaacaaaacctgcatactttagatagtctccgtatattcaatgacaagagtccagaggaagtatttatggcaatccggaatcctctggagtggcactgcaagcaaatggatcattttgttggactcaatttcaactctaactttaactttgcattggttggacaccttttaaaagggtacaggcatccttcacctgctattgttgcaagaacagtcagaattttacatacactactaactctggttaacaaacacagaaattgtgacaaatttgaagtgaatacacagagcgtggcctacttagcagctttacttacagtgtctgaagaagttcgaagtcgctgcagcctaaaacatagaaagtcacttcttcttactgatatttcaatggaaaatgttcctatggatacatatcccattcatcatggtgacccttcctataggacactaaaggagactcagccatggtcctctcccaaaggttctgaaggataccttgcagccacctatccaactgtcggccagaccagtccccgagccaggaaatccatgagcctggacatggggcaaccttctcaggccaacactaagaagttgcttggaacaaggaaaagttttgatcacttgatatcagacacaaaggctcctaaaaggcaagaaatggaatcagggatcacaacaccccccaaaatgaggagagtagcagaaactgattatgaaatggaaactcagaggatttcctcatcacaacagcacccacatttacgtaaagtttcagtgtctgaatcaaatgttctcttggatgaagaagtacttactgatccgaagatccaggcgctgcttcttactgttctagctacactggtaaaatataccacagatgagtttgatcaacgaattctttatgaatacttagcagaggccagtgttgtgtttcccaaagtctttcctgttgtgcataatttgttggactctaagatcaacaccctgttatcattgtgccaagatccaaatttgttaaatccaatccatggaattgtgcagagtgtggtgtaccatgaagaatccccaccacaataccaaacatcttacctgcaaagttttggttttaatggcttgtggcggtttgcaggaccgttttcaaagcaaacacaaattccagactatgctgagcttattgttaagtttcttgatgccttgattgacacgtacctgcctggaattgatgaagaaaccagtgaagaatccctcctgactcccacatctccttaccctcctgcactgcagagccagcttagtatcactgccaaccttaacctttctaattccatgacctcacttgcaacttcccagcattccccaggaatcgacaaggagaacgttgaactctcccctaccactggccactgtaacagtggacgaactcgccacggatccgcaagccaagtgcagaagcaaagaagcgctggcagtttcaaacgtaatagcattaagaagatcgtgtgaagcttgcttgctttcttttttaaaatcaacttaacatgggctcttcactagtgaccccttccctgtccttgccctttccccccatgttgtaatgctgcacttcctgttttataatgaacccatccggtttgccatgttgccagatgatcaactcttcgaagccttgcctaaatttaatgctgccttttctttaactttttttcttctacttttggcgtgtatctggtatatgtaagtgttcagaacaactgcaaagaaagtgggaggtcaggaaacttttaactgagaaatctcaattgtaagagaggatgaattcttgaatactgctactactggccagtgatgaaagccatttgcacagagctctgccttctgtggttttcccttcttcatcctacagagtaaagtgttagtcctatttatacatttttcaagatacaagtttatgagagaaatagtattataaccccagtatgtttaatcttttagctgtggactttttttttaaccgtacaaaactgaaagaaccatagaggtcaagcctcagtgacttgacaccataaagccacagacaaggtacttgggggggagggcagggaaatttcatattttatagtggattcttaagaaatactaacacttgagtattagcaataattacaggaaaataagtgcgaccacatatatcttaacattactgaattaaaactatggcttctaagtccttatccaaactcagtcatccaaactagtttatttttttctccagttgattatcttttaatttttaattttgctaaaggtggtttttttgtgttttgttttttgtaaaccaaaactatactaagtatagtaattatatatatatatatattttttcccctccccctcttctttcctaactaattctgagcagggtaatcagtgaacaaagtgttgaaaattgttcccagaaggtaattttcatagatgtttgcattagctccatagcaaaatggaatggtacgtgacatttagggtagctgatatttttattttgttaaataatttccaagaatagagtatggtgtatattataaatttctttgataagatgtattttgaatgtcttttaatcttcctcctcctctccaaaaaaatcagaaacctctttaagaaaacatgtaggttatatatgctagaattgcatttaatcactgtgaaaagactggtcagcctgcattagtatgacagtaggggggctgttagaattgctgctatactggtggtatggattatcatggcattggaattttcatagtaatgcagatccaatttctttgtggtacctgcagtttacaaaataatttgacttcagtgagcatattggtatctggatgttccaatttagaactaaaccatatttattacaaaaagatattaatccctctactcccaggttccctttatatgttaagatataatggctttgaggggggaaaaaataaacctaggggagaggggagtttcctgtagtgctgtttcattagaggatttcagtaaattaaattccacagctaattcaataaataatggtacatttaagtgttctgattttaataatatatttcacatttatccacacagtaacaatgtaatatgttaatgtaaataaaattggttttgatactcagaaataacaagaatttaattttttaaatttgtttacagtcctgggaaaagtaagaattatttgccaaaataagaggaaagaaaaccttagtattattaatgagtttaccatagaattgttggaaatactgaagacaggtgcaatttactaaacttttgtttttaaactattgtagaggctgcattagaagaaaatgtttataatgacagagcaactatgactatataaaaaagctgaaattagaactgtgtttagaaatagatcagtaacccagtgccaaggatgccaagctgccaccatggtcttggctctcccacaacccagtgtttctggggtaagtttcacagtttctaggccctggaatagcaggcagtgtaagcctttgataactttagttcgatgtttttcttgtttttgtttgttggtttggtgcatatgatagtgggtgttatgctattttgctcttcccatcaaaataaagaaacttccagaggtttactgttaaaaatactgatatttccataaacgggtttaccaagggtgtagtatttcataccgcctgaaatgatcagcattggcacaaatcaaaattcagccgcctttgaaatgcaaaaatacctttgactagtaagtacatcctaggagtttgaaaacttaactaaggtttaaaatttaccttgtttaaagaacttctgacttttgaggaaaatctagctttccaagtaactaaaatgtacatgagataaacctctcaccactatgtgtcccttgagaaatgcaacacttttttagtcttcatacttgtaatctataaaagaaattctgaagtttagaccaagttgcccatttctgcgtaattgacataagttctgttaaaaatattataagtaattcgtttcggtttgtagatgtttcccctgacttgttaaagaggaaaccaggaactcagtcatgtttttgtcctggataatctacctgttatgccagtactcccatccgaggggcatgcccttagttgcccagatggagatgcagttcagtagatttggggcaaagtggctacagctctgtcttccattcactcaacacctgttcatgactgagccaggtgcccaggacacatcctaaacagtcagcttctatcctgtgtcctagttggggagacagagtgccagccagcaaccctcccaggtttgtaggttttaggggttttcagttttgtttgggttttttgttttttgtttttgtttctacatccttccccgactcccaggcataatgaggcatgtcttactcaatgttatgcaatggatttaggcaaaaattcattcttagtgtcagccacacaattttttttaatgcagtatattcacctgtaaatagtttgtgtaaaatttgacaaaaaaagtatatttactatactgtaaatatatgtgatgatatattgtattattttgcttttttgtaaagcagttagttgctgcacatggataacaacaaaaatttgattattctcgtgttagtattgttaacttctttttgcgactgcgttacatcatttaaagaaaatgctgtgtattgtaaacttaaattgtatatgataacttactgtcctttccatccgggcctaaactttggcagttcctttgtctacaaccttgttaatactgtaaacagttgtacgccagcaggaaaaatactgcccaacagacaaaatcgatcattgtaggggaaaatcatagaaatccatttcagatctttattgttcctcaccccattttcctccttgtgtatgtacttcccccacccccctttttttaagtaaaatgtaaattcaatctgctctaaga

SEQ ID NO: 2763 - DNA, 12425 bp, Homo sapiens
  source 1..12425: mol_type = genomic DNA
aatctctagctcgctcgcgctccctctccccgggccgtggaaaggatcccacttccggtggggtgtcatggcggcgtctcggactgtgatggctgtggggagacggcgctagtggggagagcgaccaagaggccccctcccctccccgggtccccttcccctatccccctccccccagcctccttgccaacgccccctttccctctccccctcccgctcggcgctgaccccccatccccacccccgtgggaacactgggagcctgcactccacagaccctctccttgcctcttccctcacctcagcctccgctccccgccctcttcccggcccagggcgccggcccacccttccctccgccgccccccggccgcggggaggacatggccgcgcacaggccggtggaatgggtccaggccgtggtcagccgcttcgacgagcagcttccaataaaaacaggacagcagaacacacataccaaagtcagtactgagcacaacaaggaatgtctaatcaatatttccaaatacaagttttctttggttataagcggcctcactactattttaaagaatgttaacaatatgagaatatttggagaagctgctgaaaaaaatttatatctctctcagttgattatattggatacactggaaaaatgtcttgctgggcaaccaaaggacacaatgagattagatgaaacgatgctggtcaaacagttgctgccagaaatctgccattttcttcacacctgtcgtgaaggaaaccagcatgcagctgaacttcggaattctgcctctggggttttattttctctcagctgcaacaacttcaatgcagtctttagtcgcatttctaccaggttacaggaattaactgtttgttcagaagacaatgttgatgttcatgatatagaattgttacagtatatcaatgtggattgtgcaaaattaaaacgactcctgaaggaaacagcatttaaatttaaagccctaaagaaggttgcgcagttagcagttataaatagcctggaaaaggcattttggaactgggtagaaaattatccagatgaatttacaaaactgtaccagatcccacagactgatatggctgaatgtgcagaaaagctatttgacttggtggatggttttgctgaaagcaccaaacgtaaagcagcagtttggccactacaaatcattctccttatcttgtgtccagaaataatccaggatatatccaaagacgtggttgatgaaaacaacatgaataagaagttatttctggacagtctacgaaaagctcttgctggccatggaggaagtaggcagctgacagaaagtgctgcaattgcctgtgtcaaactgtgtaaagcaagtacttacatcaattgggaagataactctgtcattttcctacttgttcagtccatggtggttgatcttaagaacctgctttttaatccaagtaagccattctcaagaggcagtcagcctgcagatgtggatctaatgattgactgccttgtttcttgctttcgtataagccctcacaacaaccaacactttaagatctgcctggctcagaattcaccttctacatttcactatgtgctggtaaattcactccatcgaatcatcaccaattccgcattggattggtggcctaagattgatgctgtgtattgtcactcggttgaacttcgaaatatgtttggtgaaacacttcataaagcagtgcaaggttgtggagcacacccagcaatacgaatggcaccgagtcttacatttaaagaaaaagtaacaagccttaaatttaaagaaaaacctacagacctggagacaagaagctataagtatcttctcttgtccatggtgaaactaattcatgcagatccaaagctcttgctttgtaatccaagaaaacaggggcccgaaacccaaggcagtacagcagaattaattacagggctcgtccaactggtccctcagtcacacatgccagagattgctcaggaagcaatggaggctctgctggttcttcatcagttagatagcattgatttgtggaatcctgatgctcctgtagaaacattttgggagattagctcacaaatgcttttttacatctgcaagaaattaactagtcatcaaatgcttagtagcacagaaattctcaagtggttgcgggaaatattgatctgcaggaataaatttcttcttaaaaataagcaggcagatagaagttcctgtcactttctccttttttacggggtaggatgtgatattccttctagtggaaataccagtcaaatgtccatggatcatgaagaattactacgtactcctggagcctctctccggaagggaaaagggaactcctctatggatagtgcagcaggatgcagcggaacccccccgatttgccgacaagcccagaccaaactagaagtggccctgtacatgtttctgtggaaccctgacactgaagctgttctggttgccatgtcctgtttccgccacctctgtgaggaagcagatatccggtgtggggtggatgaagtgtcagtgcataacctcttgcccaactataacacattcatggagtttgcctctgtcagcaatatgatgtcaacaggaagagcagcacttcagaaaagagtgatggcactgctgaggcgcattgagcatcccactgcaggaaacactgaggcttgggaagatacacatgcaaaatgggaacaagcaacaaagctaatccttaactatccaaaagccaaaatggaagatggccaggctgctgaaagccttcacaagaccattgttaagaggcgaatgtcccatgtgagtggaggaggatccatagatttgtctgacacagactccctacaggaatggatcaacatgactggcttcctttgtgcccttgggggagtgtgcctccagcagagaagcaattctggcctggcaacctatagcccacccatgggtccagtcagtgaacgtaagggttctatgatttcagtgatgtcttcagagggaaacgcagatacacctgtcagcaaatttatggatcggctgttgtccttaatggtgtgtaaccatgagaaagtgggacttcaaatacggaccaatgttaaggatctggtgggtctagaattgagtcctgctctgtatccaatgctatttaacaaattgaagaataccatcagcaagttttttgactcccaaggacaggttttattgactgataccaatactcaatttgtagaacaaaccatagctataatgaagaacttgctagataatcatactgaaggcagctctgaacatctagggcaagctagcattgaaacaatgatgttaaatctggtcaggtatgttcgtgtgcttgggaatatggtccatgcaattcaaataaaaacgaaactgtgtcaattagttgaagtaatgatggcaaggagagatgacctctcattttgccaagagatgaaatttaggaataagatggtagaatacctgacagactgggttatgggaacatcaaaccaagcagcagatgatgatgtaaaatgtcttacaagagatttggaccaggcaagcatggaagcagtagtttcacttctagctggtctccctctgcagcctgaagaaggagatggtgtggaattgatggaagccaaatcacagttatttcttaaatacttcacattatttatgaaccttttgaatgactgcagtgaagttgaagatgaaagtgcgcaaacaggtggcaggaaacgtggcatgtctcggaggctggcatcactgaggcactgtacggtccttgcaatgtcaaacttactcaatgccaacgtagacagtggtctcatgcactccataggcttaggttaccacaaggatctccagacaagagctacatttatggaagttctgacaaaaatccttcaacaaggcacagaatttgacacacttgcagaaacagtattggctgatcggtttgagagattggtggaactggtcacaatgatgggtgatcaaggagaactccctatagcgatggctctggccaatgtggttccttgttctcagtgggatgaactagctcgagttctggttactctgtttgattctcggcatttactctaccaactgctctggaacatgttttctaaagaagtagaattggcagactccatgcagactctcttccgaggcaacagcttggccagtaaaataatgacattctgtttcaaggtatatggtgctacctatctacaaaaactcctggatcctttattacgaattgtgatcacatcctctgattggcaacatgttagctttgaagtggatcctaccaggttagaaccatcagagagccttgaggaaaaccagcggaacctccttcagatgactgaaaagttcttccatgccatcatcagttcctcctcagaattcccccctcaacttcgaagtgtgtgccactgtttataccaggcaacttgccactccctactgaataaagctacagtaaaagaaaaaaaggaaaacaaaaaatcagtggttagccagcgtttccctcagaacagcatcggtgcagtaggaagtgccatgttcctcagatttatcaatcctgccattgtctcaccgtatgaagcagggattttagataaaaagccaccacctagaatcgaaaggggcttgaagttaatgtcaaagatacttcagagtattgccaatcatgttctcttcacaaaagaagaacatatgcggcctttcaatgattttgtgaaaagcaactttgatgcagcacgcaggtttttccttgatatagcatctgattgtcctacaagtgatgcagtaaatcatagtctttccttcataagtgacggcaatgtgcttgctttacatcgtctactctggaacaatcaggagaaaattgggcagtatctttccagcaacagggatcataaagctgttggaagacgaccttttgataagatggcaacacttcttgcatacctgggtcctccagagcacaaacctgtggcagatacacactggtccagccttaaccttaccagttcaaagtttgaggaatttatgactaggcatcaggtacatgaaaaagaagaattcaaggctttgaaaacgttaagtattttctaccaagctgggacttccaaagctgggaatcctattttttattatgttgcacggaggttcaaaactggtcaaatcaatggtgatttgctgatataccatgtcttactgactttaaagccatattatgcaaagccatatgaaattgtagtggaccttacccataccgggcctagcaatcgctttaaaacagactttctctctaagtggtttgttgtttttcctggctttgcttacgacaacgtctccgcagtctatatctataactgtaactcctgggtcagggagtacaccaagtatcatgagcggctgctgactggcctcaaaggtagcaaaaggcttgttttcatagactgtcctgggaaactggctgagcacatagagcatgaacaacagaaactacctgctgccaccttggctttagaagaggacctgaaggtattccacaatgctctcaagctagctcacaaagacaccaaagtttctattaaagttggttctactgctgtccaagtaacttcagcagagcgaacaaaagtcctagggcaatcagtctttctaaatgacatttattatgcttcggaaattgaagaaatctgcctagtagatgagaaccagttcaccttaaccattgcaaaccagggcacgccgctcaccttcatgcaccaggagtgtgaagccattgtccagtctatcattcatatccggacccgctgggaactgtcacagcccgactctatcccccaacacaccaagattcggccaaaagatgtccctgggacactgctcaatatcgcattacttaatttaggcagttctgacccgagtttacggtcagctgcctataatcttctgtgtgccttaacttgtacctttaatttaaaaatcgagggccagttactagagacatcaggtttatgtatccctgccaacaacaccctctttattgtctctattagtaagacactggcagccaatgagccacacctcacgttagaatttttggaagagtgtatttctggatttagcaaatctagtattgaattgaaacacctttgtttggaatacatgactccatggctgtcaaatctagttcgtttttgcaagcataatgatgatgccaaacgacaaagagttactgctattcttgacaagctgataacaatgaccatcaatgaaaaacagatgtacccatctattcaagcaaaaatatggggaagccttgggcagattacagatctgcttgatgttgtactagacagtttcatcaaaaccagtgcaacaggtggcttgggatcaataaaagctgaggtgatggcagatactgctgtagctttggcttctggaaatgtgaaattggtttcaagcaaggttattggaaggatgtgcaaaataattgacaagacatgcttatctccaactcctactttagaacaacatcttatgtgggatgatattgctattttagcacgctacatgctgatgctgtccttcaacaattcccttgatgtggcagctcatcttccctacctcttccacgttgttactttcttagtagccacaggtccgctctcccttagagcttccacacatggactggtcattaatatcattcactctctgtgtacttgttcacagcttcattttagtgaagagaccaagcaagttttgagactcagtctgacagagttctcattacccaaattttacttgctgtttggcattagcaaagtcaagtcagctgctgtcattgccttccgttccagttaccgggacaggtcattctctcctggctcctatgagagagagacttttgctttgacatccttggaaacagtcacagaagctttgttggagatcatggaggcatgcatgagagatattccaacgtgcaagtggctggaccagtggacagaactagctcaaagatttgcattccaatataatccatccctgcaaccaagagctcttgttgtctttgggtgtattagcaaacgagtgtctcatgggcagataaagcagataatccgtattcttagcaaggcacttgagagttgcttaaaaggacctgacacttacaacagtcaagttctgatagaagctacagtaatagcactaaccaaattacagccacttcttaataaggactcgcctctgcacaaagccctcttttgggtagctgtggctgtgctgcagcttgatgaggtcaacttgtattcagcaggtaccgcacttcttgaacaaaacctgcatactttagatagtctccgtatattcaatgacaagagtccagaggaagtatttatggcaatccggaatcctctggagtggcactgcaagcaaatggatcattttgttggactcaatttcaactctaactttaactttgcattggttggacaccttttaaaagggtacaggcatccttcacctgctattgttgcaagaacagtcagaattttacatacactactaactctggttaacaaacacagaaattgtgacaaatttgaagtgaatacacagagcgtggcctacttagcagctttacttacagtgtctgaagaagttcgaagtcgctgcagcctaaaacatagaaagtcacttcttcttactgatatttcaatggaaaatgttcctatggatacatatcccattcatcatggtgacccttcctataggacactaaaggagactcagccatggtcctctcccaaaggttctgaaggataccttgcagccacctatccaactgtcggccagaccagtccccgagccaggaaatccatgagcctggacatggggcaaccttctcaggccaacactaagaagttgcttggaacaaggaaaagttttgatcacttgatatcagacacaaaggctcctaaaaggcaagaaatggaatcagggatcacaacaccccccaaaatgaggagagtagcagaaactgattatgaaatggaaactcagaggatttcctcatcacaacagcacccacatttacgtaaagtttcagtgtctgaatcaaatgttctcttggatgaagaagtacttactgatccgaagatccaggcgctgcttcttactgttctagctacactggtaaaatataccacagatgagtttgatcaacgaattctttatgaatacttagcagaggccagtgttgtgtttcccaaagtctttcctgttgtgcataatttgttggactctaagatcaacaccctgttatcattgtgccaagatccaaatttgttaaatccaatccatggaattgtgcagagtgtggtgtaccatgaagaatccccaccacaataccaaacatcttacctgcaaagttttggttttaatggcttgtggcggtttgcaggaccgttttcaaagcaaacacaaattccagactatgctgagcttattgttaagtttcttgatgccttgattgacacgtacctgcctggaattgatgaagaaaccagtgaagaatccctcctgactcccacatctccttaccctcctgcactgcagagccagcttagtatcactgccaaccttaacctttctaattccatgacctcacttgcaacttcccagcattccccaggaatcgacaaggagaacgttgaactctcccctaccactggccactgtaacagtggacgaactcgccacggatccgcaagccaagtgcagaagcaaagaagcgctggcagtttcaaacgtaatagcattaagaagatcgtgtgaagcttgcttgctttcttttttaaaatcaacttaacatgggctcttcactagtgaccccttccctgtccttgccctttccccccatgttgtaatgctgcacttcctgttttataatgaacccatccggtttgccatgttgccagatgatcaactcttcgaagccttgcctaaatttaatgctgccttttctttaactttttttcttctacttttggcgtgtatctggtatatgtaagtgttcagaacaactgcaaagaaagtgggaggtcaggaaacttttaactgagaaatctcaattgtaagagaggatgaattcttgaatactgctactactggccagtgatgaaagccatttgcacagagctctgccttctgtggttttcccttcttcatcctacagagtaaagtgttagtcctatttatacatttttcaagatacaagtttatgagagaaatagtattataaccccagtatgtttaatcttttagctgtggactttttttttaaccgtacaaaactgaaagaaccatagaggtcaagcctcagtgacttgacaccataaagccacagacaaggtacttgggggggagggcagggaaatttcatattttatagtggattcttaagaaatactaacacttgagtattagcaataattacaggaaaataagtgcgaccacatatatcttaacattactgaattaaaactatggcttctaagtccttatccaaactcagtcatccaaactagtttatttttttctccagttgattatcttttaatttttaattttgctaaaggtggtttttttgtgttttgttttttgtaaaccaaaactatactaagtatagtaattatatatatatatatattttttcccctccccctcttctttcctaactaattctgagcagggtaatcagtgaacaaagtgttgaaaattgttcccagaaggtaattttcatagatgtttgcattagctccatagcaaaatggaatggtacgtgacatttagggtagctgatatttttattttgttaaataatttccaagaatagagtatggtgtatattataaatttctttgataagatgtattttgaatgtcttttaatcttcctcctcctctccaaaaaaatcagaaacctctttaagaaaacatgtaggttatatatgctagaattgcatttaatcactgtgaaaagactggtcagcctgcattagtatgacagtaggggggctgttagaattgctgctatactggtggtatggattatcatggcattggaattttcatagtaatgcagatccaatttctttgtggtacctgcagtttacaaaataatttgacttcagtgagcatattggtatctggatgttccaatttagaactaaaccatatttattacaaaaagatattaatccctctactcccaggttccctttatatgttaagatataatggctttgaggggggaaaaaataaacctaggggagaggggagtttcctgtagtgctgtttcattagaggatttcagtaaattaaattccacagctaattcaataaataatggtacatttaagtgttctgattttaataatatatttcacatttatccacacagtaacaatgtaatatgttaatgtaaataaaattggttttgatactcagaaataacaagaatttaattttttaaatttgtttacagtcctgggaaaagtaagaattatttgccaaaataagaggaaagaaaaccttagtattattaatgagtttaccatagaattgttggaaatactgaagacaggtgcaatttactaaacttttgtttttaaactattgtagaggctgcattagaagaaaatgtttataatgacagagcaactatgactatataaaaaagctgaaattagaactgtgtttagaaatagatcagtaacccagtgccaaggatgccaagctgccaccatggtcttggctctcccacaacccagtgtttctggggtaagtttcacagtttctaggccctggaatagcaggcagtgtaagcctttgataactttagttcgatgtttttcttgtttttgtttgttggtttggtgcatatgatagtgggtgttatgctattttgctcttcccatcaaaataaagaaacttccagaggtttactgttaaaaatactgatatttccataaacgggtttaccaagggtgtagtatttcataccgcctgaaatgatcagcattggcacaaatcaaaattcagccgcctttgaaatgcaaaaatacctttgactagtaagtacatcctaggagtttgaaaacttaactaaggtttaaaatttaccttgtttaaagaacttctgacttttgaggaaaatctagctttccaagtaactaaaatgtacatgagataaacctctcaccactatgtgtcccttgagaaatgcaacacttttttagtcttcatacttgtaatctataaaagaaattctgaagtttagaccaagttgcccatttctgcgtaattgacataagttctgttaaaaatattataagtaattcgtttcggtttgtagatgtttcccctgacttgttaaagaggaaaccaggaactcagtcatgtttttgtcctggataatctacctgttatgccagtactcccatccgaggggcatgcccttagttgcccagatggagatgcagttcagtagatttggggcaaagtggctacagctctgtcttccattcactcaacacctgttcatgactgagccaggtgcccaggacacatcctaaacagtcagcttctatcctgtgtcctagttggggagacagagtgccagccagcaaccctcccaggtttgtaggttttaggggttttcagttttgtttgggttttttgttttttgtttttgtttctacatccttccccgactcccaggcataatgaggcatgtcttactcaatgttatgcaatggatttaggcaaaaattcattcttagtgtcagccacacaattttttttaatgcagtatattcacctgtaaatagtttgtgtaaaatttgacaaaaaaagtatatttactatactgtaaatatatgtgatgatatattgtattattttgcttttttgtaaagcagttagttgctgcacatggataacaacaaaaatttgattattctcgtgttagtattgttaacttctttttgcgactgcgttacatcatttaaagaaaatgctgtgtattgtaaacttaaattgtatatgataacttactgtcctttccatccgggcctaaactttggcagttcctttgtctacaaccttgttaatactgtaaacagttgtacgccagcaggaaaaatactgcccaacagacaaaatcgatcattgtaggggaaaatcatagaaatccatttcagatctttattgttcctcaccccattttcctccttgtgtatgtacttcccccacccccctttttttaagtaaaatgtaaattcaatctgctctaaga

SEQ ID NO: 2764 - DNA, 1256 bp, Homo sapiens
  source 1..1256: mol_type = genomic DNA
aggcatgcatgagagatattccaacgtgcaagtggctggaccagtggacagaactagctcaaaggactcgcctctgcacaaagccctcttttgggtagctgtggctgtgctgcagcttgatgaggtcaacttgtattcagcaggtaccgcacttcttgaacaaaacctgcatactttagatagtctccgtatattcaatgacaagagtccagaggaagtatttatggcaatccggaatcctctggagtggcactgcaagcaaatggatcattttgttggactcaatttcaactctaactttaactttgcattggttggacaccttttaaaagggtacaggcatccttcacctgctattgttgcaagaacagtcagaattttacatacactactaactctggttaacaaacacagaaattgtgacaaatttgaagtgaatacacagagcgtggcctacttagcagctttacttacagtgtctgaagaagttcgaagtcgctgcagcctaaaacatagaaagtcacttcttcttactgatatttcaatggaaaatgttcctatggatacatatcccattcatcatggtgacccttcctataggaacaaggaaaagttttgatcacttgatatcagacacaaaggctcctaaaaggcaagaaatggaatcagggatcacaacaccccccaaaatgaggagagtagcagaaactgattatgaaatggaaactcagaggatttcctcatcacaacagcacccacatttacgtaaagtttcagtgtctgaatcaaatgttctcttggatgaagaagtacttactgatccgaagatccaggcgctgcttcttactgttctagctacactggtaaaatataccacagatgagtttgatcaacgaattctttatgaatacttagcagaggccagtgttgtgtttcccaaagtctttcctgttgtgcataatttgttggactctaagatcaacaccctgttatcattgtgccaagatccaaatttgttaaatccaatccatggaattgtgcagagtgtggtgtaccatgaagaatccccaccacaataccaaacatcttacctgcaaagttttggttttaatggcttgtggcggtttgcaggaccgttttcaaagcaaacacaaattccagactatgctgagcttattgttaagtttcttgatgccttgattgacacgtacctgcctggaattgatgaagaaaccagtgaagaatccctcctgact

SEQ ID NO: 2765 - DNA, 2939 bp, Homo sapiens
  source 1..2939: mol_type = genomic DNA
aatctctagctcgctcgcgctccctctccccgggccgtggaaaggatcccacttccggtggggtgtcatggcggcgtctcggactgtgatggctgtggggagacggcgctagtggggagagcgaccaagaggccccctcccctccccgggtccccttcccctatccccctccccccagcctccttgccaacgccccctttccctctccccctcccgctcggcgctgaccccccatccccacccccgtgggaacactgggagcctgcactccacagaccctctccttgcctcttccctcacctcagcctccgctccccgccctcttcccggcccagggcgccggcccacccttccctccgccgccccccggccgcggggaggacatggccgcgcacaggccggtggaatgggtccaggccgtggtcagccgcttcgacgagcagcttccaataaaaacaggacagcagaacacacataccaaagtcagtactgagcacaacaaggaatgtctaatcaatatttccaaatacaagttttctttggttataagcggcctcactactattttaaagaatgttaacaatatgagaatatttggagaagctgctgaaaaaaatttatatctctctcagttgattatattggatacactggaaaaatgtcttgctgggcaaccaaaggacacaatgagattagatgaaacgatgctggtcaaacagttgctgccagaaatctgccattttcttcacacctgtcgtgaaggaaaccagcatgcagctgaacttcggaattctgcctctggggttttattttctctcagctgcaacaacttcaatgcagtctttagtcgcatttctaccaggttacaggaattaactgtttgttcagaagacaatgttgatgttcatgatatagaattgttacagtatatcaatgtggattgtgcaaaattaaaacgactcctgaaggaaacagcatttaaatttaaagccctaaagaaggttgcgcagttagcagttataaatagcctggaaaaggcattttggaactgggtagaaaattatccagatgaatttacaaaactgtaccagatcccacagactgatatggctgaatgtgcagaaaagctatttgacttggtggatggttttgctgaaagcaccaaacgtaaagcagcagtttggccactacaaatcattctccttatcttgtgtccagaaataatccaggatatatccaaagacgtggttgatgaaaacaacatgaataagaagttatttctggacagtctacgaaaagctcttgctggccatggaggaagtaggcagctgacagaaagtgctgcaattgcctgtgtcaaactgtgtaaagcaagtacttacatcaattgggaagataactctgtcattttcctacttgttcagtccatggtggttgatcttaagaacctgctttttaatccaagtaagccattctcaagaggcagtcagcctgcagatgtggatctaatgattgactgccttgtttcttgctttcgtataagccctcacaacaaccaacactttaagatctgcctggctcagaattcaccttctacatttcactatgtgctggtaaattcactccatcgaatcatcaccaattccgcattggattggtggcctaagattgatgctgtgtattgtcactcggttgaacttcgaaatatgtttggtgaaacacttcataaagcagtgcaaggttgtggagcacacccagcaatacgaatggcaccgagtcttacatttaaagaaaaagtaacaagccttaaatttaaagaaaaacctacagacctggagacaagaagctataagtatcttctcttgtccatggtgaaactaattcatgcagatccaaagctcttgctttgtaatccaagaaaacaggggcccgaaacccaaggcagtacagcagaattaattacagggctcgtccaactggtccctcagtcacacatgccagagattgctcaggaagcaatggaggctctgctggttcttcatcagttagatagcattgatttgtggaatcctgatgctcctgtagaaacattttgggagattaggtatatgtacttttattttttaaattcaacttttaaattttattttgtatttttgtcttgaaatattaactctgtagtacttagtacattgtaaaacttacacttccaaaggttttatggttttgtattttatttgacttcaaattattagaatttcttgttttaactgtaagaaaagtatcacagcaatttagaaaataaattttaagaatagtgctaaattttgtcaccctaacataagtactgttgtttggtatattacttttttcagatttcaatgtggttactactgtatttttaatagattttcatagttataagcctagaatgataaaattttgtaacaatactgttttttcagttttttgaactatgatctttcataaactttctgtaataccaatgctttcgatgaatgaattaataatggacacctgcttagaagaaaaaaatgtatgcagaattttgtggtctgcttcctagattatacaaatcattacattttaatgagcatgaagtcaccacacggaggaaaatgtaaatgtgtaaacctcaagtttgccattatcttataagaatgggtgtgctaagttacttggcagctgaattaaaccttactctagagtagtgctgtccactagtaatataatgagaaccccatatgttaaaaacttttttacttactacattaaagagtaaaaagaagcaggtaaaattaattgtaattatgttttgtttaacccggtgtatattatctataatttcaacatgtaatcaatataaaagttattaatgacatttcattctcttttttttaataaagtcttcaaacttt

SEQ ID NO: 2766 - DNA, 2028 bp, Homo sapiens
  source 1..2028: mol_type = genomic DNA
aggcatgcatgagagatattccaacgtgcaagtggctggaccagtggacagaactagctcaaagttctgtggatcttttaattgcagatttgcattccaatataatccatccctgcaaccaagagctcttgttgtctttgggtgtattagcaaacgagtgtctcatgggcagataaagcagataatccgtattcttagcaaggcacttgagagttgcttaaaaggacctgacacttacaacagtcaagttctgatagaagctacagtaatagcactaaccaaattacagccacttcttaataaggactcgcctctgcacaaagccctcttttgggtagctgtggctgtgctgcagcttgatgaggtcaacttgtattcagcaggtaccgcacttcttgaacaaaacctgcatactttagatagtctccgtatattcaatgacaagagtccagaggaagtatttatggcaatccggaatcctctggagtggcactgcaagcaaatggatcattttgttggactcaatttcaactctaactttaactttgcattggttggacaccttttaaaagggtacaggcatccttcacctgctattgttgcaagaacagtcagaattttacatacactactaactctggttaacaaacacagaaattgtgacaaatttgaagtgaatacacagagcgtggcctacttagcagctttacttacagtgtctgaagaagttcgaagtcgctgcagcctaaaacatagaaagtcacttcttcttactgatatttcaatggaaaatgttcctatggatacatatcccattcatcatggtgacccttcctataggacactaaaggagactcagccatggtcctctcccaaaggttctgaaggataccttgcagccacctatccaactgtcggccagaccagtccccgagccaggaaatccatgagcctggacatggggcaaccttctcaggccaacactaagaagttgcttggaacaaggaaaagttttgatcacttgatatcagacacaaaggctcctaaaaggcaagaaatggaatcagggatcacaacaccccccaaaatgaggagagtagcagaaactgattatgaaatggaaactcagaggatttcctcatcacaacagcacccacatttacgtaaagtttcagtgtctgaatcaaatgttctcttggatgaagaagtacttactgatccgaagatccaggcgctgcttcttactgttctagctacactggtaaaatataccacagatgagtttgatcaacgaattctttatgaatacttagcagaggccagtgttgtgtttcccaaagtctttcctgttgtgcataatttgttggactctaagatcaacaccctgttatcattgtgccaagatccaaatttgttaaatccaatccatggaattgtgcagagtgtggtgtaccatgaagaatccccaccacaataccaaacatcttacctgcaaagttttggttttaatggcttgtggcggtttgcaggaccgttttcaaagcaaacacaaattccagactatgctgagcttattgttaagtttcttgatgccttgattgacacgtacctgcctggaattgatgaagaaaccagtgaagaatccctcctgactcccacatctccttaccctcctgcactgcagagccagcttagtatcactgccaaccttaacctttctaattccatgacctcacttgcaacttcccagcattccccaggaatcgacaaggagaacgttgaactctcccctaccactggccactgtaacagtggacgaactcgccacggatccgcaagccaagtgcagaagcaaagaagcgctggcagtttcaaactagcacttcttaacctgctcactgcccatcagaacagcctctgacaaagctgcatccaaattctttaaagggcaattcattgccccaagtaatctgccaaacctgtcttcatttggaaatcagtcttcatattcagcactgctcagcacgc

SEQ ID NO: 2767 - DNA, 11031 bp, Homo sapiens
  source 1..11031: mol_type = genomic DNA
aattgggaagataactctgtcattttcctacttgttcagtccatggtggttgatcttaagaacctgctttttaatccaagtaagccattctcaagaggcagtcagcctgcagatgtggatctaatgattgactgccttgtttcttgctttcgtataagccctcacaacaaccaacactttaagatctgcctggctcagaattcaccttctacatttcactatgtgctggtaaattcactccatcgaatcatcaccaattccgcattggattggtggcctaagattgatgctgtgtattgtcactcggttgaacttcgaaatatgtttggtgaaacacttcataaagcagtgcaaggttgtggagcacacccagcaatacgaatggcaccgagtcttacatttaaagaaaaagtaacaagccttaaatttaaagaaaaacctacagacctggagacaagaagctataagtatcttctcttgtccatggtgaaactaattcatgcagatccaaagctcttgctttgtaatccaagaaaacaggggcccgaaacccaaggcagtacagcagaattaattacagggctcgtccaactggtccctcagtcacacatgccagagattgctcaggaagcaatggaggctctgctggttcttcatcagttagatagcattgatttgtggaatcctgatgctcctgtagaaacattttgggagattagctcacaaatgcttttttacatctgcaagaaattaactagtcatcaaatgcttagtagcacagaaattctcaagtggttgcgggaaatattgatctgcaggaataaatttcttcttaaaaataagcaggcagatagaagttcctgtcactttctccttttttacggggtaggatgtgatattccttctagtggaaataccagtcaaatgtccatggatcatgaagaattactacgtactcctggagcctctctccggaagggaaaagggaactcctctatggatagtgcagcaggatgcagcggaacccccccgatttgccgacaagcccagaccaaactagaagtggccctgtacatgtttctgtggaaccctgacactgaagctgttctggttgccatgtcctgtttccgccacctctgtgaggaagcagatatccggtgtggggtggatgaagtgtcagtgcataacctcttgcccaactataacacattcatggagtttgcctctgtcagcaatatgatgtcaacaggaagagcagcacttcagaaaagagtgatggcactgctgaggcgcattgagcatcccactgcaggaaacactgaggcttgggaagatacacatgcaaaatgggaacaagcaacaaagctaatccttaactatccaaaagccaaaatggaagatggccaggctgctgaaagccttcacaagaccattgttaagaggcgaatgtcccatgtgagtggaggaggatccatagatttgtctgacacagactccctacaggaatggatcaacatgactggcttcctttgtgcccttgggggagtgtgcctccagcagagaagcaattctggcctggcaacctatagcccacccatgggtccagtcagtgaacgtaagggttctatgatttcagtgatgtcttcagagggaaacgcagatacacctgtcagcaaatttatggatcggctgttgtccttaatggtgtgtaaccatgagaaagtgggacttcaaatacggaccaatgttaaggatctggtgggtctagaattgagtcctgctctgtatccaatgctatttaacaaattgaagaataccatcagcaagttttttgactcccaaggacaggttttattgactgataccaatactcaatttgtagaacaaaccatagctataatgaagaacttgctagataatcatactgaaggcagctctgaacatctagggcaagctagcattgaaacaatgatgttaaatctggtcaggtatgttcgtgtgcttgggaatatggtccatgcaattcaaataaaaacgaaactgtgtcaattagttgaagtaatgatggcaaggagagatgacctctcattttgccaagagatgaaatttaggaataagatggtagaatacctgacagactgggttatgggaacatcaaaccaagcagcagatgatgatgtaaaatgtcttacaagagatttggaccaggcaagcatggaagcagtagtttcacttctagctggtctccctctgcagcctgaagaaggagatggtgtggaattgatggaagccaaatcacagttatttcttaaatacttcacattatttatgaaccttttgaatgactgcagtgaagttgaagatgaaagtgcgcaaacaggtggcaggaaacgtggcatgtctcggaggctggcatcactgaggcactgtacggtccttgcaatgtcaaacttactcaatgccaacgtagacagtggtctcatgcactccataggcttaggttaccacaaggatctccagacaagagctacatttatggaagttctgacaaaaatccttcaacaaggcacagaatttgacacacttgcagaaacagtattggctgatcggtttgagagattggtggaactggtcacaatgatgggtgatcaaggagaactccctatagcgatggctctggccaatgtggttccttgttctcagtgggatgaactagctcgagttctggttactctgtttgattctcggcatttactctaccaactgctctggaacatgttttctaaagaagtagaattggcagactccatgcagactctcttccgaggcaacagcttggccagtaaaataatgacattctgtttcaaggtatatggtgctacctatctacaaaaactcctggatcctttattacgaattgtgatcacatcctctgattggcaacatgttagctttgaagtggatcctaccaggttagaaccatcagagagccttgaggaaaaccagcggaacctccttcagatgactgaaaagttcttccatgccatcatcagttcctcctcagaattcccccctcaacttcgaagtgtgtgccactgtttataccaggtggttagccagcgtttccctcagaacagcatcggtgcagtaggaagtgccatgttcctcagatttatcaatcctgccattgtctcaccgtatgaagcagggattttagataaaaagccaccacctagaatcgaaaggggcttgaagttaatgtcaaagatacttcagagtattgccaatcatgttctcttcacaaaagaagaacatatgcggcctttcaatgattttgtgaaaagcaactttgatgcagcacgcaggtttttccttgatatagcatctgattgtcctacaagtgatgcagtaaatcatagtctttccttcataagtgacggcaatgtgcttgctttacatcgtctactctggaacaatcaggagaaaattgggcagtatctttccagcaacagggatcataaagctgttggaagacgaccttttgataagatggcaacacttcttgcatacctgggtcctccagagcacaaacctgtggcagatacacactggtccagccttaaccttaccagttcaaagtttgaggaatttatgactaggcatcaggtacatgaaaaagaagaattcaaggctttgaaaacgttaagtattttctaccaagctgggacttccaaagctgggaatcctattttttattatgttgcacggaggttcaaaactggtcaaatcaatggtgatttgctgatataccatgtcttactgactttaaagccatattatgcaaagccatatgaaattgtagtggaccttacccataccgggcctagcaatcgctttaaaacagactttctctctaagtggtttgttgtttttcctggctttgcttacgacaacgtctccgcagtctatatctataactgtaactcctgggtcagggagtacaccaagtatcatgagcggctgctgactggcctcaaaggtagcaaaaggcttgttttcatagactgtcctgggaaactggctgagcacatagagcatgaacaacagaaactacctgctgccaccttggctttagaagaggacctgaaggtattccacaatgctctcaagctagctcacaaagacaccaaagtttctattaaagttggttctactgctgtccaagtaacttcagcagagcgaacaaaagtcctagggcaatcagtctttctaaatgacatttattatgcttcggaaattgaagaaatctgcctagtagatgagaaccagttcaccttaaccattgcaaaccagggcacgccgctcaccttcatgcaccaggagtgtgaagccattgtccagtctatcattcatatccggacccgctgggaactgtcacagcccgactctatcccccaacacaccaagattcggccaaaagatgtccctgggacactgctcaatatcgcattacttaatttaggcagttctgacccgagtttacggtcagctgcctataatcttctgtgtgccttaacttgtacctttaatttaaaaatcgagggccagttactagagacatcaggtttatgtatccctgccaacaacaccctctttattgtctctattagtaagacactggcagccaatgagccacacctcacgttagaatttttggaagagtgtatttctggatttagcaaatctagtattgaattgaaacacctttgtttggaatacatgactccatggctgtcaaatctagttcgtttttgcaagcataatgatgatgccaaacgacaaagagttactgctattcttgacaagctgataacaatgaccatcaatgaaaaacagatgtacccatctattcaagcaaaaatatggggaagccttgggcagattacagatctgcttgatgttgtactagacagtttcatcaaaaccagtgcaacaggtggcttgggatcaataaaagctgaggtgatggcagatactgctgtagctttggcttctggaaatgtgaaattggtttcaagcaaggttattggaaggatgtgcaaaataattgacaagacatgcttatctccaactcctactttagaacaacatcttatgtgggatgatattgctattttagcacgctacatgctgatgctgtccttcaacaattcccttgatgtggcagctcatcttccctacctcttccacgttgttactttcttagtagccacaggtccgctctcccttagagcttccacacatggactggtcattaatatcattcactctctgtgtacttgttcacagcttcattttagtgaagagaccaagcaagttttgagactcagtctgacagagttctcattacccaaattttacttgctgtttggcattagcaaagtcaagtcagctgctgtcattgccttccgttccagttaccgggacaggtcattctctcctggctcctatgagagagagacttttgctttgacatccttggaaacagtcacagaagctttgttggagatcatggaggcatgcatgagagatattccaacgtgcaagtggctggaccagtggacagaactagctcaaagatttgcattccaatataatccatccctgcaaccaagagctcttgttgtctttgggtgtattagcaaacgagtgtctcatgggcagataaagcagataatccgtattcttagcaaggcacttgagagttgcttaaaaggacctgacacttacaacagtcaagttctgatagaagctacagtaatagcactaaccaaattacagccacttcttaataaggactcgcctctgcacaaagccctcttttgggtagctgtggctgtgctgcagcttgatgaggtcaacttgtattcagcaggtaccgcacttcttgaacaaaacctgcatactttagatagtctccgtatattcaatgacaagagtccagaggaagtatttatggcaatccggaatcctctggagtggcactgcaagcaaatggatcattttgttggactcaatttcaactctaactttaactttgcattggttggacaccttttaaaagggtacaggcatccttcacctgctattgttgcaagaacagtcagaattttacatacactactaactctggttaacaaacacagaaattgtgacaaatttgaagtgaatacacagagcgtggcctacttagcagctttacttacagtgtctgaagaagttcgaagtcgctgcagcctaaaacatagaaagtcacttcttcttactgatatttcaatggaaaatgttcctatggatacatatcccattcatcatggtgacccttcctataggacactaaaggagactcagccatggtcctctcccaaaggttctgaaggataccttgcagccacctatccaactgtcggccagaccagtccccgagccaggaaatccatgagcctggacatggggcaaccttctcaggccaacactaagaagttgcttggaacaaggaaaagttttgatcacttgatatcagacacaaaggctcctaaaaggcaagaaatggaatcagggatcacaacaccccccaaaatgaggagagtagcagaaactgattatgaaatggaaactcagaggatttcctcatcacaacagcacccacatttacgtaaagtttcagtgtctgaatcaaatgttctcttggatgaagaagtacttactgatccgaagatccaggcgctgcttcttactgttctagctacactggtaaaatataccacagatgagtttgatcaacgaattctttatgaatacttagcagaggccagtgttgtgtttcccaaagtctttcctgttgtgcataatttgttggactctaagatcaacaccctgttatcattgtgccaagatccaaatttgttaaatccaatccatggaattgtgcagagtgtggtgtaccatgaagaatccccaccacaataccaaacatcttacctgcaaagttttggttttaatggcttgtggcggtttgcaggaccgttttcaaagcaaacacaaattccagactatgctgagcttattgttaagtttcttgatgccttgattgacacgtacctgcctggaattgatgaagaaaccagtgaagaatccctcctgactcccacatctccttaccctcctgcactgcagagccagcttagtatcactgccaaccttaacctttctaattccatgacctcacttgcaacttcccagcattccccagcttctctgccttgctctaaatcagcagttttcatgcagctgttccctcatcaaggaatcgacaaggagaacgttgaactctcccctaccactggccactgtaacagtggacgaactcgccacggatccgcaagccaagtgcagaagcaaagaagcgctggcagtttcaaacgtaatagcattaagaagatcgtgtgaagcttgcttgctttcttttttaaaatcaacttaacatgggctcttcactagtgaccccttccctgtccttgccctttccccccatgttgtaatgctgcacttcctgttttataatgaacccatccggtttgccatgttgccagatgatcaactcttcgaagccttgcctaaatttaatgctgccttttctttaactttttttcttctacttttggcgtgtatctggtatatgtaagtgttcagaacaactgcaaagaaagtgggaggtcaggaaacttttaactgagaaatctcaattgtaagagaggatgaattcttgaatactgctactactggccagtgatgaaagccatttgcacagagctctgccttctgtggttttcccttcttcatcctacagagtaaagtgttagtcctatttatacatttttcaagatacaagtttatgagagaaatagtattataaccccagtatgtttaatcttttagctgtggactttttttttaaccgtacaaaactgaaagaaccatagaggtcaagcctcagtgacttgacaccataaagccacagacaaggtacttgggggggagggcagggaaatttcatattttatagtggattcttaagaaatactaacacttgagtattagcaataattacaggaaaataagtgcgaccacatatatcttaacattactgaattaaaactatggcttctaagtccttatccaaactcagtcatccaaactagtttatttttttctccagttgattatcttttaatttttaattttgctaaaggtggtttttttgtgttttgttttttgtaaaccaaaactatactaagtatagtaattatatatatatatatattttttcccctccccctcttctttcctaactaattctgagcagggtaatcagtgaacaaagtgttgaaaattgttcccagaaggtaattttcatagatgtttgcattagctccatagcaaaatggaatggtacgtgacatttagggtagctgatatttttattttgttaaataatttccaagaatagagtatggtgtatattataaatttctttgataagatgtattttgaatgtcttttaatcttcctcctcctctccaaaaaaatcagaaacctctttaagaaaacatgtaggttatatatgctagaattgcatttaatcactgtgaaaagactggtcagcctgcattagtatgacagtaggggggctgttagaattgctgctatactggtggtatggattatcatggcattggaattttcatagtaatgcagatccaatttctttgtggtacctgcagtttacaaaataatttgacttcagtgagcatattggtatctggatgttccaatttagaactaaaccatatttattacaaaaagatattaatccctctactcccaggttccctttatatgttaagatataatggctttgaggggggaaaaaataaacctaggggagaggggagtttcctgtagtgctgtttcattagaggatttcagtaaattaaattccacagctaattcaataaataatggtacatttaagtgttctgattttaataatatatttcacatttatccacacagtaacaatgtaatatgttaatgtaaataaaattggttttgatactcagaaataacaagaatttaattttttaaatttgtttacagtcctgggaaaagtaagaattatttgccaaaataagaggaaagaaaaccttagtattattaatgagtttaccatagaattgttggaaatactgaagacaggtgcaatttactaaacttttgtttttaaactattgtagaggctgcattagaagaaaatgtttataatgacagagcaactatgactatataaaaaagctgaaattagaactgtgtttagaaatagatcagtaacccagtgccaaggatgccaagctgccaccatggtcttggctctcccacaacccagtgtttctggggtaagtttcacagtttctaggccctggaatagcaggcagtgtaagcctttgataactttagttcgatgtttttcttgtttttgtttgttggtttggtgcatatgatagtgggtgttatgctattttgctcttcccatcaaaataaagaaacttccagaggtttactgttaaaaatactgatatttccataaacgggtttaccaagggtgtagtatttcataccgcctgaaatgatcagcattggcacaaatcaaaattcagccgcctttgaaatgcaaaaatacctttgactagtaagtacatcctaggagtttgaaaacttaactaaggtttaaaatttaccttgtttaaagaacttctgacttttgaggaaaatctagctttccaagtaactaaaatgtacatgagataaacctctcaccactatgtgtcccttgagaaatgcaacacttttttagtcttcatacttgtaatctataaaagaaattctgaagtttagaccaagttgcccatttctgcgtaattgacataagttctgttaaaaatattataagtaattcgtttcggtttgtagatgtttcccctgacttgttaaagaggaaaccaggaactcagtcatgtttttgtcctggataatctacctgttatgccagtactcccatccgaggggcatgcccttagttgcccagatggagatgcagttcagtagatttggggcaaagtggctacagctctgtcttccattcactcaacacctgttcatgactgagccaggtgcccaggacacatcctaaacagtcagcttctatcctgtgtcctagttggggagacagagtgccagccagcaaccctcccaggtttgtaggttttaggggttttcagttttgtttgggttttttgttttttgtttttgtttctacatccttccccgactcccaggcataatgaggcatgtcttactcaatgttatgcaatggatttaggcaaaaattcattcttagtgtcagccacacaattttttttaatgcagtatattcacctgtaaatagtttgtgtaaaatttgacaaaaaaagtatatttactatactgtaaatatatgtgatgatatattgtattattttgcttttttgtaaagcagttagttgctgcacatggataacaacaaaaatttgattattctcgtgttagtattgttaacttctttttgcgactgcgttacatcatttaaagaaaatgctgtgtattgtaaacttaaattgtatatgataacttactgtcctttccatccgggcctaaactttggcagttcctttgtctacaaccttgttaatactgtaaacagttgtacgccagcaggaaaaatactgcccaacagacaaaatcgatcattgtaggggaaaatcatagaaatccatttcagatctttattgttcctcaccccattttcctccttgtgtatgtacttcccccacccccctttttttaagtaaaatgtaaattcaatctgctctaaga

SEQ ID NO: 2768 - DNA, 2020 bp, Homo sapiens
  source 1..2020: mol_type = genomic DNA
tcccggagtgccgggtcgcgcctgcaccgaaggtcccggctcctgtgccctccctgcagccgtcagggcccgtcccccaactcccctttccgctcaggcagggtcctcgcggcccatgctggccgctggggacccgcgcagcccagaccgttcccgggccgggcagccggccaccatggtggccctgaggcctgtgcagcaactccaggggggctaaagggctcagagtgcaggccgtggggcgcgagggtcccgggcctgagccccgcgccatggccggggccatcgcttcccgcatgagcttcagctctctcaagaggaagcaacccaagacgttcaccgtgaggatcgtcaccatggacgccgagatggagttcaattgcgaggtaaagaagcagattttagatgaaaagatctactgccctcctgaggcttctgtgctcctggcttcttacgccgtccaggccaagtatggtgactacgaccccagtgttcacaagcggggatttttggcccaagaggaattgcttccaaaaagggtaataaatctgtatcagatgactccggaaatgtgggaggagagaattactgcttggtacgcagagcaccgaggccgagccagggatgaagctgaaatggaatatctgaagatagctcaggacctggagatgtacggtgtgaactactttgcaatccggaataaaaagggcacagagctgctgcttggagtggatgccctggggcttcacatttatgaccctgagaacagactgacccccaagatctccttcccgtggaatgaaatccgaaacatctcgtacagtgacaaggagtttactattaaaccactggataagaaaattgatgtcttcaagtttaactcctcaaagcttcgtgttaataagctgattctccagctatgtatcgggaaccatgatctatttatgaggagaaggaaagccgattctttggaagttcagcagatgaaagcccaggccagggaggagaaggctagaaagcagatggagcggcagcgcctcgctcgagagaagcagatgagggaggaggctgaacgcacgagggatgagttggagaggaggctgctgcagatgaaagaagaagcaacaatggccaacgaagcactgatgcggtctgaggagacagctgacctgttggctgaaaaggcccagatcaccgaggaggaggcaaaacttctggcccagaaggccgcagaggctgagcaggaaatgcagcgcatcaaggccacagcgattcgcacggaggaggagaagcgcctgatggagcagaaggtgctggaagccgaggtgctggcactgaagatggctgaggagtcagagaggagggccaaagaggcagatcagctgaagcaggacctgcaggaagcacgcgaggcggagcgaagagccaagcagaagctcctggagattgccaccaagcccacgtacccgcccatgaacccaattccagcaccgttgcctcctgacataccaagcttcaacctcattggtgacagcctgtctttcgacttcaaagatactgacatgaagcggctttccatggagatagagaaagaaaaagtggaatacatggaaaagagcaagcatctgcaggagcagctcaatgaactcaagacagaaatcgaggccttgaaactgaaagagagggagacagctctggatattctgcacaatgagaactccgacaggggtggcagcagcaagcacaataccattaaaaagcctcaagcccaaggcagaagacctatctgcatttgagccctcaaacttcctctccataggctgagcagagatgtggtcagagtgaactcacattggaacagtacactcacggcaccctggagaggagcggtcactggttgctgagtgaattaaccgaatgtttgctgcttttctcctgcaacagttcattattcctccagcatgcctaggcagtggagagaatgtattttgcccaataataaaatgacatcctgcctcta

SEQ ID NO: 2769 - DNA, 6025 bp, Homo sapiens
  source 1..6025: mol_type = genomic DNA
cgcttcccgcgggcgcgcggagtgaggacggtgacagccacgcgcgcgcgtacgcgcccgatgcagcgcggccccgtgaccctagtcggccgctgagaggcgcgcggagtctgggccgctgccgtctaggggtcccgtcccgaggcgtccccggcatctccggcccgaatcccggagtgccgggtcgcgcctgcaccgaaggtcccggctcctgtgccctccctgcagccgtcagggcccgtcccccaactcccctttccgctcaggcagggtcctcgcggcccatgctggccgctggggacccgcgcagcccagaccgttcccgggccgggcagccggccaccatggtggccctgaggcctgtgcagcaactccaggggggctaaagggctcagagtgcaggccgtggggcgcgagggtcccgggcctgagccccgcgccatggccggggccatcgcttcccgcatgagcttcagctctctcaagaggaagcaacccaagacgttcaccgtgaggatcgtcaccatggacgccgagatggagttcaattgcgagatgaagtggaaagggaaggacctctttgatttggtgtgccggactctggggctccgagaaacctggttctttggactgcagtacacaatcaaggacacagtggcctggctcaaaatggacaagaaggtactggatcatgatgtttcaaaggaagaaccagtcacctttcacttcttggccaaattttatcctgagaatgctgaagaggagctggttcaggagatcacacaacatttattcttcttacaggtaaagaagcagattttagatgaaaagatctactgccctcctgaggcttctgtgctcctggcttcttacgccgtccaggccaagtatggtgactacgaccccagtgttcacaagcggggatttttggcccaagaggaattgcttccaaaaagggtaataaatctgtatcagatgactccggaaatgtgggaggagagaattactgcttggtacgcagagcaccgaggccgagccagggatgaagctgaaatggaatatctgaagatagctcaggacctggagatgtacggtgtgaactactttgcaatccggaataaaaagggcacagagctgctgcttggagtggatgccctggggcttcacatttatgaccctgagaacagactgacccccaagatctccttcccgtggaatgaaatccgaaacatctcgtacagtgacaaggagtttactattaaaccactggataagaaaattgatgtcttcaagtttaactcctcaaagcttcgtgttaataagctgattctccagctatgtatcgggaaccatgatctatttatgaggagaaggaaagccgattctttggaagttcagcagatgaaagcccaggccagggaggagaaggctagaaagcagatggagcggcagcgcctcgctcgagagaagcagatgagggaggaggctgaacgcacgagggatgagttggagaggaggctgctgcagatgaaagaagaagcaacaatggccaacgaagcactgatgcggtctgaggagacagctgacctgttggctgaaaaggcccagatcaccgaggaggaggcaaaacttctggcccagaaggccgcagaggctgagcaggaaatgcagcgcatcaaggccacagcgattcgcacggaggaggagaagcgcctgatggagcagaaggtgctggaagccgaggtgctggcactgaagatggctgaggagtcagagaggagggccaaagaggcagatcagctgaagcaggacctgcaggaagcacgcgaggcggagcgaagagccaagcagaagctcctggagattgccaccaagcccacgtacccgcccatgaacccaattccagcaccgttgcctcctgacataccaagcttcaacctcattggtgacagcctgtctttcgacttcaaagatactgacatgaagcggctttccatggagatagagaaagaaaaagtggaatacatggaaaagagcaagcatctgcaggagcagctcaatgaactcaagacagaaatcgaggccttgaaactgaaagagagggagacagctctggatattctgcacaatgagaactccgacaggggtggcagcagcaagcacaataccattaaaaagctcaccttgcagagcgccaagtcccgagtggccttctttgaagagctctagcaggtgacccagccaccccaggacctgccacttctcctgctaccgggaccgcgggatggaccagatatcaagagagccatccatagggagctggctgggggtttccgtgggagctccagaactttccccagctgagtgaagagcccagcccctcttatgtgcaattgccttgaactacgaccctgtagagatttctctcatggcgttctagttctctgacctgagtctttgttttaagaagtatttgtcttcctttgtctaatgtgggattcctgactcccttcgtccaaggcaccggtgtgtgtgtgtcttgcactccagagctgacctccaccgcccagcctgggaagtcattgtagggagtgagacactgaagccctgagaagccagtgccatcatccccaccccgcccagggttccggaacattcattcccccaccggtgaggacctggcatgcagcgaagcagcccagcccggcggatcccaggccagcacgcctgccggcttctcatcgtcagggagcccgcccagagctcgtgacgagcaagtgctgggtccccgccaggcaccccgaggcggcgctctggctggcagctggtggggaataggcagggcagctgtggctggggagagactttaggcagaagctgtgatgcaggctgactgccagccgaggggctgggtagtgccgtgcgggagctgatggtacagggcactcgctgtccccctccggccaccctagaccagggtccgagaggcaggcaggagccactcatgtcttccccattgcccgacgcccatagacgctccttcctgtgtggggctggggtactccctggtcgtactgcagtcagcacccgtaacccggctatgaccagggatctgtaagccctgtggctccacaggtgctgcttctcactggcccagactctgagctccaccggcccagtctgcacggcccatctgcttcaccttccctcccagccacgtgccagtggccacagcccacttcccaacccactgttgtacccaggcctcactttgctgttgcccttgtccctcttcgggccctgaattttctgttccctgggggccagccagggccctttgtgcccctcccagcacaggcctgatgcaggtgtccactcacaggtggcgctcacctaggctgtcacaggacccacctccatgccaggcaacagagggccacagaaccacccccacggctcactccttggtctggggccaccttcttgccctttctttttttttttttttttttttttccgagatggagtctctctctgtcacccaggtgggagtgtggtggcacaatctcggctcactgcaacctccacctcctgagttcaagcaattctcctgcctcagcctcccaagtagctgggactacaggcatgcaccaccacacttggccaatgttctgtatttttaatagggacggggttttgccatgttagctaggctggtctcaaactcacacctgggattacaggcatgagccactgcacccagccccttcttgccctttcttttctccatggctgatgctgctgtggccagccagggcccttgagatccttccagtttggctgttatgcaaagcaggtgatttgtcttaatcagataaaagatagaggctatgggggcctcaagatttttggagagcagaggtggtctctggcaattccatctggttttgagaaacttagcagctcacagagcacagagatcctgccttcttcctactatcaggctgacctaatggggttgggctgctcggcaactgcttgggtcaccttgccccaaggaaaccagccctgggtgccacccagccacttagggtctacagggtgggactccagacctagagcgtaagtatggatgttgtggccctgtgtcttcctagtgtgacccagccaggagcggaagcttcaggcgtttgtaaagtgaggtctggctctgcctcctccgttttttttttttttctgtttctgtttctgttttttttttgagatggagtctcgctctgtcgcccaggctggagtgcagtgtcacgatctcagctcactgcaacctccgcctcccaggtacaagagattctcctgcctcagcctcccgagtagctgggactacaggcgtgtgccaccatgcctggctaatttttgtatttttagtagagatggggtttcgccatgttagccagactggtctcgaactcctgacctcaggtgatcctcccaccccggcttcccaaagttctgggattataggcgtgagccaccatgcccggtctcttctcagtcttgaagcccatccctggatttccaccaggagttactttcctcctgacctgtaaatttgttctttaacaatggctgcaggtgggagcatatggtggtttataaaaacgctgtcgggctttgtttccttctttagctgccgtgtctacttctgaagtctgggaagtgccaagccacgcggcctcaagggagctggctggtgtttgagctgtggcagaagcacctggggctccagggagcaggctgggaactgcaggaccttgctcagccaggagcacttccccctccttgaggcaggaatactgaggtgcctccccacagatggagaaggtggagaggaggatgggcctcaggagcatctcaagccccagtagcaggagaaagaaagaaagagatgcctggttttcacagactggttcctgtggctgggatgactgcatccttttttttttttttttgagacggagtttttgcctttgtcgcccaggctggagtgcaatggcgtgatctcggctcaccgcaacctccgcctcccggattcaagcaattctcctgcctcagcctcccgagtagctgggattacaggcacgcacctccacgtccggctaattttgtatttttagtggagacggggtttctccatgtcggtcaggctggtctcgaactcccgacctcaggtgatctgcccacctcggcctcccaaagtgctgggattacaggcatgagccaccgcgcttggccagactgcgtcctttttaagcgaacattttagggcctgggagtttgtcaagtaaggaagtctcaagcccaaagagcagcgtcctgaccatggtggtttcattacgagcccttctgctggctctcaggcagaagccccacagcaccgggaccattcatgaggtcactgcccagctcatgatgtccgtgaggctgtccttttggccagtagccgtgtgcagctgtgtggcacagatggcttcgttcatcctgatcaaggccccacctcagccacagcagtccccccaacctgtgttgtccaccctattattcatgtacctgccaggccctgctagatagcaccccgtggcattacataacacttcatgagtggctgtgtcttgtaattttggggacaggtttctctctttccctctcttttttttgtcaaaagcccagagactgacaaccagctgcagtgtctaagtgttcctcactgacagggtggggcctcaccacccctggagggagcagcgttggcagggagacagcctggcccagtgaccctgggcccaagccagcccctccagggctttcagggaagcgccatccattttcaaagatgtcaaacgtcacttcttcctgtagggcccgagtcctgcctcctatcagggccagatcatagaaggctattttctattctggggaacgattataacttaaatgattgttttaataaaaattctaagctggaaaa

SEQ ID NO: 2770 - DNA, 5250 bp, Homo sapiens
  source 1..5250: mol_type = genomic DNA
tgcgcttcccgcgggcgcgcggagtgaggacggtgacagccacgcgcgcgcgtacgcgcccgatgcagcgcggccccgtgaccctagtcggccgctgagaggcgcgcggagtctgggccgctgccgtctaggggtcccgtcccgaggcgtccccggcatctccggcccgaatcccggagtgccgggtcgcgcctgcaccgaaggtcccggctcctgtgccctccctgcagccgtcagggcccgtcccccaactcccctttccgctcaggcagggtcctcgcggcccatgctggccgctggggacccgcgcagcccagaccgttcccgggccgggcagccggccaccatggtggccctgaggcctgtgcagcaactccaggggggctaaagggctcagagtgcaggccgtggggcgcgagggtcccgggcctgagccccgcgccatggccggggccatcgcttcccgcatgagcttcagctctctcaagaggaagcaacccaagacgttcaccgtgaggatcgtcaccatggacgccgagatggagttcaattgcgaggtaaagaagcagattttagatgaaaagatctactgccctcctgaggcttctgtgctcctggcttcttacgccgtccaggccaagaataaaaagggcacagagctgctgcttggagtggatgccctggggcttcacatttatgaccctgagaacagactgacccccaagatctccttcccgtggaatgaaatccgaaacatctcgtacagtgacaaggagtttactattaaaccactggataagaaaattgatgtcttcaagtttaactcctcaaagcttcgtgttaataagctgattctccagctatgtatcgggaaccatgatctatttatgaggagaaggaaagccgattctttggaagttcagcagatgaaagcccaggccagggaggagaaggctagaaagcagggccaaagaggcagatcagctgaagcaggacctgcaggaagcacgcgaggcggagcgaagagccaagcagaagctcctggagattgccaccaagcccacgtacccgcccatgaacccaattccagcaccgttgcctcctgacataccaagcttcaacctcattggtgacagcctgtctttcgacttcaaagatactgacatgaagcggctttccatggagatagagaaagaaaaagtggaatacatggaaaagagcaagcatctgcaggagcagctcaatgaactcaagacagaaatcgaggccttgaaactgaaagagagggagacagctctggatattctgcacaatgagaactccgacaggggtggcagcagcaagcacaataccattaaaaagcctcaagcccaaggcagaagacctatctgcatttgagccctcaaactcaccttgcagagcgccaagtcccgagtggccttctttgaagagctctagcaggtgacccagccaccccaggacctgccacttctcctgctaccgggaccgcgggatggaccagatatcaagagagccatccatagggagctggctgggggtttccgtgggagctccagaactttccccagctgagtgaagagcccagcccctcttatgtgcaattgccttgaactacgaccctgtagagatttctctcatggcgttctagttctctgacctgagtctttgttttaagaagtatttgtcttcctttgtctaatgtgggattcctgactcccttcgtccaaggcaccggtgtgtgtgtgtcttgcactccagagctgacctccaccgcccagcctgggaagtcattgtagggagtgagacactgaagccctgagaagccagtgccatcatccccaccccgcccagggttccggaacattcattcccccaccggtgaggacctggcatgcagcgaagcagcccagcccggcggatcccaggccagcacgcctgccggcttctcatcgtcagggagcccgcccagagctcgtgacgagcaagtgctgggtccccgccaggcaccccgaggcggcgctctggctggcagctggtggggaataggcagggcagctgtggctggggagagactttaggcagaagctgtgatgcaggctgactgccagccgaggggctgggtagtgccgtgcgggagctgatggtacagggcactcgctgtccccctccggccaccctagaccagggtccgagaggcaggcaggagccactcatgtcttccccattgcccgacgcccatagacgctccttcctgtgtggggctggggtactccctggtcgtactgcagtcagcacccgtaacccggctatgaccagggatctgtaagccctgtggctccacaggtgctgcttctcactggcccagactctgagctccaccggcccagtctgcacggcccatctgcttcaccttccctcccagccacgtgccagtggccacagcccacttcccaacccactgttgtacccaggcctcactttgctgttgcccttgtccctcttcgggccctgaattttctgttccctgggggccagccagggccctttgtgcccctcccagcacaggcctgatgcaggtgtccactcacaggtggcgctcacctaggctgtcacaggacccacctccatgccaggcaacagagggccacagaaccacccccacggctcactccttggtctggggccaccttcttgccctttctttttttttttttttttttttttccgagatggagtctctctctgtcacccaggtgggagtgtggtggcacaatctcggctcactgcaacctccacctcctgagttcaagcaattctcctgcctcagcctcccaagtagctgggactacaggcatgcaccaccacacttggccaatgttctgtatttttaatagggacggggttttgccatgttagctaggctggtctcaaactcacacctgggattacaggcatgagccactgcacccagccccttcttgccctttcttttctccatggctgatgctgctgtggccagccagggcccttgagatccttccagtttggctgttatgcaaagcaggtgatttgtcttaatcagataaaagatagaggctatgggggcctcaagatttttggagagcagaggtggtctctggcaattccatctggttttgagaaacttagcagctcacagagcacagagatcctgccttcttcctactatcaggctgacctaatggggttgggctgctcggcaactgcttgggtcaccttgccccaaggaaaccagccctgggtgccacccagccacttagggtctacagggtgggactccagacctagagcgtaagtatggatgttgtggccctgtgtcttcctagtgtgacccagccaggagcggaagcttcaggcgtttgtaaagtgaggtctggctctgcctcctccgttttttttttttttctgtttctgtttctgttttttttttgagatggagtctcgctctgtcgcccaggctggagtgcagtgtcacgatctcagctcactgcaacctccgcctcccaggtacaagagattctcctgcctcagcctcccgagtagctgggactacaggcgtgtgccaccatgcctggctaatttttgtatttttagtagagatggggtttcgccatgttagccagactggtctcgaactcctgacctcaggtgatcctcccaccccggcttcccaaagttctgggattataggcgtgagccaccatgcccggtctcttctcagtcttgaagcccatccctggatttccaccaggagttactttcctcctgacctgtaaatttgttctttaacaatggctgcaggtgggagcatatggtggtttataaaaacgctgtcgggctttgtttccttctttagctgccgtgtctacttctgaagtctgggaagtgccaagccacgcggcctcaagggagctggctggtgtttgagctgtggcagaagcacctggggctccagggagcaggctgggaactgcaggaccttgctcagccaggagcacttccccctccttgaggcaggaatactgaggtgcctccccacagatggagaaggtggagaggaggatgggcctcaggagcatctcaagccccagtagcaggagaaagaaagaaagagatgcctggttttcacagactggttcctgtggctgggatgactgcatccttttttttttttttttgagacggagtttttgcctttgtcgcccaggctggagtgcaatggcgtgatctcggctcaccgcaacctccgcctcccggattcaagcaattctcctgcctcagcctcccgagtagctgggattacaggcacgcacctccacgtccggctaattttgtatttttagtggagacggggtttctccatgtcggtcaggctggtctcgaactcccgacctcaggtgatctgcccacctcggcctcccaaagtgctgggattacaggcatgagccaccgcgcttggccagactgcgtcctttttaagcgaacattttagggcctgggagtttgtcaagtaaggaagtctcaagcccaaagagcagcgtcctgaccatggtggtttcattacgagcccttctgctggctctcaggcagaagccccacagcaccgggaccattcatgaggtcactgcccagctcatgatgtccgtgaggctgtccttttggccagtagccgtgtgcagctgtgtggcacagatggcttcgttcatcctgatcaaggccccacctcagccacagcagtccccccaacctgtgttgtccaccctattattcatgtacctgccaggccctgctagatagcaccccgtggcattacataacacttcatgagtggctgtgtcttgtaattttggggacaggtttctctctttccctctcttttttttgtcaaaagcccagagactgacaaccagctgcagtgtctaagtgttcctcactgacagggtggggcctcaccacccctggagggagcagcgttggcagggagacagcctggcccagtgaccctgggcccaagccagcccctccagggctttcagggaagcgccatccattttcaaagatgtcaaacgtcacttcttcctgtagggcccgagtcctgcctcctatcagggccagatcatagaaggctattttctattctggggaacgattataacttaaatgattgttttaataaaaattctaagctgg

SEQ ID NO: 2771 - DNA, 1845 bp, Homo sapiens
  source 1..1845: mol_type = genomic DNA
cctgcaccgaaggtcccggctcctgtgccctccctgcagccgtcagggcccgtcccccaactcccctttccgctcaggcagggtcctcgcggcccatgctggccgctggggacccgcgcagcccagaccgttcccgggccgggcagccggccaccatggtggccctgaggcctgtgcagcaactccaggggggctaaagggctcagagtgcaggccgtggggcgcgagggtcccgggcctgagccccgcgccatggccggggccatcgcttcccgcatgagcttcagctctctcaagaggaagcaacccaagacgttcaccgtgaggatcgtcaccatggacgccgagatggagttcaattgcgaggtaaagaagcagattttagatgaaaagatctactgccctcctgaggcttctgtgctcctggcttcttacgccgtccaggccaagtatggtgactacgaccccagtgttcacaagcggggatttttggcccaagaggaattgcttccaaaaagggtaataaatctgtatcagatgactccggaaatgtgggaggagagaattactgcttggtacgcagagcaccgaggccgagccagggatgaagctgaaatggaatatctgaagatagctcaggacctggagatgtacggtgtgaactactttgcaatccggaataaaaagggcacagagctgctgcttggagtggatgccctggggcttcacatttatgaccctgagaacagactgacccccaagatctccttcccgtggaatgaaatccgaaacatctcgtacagtgacaaggagtttactattaaaccactggataagaaaattgatgtcttcaagtttaactcctcaaagcttcgtgttaataagctgattctccagctatgtatcgggaaccatgatctatttatgaggagaaggaaagccgattctttggaagttcagcagatgaaagcccaggccagggaggagaaggctagaaagcagatggagcggcagcgcctcgctcgagagaagcagatgagggaggaggctgaacgcacgagggatgagttggagaggaggctgctgcagatgaaagaagaagcaacaatggccaacgaagcactgatgcggtctgaggagacagctgacctgttggctgaaaaggcccagatcaccgaggaggaggcaaaacttctggcccagaaggccgcagaggctgagcaggaaatgcagcgcatcaaggccacagcgattcgcacggaggaggagaagcgcctgatggagcagaaggtgctggaagccgaggtgctggcactgaagatggctgaggagtcagagaggagggccaaagaggcagatcagctgaagcaggacctgcaggaagcacgcgaggcggagcgaagagccaagcagaagctcctggagattgccaccaagcccacgtacccgcccatgaacccaattccagcaccgttgcctcctgacataccaagcttcaacctcattggtgacagcctgtctttcgacttcaaagatactgacatgaagcggctttccatggagatagagaaagaaaaagtggaatacatggaaaagagcaagcatctgcaggagcagctcaatgaactcaagacagaaatcgaggccttgaaactgaaagagagggagacagctctggatattctgcacaatgagaactccgacaggggtggcagcagcaagcacaataccattaaaaagcctcaagcccaaggcagaagacctatctgcatttgagccctcaaactcaccttgcagagcgccaagtcccgagtggccttctttgaagagctctagcaggtgacc

SEQ ID NO: 2772 - DNA, 1837 bp, Homo sapiens
  source 1..1837: mol_type = genomic DNA
atggccggggccatcgcttcccgcatgagcttcagctctctcaagaggaagcaacccaagacgttcaccgtgaggatcgtcaccatggacgccgagatggagttcaattgcgagatgaagtggaaagggaaggacctctttgatttggtgtgccggactctggggctccgagaaacctggttctttggactgcagtacacaatcaaggacacagtggcctggctcaaaatggacaagaaggtactggatcatgatgtttcaaaggaagaaccagtcacctttcacttcttggccaaattttatcctgagaatgctgaagaggagctggttcaggagatcacacaacatttattcttcttacaggtaaagaagcagattttagatgaaaagatctactgccctcctgaggcttctgtgctcctggcttcttacgccgtccaggccaagtatggtgactacgaccccagtgttcacaagcggggatttttggcccaagaggaattgcttccaaaaagggtaataaatctgtatcagatgactccggaaatgtgggaggagagaattactgcttggtacgcagagcaccgaggccgagccagggatgaagctgaaatggaatatctgaagatagctcaggacctggagatgtacggtgtgaactactttgcaatccggaataaaaagggcacagagctgctgcttggagtggatgccctggggcttcacatttatgaccctgagaacagactgacccccaagatctccttcccgtggaatgaaatccgaaacatctcgtacagtgacaaggagtttactattaaaccactggataagaaaattgatgtcttcaagtttaactcctcaaagcttcgtgttaataagctgattctccagctatgtatcgggaaccatgatctatttatgaggagaaggaaagccgattctttggaagttcagcagatgaaagcccaggccagggaggagaaggctagaaagcagatggagcggcagcgcctcgctcgagagaagcagatgagggaggaggctgaacgcacgagggatgagttggagaggaggctgctgcagatgaaagaagaagcaacaatggccaacgaagcactgatgcggtctgaggagacagctgacctgttggctgaaaaggcccagatcaccgaggaggaggcaaaacttctggcccagaaggccgcagaggctgagcaggaaatgcagcgcatcaaggccacagcgattcgcacggaggaggagaagcgcctgatggagcagaaggtgctggaagccgaggtgctggcactgaagatggctgaggagtcagagaggagggccaaagaggcagatcagctgaagcaggacctgcaggaagcacgcgaggcggagcgaagagccaagcagaagctcctggagattgccaccaagcccacgtacccgcccatgaacccaattccagcaccgttgcctcctgacataccaagcttcaacctcattggtgacagcctgtctttcgacttcaaagatactgacatgaagcggctttccatggagatagagaaagaaaaagtggaatacatggaaaagagcaagcatctgcaggagcagctcaatgaactcaagacagaaatcgaggccttgaaactgaaagagagggagacagctctggatattctgcacaatgagaactccgacaggggtggcagcagcaagcacaataccattaaaaagcctcaagcccaaggcagaagacctatctgcatttgagccctcaaactcaccttgcagagcgccaagtcccgagtggccttctttgaagagctctagcagg

SEQ ID NO: 2773 - DNA, 5884 bp, Homo sapiens
  source 1..5884: mol_type = genomic DNA
gatgcagcgcggccccgtgaccctagtcggccgctgagaggcgcgcggagtctgggccgctgccgtctaggggtcccgtcccgaggcgtccccggcatctccggcccgaatcccggagtgccgggtcgcgcctgcaccgaaggtcccggctcctgtgccctccctgcagccgtcagggcccgtcccccaactcccctttccgctcaggcagggtcctcgcggcccatgctggccgctggggacccgcgcagcccagaccgttcccgggccgggcagccggccaccatggtggccctgaggcctgtgcagcaactccaggggggctaaagggctcagagtgcaggccgtggggcgcgagggtcccgggcctgagccccgcgccatggccggggccatcgcttcccgcatgagcttcagctctctcaagaggaagcaacccaagacgttcaccgtgaggatcgtcaccatggacgccgagatggagttcaattgcgagatgaagtggaaagggaaggacctctttgatttggtgtgccggactctggggctccgagaaacctggttctttggactgcagtacacaatcaaggacacagtggcctggctcaaaatggacaagaaggtaaagaagcagattttagatgaaaagatctactgccctcctgaggcttctgtgctcctggcttcttacgccgtccaggccaagtatggtgactacgaccccagtgttcacaagcggggatttttggcccaagaggaattgcttccaaaaagggtaataaatctgtatcagatgactccggaaatgtgggaggagagaattactgcttggtacgcagagcaccgaggccgagccagggatgaagctgaaatggaatatctgaagatagctcaggacctggagatgtacggtgtgaactactttgcaatccggaataaaaagggcacagagctgctgcttggagtggatgccctggggcttcacatttatgaccctgagaacagactgacccccaagatctccttcccgtggaatgaaatccgaaacatctcgtacagtgacaaggagtttactattaaaccactggataagaaaattgatgtcttcaagtttaactcctcaaagcttcgtgttaataagctgattctccagctatgtatcgggaaccatgatctatttatgaggagaaggaaagccgattctttggaagttcagcagatgaaagcccaggccagggaggagaaggctagaaagcagatggagcggcagcgcctcgctcgagagaagcagatgagggaggaggctgaacgcacgagggatgagttggagaggaggctgctgcagatgaaagaagaagcaacaatggccaacgaagcactgatgcggtctgaggagacagctgacctgttggctgaaaaggcccagatcaccgaggaggaggcaaaacttctggcccagaaggccgcagaggctgagcaggaaatgcagcgcatcaaggccacagcgattcgcacggaggaggagaagcgcctgatggagcagaaggtgctggaagccgaggtgctggcactgaagatggctgaggagtcagagaggagggccaaagaggcagatcagctgaagcaggacctgcaggaagcacgcgaggcggagcgaagagccaagcagaagctcctggagattgccaccaagcccacgtacccgcccatgaacccaattccagcaccgttgcctcctgacataccaagcttcaacctcattggtgacagcctgtctttcgacttcaaagatactgacatgaagcggctttccatggagatagagaaagaaaaagtggaatacatggaaaagagcaagcatctgcaggagcagctcaatgaactcaagacagaaatcgaggccttgaaactgaaagagagggagacagctctggatattctgcacaatgagaactccgacaggggtggcagcagcaagcacaataccattaaaaagcctcaagcccaaggcagaagacctatctgcatttgagccctcaaactcaccttgcagagcgccaagtcccgagtggccttctttgaagagctctagcaggtgacccagccaccccaggacctgccacttctcctgctaccgggaccgcgggatggaccagatatcaagagagccatccatagggagctggctgggggtttccgtgggagctccagaactttccccagctgagtgaagagcccagcccctcttatgtgcaattgccttgaactacgaccctgtagagatttctctcatggcgttctagttctctgacctgagtctttgttttaagaagtatttgtcttcctttgtctaatgtgggattcctgactcccttcgtccaaggcaccggtgtgtgtgtgtcttgcactccagagctgacctccaccgcccagcctgggaagtcattgtagggagtgagacactgaagccctgagaagccagtgccatcatccccaccccgcccagggttccggaacattcattcccccaccggtgaggacctggcatgcagcgaagcagcccagcccggcggatcccaggccagcacgcctgccggcttctcatcgtcagggagcccgcccagagctcgtgacgagcaagtgctgggtccccgccaggcaccccgaggcggcgctctggctggcagctggtggggaataggcagggcagctgtggctggggagagactttaggcagaagctgtgatgcaggctgactgccagccgaggggctgggtagtgccgtgcgggagctgatggtacagggcactcgctgtccccctccggccaccctagaccagggtccgagaggcaggcaggagccactcatgtcttccccattgcccgacgcccatagacgctccttcctgtgtggggctggggtactccctggtcgtactgcagtcagcacccgtaacccggctatgaccagggatctgtaagccctgtggctccacaggtgctgcttctcactggcccagactctgagctccaccggcccagtctgcacggcccatctgcttcaccttccctcccagccacgtgccagtggccacagcccacttcccaacccactgttgtacccaggcctcactttgctgttgcccttgtccctcttcgggccctgaattttctgttccctgggggccagccagggccctttgtgcccctcccagcacaggcctgatgcaggtgtccactcacaggtggcgctcacctaggctgtcacaggacccacctccatgccaggcaacagagggccacagaaccacccccacggctcactccttggtctggggccaccttcttgccctttctttttttttttttttttttttttccgagatggagtctctctctgtcacccaggtgggagtgtggtggcacaatctcggctcactgcaacctccacctcctgagttcaagcaattctcctgcctcagcctcccaagtagctgggactacaggcatgcaccaccacacttggccaatgttctgtatttttaatagggacggggttttgccatgttagctaggctggtctcaaactcacacctgggattacaggcatgagccactgcacccagccccttcttgccctttcttttctccatggctgatgctgctgtggccagccagggcccttgagatccttccagtttggctgttatgcaaagcaggtgatttgtcttaatcagataaaagatagaggctatgggggcctcaagatttttggagagcagaggtggtctctggcaattccatctggttttgagaaacttagcagctcacagagcacagagatcctgccttcttcctactatcaggctgacctaatggggttgggctgctcggcaactgcttgggtcaccttgccccaaggaaaccagccctgggtgccacccagccacttagggtctacagggtgggactccagacctagagcgtaagtatggatgttgtggccctgtgtcttcctagtgtgacccagccaggagcggaagcttcaggcgtttgtaaagtgaggtctggctctgcctcctccgttttttttttttttctgtttctgtttctgttttttttttgagatggagtctcgctctgtcgcccaggctggagtgcagtgtcacgatctcagctcactgcaacctccgcctcccaggtacaagagattctcctgcctcagcctcccgagtagctgggactacaggcgtgtgccaccatgcctggctaatttttgtatttttagtagagatggggtttcgccatgttagccagactggtctcgaactcctgacctcaggtgatcctcccaccccggcttcccaaagttctgggattataggcgtgagccaccatgcccggtctcttctcagtcttgaagcccatccctggatttccaccaggagttactttcctcctgacctgtaaatttgttctttaacaatggctgcaggtgggagcatatggtggtttataaaaacgctgtcgggctttgtttccttctttagctgccgtgtctacttctgaagtctgggaagtgccaagccacgcggcctcaagggagctggctggtgtttgagctgtggcagaagcacctggggctccagggagcaggctgggaactgcaggaccttgctcagccaggagcacttccccctccttgaggcaggaatactgaggtgcctccccacagatggagaaggtggagaggaggatgggcctcaggagcatctcaagccccagtagcaggagaaagaaagaaagagatgcctggttttcacagactggttcctgtggctgggatgactgcatccttttttttttttttttgagacggagtttttgcctttgtcgcccaggctggagtgcaatggcgtgatctcggctcaccgcaacctccgcctcccggattcaagcaattctcctgcctcagcctcccgagtagctgggattacaggcacgcacctccacgtccggctaattttgtatttttagtggagacggggtttctccatgtcggtcaggctggtctcgaactcccgacctcaggtgatctgcccacctcggcctcccaaagtgctgggattacaggcatgagccaccgcgcttggccagactgcgtcctttttaagcgaacattttagggcctgggagtttgtcaagtaaggaagtctcaagcccaaagagcagcgtcctgaccatggtggtttcattacgagcccttctgctggctctcaggcagaagccccacagcaccgggaccattcatgaggtcactgcccagctcatgatgtccgtgaggctgtccttttggccagtagccgtgtgcagctgtgtggcacagatggcttcgttcatcctgatcaaggccccacctcagccacagcagtccccccaacctgtgttgtccaccctattattcatgtacctgccaggccctgctagatagcaccccgtggcattacataacacttcatgagtggctgtgtcttgtaattttggggacaggtttctctctttccctctcttttttttgtcaaaagcccagagactgacaaccagctgcagtgtctaagtgttcctcactgacagggtggggcctcaccacccctggagggagcagcgttggcagggagacagcctggcccagtgaccctgggcccaagccagcccctccagggctttcagggaagcgccatccattttcaaagatgtcaaacgtcacttcttcctgtagggcccgagtcctgcctcctatcagggccagatcatagaaggctattttctattctggggaacgattataacttaaatgattgttttaataaaaattctaagctgg

SEQ ID NO: 2774 - DNA, 1716 bp, Homo sapiens
  source 1..1716: mol_type = genomic DNA
atggccggggccatcgcttcccgcatgagcttcagctctctcaagaggaagcaacccaagacgttcaccgtgaggatcgtcaccatggacgccgagatggagttcaattgcgaggtactggatcatgatgtttcaaaggaagaaccagtcacctttcacttcttggccaaattttatcctgagaatgctgaagaggagctggttcaggagatcacacaacatttattcttcttacaggtaaagaagcagattttagatgaaaagatctactgccctcctgaggcttctgtgctcctggcttcttacgccgtccaggccaagtatggtgactacgaccccagtgttcacaagcggggatttttggcccaagaggaattgcttccaaaaagggtaataaatctgtatcagatgactccggaaatgtgggaggagagaattactgcttggtacgcagagcaccgaggccgagccagggatgaagctgaaatggaatatctgaagatagctcaggacctggagatgtacggtgtgaactactttgcaatccggaataaaaagggcacagagctgctgcttggagtggatgccctggggcttcacatttatgaccctgagaacagactgacccccaagatctccttcccgtggaatgaaatccgaaacatctcgtacagtgacaaggagtttactattaaaccactggataagaaaattgatgtcttcaagtttaactcctcaaagcttcgtgttaataagctgattctccagctatgtatcgggaaccatgatctatttatgaggagaaggaaagccgattctttggaagttcagcagatgaaagcccaggccagggaggagaaggctagaaagcagatggagcggcagcgcctcgctcgagagaagcagatgagggaggaggctgaacgcacgagggatgagttggagaggaggctgctgcagatgaaagaagaagcaacaatggccaacgaagcactgatgcggtctgaggagacagctgacctgttggctgaaaaggcccagatcaccgaggaggaggcaaaacttctggcccagaaggccgcagaggctgagcaggaaatgcagcgcatcaaggccacagcgattcgcacggaggaggagaagcgcctgatggagcagaaggtgctggaagccgaggtgctggcactgaagatggctgaggagtcagagaggagggccaaagaggcagatcagctgaagcaggacctgcaggaagcacgcgaggcggagcgaagagccaagcagaagctcctggagattgccaccaagcccacgtacccgcccatgaacccaattccagcaccgttgcctcctgacataccaagcttcaacctcattggtgacagcctgtctttcgacttcaaagatactgacatgaagcggctttccatggagatagagaaagaaaaagtggaatacatggaaaagagcaagcatctgcaggagcagctcaatgaactcaagacagaaatcgaggccttgaaactgaaagagagggagacagctctggatattctgcacaatgagaactccgacaggggtggcagcagcaagcacaataccattaaaaagcctcaagcccaaggcagaagacctatctgcatttgagccctcaaactcaccttgcagagcgccaagtcccgagtggccttctttgaagagctctagcaggtgacc

SEQ ID NO: 2775 - DNA, 1857 bp, Homo sapiens
  source 1..1857: mol_type = genomic DNA
atggccggggccatcgcttcccgcatgagcttcagctctctcaagaggaagcaacccaagacgttcaccgtgaggatcgtcaccatggacgccgagatggagttcaattgcgagatgaagtggaaagggaaggacctctttgatttggtgtgccggactctggggctccgagaaacctggttctttggactgcagtacacaatcaaggacacagtggcctggctcaaaatggacaagaaggtactggatcatgatgtttcaaaggaagaaccagtcacctttcacttcttggccaaattttatcctgagaatgctgaagaggagctggttcaggagatcacacaacatttattcttcttacaggtaaagaagcagattttagatgaaaagatctactgccctcctgaggcttctgtgctcctggcttcttacgccgtccaggccaagtatggtgactacgaccccagtgttcacaagcggggatttttggcccaagaggaattgcttccaaaaagggtaataaatctgtatcagatgactccggaaatgtgggaggagagaattactgcttggtacgcagagcaccgaggccgagccagggatgaagctgaaatggaatatctgaagatagctcaggacctggagatgtacggtgtgaactactttgcaatccggaataaaaagggcacagagctgctgcttggagtggatgccctggggcttcacatttatgaccctgagaacagactgacccccaagatctccttcccgtggaatgaaatccgaaacatctcgtacagtgacaaggagtttactattaaaccactggataagaaaattgatgtcttcaagtttaactcctcaaagcttcgtgttaataagctgattctccagctatgtatcgggaaccatgatctatttatgaggagaaggaaagccgattctttggaagttcagcagatgaaagcccaggccagggaggagaaggctagaaagcagatggagcggcagcgcctcgctcgagagaagcagatgagggaggaggctgaacgcacgagggatgagttggagaggaggctgctgcagatgaaagaagaagcaacaatggccaacgaagcactgatgcggtctgaggagacagctgacctgttggctgaaaaggcccagatcaccgaggaggaggcaaaacttctggcccagaaggccgcagaggctgagcaggaaatgcagcgcatcaaggccacagcgattcgcacggaggaggagaagcgcctgatggagcagaaggtgctggaagccgaggtgctggcactgaagatggctgaggagtcagagaggagggccaaagaggcagatcagctgaagcaggacctgcaggaagcacgcgaggcggagcgaagagccaagcagaagctcctggagattgccaccaagcccacgtacccgcccatgaacccaattccagcaccgttgcctcctgacataccaagcttcaacctcattggtgacagcctgtctttcgacttcaaagatactgacatgaagcggctttccatggagatagagaaagaaaaagtggaatacatggaaaagagcaagcatctgcaggagcagctcaatgaactcaagacagaaatcgaggccttgaaactgaaagagagggagacagctctggatattctgcacaatgagaactccgacaggggtggcagcagcaagcacaataccattaaaaagcctcaagcccaaggcagaagacctatctgcatttgagccctcaaagtaggttgttcccagctcaccttgcagagcgccaagtcccgagtggccttctttgaagagctctagcaggtgacc

SEQ ID NO: 2776 - DNA, 2335 bp, Homo sapiens
  source 1..2335: mol_type = genomic DNA
gatgcagcgcggccccgtgaccctagtcggccgctgagaggcgcgcggagtctgggccgctgccgtctaggggtcccgtcccgaggcgtccccggcatctccggcccgaatcccggagtgccgggtcgcgcctgcaccgaaggtcccggctcctgtgccctccctgcagccgtcagggcccgtcccccaactcccctttccgctcaggcagggtcctcgcggcccatgctggccgctggggacccgcgcagcccagaccgttcccgggccgggcagccggccaccatggtggccctgaggcctgtgcagcaactccaggggggctaaagggctcagagtgcaggccgtggggcgcgagggtcccgggcctgagccccgcgccatggccggggccatcgcttcccgcatgagcttcagctctctcaagaggaagcaacccaagacgttcaccgtgaggatcgtcaccatggacgccgagatggagttcaattgcgagatgaagtggaaagggaaggacctctttgatttggtgtgccggactctggggctccgagaaacctggttctttggactgcagtacacaatcaaggacacagtggcctggctcaaaatggacaagaaggtactggatcatgatgtttcaaaggaagaaccagtcacctttcacttcttggccaaattttatcctgagaatgctgaagaggagctggttcaggagatcacacaacatttattcttcttacaggtaaagaagcagattttagatgaaaagatctactgccctcctgaggcttctgtgctcctggcttcttacgccgtccaggccaagtatggtgactacgaccccagtgttcacaagcggggatttttggcccaagaggaattgcttccaaaaagggtaataaatctgtatcagatgactccggaaatgtgggaggagagaattactgcttggtacgcagagcaccgaggccgagccagggatgaagctgaaatggaatatctgaagatagctcaggacctggagatgtacggtgtgaactactttgcaatccggaataaaaagggcacagagctgctgcttggagtggatgccctggggcttcacatttatgaccctgagaacagactgacccccaagatctccttcccgtggaatgaaatccgaaacatctcgtacagtgacaaggagtttactattaaaccactggataagaaaattgatgtcttcaagtttaactcctcaaagcttcgtgttaataagctgattctccagctatgtatcgggaaccatgatctatttatgaggagaaggaaagccgattctttggaagttcagcagatgaaagcccaggccagggaggagaaggctagaaagcagatggagcggcagcgcctcgctcgagagaagcagatgagggaggaggctgaacgcacgagggatgagttggagaggaggctgctgcagatgaaagaagaagcaacaatggccaacgaagcactgatgcggtctgaggaggctgagcaggaaatgcagcgcatcaaggccacagcgattcgcacggaggaggagaagcgcctgatggagcagaaggtgctggaagccgaggtgctggcactgaagatggctgaggagtcagagaggagggccaaagaggcagatcagctgaagcaggacctgcaggaagcacgcgaggcggagcgaagagccaagcagaagctcctggagattgccaccaagcccacgtacccgcccatgaacccaattccagcaccgttgcctcctgacataccaagcttcaacctcattggtgacagcctgtctttcgacttcaaagatactgacatgaagcggctttccatggagatagagaaagaaaaagtggaatacatggaaaagagcaagcatctgcaggagcagctcaatgaactcaagacagaaatcgaggccttgaaactgaaagagagggagacagctctggatattctgcacaatgagaactccgacaggggtggcagcagcaagcacaataccattaaaaagggtatgtttttgtttttcttcattttattttgctggtttagcctcaagcccaaggcagaagacctatctgcatttgagccctcaaactcaccttgcagagcgccaagtcccgagtggccttctttgaagagctctagcaggtgacccagccaccccaggacctgccacttctcctgctaccgggaccgcgggatggaccagatatcaagagagccatccatagggagctggctgggggtttccgtgggagctccagaactttccccagctgagtgaagagcccagcccctc

SEQ ID NO: 2777 - DNA, 2568 bp, Homo sapiens
  source 1..2568: mol_type = genomic DNA
gtgacagccacgcgcgcgcgtacgcgcccgatgcagcgcggccccgtgaccctagtcggccgctgagaggcgcgcggagtctgggccgctgccgtctaggggtcccgtcccgaggcgtccccggcatctccggcccgaatcccggagtgccgggtcgcgcctgcaccgaaggtcccggctcctgtgccctccctgcagccgtcagggcccgtcccccaactcccctttccgctcaggcagggtcctcgcggcccatgctggccgctggggacccgcgcagcccagaccgttcccgggccgggcagccggccaccatggtggccctgaggcctgtgcagcaactccaggggggctaaagggctcagagtgcaggccgtggggcgcgagggtcccgggcctgagccccgcgccatggccggggccatcgcttcccgcatgagcttcagctctctcaagaggaagcaacccaagacgttcaccgtgaggatcgtcaccatggacgccgagatggagttcaattgcgagatgaagtggaaagggaaggacctctttgatttggtgtgccggactctggggctccgagaaacctggttctttggactgcagtacacaatcaaggacacagtggcctggctcaaaatggacaagaaggtactggatcatgatgtttcaaaggaagaaccagtcacctttcacttcttggccaaattttatcctgagaatgctgaagaggagctggttcaggagatcacacaacatttattcttcttacaggtaaagaagcagattttagatgaaaagatctactgccctcctgaggcttctgtgctcctggcttcttacgccgtccaggccaagtatggtgactacgaccccagtgttcacaagcggggatttttggcccaagaggaattgcttccaaaaagggtaataaatctgtatcagatgactccggaaatgtgggaggagagaattactgcttggtacgcagagcaccgaggccgagccagggatgaagctgaaatggaatatctgaagatagctcaggacctggagatgtacggtgtgaactactttgcaatccggaataaaaagggcacagagctgctgcttggagtggatgccctggggcttcacatttatgaccctgagaacagactgacccccaagatctccttcccgtggaatgaaatccgaaacatctcgtacagtgacaaggagtttactattaaaccactggataagaaaattgatgtcttcaagtttaactcctcaaagcttcgtgttaataagctgattctccagctatgtatcgggaaccatgatctatttatgaggagaaggaaagccgattctttggaagttcagcagatgaaagcccaggccagggaggagaaggctagaaagcagatgaaagaagaagcaacaatggccaacgaagcactgatgcggtctgaggagacagctgacctgttggctgaaaaggcccagatcaccgaggaggaggcaaaacttctggcccagaaggccgcagaggctgagcaggaaatgcagcgcatcaaggccacagcgattcgcacggaggaggagaagcgcctgatggagcagaaggtgctggaagccgaggtgctggcactgaagatggctgaggagtcagagaggagggccaaagaggcagatcagctgaagcaggacctgcaggaagcacgcgaggcggagcgaagagccaagcagaagctcctggagattgccaccaagcccacgtacccgcccatgaacccaattccagcaccgttgcctcctgacataccaagcttcaacctcattggtgacagcctgtctttcgacttcaaagatactgacatgaagcggctttccatggagatagagaaagaaaaagtggaatacatggaaaagagcaagcatctgcaggagcagctcaatgaactcaagacagaaatcgaggccttgaaactgaaagagagggagacagctctggatattctgcacaatgagaactccgacaggggtggcagcagcaagcacaataccattaaaaagcctcaagcccaaggcagaagacctatctgcatttgagccctcaaacttcctctccataggctgagcagagatgtggtcagagtgaactcacattggaacagtacactcacggcaccctggagaggagcggtcactggttgctgagtgaattaaccgaatgtttgctgcttttctcctgcaacagttcattattcctccagcatgcctaggcagtggagagaatgtattttgcccaataataaaatgacatcctgcctctacttctcacctaatccccagtagtacccatgccaacaagccccacaccacctgacagcagcataggatgtgtcctttggagtcttccctgcagtttctgctcatagagtggaataagctcattggaacctttctaacaaaaagagatctggcataagatagatcctacttgtggtcgttatcccatcaagagaggtcagctgttaaagtccctgatagatcttattaaaaggtacacttgagctgtca

SEQ ID NO: 2778 - DNA, 2999 bp, Homo sapiens
  source 1..2999: mol_type = genomic DNA
gtgaccctagtcggccgctgagaggcgcgcggagtctgggccgctgccgtctaggggtcccgtcccgaggcgtccccggcatctccggcccgaatcccggagtgccgggtcgcgcctgcaccgaaggtcccggctcctgtgccctccctgcagccgtcagggcccgtcccccaactcccctttccgctcaggcagggtcctcgcggcccatgctggccgctggggacccgcgcagcccagaccgttcccgggccgggcagccggccaccatggtggccctgaggcctgtgcagcaactccaggggggctaaagggctcagagtgcaggccgtggggcgcgagggtcccgggcctgagccccgcgccatggccggggccatcgcttcccgcatgagcttcagctctctcaagaggaagcaacccaagacgttcaccgtgaggatcgtcaccatggacgccgagatggagttcaattgcgagatgaagtggaaagggaaggacctctttgatttggtgtgccggactctggggctccgagaaacctggttctttggactgcagtacacaatcaaggacacagtggcctggctcaaaatggacaagaaggtactggatcatgatgtttcaaaggaagaaccagtcacctttcacttcttggccaaattttatcctgagaatgctgaagaggagctggttcaggagatcacacaacatttattcttcttacaggtaaagaagcagattttagatgaaaagatctactgccctcctgaggcttctgtgctcctggcttcttacgccgtccaggccaagtatggtgactacgaccccagtgttcacaagcggggatttttggcccaagaggaattgcttccaaaaagggtaataaatctgtatcagatgactccggaaatgtgggaggagagaattactgcttggtacgcagagcaccgaggccgagccagggatgaagctgaaatggaatatctgaagatagctcaggacctggagatgtacggtgtgaactactttgcaatccggaataaaaagggcacagagctgctgcttggagtggatgccctggggcttcacatttatgaccctgagaacagactgacccccaagatctccttcccgtggaatgaaatccgaaacatctcgtacagtgacaaggagtttactattaaaccactggataagaaaattgatgtcttcaagtttaactcctcaaagcttcgtgttaataagctgattctccagctatgtatcgggaaccatgatctatttatgaggagaaggaaagccgattctttggaagttcagcagatgaaagcccaggccagggaggagaaggctagaaagcagatggagcggcagcgcctcgctcgagagaagcagatgagggaggaggctgaacgcacgagggatgagttggagaggaggctgctgcagatgaaagaagaagcaacaatggccaacgaagcactgatgcggtctgaggagacagctgacctgttggctgaaaaggcccagatcaccgaggaggaggcaaaacttctggcccagaaggccgcagaggctgagcaggaaatgcagcgcatcaaggccacagcgattcgcacggaggaggagaagcgcctgatggagcagaaggtgctggaagccgaggtgctggcactgaagatggctgaggagtcagagaggagggccaaagaggcagatcagctgaagcaggacctgcaggaagcacgcgaggcggagcgaagagccaagcagaagctcctggagattgccaccaagcccacgtacccgcccatgaacccaattccagcaccgttgcctcctgacataccaagcttcaacctcattggtgacagcctgtctttcgacttcaaagatactgacatgaagcggctttccatggagatagagaaagaaaaagtggaatacatggaaaagagcaagcatctgcaggagcagctcaatgaactcaagacagaaatcgaggccttgaaactgaaagagagggagacagctctggatattctgcacaatgagaactccgacaggggtggcagcagcaagcacaataccattaaaaagcctcaagcccaaggcagaagacctatctgcatttgagccctcaaagtaggttgttcccaggtactctctatgtggtgatggtgctgccctctgtgatactaacccgtgcatgagcttgcctgtctctgtcctcgggccacactgagcccttacgagggcaggtggtgcctgggtactggccgcagcatgctttgagtctaaaagtaggcacccaccctgtgaagccagaccagcctccagggccccagaagactgcctcgttccgaagagcatgtcatggggctgtaggaccagccattcttcccatctcgggtcattgttgggctggggaaggttatggcttcttgtccagtcaggtgtgtctaaaagtcctttgtcttggtggcatactcctagcatggaaatggggtcaatctgggcactttggagactggtgtgtttaactcaagatcaagaccttttatgcgttgacagcctctcaagacccatggtcacacctggcagcttctggtagtggggcaaaagggttgcttgtgctggctcattttcctttagagctttccctttctgcacacatcccttttcttttcaaataaagcaaacccagagcacagggtctgatatgtgagtccacggggagtggactgtctgttcatctgtgctcagccacctctgcttcagcttcctctccataggctgagcagagatgtggtcagagtgaactcacattggaacagtacactcacggcaccctggagaggagcggtcactggttgctgagtgaattaaccgaatgtttgctgcttttctcctgcaacagttcattattcctccagcatgcctaggcagtggagagaatgtattttgcccaataataaaatgacatcctgcctcta

SEQ ID NO: 2779 - DNA, 4733 bp, Homo sapiens
  source 1..4733: mol_type = genomic DNA
tgcgcttcccgcgggcgcgcggagtgaggacggtgacagccacgcgcgcgcgtacgcgcccgatgcagcgcggccccgtgaccctagtcggccgctgagaggcgcgcggagtctgggccgctgccgtctaggggtcccgtcccgaggcgtccccggcatctccggcccgaatcccggagtgccgggtcgcgcctgcaccgaaggtcccggctcctgtgccctccctgcagccgtcagggcccgtcccccaactcccctttccgctcaggcagggtcctcgcggcccatgctggccgctggggacccgcgcagcccagaccgttcccgggccgggcagccggccaccatggtggccctgaggcctgtgcagcaactccaggggggctaaagggctcagagtgcaggccgtggggcgcgagggtcccgggcctgagccccgcgccatggccggggccatcgcttcccgcatgagcttcagctctctcaagaggaagcaacccaagacgttcaccgtgaggatcgtcaccatggacgccgagatggagttcaattgcgagatgaagtggaaagggaaggacctctttgatttggtgtgccggactctggggctccgagaaacctggttctttggactgcagtacacaatcaaggacacagtggcctggctcaaaatggacaagaaggtactggatcatgatgtttcaaaggaagaaccagtcacctttcacttcttggccaaattttatcctgagaatgctgaagaggagctggttcaggagatcacacaacatttattcttcttacaggtaaagaagcagattttagatgaaaagatctactgccctcctgaggcttctgtgctcctggcttcttacgccgtccaggccaagctcaccttgcagagcgccaagtcccgagtggccttctttgaagagctctagcaggtgacccagccaccccaggacctgccacttctcctgctaccgggaccgcgggatggaccagatatcaagagagccatccatagggagctggctgggggtttccgtgggagctccagaactttccccagctgagtgaagagcccagcccctcttatgtgcaattgccttgaactacgaccctgtagagatttctctcatggcgttctagttctctgacctgagtctttgttttaagaagtatttgtcttcctttgtctaatgtgggattcctgactcccttcgtccaaggcaccggtgtgtgtgtgtcttgcactccagagctgacctccaccgcccagcctgggaagtcattgtagggagtgagacactgaagccctgagaagccagtgccatcatccccaccccgcccagggttccggaacattcattcccccaccggtgaggacctggcatgcagcgaagcagcccagcccggcggatcccaggccagcacgcctgccggcttctcatcgtcagggagcccgcccagagctcgtgacgagcaagtgctgggtccccgccaggcaccccgaggcggcgctctggctggcagctggtggggaataggcagggcagctgtggctggggagagactttaggcagaagctgtgatgcaggctgactgccagccgaggggctgggtagtgccgtgcgggagctgatggtacagggcactcgctgtccccctccggccaccctagaccagggtccgagaggcaggcaggagccactcatgtcttccccattgcccgacgcccatagacgctccttcctgtgtggggctggggtactccctggtcgtactgcagtcagcacccgtaacccggctatgaccagggatctgtaagccctgtggctccacaggtgctgcttctcactggcccagactctgagctccaccggcccagtctgcacggcccatctgcttcaccttccctcccagccacgtgccagtggccacagcccacttcccaacccactgttgtacccaggcctcactttgctgttgcccttgtccctcttcgggccctgaattttctgttccctgggggccagccagggccctttgtgcccctcccagcacaggcctgatgcaggtgtccactcacaggtggcgctcacctaggctgtcacaggacccacctccatgccaggcaacagagggccacagaaccacccccacggctcactccttggtctggggccaccttcttgccctttctttttttttttttttttttttttccgagatggagtctctctctgtcacccaggtgggagtgtggtggcacaatctcggctcactgcaacctccacctcctgagttcaagcaattctcctgcctcagcctcccaagtagctgggactacaggcatgcaccaccacacttggccaatgttctgtatttttaatagggacggggttttgccatgttagctaggctggtctcaaactcacacctgggattacaggcatgagccactgcacccagccccttcttgccctttcttttctccatggctgatgctgctgtggccagccagggcccttgagatccttccagtttggctgttatgcaaagcaggtgatttgtcttaatcagataaaagatagaggctatgggggcctcaagatttttggagagcagaggtggtctctggcaattccatctggttttgagaaacttagcagctcacagagcacagagatcctgccttcttcctactatcaggctgacctaatggggttgggctgctcggcaactgcttgggtcaccttgccccaaggaaaccagccctgggtgccacccagccacttagggtctacagggtgggactccagacctagagcgtaagtatggatgttgtggccctgtgtcttcctagtgtgacccagccaggagcggaagcttcaggcgtttgtaaagtgaggtctggctctgcctcctccgttttttttttttttctgtttctgtttctgttttttttttgagatggagtctcgctctgtcgcccaggctggagtgcagtgtcacgatctcagctcactgcaacctccgcctcccaggtacaagagattctcctgcctcagcctcccgagtagctgggactacaggcgtgtgccaccatgcctggctaatttttgtatttttagtagagatggggtttcgccatgttagccagactggtctcgaactcctgacctcaggtgatcctcccaccccggcttcccaaagttctgggattataggcgtgagccaccatgcccggtctcttctcagtcttgaagcccatccctggatttccaccaggagttactttcctcctgacctgtaaatttgttctttaacaatggctgcaggtgggagcatatggtggtttataaaaacgctgtcgggctttgtttccttctttagctgccgtgtctacttctgaagtctgggaagtgccaagccacgcggcctcaagggagctggctggtgtttgagctgtggcagaagcacctggggctccagggagcaggctgggaactgcaggaccttgctcagccaggagcacttccccctccttgaggcaggaatactgaggtgcctccccacagatggagaaggtggagaggaggatgggcctcaggagcatctcaagccccagtagcaggagaaagaaagaaagagatgcctggttttcacagactggttcctgtggctgggatgactgcatccttttttttttttttttgagacggagtttttgcctttgtcgcccaggctggagtgcaatggcgtgatctcggctcaccgcaacctccgcctcccggattcaagcaattctcctgcctcagcctcccgagtagctgggattacaggcacgcacctccacgtccggctaattttgtatttttagtggagacggggtttctccatgtcggtcaggctggtctcgaactcccgacctcaggtgatctgcccacctcggcctcccaaagtgctgggattacaggcatgagccaccgcgcttggccagactgcgtcctttttaagcgaacattttagggcctgggagtttgtcaagtaaggaagtctcaagcccaaagagcagcgtcctgaccatggtggtttcattacgagcccttctgctggctctcaggcagaagccccacagcaccgggaccattcatgaggtcactgcccagctcatgatgtccgtgaggctgtccttttggccagtagccgtgtgcagctgtgtggcacagatggcttcgttcatcctgatcaaggccccacctcagccacagcagtccccccaacctgtgttgtccaccctattattcatgtacctgccaggccctgctagatagcaccccgtggcattacataacacttcatgagtggctgtgtcttgtaattttggggacaggtttctctctttccctctcttttttttgtcaaaagcccagagactgacaaccagctgcagtgtctaagtgttcctcactgacagggtggggcctcaccacccctggagggagcagcgttggcagggagacagcctggcccagtgaccctgggcccaagccagcccctccagggctttcagggaagcgccatccattttcaaagatgtcaaacgtcacttcttcctgtagggcccgagtcctgcctcctatcagggccagatcatagaaggctattttctattctggggaacgattataacttaaatgattgttttaataaaaattctaagctgg

SEQ ID NO: 2780 - DNA, 1000 bp, Homo sapiens
  source 1..1000: mol_type = genomic DNA
tcagagtgcaggccgtggggcgcgagggtcccgggcctgagccccgcgccatggccggggccatcgcttcccgcatgagcttcagctctctcaagaggaagcaacccaagacgttcaccgtgaggatcgtcaccatggacgccgagatggagttcaattgcgaggtaaagaagcagattttagatgaaaagatctactgccctcctgaggcttctgtgctcctggcttcttacgccgtccaggccaagaataaaaagggcacagagctgctgcttggagtggatgccctggggcttcacatttatgaccctgagaacagactgacccccaagatctccttcccgtggaatgaaatccgaaacatctcgtacagtgacaaggagtttactattaaaccactggataagaaaattgatgtcttcaagtttaactcctcaaagcttcgtgttaataagctgattctccagctatgtatcgggaaccatgatctatttatgaggagaaggaaagccgattctttggaagttcagcagatgaaagcccaggccagggaggagaaggctagaaagcagggccaaagaggcagatcagctgaagcaggacctgcaggaagcacgcgaggcggagcgaagagccaagcagaagctcctggagattgccaccaagcccacgtacccgcccatgaacccaattccagcaccgttgcctcctgacataccaagcttcaacctcattggtgacagcctgtctttcgacttcaaagatactgacatgaagcggctttccatggagatagagaaagaaaactcaccttgcagagcgccaagtcccgagtggccttctttgaagagctctagcaggtgacccagccaccccaggacctgccacttctcctgctaccgggaccgcgggatggaccagatatcaagagagccatccatagggagctggctgggggtttccgtgggagctccagaactttccccagctgagtgaagag

SEQ ID NO: 2781 - DNA, 5728 bp, Homo sapiens
  source 1..5728: mol_type = genomic DNA
gccaaaacctttgaccagagtctccttgccagcattcctacctccctttggccagctatttgtgccagttttttttttttttttttgagacatggcccgggcagtggctcctggaagaggaacaagtgtgggaaaagggagaggaagccggagctaaatgacaggatgcaggcgacttgagacacaaaaagagaagcgttcctctcggatccaggcattgcctcgctgctttcttttctccaagacgggctgaggattgtacagctctaggcggagttggggctcttcggatcgcttagattctcctctttgctgcatttccccccacgtcctcgttctcccgcgtctgcctgcggacccggagaagggagaatggagagggggctgccgctcctctgcgccgtgctcgccctcgtcctcgccccggccggcgcttttcgcaacgataaatgtggcgatactataaaaattgaaagccccgggtaccttacatctcctggttatcctcattcttatcacccaagtgaaaaatgcgaatggctgattcaggctccggacccataccagagaattatgatcaacttcaaccctcacttcgatttggaggacagagactgcaagtatgactacgtggaagtcttcgatggagaaaatgaaaatggacattttaggggaaagttctgtggaaagatagcccctcctcctgttgtgtcttcagggccatttctttttatcaaatttgtctctgactacgaaacacatggtgcaggattttccatacgttatgaaattttcaagagaggtcctgaatgttcccagaactacacaacacctagtggagtgataaagtcccccggattccctgaaaaatatcccaacagccttgaatgcacttatattgtctttgtgccaaagatgtcagagattatcctggaatttgaaagctttgacctggagcctgactcaaatcctccaggggggatgttctgtcgctacgaccggctagaaatctgggatggattccctgatgttggccctcacattgggcgttactgtggacagaaaacaccaggtcgaatccgatcctcatcgggcattctctccatggttttttacaccgacagcgcgatagcaaaagaaggtttctcagcaaactacagtgtcttgcagagcagtgtctcagaagatttcaaatgtatggaagctctgggcatggaatcaggagaaattcattctgaccagatcacagcttcttcccagtatagcaccaactggtctgcagagcgctcccgcctgaactaccctgagaatgggtggactcccggagaggattcctaccgagagtggatacaggtagacttgggccttctgcgctttgtcacggctgtcgggacacagggcgccatttcaaaagaaaccaagaagaaatattatgtcaagacttacaagatcgacgttagctccaacggggaagactggatcaccataaaagaaggaaacaaacctgttctctttcagggaaacaccaaccccacagatgttgtggttgcagtattccccaaaccactgataactcgatttgtccgaatcaagcctgcaacttgggaaactggcatatctatgagatttgaagtatacggttgcaagataacagattatccttgctctggaatgttgggtatggtgtctggacttatttctgactcccagatcacatcatccaaccaaggggacagaaactggatgcctgaaaacatccgcctggtaaccagtcgctctggctgggcacttccacccgcacctcattcctacatcaatgagtggctccaaatagacctgggggaggagaagatcgtgaggggcatcatcattcagggtgggaagcaccgagagaacaaggtgttcatgaggaagttcaagatcgggtacagcaacaacggctcggactggaagatgatcatggatgacagcaaacgcaaggcgaagtcttttgagggcaacaacaactatgatacacctgagctgcggacttttccagctctctccacgcgattcatcaggatctaccccgagagagccactcatggcggactggggctcagaatggagctgctgggctgtgaagtggaagcccctacagctggaccgaccactcccaacgggaacttggtggatgaatgtgatgacgaccaggccaactgccacagtggaacaggtgatgacttccagctcacaggtggcaccactgtgctggccacagaaaagcccacggtcatagacagcaccatacaatcagagtttccaacatatggttttaactgtgaatttggctggggctctcacaagaccttctgccactgggaacatgacaatcacgtgcagctcaagtggagtgtgttgaccagcaagacgggacccattcaggatcacacaggagatggcaacttcatctattcccaagctgacgaaaatcagaagggcaaagtggctcgcctggtgagccctgtggtttattcccagaactctgcccactgcatgaccttctggtatcacatgtctgggtcccacgtcggcacactcagggtcaaactgcgctaccagaagccagaggagtacgatcagctggtctggatggccattggacaccaaggtgaccactggaaggaagggcgtgtcttgctccacaagtctctgaaactttatcaggtgattttcgagggcgaaatcggaaaaggaaaccttggtgggattgctgtggatgacattagtattaataaccacatttcacaagaagattgtgcaaaaccagcagacctggataaaaagaacccagaaattaaaattgatgaaacagggagcacgccaggatacgaaggtgaaggagaaggtgacaagaacatctccaggaagccaggcaatgtgttgaagaccttagaccccatcctcatcaccatcatagccatgagtgccctgggggtcctcctgggggctgtctgtggggtcgtgctgtactgtgcctgttggcataatgggatgtcagaaagaaacttgtctgccctggagaactataactttgaacttgtggatggtgtgaagttgaaaaaagacaaactgaatacacagagtacttattcggaggcatgaaggcagacagagatgaaaagacagtcaaaggacggaagtggaaggacgggagtgagctggggagctgttgatctttcactatacaggctgggaagtgtgttgatgaccactgagccaggcttttctcaggagcttcaatgagtatggccgacagacatggacaaggagctgtgttcaccatcggactcatgtgcagtcagcttttttcctgttggtttcatttgaataatcagatgctggtgttgagaccaagtatgattgacataatcattcatttcgacccctcctgcccctctctctctctctcctctcccctttgtggattctttttggaaactgagcgaaatccaagatgctggcaccaagcgtattccgtgtggccctttggatggacatgctacctgaaacccagtgcccagaatatactagaatcaccgcatttcagtggactcctgaagttgtacttgtgtataattgcccgcgtcgtgcataggcaaagaaggattaggctgttttctttttaaagtactgtagcctcagtactggtgtagtgtgtcagctctgtttacgaagcaatactgtccagttttcttgctgtttttccggtgttgtactaaacctcgtgcttgtgaactccatacagaaaacggtgccatccctgaacacggctggccactgggtatactgctgacaaccgcaacaacaaaaacacaaatccttggcactggctagtctatgtcctctcaagtgcctttttgtttgtactggttcattgtgttacattaacgacccactctgcttcttgctggtgaaagccctgctctttaatcaaactctggtggcccactgactaagaagaaagtttattttcgtgtgagatgccagcccctccgggcaggcaagggctctgaagatttggcaacgtggcttaattgttctgctttttctgtagttcaatttcatgtttcttgacccttttgtataaagctacaatattctctcttattgttctttcatatggaatgtattttcaaatgtaaactctcttctctttctctctcctatctctctgtcttttttctctcttagaattggaggatttgccattgtccaggaaagaaacttgcagctttaacctgctgggaatggcaaacgattttactagactttatgtttaaaaataaataaataagggaaattcctaactttgccctccaaagtctaactttggttttcttgttaactggttaaagtgacagtatcttttttccttatctattctattcaaaatgacctttgatagaaatgttggcatttagtagaaatagtgataagttgaggaaagaaataatacaaattggctttcaagtgagacccaaaggaagaactggataaaatcttccaaatccaaaagcatgagatttttctatccaaatatgcaaaaatgacccaagagaactttcttattttgctactgagtcacacaagggaagtggaaggaagaacagttaatttaagaatgaaactataaatcctgatgcctgggggtcaagtattttaagataagagggggaaaaacacataaagtcaaacaaatgttttaaaaattcataacagcaaccttgaaaaaatagacttaaatgaatgcttctagaaacttccagcggctcacaaagaataagcctgccttagggctggcaacatctaagcctctaacagcacagggaagcaaatatcttaccaggcagcctatgaattaacccaaagaagctttggttggttttggtggatttttatcatgccatgttggacatgagattttttagatcttccttcccacattgctagacgtctcactcaaagacatttgttgggagtcacatttgcatcatagacgagacagtccattcatcttagttaaattggattgagaatgccttttgtttccaggaaaatattgatcaccatgaaagaagaatagttttttgtccccagagacattcatttagttgatataatcctaccagaaggaaagcactaagaaacactcgtttgttgtttttaaaggcaacagacttaaagttgtcctcagccaaggaaaaatgatactgcaactttaaaatttaaagtatcttgcactgataaatatatttaaaaattatatgtttataaagttattaatttgtaaaggcagtgttacaaaatgttcagtttatattgttttagattgttttgtaatttttaaaggtgtaaaataacatattttttctttatggaaatctataaaactttctgtagtaaaatgttttcattttactggtatattattgcttcatgttttgtaccatcataagattttgtgcagattttttttacagaaattattattttctatgacaatatgacacttgtaaattgttgtttcaaaatgaacagcgaagccttaactttaaatgacatttgtattctcagacactgagtagcataaaaaccacatagaactgaactgtaacttaaattccaaactatgactactacattccaaagaaacagttgaattaaacattttcataaaatatcccac

SEQ ID NO: 2782 - DNA, 2007 bp, Homo sapiens
  source 1..2007: mol_type = genomic DNA
atggagagggggctgccgctcctctgcgccgtgctcgccctcgtcctcgccccggccggcgcttttcgcaacgataaatgtggcgatactataaaaattgaaagccccgggtaccttacatctcctggttatcctcattcttatcacccaagtgaaaaatgcgaatggctgattcaggctccggacccataccagagaattatgatcaacttcaaccctcacttcgatttggaggacagagactgcaagtatgactacgtggaagtcttcgatggagaaaatgaaaatggacattttaggggaaagttctgtggaaagatagcccctcctcctgttgtgtcttcagggccatttctttttatcaaatttgtctctgactacgaaacacatggtgcaggattttccatacgttatgaaattttcaagagaggtcctgaatgttcccagaactacacaacacctagtggagtgataaagtcccccggattccctgaaaaatatcccaacagccttgaatgcacttatattgtctttgtgccaaagatgtcagagattatcctggaatttgaaagctttgacctggagcctgactcaaatcctccaggggggatgttctgtcgctacgaccggctagaaatctgggatggattccctgatgttggccctcacattgggcgttactgtggacagaaaacaccaggtcgaatccgatcctcatcgggcattctctccatggttttttacaccgacagcgcgatagcaaaagaaggtttctcagcaaactacagtgtcttgcagagcagtgtctcagaagatttcaaatgtatggaagctctgggcatggaatcaggagaaattcattctgaccagatcacagcttcttcccagtatagcaccaactggtctgcagagcgctcccgcctgaactaccctgagaatgggtggactcccggagaggattcctaccgagagtggatacaggtagacttgggccttctgcgctttgtcacggctgtcgggacacagggcgccatttcaaaagaaaccaagaagaaatattatgtcaagacttacaagatcgacgttagctccaacggggaagactggatcaccataaaagaaggaaacaaacctgttctctttcagggaaacaccaaccccacagatgttgtggttgcagtattccccaaaccactgataactcgatttgtccgaatcaagcctgcaacttgggaaactggcatatctatgagatttgaagtatacggttgcaagataacagattatccttgctctggaatgttgggtatggtgtctggacttatttctgactcccagatcacatcatccaaccaaggggacagaaactggatgcctgaaaacatccgcctggtaaccagtcgctctggctgggcacttccacccgcacctcattcctacatcaatgagtggctccaaatagacctgggggaggagaagatcgtgaggggcatcatcattcagggtgggaagcaccgagagaacaaggtgttcatgaggaagttcaagatcgggtacagcaacaacggctcggactggaagatgatcatggatgacagcaaacgcaaggcgaagtcttttgagggcaacaacaactatgatacacctgagctgcggacttttccagctctctccacgcgattcatcaggatctaccccgagagagccactcatggcggactggggctcagaatggagctgctgggctgtgaagtggaagcccctacagctggaccgaccactcccaacgggaacttggtggatgaatgtgatgacgaccaggccaactgccacagtggaacaggtgatgacttccagctcacaggtggcaccactgtgctggccacagaaaagcccacggtcatagacagcaccatacaatcaggctccagattcttcaagcatcatcacaagcagcagtcaatgagacctcaaaaccttcatcataattccattttgctattatag

SEQ ID NO: 2783 - DNA, 2804 bp, Homo sapiens
  source 1..2804: mol_type = genomic DNA
cttttctccaagacgggctgaggattgtacagctctaggcggagttggggctcttcggatcgcttagattctcctctttgctgcatttccccccacgtcctcgttctcccgcgtctgcctgcggacccggagaagggagaatggagagggggctgccgctcctctgcgccgtgctcgccctcgtcctcgccccggccggcgcttttcgcaacgataaatgtggcgatactataaaaattgaaagccccgggtaccttacatctcctggttatcctcattcttatcacccaagtgaaaaatgcgaatggctgattcaggctccggacccataccagagaattatgatcaacttcaaccctcacttcgatttggaggacagagactgcaagtatgactacgtggaagtcttcgatggagaaaatgaaaatggacattttaggggaaagttctgtggaaagatagcccctcctcctgttgtgtcttcagggccatttctttttatcaaatttgtctctgactacgaaacacatggtgcaggattttccatacgttatgaaattttcaagagaggtcctgaatgttcccagaactacacaacacctagtggagtgataaagtcccccggattccctgaaaaatatcccaacagccttgaatgcacttatattgtctttgtgccaaagatgtcagagattatcctggaatttgaaagctttgacctggagcctgactcaaatcctccaggggggatgttctgtcgctacgaccggctagaaatctgggatggattccctgatgttggccctcacattgggcgttactgtggacagaaaacaccaggtcgaatccgatcctcatcgggcattctctccatggttttttacaccgacagcgcgatagcaaaagaaggtttctcagcaaactacagtgtcttgcagagcagtgtctcagaagatttcaaatgtatggaagctctgggcatggaatcaggagaaattcattctgaccagatcacagcttcttcccagtatagcaccaactggtctgcagagcgctcccgcctgaactaccctgagaatgggtggactcccggagaggattcctaccgagagtggatacaggtagacttgggccttctgcgctttgtcacggctgtcgggacacagggcgccatttcaaaagaaaccaagaagaaatattatgtcaagacttacaagatcgacgttagctccaacggggaagactggatcaccataaaagaaggaaacaaacctgttctctttcagggaaacaccaaccccacagatgttgtggttgcagtattccccaaaccactgataactcgatttgtccgaatcaagcctgcaacttgggaaactggcatatctatgagatttgaagtatacggttgcaagataacagattatccttgctctggaatgttgggtatggtgtctggacttatttctgactcccagatcacatcatccaaccaaggggacagaaactggatgcctgaaaacatccgcctggtaaccagtcgctctggctgggcacttccacccgcacctcattcctacatcaatgagtggctccaaatagacctgggggaggagaagatcgtgaggggcatcatcattcagggtgggaagcaccgagagaacaaggtgttcatgaggaagttcaagatcgggtacagcaacaacggctcggactggaagatgatcatggatgacagcaaacgcaaggcgaagtcttttgagggcaacaacaactatgatacacctgagctgcggacttttccagctctctccacgcgattcatcaggatctaccccgagagagccactcatggcggactggggctcagaatggagctgctgggctgtgaagtggaaggcactatcaacacagaccaagaatgtccatgtgccagggctttggcaaaggatgccaagaaaaagaagagatgggcagactccactcactgcagatgcgttcgttcaattcacggagaaatgtggtcatctggaaaaggagtctgctccctggatgcgaatctgtagcctggattctggaaggcgatgctgatttaggaggtggagtgaatggagaattgaaaagacagcctggtggcagttttgaaagcacgcttgcaaaaattgtaatgagaacatgatgacagtgaaagagatctgacctaactgactccatcttgcttctaacctccaagctgtccttgttcattcctgggcataggccaaactaactttaggaggaacttatagtttaactttgaaacaaagacaatgacagctctttcccaaaacaaacccccttcctgcctggggactagattgccttcgcaagactaacaaattagccacaaaattggaaattatggtttagggggaaaaaaatgaaattatggtttaggggtcatgcagctggaggctgcaagactctgaacctccccaaattgcttctgggaataatgtcactgttgtaaaacctgagatcagtgcttcagatattttccagaccctgtacttgatggatcagctggcaccacccagatcgataaactggctcatcctgtcttgtgtccctcaccagaaactgactcagcacaagaggacacctttgactccctgtgatttcacctcagacctgaccaatgagcacctgccccttttcaacccctgctcaacaaattacccttcaaaacctaaaccccaagtaataatagaacccccatctcccatacagttgtctctgcatgaattaaactctttctctattgc

SEQ ID NO: 2784 - DNA, 1110 bp, Homo sapiens
  source 1..1110: mol_type = genomic DNA
atggagagggggctgccgctcctctgcgccgtgctcgccctcgtcctcgccccggccggcgcttttcgcaacgataaatgtggcgatactataaaaattgaaagccccgggtaccttacatctcctggttatcctcattcttatcacccaagtgaaaaatgcgaatggctgattcaggctccggacccataccagagaattatgatcaacttcaaccctcacttcgatttggaggacagagactgcaagtatgactacgtggaagtcttcgatggagaaaatgaaaatggacattttaggggaaagttctgtggaaagatagcccctcctcctgttgtgtcttcagggccatttctttttatcaaatttgtctctgactacgaaacacatggtgcaggattttccatacgttatgaaattttcaagagaggtcctgaatgttcccagaactacacaacacctagtggagtgataaagtcccccggattccctgaaaaatatcccaacagccttgaatgcacttatattgtctttgtgccaaagatgtcagagattatcctggaatttgaaagctttgacctggagcctgactcaaatcctccaggggggatgttctgtcgctacgaccggctagaaatctgggatggattccctgatgttggccctcacattgggcgttactgtggacagaaaacaccaggtcgaatccgatcctcatcgggcattctctccatggttttttacaccgacagcgcgatagcaaaagaaggtttctcagcaaactacagtgtcttgcagagcagtgtctcagaagatttcaaatgtatggaagctctgggcatggaatcaggagaaattcattctgaccagatcacagcttcttcccagtatagcaccaactggtctgcagagcgctcccgcctgaactaccctgagaatgggtggactcccggagaggattcctaccgagagtggatacaggatgcaaaatacagactccgtgtatcagtggtgcgatcaaaatcttcctcttcaagcacatcattagaacccaggccattaagctcattgaaactgagtttcttttcctataaaataaaaataacgtag

SEQ ID NO: 2785 - DNA, 1988 bp, Homo sapiens
  source 1..1988: mol_type = genomic DNA
cttttctccaagacgggctgaggattgtacagctctaggcggagttggggctcttcggatcgcttagattctcctctttgctgcatttccccccacgtcctcgttctcccgcgtctgcctgcggacccggagaagggagaatggagagggggctgccgctcctctgcgccgtgctcgccctcgtcctcgccccggccggcgcttttcgcaacgataaatgtggcgatactataaaaattgaaagccccgggtaccttacatctcctggttatcctcattcttatcacccaagtgaaaaatgcgaatggctgattcaggctccggacccataccagagaattatgatcaacttcaaccctcacttcgatttggaggacagagactgcaagtatgactacgtggaagtcttcgatggagaaaatgaaaatggacattttaggggaaagttctgtggaaagatagcccctcctcctgttgtgtcttcagggccatttctttttatcaaatttgtctctgactacgaaacacatggtgcaggattttccatacgttatgaaattttcaagagaggtcctgaatgttcccagaactacacaacacctagtggagtgataaagtcccccggattccctgaaaaatatcccaacagccttgaatgcacttatattgtctttgtgccaaagatgtcagagattatcctggaatttgaaagctttgacctggagcctgactcaaatcctccaggggggatgttctgtcgctacgaccggctagaaatctgggatggattccctgatgttggccctcacattgggcgttactgtggacagaaaacaccaggtcgaatccgatcctcatcgggcattctctccatggttttttacaccgacagcgcgatagcaaaagaaggtttctcagcaaactacagtgtcttgcagagcagtgtctcagaagatttcaaatgtatggaagctctgggcatggaatcaggagaaattcattctgaccagatcacagcttcttcccagtatagcaccaactggtctgcagagcgctcccgcctgaactaccctgagaatgggtggactcccggagaggattcctaccgagagtggatacaggtagacttgggccttctgcgctttgtcacggctgtcgggacacagggcgccatttcaaaagaaaccaagaagaaatattatgtcaagacttacaagatcgacgttagctccaacggggaagactggatcaccataaaagaaggaaacaaacctgttctctttcagggaaacaccaaccccacagatgttgtggttgcagtattccccaaaccactgataactcgatttgtccgaatcaagcctgcaacttgggaaactggcatatctatgagatttgaagtatacggttgcaagataacagattatccttgctctggaatgttgggtatggtgtctggacttatttctgactcccagatcacatcatccaaccaaggggacagaaactggatgcctgaaaacatccgcctggtaaccagtcgctctggctgggcacttccacccgcacctcattcctacatcaatgagtggctccaaatagacctgggggaggagaagatcgtgaggggcatcatcattcagggtgggaagcaccgagagaacaaggtgttcatgaggaagttcaagatcgggtacagcaacaacggctcggactggaagatgatcatggatgacagcaaacgcaaggcgaagtcttttgagggcaacaacaactatgatacacctgagctgcggacttttccagctctctccacgcgattcatcaggatctaccccgagagagccactcatggcggactggggctcagaatggagctgctgggctgtgaagtggaaggtggcaccactgtgctggccacagaaaagcccacggtcatagacagcaccatacaatcaggtatcaaataaaatacgaaatgtgacaga

SEQ ID NO: 2786 - DNA, 2213 bp, Homo sapiens
  source 1..2213: mol_type = genomic DNA
ggaagaggaacaagtgtgggaaaagggagaggaagccggagctaaatgacaggatgcaggcgacttgagacacaaaaagagaagcgttcctctcggatccaggcattgcctcgctgctttcttttctccaagacgggctgaggattgtacagctctaggcggagttggggctcttcggatcgcttagattctcctctttgctgcatttccccccacgtcctcgttctcccgcgtctgcctgcggacccggagaagggagaatggagagggggctgccgctcctctgcgccgtgctcgccctcgtcctcgccccggccggcgcttttcgcaacgataaatgtggcgatactataaaaattgaaagccccgggtaccttacatctcctggttatcctcattcttatcacccaagtgaaaaatgcgaatggctgattcaggctccggacccataccagagaattatgatcaacttcaaccctcacttcgatttggaggacagagactgcaagtatgactacgtggaagtcttcgatggagaaaatgaaaatggacattttaggggaaagttctgtggaaagatagcccctcctcctgttgtgtcttcagggccatttctttttatcaaatttgtctctgactacgaaacacatggtgcaggattttccatacgttatgaaattttcaagagaggtcctgaatgttcccagaactacacaacacctagtggagtgataaagtcccccggattccctgaaaaatatcccaacagccttgaatgcacttatattgtctttgtgccaaagatgtcagagattatcctggaatttgaaagctttgacctggagcctgactcaaatcctccaggggggatgttctgtcgctacgaccggctagaaatctgggatggattccctgatgttggccctcacattgggcgttactgtggacagaaaacaccaggtcgaatccgatcctcatcgggcattctctccatggttttttacaccgacagcgcgatagcaaaagaaggtttctcagcaaactacagtgtcttgcagagcagtgtctcagaagatttcaaatgtatggaagctctgggcatggaatcaggagaaattcattctgaccagatcacagcttcttcccagtatagcaccaactggtctgcagagcgctcccgcctgaactaccctgagaatgggtggactcccggagaggattcctaccgagagtggatacaggtagacttgggccttctgcgctttgtcacggctgtcgggacacagggcgccatttcaaaagaaaccaagaagaaatattatgtcaagacttacaagatcgacgttagctccaacggggaagactggatcaccataaaagaaggaaacaaacctgttctctttcagggaaacaccaaccccacagatgttgtggttgcagtattccccaaaccactgataactcgatttgtccgaatcaagcctgcaacttgggaaactggcatatctatgagatttgaagtatacggttgcaagataacagattatccttgctctggaatgttgggtatggtgtctggacttatttctgactcccagatcacatcatccaaccaaggggacagaaactggatgcctgaaaacatccgcctggtaaccagtcgctctggctgggcacttccacccgcacctcattcctacatcaatgagtggctccaaatagacctgggggaggagaagatcgtgaggggcatcatcattcagggtgggaagcaccgagagaacaaggtgttcatgaggaagttcaagatcgggtacagcaacaacggctcggactggaagatgatcatggatgacagcaaacgcaaggcgaagtcttttgagggcaacaacaactatgatacacctgagctgcggacttttccagctctctccacgcgattcatcaggatctaccccgagagagccactcatggcggactggggctcagaatggagctgctgggctgtgaagtggaagcccctacagctggaccgaccactcccaacgggaacttggtggatgaatgtgatgacgaccaggccaactgccacagtggaacaggtgatgacttccagctcacaggtggcaccactgtgctggccacagaaaagcccacggtcatagacagcaccatacaatcaggtatcaaataaaatacgaaatgtgacaga

SEQ ID NO: 2787 - DNA, 3737 bp, Homo sapiens
  source 1..3737: mol_type = genomic DNA
atggagagggggctgccgctcctctgcgccgtgctcgccctcgtcctcgccccggccggcgcttttcgcaacgataaatgtggcgatactataaaaattgaaagccccgggtaccttacatctcctggttatcctcattcttatcacccaagtgaaaaatgcgaatggctgattcaggctccggacccataccagagaattatgatcaacttcaaccctcacttcgatttggaggacagagactgcaagtatgactacgtggaagtcttcgatggagaaaatgaaaatggacattttaggggaaagttctgtggaaagatagcccctcctcctgttgtgtcttcagggccatttctttttatcaaatttgtctctgactacgaaacacatggtgcaggattttccatacgttatgaaattttcaagagaggtcctgaatgttcccagaactacacaacacctagtggagtgataaagtcccccggattccctgaaaaatatcccaacagccttgaatgcacttatattgtctttgtgccaaagatgtcagagattatcctggaatttgaaagctttgacctggagcctgactcaaatcctccaggggggatgttctgtcgctacgaccggctagaaatctgggatggattccctgatgttggccctcacattgggcgttactgtggacagaaaacaccaggtcgaatccgatcctcatcgggcattctctccatggttttttacaccgacagcgcgatagcaaaagaaggtttctcagcaaactacagtgtcttgcagagcagtgtctcagaagatttcaaatgtatggaagctctgggcatggaatcaggagaaattcattctgaccagatcacagcttcttcccagtatagcaccaactggtctgcagagcgctcccgcctgaactaccctgagaatgggtggactcccggagaggattcctaccgagagtggatacaggtagacttgggccttctgcgctttgtcacggctgtcgggacacagggcgccatttcaaaagaaaccaagaagaaatattatgtcaagacttacaagatcgacgttagctccaacggggaagactggatcaccataaaagaaggaaacaaacctgttctctttcagggaaacaccaaccccacagatgttgtggttgcagtattccccaaaccactgataactcgatttgtccgaatcaagcctgcaacttgggaaactggcatatctatgagatttgaagtatacggttgcaagataacagattatccttgctctggaatgttgggtatggtgtctggacttatttctgactcccagatcacatcatccaaccaaggggacagaaactggatgcctgaaaacatccgcctggtaaccagtcgctctggctgggcacttccacccgcacctcattcctacatcaatgagtggctccaaatagacctgggggaggagaagatcgtgaggggcatcatcattcagggtgggaagcaccgagagaacaaggtgttcatgaggaagttcaagatcgggtacagcaacaacggctcggactggaagatgatcatggatgacagcaaacgcaaggcgaagtcttttgagggcaacaacaactatgatacacctgagctgcggacttttccagctctctccacgcgattcatcaggatctaccccgagagagccactcatggcggactggggctcagaatggagctgctgggctgtgaagtggaagcccctacagctggaccgaccactcccaacgggaacttggtggatgaatgtgatgacgaccaggccaactgccacagtggaacaggtgatgacttccagctcacaggtgcagaaaccatcttcatcccattgctgtaccatttcagttcatgtcttagttgggaccagctaacgcctgtgtgtgtgcttgtaactccgcatggcagagagctgcccaggaatagaagctgccttgccagaacacgtgcatcttcatttcctcatgtcatctggatagatgagttgttcttaatagccacaaccatttgtaacaataatttgagccatttcgagagccaaaggctaggattatcttaattgaataagaatttccccatggctaaatgtactaaaccgatccttattttcattattttcagacccccccccaataacacgtgcaccacccctacgtaaccacacacttcagaatgtttattttcattttctaatgaggacaagtttttttgagtggatcctttatccaacaaatggataaagttaggcttatatttgaagtgcggcttttaagttgggatttggtaaatcattgtacattaacatttacaaaggcagaattagctgctatttcacatcaccaccgaccagcaaatgcatcagagatgttgtgtgccaaatgtctcactaattaatctagagtattactctctaatctcctaaaaccctaaaagctaggaaatgaccttctcttccacttggaatggcagaggaaatattaggcaagtggagaaatgggattataccatttggaaattggccaaggcactagggttttcaccctgtggttgcaaaaggtatcgtgggacttttactgctccctgggtcaaaacgcagtttcaatagcatctgactctcatttgagattaaacatgagcttttgaatgcaggtctgcatttttacccagaagggactcggagagcccacataattaatttccatgggcaaaactgaaggcgttaccatgtaacttcataataaagccatgttattggctaatgcattcgtacaaaatctggaaggaagtgtcctagagtacatttccaattatttcaaaagctctcctctgaaggagtgagagggctctgcactctaagatggaataaagagtaaaagaaagaaaaaaaaattgaaaatctgtcccagaaatttagtactgtgaactgagtttacatttaaatcccacctcctaaagctgtctctctccaaatttccaggataatcatttacattcatatggccaataaatgtcacattgctatgagcttttgaatgcaaatcttgtatacaagcagccacaagccacaaaacttagattaattaatgcagagacattttctgtgtaacatgtcaagttcaagttgaaaactcaaccactgatataaaaaacagagtactattccatgaaccaagtcctctggaagcttcccggggttgcctgtaaacactctgccacaaacctcaggctttttacagaccccgtcacacatccatagtgaaatttctcataaaaaaggaatgattgcaggatcccagtgtgccctttcaattgccctcttgtggaaggggttcttttcttcataaaccctaaagtggtcagttaatattgattagaaacaaagcctcagatttactcctcatatcagaacaaccagccttctcatttttgcattagttcatgactgaatcaattgaaactgaaggctttgaatgaaatagggcgagtatgttagcctggagcaaattgtgtatggcagcgagttacaaaccacagaaaatgggtcatttatagtggaaacactgacaacctttcaaaactataaggttttgctttacctacagtgtttcaattatttctttggtagatagaagaaagttcattctgattttttctttttacatattagcatggtgaaaaaaa

SEQ ID NO: 2788 - DNA, 2252 bp, Homo sapiens
  source 1..2252: mol_type = genomic DNA
ggaagaggaacaagtgtgggaaaagggagaggaagccggagctaaatgacaggatgcaggcgacttgagacacaaaaagagaagcgttcctctcggatccaggcattgcctcgctgctttcttttctccaagacgggctgaggattgtacagctctaggcggagttggggctcttcggatcgcttagattctcctctttgctgcatttccccccacgtcctcgttctcccgcgtctgcctgcggacccggagaagggagaatggagagggggctgccgctcctctgcgccgtgctcgccctcgtcctcgccccggccggcgcttttcgcaacgataaatgtggcgatactataaaaattgaaagccccgggtaccttacatctcctggttatcctcattcttatcacccaagtgaaaaatgcgaatggctgattcaggctccggacccataccagagaattatgatcaacttcaaccctcacttcgatttggaggacagagactgcaagtatgactacgtggaagtcttcgatggagaaaatgaaaatggacattttaggggaaagttctgtggaaagatagcccctcctcctgttgtgtcttcagggccatttctttttatcaaatttgtctctgactacgaaacacatggtgcaggattttccatacgttatgaaattttcaagagaggtcctgaatgttcccagaactacacaacacctagtggagtgataaagtcccccggattccctgaaaaatatcccaacagccttgaatgcacttatattgtctttgtgccaaagatgtcagagattatcctggaatttgaaagctttgacctggagcctgactcaaatcctccaggggggatgttctgtcgctacgaccggctagaaatctgggatggattccctgatgttggccctcacattgggcgttactgtggacagaaaacaccaggtcgaatccgatcctcatcgggcattctctccatggttttttacaccgacagcgcgatagcaaaagaaggtttctcagcaaactacagtgtcttgcagagcagtgtctcagaagatttcaaatgtatggaagctctgggcatggaatcaggagaaattcattctgaccagatcacagcttcttcccagtatagcaccaactggtctgcagagcgctcccgcctgaactaccctgagaatgggtggactcccggagaggattcctaccgagagtggatacaggtagacttgggccttctgcgctttgtcacggctgtcgggacacagggcgccatttcaaaagaaaccaagaagaaatattatgtcaagacttacaagatcgacgttagctccaacggggaagactggatcaccataaaagaaggaaacaaacctgttctctttcagggaaacaccaaccccacagatgttgtggttgcagtattccccaaaccactgataactcgatttgtccgaatcaagcctgcaacttgggaaactggcatatctatgagatttgaagtatacggttgcaagataacagattatccttgctctggaatgttgggtatggtgtctggacttatttctgactcccagatcacatcatccaaccaaggggacagaaactggatgcctgaaaacatccgcctggtaaccagtcgctctggctgggcacttccacccgcacctcattcctacatcaatgagtggctccaaatagacctgggggaggagaagatcgtgaggggcatcatcattcagggtgggaagcaccgagagaacaaggtgttcatgaggaagttcaagatcgggtacagcaacaacggctcggactggaagatgatcatggatgacagcaaacgcaaggcgaagtcttttgagggcaacaacaactatgatacacctgagctgcggacttttccagctctctccacgcgattcatcaggatctaccccgagagagccactcatggcggactggggctcagaatggagctgctgggctgtgaagtggaagcccctacagctggaccgaccactcccaacgggaacttggtggatgaatgtgatgacgaccaggccaactgccacagtggaacaggtgatgacttccagctcacaggtggcaccactgtgctggccacagaaaagcccacggtcatagacagcaccatacaatcagccaggctggaagtttccacattgaacctctcactccataaccctccccaacaaaaggcattgatctaa

SEQ ID NO: 2789 - DNA, 5877 bp, Homo sapiens
  source 1..5877: mol_type = genomic DNA
gcagttggtgaaactcctctgtctcccgctcatcttttcattgctcgttcccctccttcccgcagacacccggacctcccctgggcgccagctccgcggctccaacgggtccagaaacaagccggattttttttttttcttcctggaaattggctttggtgtgtgttgccctacctccctcctccccctcccacccacagcccccccccggccttttttttttttttttttttttttgagacatggcccgggcagtggctcctggaagaggaacaagtgtgggaaaagggagaggaagccggagctaaatgacaggatgcaggcgacttgagacacaaaaagagaagcgttcctctcggatccaggcattgcctcgctgctttcttttctccaagacgggctgaggattgtacagctctaggcggagttggggctcttcggatcgcttagattctcctctttgctgcatttccccccacgtcctcgttctcccgcgtctgcctgcggacccggagaagggagaatggagagggggctgccgctcctctgcgccgtgctcgccctcgtcctcgccccggccggcgcttttcgcaacgataaatgtggcgatactataaaaattgaaagccccgggtaccttacatctcctggttatcctcattcttatcacccaagtgaaaaatgcgaatggctgattcaggctccggacccataccagagaattatgatcaacttcaaccctcacttcgatttggaggacagagactgcaagtatgactacgtggaagtcttcgatggagaaaatgaaaatggacattttaggggaaagttctgtggaaagatagcccctcctcctgttgtgtcttcagggccatttctttttatcaaatttgtctctgactacgaaacacatggtgcaggattttccatacgttatgaaattttcaagagaggtcctgaatgttcccagaactacacaacacctagtggagtgataaagtcccccggattccctgaaaaatatcccaacagccttgaatgcacttatattgtctttgtgccaaagatgtcagagattatcctggaatttgaaagctttgacctggagcctgactcaaatcctccaggggggatgttctgtcgctacgaccggctagaaatctgggatggattccctgatgttggccctcacattgggcgttactgtggacagaaaacaccaggtcgaatccgatcctcatcgggcattctctccatggttttttacaccgacagcgcgatagcaaaagaaggtttctcagcaaactacagtgtcttgcagagcagtgtctcagaagatttcaaatgtatggaagctctgggcatggaatcaggagaaattcattctgaccagatcacagcttcttcccagtatagcaccaactggtctgcagagcgctcccgcctgaactaccctgagaatgggtggactcccggagaggattcctaccgagagtggatacaggtagacttgggccttctgcgctttgtcacggctgtcgggacacagggcgccatttcaaaagaaaccaagaagaaatattatgtcaagacttacaagatcgacgttagctccaacggggaagactggatcaccataaaagaaggaaacaaacctgttctctttcagggaaacaccaaccccacagatgttgtggttgcagtattccccaaaccactgataactcgatttgtccgaatcaagcctgcaacttgggaaactggcatatctatgagatttgaagtatacggttgcaagataacagattatccttgctctggaatgttgggtatggtgtctggacttatttctgactcccagatcacatcatccaaccaaggggacagaaactggatgcctgaaaacatccgcctggtaaccagtcgctctggctgggcacttccacccgcacctcattcctacatcaatgagtggctccaaatagacctgggggaggagaagatcgtgaggggcatcatcattcagggtgggaagcaccgagagaacaaggtgttcatgaggaagttcaagatcgggtacagcaacaacggctcggactggaagatgatcatggatgacagcaaacgcaaggcgaagtcttttgagggcaacaacaactatgatacacctgagctgcggacttttccagctctctccacgcgattcatcaggatctaccccgagagagccactcatggcggactggggctcagaatggagctgctgggctgtgaagtggaagcccctacagctggaccgaccactcccaacgggaacttggtggatgaatgtgatgacgaccaggccaactgccacagtggaacaggtgatgacttccagctcacaggtggcaccactgtgctggccacagaaaagcccacggtcatagacagcaccatacaatcagagtttccaacatatggttttaactgtgaatttggctggggctctcacaagaccttctgccactgggaacatgacaatcacgtgcagctcaagtggagtgtgttgaccagcaagacgggacccattcaggatcacacaggagatggcaacttcatctattcccaagctgacgaaaatcagaagggcaaagtggctcgcctggtgagccctgtggtttattcccagaactctgcccactgcatgaccttctggtatcacatgtctgggtcccacgtcggcacactcagggtcaaactgcgctaccagaagccagaggagtacgatcagctggtctggatggccattggacaccaaggtgaccactggaaggaagggcgtgtcttgctccacaagtctctgaaactttatcaggtgattttcgagggcgaaatcggaaaaggaaaccttggtgggattgctgtggatgacattagtattaataaccacatttcacaagaagattgtgcaaaaccagcagacctggataaaaagaacccagaaattaaaattgatgaaacagggagcacgccaggatacgaaggtgaaggagaaggtgacaagaacatctccaggaagccaggcaatgtgttgaagaccttagaccccatcctcatcaccatcatagccatgagtgccctgggggtcctcctgggggctgtctgtggggtcgtgctgtactgtgcctgttggcataatgggatgtcagaaagaaacttgtctgccctggagaactataactttgaacttgtggatggtgtgaagttgaaaaaagacaaactgaatacacagagtacttattcggaggcatgaaggcagacagagatgaaaagacagtcaaaggacggaagtggaaggacgggagtgagctggggagctgttgatctttcactatacaggctgggaagtgtgttgatgaccactgagccaggcttttctcaggagcttcaatgagtatggccgacagacatggacaaggagctgtgttcaccatcggactcatgtgcagtcagcttttttcctgttggtttcatttgaataatcagatgctggtgttgagaccaagtatgattgacataatcattcatttcgacccctcctgcccctctctctctctctcctctcccctttgtggattctttttggaaactgagcgaaatccaagatgctggcaccaagcgtattccgtgtggccctttggatggacatgctacctgaaacccagtgcccagaatatactagaatcaccgcatttcagtggactcctgaagttgtacttgtgtataattgcccgcgtcgtgcataggcaaagaaggattaggctgttttctttttaaagtactgtagcctcagtactggtgtagtgtgtcagctctgtttacgaagcaatactgtccagttttcttgctgtttttccggtgttgtactaaacctcgtgcttgtgaactccatacagaaaacggtgccatccctgaacacggctggccactgggtatactgctgacaaccgcaacaacaaaaacacaaatccttggcactggctagtctatgtcctctcaagtgcctttttgtttgtactggttcattgtgttacattaacgacccactctgcttcttgctggtgaaagccctgctctttaatcaaactctggtggcccactgactaagaagaaagtttattttcgtgtgagatgccagcccctccgggcaggcaagggctctgaagatttggcaacgtggcttaattgttctgctttttctgtagttcaatttcatgtttcttgacccttttgtataaagctacaatattctctcttattgttctttcatatggaatgtattttcaaatgtaaactctcttctctttctctctcctatctctctgtcttttttctctcttagaattggaggatttgccattgtccaggaaagaaacttgcagctttaacctgctgggaatggcaaacgattttactagactttatgtttaaaaataaataaataagggaaattcctaactttgccctccaaagtctaactttggttttcttgttaactggttaaagtgacagtatcttttttccttatctattctattcaaaatgacctttgatagaaatgttggcatttagtagaaatagtgataagttgaggaaagaaataatacaaattggctttcaagtgagacccaaaggaagaactggataaaatcttccaaatccaaaagcatgagatttttctatccaaatatgcaaaaatgacccaagagaactttcttattttgctactgagtcacacaagggaagtggaaggaagaacagttaatttaagaatgaaactataaatcctgatgcctgggggtcaagtattttaagataagagggggaaaaacacataaagtcaaacaaatgttttaaaaattcataacagcaaccttgaaaaaatagacttaaatgaatgcttctagaaacttccagcggctcacaaagaataagcctgccttagggctggcaacatctaagcctctaacagcacagggaagcaaatatcttaccaggcagcctatgaattaacccaaagaagctttggttggttttggtggatttttatcatgccatgttggacatgagattttttagatcttccttcccacattgctagacgtctcactcaaagacatttgttgggagtcacatttgcatcatagacgagacagtccattcatcttagttaaattggattgagaatgccttttgtttccaggaaaatattgatcaccatgaaagaagaatagttttttgtccccagagacattcatttagttgatataatcctaccagaaggaaagcactaagaaacactcgtttgttgtttttaaaggcaacagacttaaagttgtcctcagccaaggaaaaatgatactgcaactttaaaatttaaagtatcttgcactgataaatatatttaaaaattatatgtttataaagttattaatttgtaaaggcagtgttacaaaatgttcagtttatattgttttagattgttttgtaatttttaaaggtgtaaaataacatattttttctttatggaaatctataaaactttctgtagtaaaatgttttcattttactggtatattattgcttcatgttttgtaccatcataagattttgtgcagattttttttacagaaattattattttctatgacaatatgacacttgtaaattgttgtttcaaaatgaacagcgaagccttaactttaaatgacatttgtattctcagacactgagtagcataaaaaccacatagaactgaactgtaacttaaattccaaactatgactactacattccaaagaaacagttgaattaaacattttcataaaatatccc

SEQ ID NO: 2790 - DNA, 5407 bp, Homo sapiens
  source 1..5407: mol_type = genomic DNA
ggaacaagtgtgggaaaagggagaggaagccggagctaaatgacaggatgcaggcgacttgagacacaaaaagagaagcgttcctctcggatccaggcattgcctcgctgctttcttttctccaagacgggctgaggattgtacagctctaggcggagttggggctcttcggatcgcttagattctcctctttgctgcatttccccccacgtcctcgttctcccgcgtctgcctgcggacccggagaagggagaatggagagggggctgccgctcctctgcgccgtgctcgccctcgtcctcgccccggccggcgcttttcgcaacgataaatgtggcgatactataaaaattgaaagccccgggtaccttacatctcctggttatcctcattcttatcacccaagtgaaaaatgcgaatggctgattcaggctccggacccataccagagaattatgatcaacttcaaccctcacttcgatttggaggacagagactgcaagtcctgaatgttcccagaactacacaacacctagtggagtgataaagtcccccggattccctgaaaaatatcccaacagccttgaatgcacttatattgtctttgtgccaaagatgtcagagattatcctggaatttgaaagctttgacctggagcctgactcaaatcctccaggggggatgttctgtcgctacgaccggctagaaatctgggatggattccctgatgttggccctcacattgggcgttactgtggacagaaaacaccaggtcgaatccgatcctcatcgggcattctctccatggttttttacaccgacagcgcgatagcaaaagaaggtttctcagcaaactacagtgtcttgcagagcagtgtctcagaagatttcaaatgtatggaagctctgggcatggaatcaggagaaattcattctgaccagatcacagcttcttcccagtatagcaccaactggtctgcagagcgctcccgcctgaactaccctgagaatgggtggactcccggagaggattcctaccgagagtggatacaggtagacttgggccttctgcgctttgtcacggctgtcgggacacagggcgccatttcaaaagaaaccaagaagaaatattatgtcaagacttacaagatcgacgttagctccaacggggaagactggatcaccataaaagaaggaaacaaacctgttctctttcagggaaacaccaaccccacagatgttgtggttgcagtattccccaaaccactgataactcgatttgtccgaatcaagcctgcaacttgggaaactggcatatctatgagatttgaagtatacggttgcaagataacagattatccttgctctggaatgttgggtatggtgtctggacttatttctgactcccagatcacatcatccaaccaaggggacagaaactggatgcctgaaaacatccgcctggtaaccagtcgctctggctgggcacttccacccgcacctcattcctacatcaatgagtggctccaaatagacctgggggaggagaagatcgtgaggggcatcatcattcagggtgggaagcaccgagagaacaaggtgttcatgaggaagttcaagatcgggtacagcaacaacggctcggactggaagatgatcatggatgacagcaaacgcaaggcgaagtcttttgagggcaacaacaactatgatacacctgagctgcggacttttccagctctctccacgcgattcatcaggatctaccccgagagagccactcatggcggactggggctcagaatggagctgctgggctgtgaagtggaagcccctacagctggaccgaccactcccaacgggaacttggtggatgaatgtgatgacgaccaggccaactgccacagtggaacaggtggcaccactgtgctggccacagaaaagcccacggtcatagacagcaccatacaatcagagtttccaacatatggttttaactgtgaatttggctggggctctcacaagaccttctgccactgggaacatgacaatcacgtgcagctcaagtggagtgtgttgaccagcaagacgggacccattcaggatcacacaggagatggcaacttcatctattcccaagctgacgaaaatcagaagggcaaagtggctcgcctggtgagccctgtggtttattcccagaactctgcccactgcatgaccttctggtatcacatgtctgggtcccacgtcggcacactcagggtcaaactgcgctaccagaagccagaggagtacgatcagctggtctggatggccattggacaccaaggtgaccactggaaggaagggcgtgtcttgctccacaagtctctgaaactttatcaggtgattttcgagggcgaaatcggaaaaggaaaccttggtgggattgctgtggatgacattagtattaataaccacatttcacaagaagattgtgcaaaaccagcagacctggataaaaagaacccagaaattaaaattgatgaaacagggagcacgccaggatacgaaggtgaaggagaaggtgacaagaacatctccaggaagccaggcaatgtgttgaagaccttagaccccatcctcatcaccatcatagccatgagtgccctgggggtcctcctgggggctgtctgtggggtcgtgctgtactgtgcctgttggcataatgggatgtcagaaagaaacttgtctgccctggagaactataactttgaacttgtggatggtgtgaagttgaaaaaagacaaactgaatacacagagtacttattcggaggcatgaaggcagacagagatgaaaagacagtcaaaggacggaagtggaaggacgggagtgagctggggagctgttgatctttcactatacaggctgggaagtgtgttgatgaccactgagccaggcttttctcaggagcttcaatgagtatggccgacagacatggacaaggagctgtgttcaccatcggactcatgtgcagtcagcttttttcctgttggtttcatttgaataatcagatgctggtgttgagaccaagtatgattgacataatcattcatttcgacccctcctgcccctctctctctctctcctctcccctttgtggattctttttggaaactgagcgaaatccaagatgctggcaccaagcgtattccgtgtggccctttggatggacatgctacctgaaacccagtgcccagaatatactagaatcaccgcatttcagtggactcctgaagttgtacttgtgtataattgcccgcgtcgtgcataggcaaagaaggattaggctgttttctttttaaagtactgtagcctcagtactggtgtagtgtgtcagctctgtttacgaagcaatactgtccagttttcttgctgtttttccggtgttgtactaaacctcgtgcttgtgaactccatacagaaaacggtgccatccctgaacacggctggccactgggtatactgctgacaaccgcaacaacaaaaacacaaatccttggcactggctagtctatgtcctctcaagtgcctttttgtttgtactggttcattgtgttacattaacgacccactctgcttcttgctggtgaaagccctgctctttaatcaaactctggtggcccactgactaagaagaaagtttattttcgtgtgagatgccagcccctccgggcaggcaagggctctgaagatttggcaacgtggcttaattgttctgctttttctgtagttcaatttcatgtttcttgacccttttgtataaagctacaatattctctcttattgttctttcatatggaatgtattttcaaatgtaaactctcttctctttctctctcctatctctctgtcttttttctctcttagaattggaggatttgccattgtccaggaaagaaacttgcagctttaacctgctgggaatggcaaacgattttactagactttatgtttaaaaataaataaataagggaaattcctaactttgccctccaaagtctaactttggttttcttgttaactggttaaagtgacagtatcttttttccttatctattctattcaaaatgacctttgatagaaatgttggcatttagtagaaatagtgataagttgaggaaagaaataatacaaattggctttcaagtgagacccaaaggaagaactggataaaatcttccaaatccaaaagcatgagatttttctatccaaatatgcaaaaatgacccaagagaactttcttattttgctactgagtcacacaagggaagtggaaggaagaacagttaatttaagaatgaaactataaatcctgatgcctgggggtcaagtattttaagataagagggggaaaaacacataaagtcaaacaaatgttttaaaaattcataacagcaaccttgaaaaaatagacttaaatgaatgcttctagaaacttccagcggctcacaaagaataagcctgccttagggctggcaacatctaagcctctaacagcacagggaagcaaatatcttaccaggcagcctatgaattaacccaaagaagctttggttggttttggtggatttttatcatgccatgttggacatgagattttttagatcttccttcccacattgctagacgtctcactcaaagacatttgttgggagtcacatttgcatcatagacgagacagtccattcatcttagttaaattggattgagaatgccttttgtttccaggaaaatattgatcaccatgaaagaagaatagttttttgtccccagagacattcatttagttgatataatcctaccagaaggaaagcactaagaaacactcgtttgttgtttttaaaggcaacagacttaaagttgtcctcagccaaggaaaaatgatactgcaactttaaaatttaaagtatcttgcactgataaatatatttaaaaattatatgtttataaagttattaatttgtaaaggcagtgttacaaaatgttcagtttatattgttttagattgttttgtaatttttaaaggtgtaaaataacatattttttctttatggaaatctataaaactttctgtagtaaaatgttttcattttactggtatattattgcttcatgttttgtaccatcataagattttgtgcagattttttttacagaaattattattttctatgacaatatgacacttgtaaattgttgtttcaaaatgaacagcgaagccttaactttaaatgacatttgtattctcagacactgagtagcataaaaaccacatagaactgaactgtaacttaaattccaaactatgactactacattccaaagaaacagttgaattaaacattttcataaaatatcccac

SEQ ID NO: 2791 - DNA, 2721 bp, Homo sapiens
  source 1..2721: mol_type = genomic DNA
atggagagggggctgccgctcctctgcgccgtgctcgccctcgtcctcgccccggccggcgcttttcgcaacgataaatgtggcgatactataaaaattgaaagccccgggtaccttacatctcctggttatcctcattcttatcacccaagtgaaaaatgcgaatggctgattcaggctccggacccataccagagaattatgatcaacttcaaccctcacttcgatttggaggacagagactgcaagtatgactacgtggaagtcttcgatggagaaaatgaaaatggacattttaggggaaagttctgtggaaagatagcccctcctcctgttgtgtcttcagggccatttctttttatcaaatttgtctctgactacgaaacacatggtgcaggattttccatacgttatgaaattttcaagagaggtcctgaatgttcccagaactacacaacacctagtggagtgataaagtcccccggattccctgaaaaatatcccaacagccttgaatgcacttatattgtctttgtgccaaagatgtcagagattatcctggaatttgaaagctttgacctggagcctgactcaaatcctccaggggggatgttctgtcgctacgaccggctagaaatctgggatggattccctgatgttggccctcacattgggcgttactgtggacagaaaacaccaggtcgaatccgatcctcatcgggcattctctccatggttttttacaccgacagcgcgatagcaaaagaaggtttctcagcaaactacagtgtcttgcagagcagtgtctcagaagatttcaaatgtatggaagctctgggcatggaatcaggagaaattcattctgaccagatcacagcttcttcccagtatagcaccaactggtctgcagagcgctcccgcctgaactaccctgagaatgggtggactcccggagaggattcctaccgagagtggatacaggtagacttgggccttctgcgctttgtcacggctgtcgggacacagggcgccatttcaaaagaaaccaagaagaaatattatgtcaagacttacaagatcgacgttagctccaacggggaagactggatcaccataaaagaaggaaacaaacctgttctctttcagggaaacaccaaccccacagatgttgtggttgcagtattccccaaaccactgataactcgatttgtccgaatcaagcctgcaacttgggaaactggcatatctatgagatttgaagtatacggttgcaagataacagattatccttgctctggaatgttgggtatggtgtctggacttatttctgactcccagatcacatcatccaaccaaggggacagaaactggatgcctgaaaacatccgcctggtaaccagtcgctctggctgggcacttccacccgcacctcattcctacatcaatgagtggctccaaatagacctgggggaggagaagatcgtgaggggcatcatcattcagggtgggaagcaccgagagaacaaggtgttcatgaggaagttcaagatcgggtacagcaacaacggctcggactggaagatgatcatggatgacagcaaacgcaaggcgaagtcttttgagggcaacaacaactatgatacacctgagctgcggacttttccagctctctccacgcgattcatcaggatctaccccgagagagccactcatggcggactggggctcagaatggagctgctgggctgtgaagtggaagcccctacagctggaccgaccactcccaacgggaacttggtggatgaatgtgatgacgaccaggccaactgccacagtggaacaggtgatgacttccagctcacaggtggcaccactgtgctggccacagaaaagcccacggtcatagacagcaccatacaatcagagtttccaacatatggttttaactgtgaatttggctggggctctcacaagaccttctgccactgggaacatgacaatcacgtgcagctcaagtggagtgtgttgaccagcaagacgggacccattcaggatcacacaggagatggcaacttcatctattcccaagctgacgaaaatcagaagggcaaagtggctcgcctggtgagccctgtggtttattcccagaactctgcccactgcatgaccttctggtatcacatgtctgggtcccacgtcggcacactcagggtcaaactgcgctaccagaagccagaggagtacgatcagctggtctggatggccattggacaccaaggtgaccactggaaggaagggcgtgtcttgctccacaagtctctgaaactttatcaggtgattttcgagggcgaaatcggaaaaggaaaccttggtgggattgctgtggatgacattagtattaataaccacatttcacaagaagattgtgcaaggagcacgccaggatacgaaggtgaaggagaaggtgacaagaacatctccaggaagccaggcaatgtgttgaagaccttagaccccatcctcatcaccatcatagccatgagtgccctgggggtcctcctgggggctgtctgtggggtcgtgctgtactgtgcctgttggcataatgggatgtcagaaagaaacttgtctgccctggagaactataactttgaacttgtggatggtgtgaagttgaaaaaagacaaactgaatacacagagtacttattcggaggcatga

SEQ ID NO: 2792 - DNA, 497 bp, Homo sapiens
  source 1..497: mol_type = genomic DNA
aaccacatttcacaagaagattgtgcaaggagcacgccaggatacgaaggtgaaggagaaggtgacaagaacatctccaggaagccaggcaatgtgttgaagaccttagaccccatcctcatcaccatcatagccatgagtgccctgggggtcctcctgggggctgtctgtggggtcgtgctgtactgtgcctgttggcataatgggatgtcagaaagaaacttgtctgccctggagaactataactttgaacttgtggatggtgtgaagttgaaaaaagacaaactgaatacacagagtacttattcggaggcatgaaggcagacagagatgaaaagacagtcaaaggacggaagtggaaggacgggagtgagctggggagctgttgatctttcactatacaggctgggaagtgtgttgatgaccactgagccaggcttttctcaggagcttcaatgagtatggccgacagacatggacaaggagctgtgttcacc

SEQ ID NO: 2793 - DNA, 574 bp, Homo sapiens
  source 1..574: mol_type = genomic DNA
cccctacagctggaccgaccactcccaacgggaacttggtggatgaatgtgatgacgaccaggccaactgccacagtggaacaggtgatgacttccagctcacaggtggcaccactgtgctggccacagaaaagcccacggtcatagacagcaccatacaatcagccaggctggaagtttccacattgaacctctcactccataaccctccccaacaaaaggcattgatctaaaaacatatcctttaaataaccaaattgccacaagttacatgatcaagacaagaagataaaagagcagtaaaatacaaaaacttagagcggttcacctggttaaatgtacaggatggggaaggacattggaaggtaaaggcagactgtcattctctgaagcgagaagtgcctgaaacattttttcaggcaaagcggttccatgtcctggtcatttcaaaaatatccaagttcctacattttatggtatcatcagaatatgaagagccaaaagaatggatgatgtcattttctgttctataaacaataaatgtaatgtattaacaaagtaaatacaggcagaa

SEQ ID NO: 2794 - DNA, 372 bp, Homo sapiens
  source 1..372: mol_type = genomic DNA
ccactcatggcggactggggctcagaatggagctgctgggctgtgaagtggaagcccctacagctggaccgaccactcccaacgggaacttggtggatgaatgtgatgacgaccaggccaactgccacagtggaacaggtgatgacttccagctcacaggtggcaccactgtgctggccacagaaaagcccacggtcatagacagcaccatacaatcaggctccagattcttcaagcatcatcacaagcagcagtcaatgagacctcaaaaccttcatcataattccattttgctattatagactcaactcagagtcttactatttcatcttgctgattctcatcaatataataaactccatgggcatataa

SEQ ID NO: 2795 - DNA, 709 bp, Homo sapiens
  source 1..709: mol_type = genomic DNA
gtagacttgggccttctgcgctttgtcacggctgtcgggacacagggcgccatttcaaaagaaaccaagaagaaatattatgtcaagacttacaagatcgacgttagctccaacggggaagactggatcaccataaaagaaggaaacaaacctgttctctttcagggaaacaccaaccccacagatgttgtggttgcagtattccccaaaccactgataactcgatttgtccgaatcaagcctgcaacttgggaaactggcatatctatgagatttgaagtatacggttgcaagataacagattatccttgctctggaatgttgggtatggtgtctggacttatttctgactcccagatcacatcatccaaccaaggggacagaaactggatgcctgaaaacatccgcctggtaaccagtcgctctggctgggcacttccacccgcacctcattcctacatcaatgagtggctccaaatagacctgggggaggagaagatcgtgaggggcatcatcattcagggtgggaagcaccgagagaacaaggtgttcatgaggaagttcaagatcgggtacagcaacaacggctcggactggaagatgatcatggatgacagcaaacgcaaggcgaaggtgagggctggggactgggaggaggtcatcccttatgtccttgacttcaatcaagggcctctggcattctcccgag

SEQ ID NO: 2796 - DNA, 518 bp, Homo sapiens
  source 1..518: mol_type = genomic DNA
tccaggggggatgttctgtcgctacgaccggctagaaatctgggatggattccctgatgttggccctcacattgggcgttactgtggacagaaaacaccaggtcgaatccgatcctcatcgggcattctctccatggttttttacaccgacagcgcgatagcaaaagaaggtttctcagcaaactacagtgtcttgcagagcagtgtctcagaagatttcaaatgtatggaagctctgggcatggaatcaggagaaattcattctgaccagatcacagcttcttcccagtatagcaccaactggtctgcagagcgctcccgcctgaactaccctgagaatgggtggactcccggagaggattcctaccgagagtggatacaggatgcaaaatacagactccgtgtatcagtggtgcgatcaaaatcttcctcttcaagcacatcattagaacccaggccattaagctcattgaaactgagtttcttttcctataaaataaaaataacgtagccttcac

SEQ ID NO: 2797 - DNA, 3351 bp, Homo sapiens
  source 1..3351: mol_type = genomic DNA
atggatatgtttcctctcacctgggttttcttagccctctacttttcaagacaccaagtgagaggccaaccagacccaccgtgcggaggtcgtttgaattccaaagatgctggctatatcacctctcccggttacccccaggactacccctcccaccagaactgcgagtggattgtttacgcccccgaacccaaccagaagattgtcctcaacttcaaccctcactttgaaatcgagaagcacgactgcaagtatgactttatcgagattcgggatggggacagtgaatccgcagacctcctgggcaaacactgtgggaacatcgccccgcccaccatcatctcctcgggctccatgctctacatcaggttcacctccgactacgcccggcagggggcaggcttctctctgcgctacgagatcttcaagacaggctctgaagattgctcaaaaaacttcacaagccccaacgggaccatcgaatctcctgggtttcctgagaagtatccacacaacttggactgcacctttaccatcctggccaaacccaagatggagatcatcctgcagttcctgatctttgacctggagcatgaccctttgcaggtgggagagggggactgcaagtacgattggctggacatctgggatggcattccacatgttggccccctgattggcaagtactgtgggaccaaaacaccctctgaacttcgttcatcgacggggatcctctccctgacctttcacacggacatggcggtggccaaggatggcttctctgcgcgttactacctggtccaccaagagccactagagaactttcagtgcaatgttcctctgggcatggagtctggccggattgctaatgaacagatcagtgcctcatctacctactctgatgggaggtggacccctcaacaaagccggctccatggtgatgacaatggctggacccccaacttggattccaacaaggagtatctccaggtggacctgcgctttttaaccatgctcacggccatcgcaacacagggagcgatttccagggaaacacagaatggctactatgtcaaatcctacaagctggaagtcagcactaatggagaggactggatggtgtaccggcatggcaaaaaccacaaggtatttcaagccaacaacgatgcaactgaggtggttctgaacaagctccacgctccactgctgacaaggtttgttagaatccgccctcagacctggcactcaggtatcgccctccggctggagctcttcggctgccgggtcacagatgctccctgctccaacatgctggggatgctctcaggcctcattgcagactcccagatctccgcctcttccacccaggaatacctctggagccccagtgcagcccgcctggttagcagccgctcgggctggttccctcgaatccctcaggcccagcccggtgaggagtggcttcaggtagatctgggaacacccaagacagtgaaaggtgtcatcatccagggagcccgcggaggagacagtatcactgctgtggaagccagagcatttgtgcgcaagttcaaagtctcctacagcctaaacggcaaggactgggaatacattcaggaccccaggacccagcagccaaagctgttcgaagggaacatgcactatgacacccctgacatccgaaggtttgaccccattccggcacagtatgtgcgggtatacccggagaggtggtcgccggcggggattgggatgcggctggaggtgctgggctgtgactggacagactccaagcccacggtagagacgctgggacccactgtgaagagcgaagagacaaccaccccctaccccaccgaagaggaggccacagagtgtggggagaactgcagctttgaggatgacaaagatttgcagctcccttcgggattcaattgcaacttcgatttcctcgaggagccctgtggttggatgtatgaccatgccaagtggctccggaccacctgggccagcagctccagcccaaacgaccggacgtttccagatgacaggaatttcttgcggctgcagagtgacagccagagagagggccagtatgcccggctcatcagcccccctgtccacctgccccgaagcccggtgtgcatggagttccagtaccaggccacgggcggccgcggggtggcgctgcaggtggtgcgggaagccagccaggagagcaagttgctgtgggtcatccgtgaggaccagggcggcgagtggaagcacgggcggatcatcctgcccagctacgacatggagtaccagattgtgttcgagggagtgatagggaaaggacgttccggagagattgccattgatgacattcggataagcactgatgtcccactggagaactgcatggaacccatctcggcttttgcaggtgagaattttaaagggggcaccctcctgccagggaccgagcccacagtggacacggtgcccatgcagcccatcccagcctactggtattacgtaatggccgccgggggcgccgtgctggtgctggtctccgtcgcgctggccctggtgctccactaccaccggttccgctatgcggccaagaagaccgatcactccatcacctacaaaacctcccactacaccaacggggcccctctggcggtggagcccaccctaaccattaagctagagcaagaccgtggctcgcactgctgagggccgaagcaagaacagcacccaaaacaaacgagaaagactgcaaacatgttgcctcgattttgcacttttttctcctcgcctagtttctgtgtgaactctcagacatctctttcccggatccccaaccctgagcactcttatcaatcccaaccatcctccttgggttcattttggtttctggtttttctttttcctttttgttgattccaaaccaacaaacccaactctaatgctgcatcttggactatccgaagagatccacccccaagcactccacaactcaaggctcagctggttttgttccagagactggttcgcttgttttttccccttgccttatcccatacctcctctcagtgggcagtctgccaggagacgtgaggggaagcctggatctgtgtgtatgtacatagtagacatgtgtgtgtgtgaatagctctctgtgtgtgggtgtgtgagagagcggctggttcattgtgtgtgtgtttgggcgaggggtgagtgttcagagagggcccctttaactcttatgttacttctcctggggtacattttacaagaaaataatatactgtacaagttttgtttacttggagaagagattgaagctttttgttgccttatcta

SEQ ID NO: 2798 - DNA, 1551 bp, Homo sapiens
  source 1..1551: mol_type = genomic DNA
gcagagcatgtttgggacataacaaaggatctgagtagtaaacaccgtacgccacccaactcctcttgtaacgccatcgcgcgtggcattgtgttgggttctgcgtgtgtggcatcggagtcgtggaatttagggggaacaaggcttttccccccgtccccccggggtctcccttgggtgggggcgacacggccaaggcggcgcgccctgggggtgcccgggggcgcttcttccccagggcgttacgcaccggcggcccggcgcggaggagctactctcctcctggtgaggtggaaattccagcaagaatagaggtgaagacaagccaccaggactcaggagggaaacgctgaccattagaaacctctgcataagacgttgtaaggaggaaaataaaagagagaaaaacacaaagatttaaacaagaaacctacgaacccagctctggaaagagccaccttctccaaaatggatatgtttcctctcacctgggttttcttagccctctacttttcaagacaccaagtgagaggccaaccagacccaccgtgcggaggtcgtttgaattccaaagatgctggctatatcacctctcccggttacccccaggactacccctcccaccagaactgcgagtggattgtttacgcccccgaacccaaccagaagattgtcctcaacttcaaccctcactttgaaatcgagaagcacgactgcaacttgctgtctgcttggaaaatttcactcacaagccgcagctttgcctgactcagtgcaatccaaggccaccatctctggtgaacttcccttgactcctccctccagccacttgcagaaatgcaaatcctgggcacccacaggctgtttgggggcctgtatagaagctgtgggcagaaaccagaggccactgtggtactgctggactcctgcagccaaaggacaaaagggcgagactacgggccgtctgggcaaacagagagaagccactttattccctgtggagtggaggatgctaggatgttgctgctccggcagacagaggcctttcgcttgagtcatcagccaacagactgaatgttatggttttagaaacccatacacaaagttgagtggttttttccatttctaaaatttaaaatgtatgtatttttaaaacacccacctgcatgtaatacacagcttgttcaggagttctcaaacagccccagcacccaccccatcccagaggctcaaccaaataaaaccaaaaccaggaggctgggtccttttaagcactggtaatttctacctgtaattccagccctttgggaggccgaggcaggcaggtcacctgaggtcaggagttcgagaccagcctggtcaacatggtgaaaccccgtctctactaaaaatacaaaaaaaattagccaagcttggtggtgcgtgcctgtaatctcagctactctggaggctgaggcaggagaatcacttgaacctgggaggcagaggctgcagtgagctgagattgtgccactgcactccggcctgggtgaaagagtgagactctgtctc

SEQ ID NO: 2799 - DNA, 2577 bp, Homo sapiens
  source 1..2577: mol_type = genomic DNA
cagagatcgcgagcgaggcaccagcctgcagccggcccccagcacatcctcagccgcacagacactcggcgaggtggaggtgagggcgggcgccagcgaactcggagaggggctcgctcactcccaggcgatcccagccgccaccgccgccgcaccagcagcagcaacagcagcagcagcttccttcctcagactcccctcgagaggctggccaagcgggtgtagccgttgggggaggctcccgccgggggaacccggcgaggacaagagcagggcggccgccttccactcgggctgtccggcggcggctgcctccgcccgtgtgtccgtcaagggtgccgcgggatgtgtgtcagtttacgcctctgagatcacacagctgcctgggggccgtgtgatgcccaaggcaagtcttggttttaattattattattatcattattgttacgcttggctttcgggaaatactcgtgatatttgtaggataaaggaaatgacactttgaggaactggagagaacatatatgcgttttgtttttaagaggaaaaccgtgttctcttcccggcttgttccctctttgctgatttcaggagctactctcctcctggtgaggtggaaattccagcaagaatagaggtgaagacaagccaccaggactcaggagggaaacgctgaccattagaaacctctgcataagacgttgtaaggaggaaaataaaagagagaaaaacacaaagatttaaacaagaaacctacgaacccagctctggaaagagccaccttctccaaaatggatatgtttcctctcacctgggttttcttagccctctacttttcaagacaccaagtgagaggccaaccagacccaccgtgcggaggtcgtttgaattccaaagatgctggctatatcacctctcccggttacccccaggactacccctcccaccagaactgcgagtggattgtttacgcccccgaacccaaccagaagattgtcctcaacttcaaccctcactttgaaatcgagaagcacgactgcaagtatgactttatcgagattcgggatggggacagtgaatccgcagacctcctgggcaaacactgtgggaacatcgccccgcccaccatcatctcctcgggctccatgctctacatcaggttcacctccgactacgcccggcagggggcaggcttctctctgcgctacgagatcttcaagacaggctctgaagattgctcaaaaaacttcacaagccccaacgggaccatcgaatctcctgggtttcctgagaagtatccacacaacttggactgcacctttaccatcctggccaaacccaagatggagatcatcctgcagttcctgatctttgacctggagcatgaccctttgcaggtgggagagggggactgcaagtacgattggctggacatctgggatggcattccacatgttggccccctgattggcaagtactgtgggaccaaaacaccctctgaacttcgttcatcgacggggatcctctccctgacctttcacacggacatggcggtggccaaggatggcttctctgcgcgttactacctggtccaccaagagccactagagaactttcagtgcaatgttcctctgggcatggagtctggccggattgctaatgaacagatcagtgcctcatctacctactctgatgggaggtggacccctcaacaaagccggctccatggtgatgacaatggctggacccccaacttggattccaacaaggagtatctccaggtggacctgcgctttttaaccatgctcacggccatcgcaacacagggagcgatttccagggaaacacagaatggctactatgtcaaatcctacaagctggaagtcagcactaatggagaggactggatggtgtaccggcatggcaaaaaccacaaggtatttcaagccaacaacgatgcaactgaggtggttctgaacaagctccacgctccactgctgacaaggtttgttagaatccgccctcagacctggcactcaggtatcgccctccggctggagctcttcggctgccgggtcacagatgctccctgctccaacatgctggggatgctctcaggcctcattgcagactcccagatctccgcctcttccacccaggaatacctctggagccccagtgcagcccgcctggttagcagccgctcgggctggttccctcgaatccctcaggcccagcccggtgaggagtggcttcaggtagatctgggaacacccaagacagtgaaaggtgtcatcatccagggagcccgcggaggagacagtatcactgctgtggaagccagagcatttgtgcgcaagttcaaagtctcctacagcctaaacggcaaggactgggaatacattcaggaccccaggacccagcagccaaaggtaggctgttcttggaggcctctgtaacgttaccctcaacagggaggctaagtgtggtacagggagttgagactgatgatgtcccatctaaacagtcgtcatccaactcctgaaatccaataaaacaaatatcgtttgagagatt

SEQ ID NO: 2800 - DNA, 3367 bp, Homo sapiens
  source 1..3367: mol_type = genomic DNA
cccagctctggaaagagccaccttctccaaaatggatatgtttcctctcacctgggttttcttagccctctacttttcaagacaccaagtgagaggccaaccagacccaccgtgcggaggtcgtttgaattccaaagatgctggctatatcacctctcccggttacccccaggactacccctcccaccagaactgcgagtggattgtttacgcccccgaacccaaccagaagattgtcctcaacttcaaccctcactttgaaatcgagaagcacgactgcaagtatgactttatcgagattcgggatggggacagtgaatccgcagacctcctgggcaaacactgtgggaacatcgccccgcccaccatcatctcctcgggctccatgctctacatcaggttcacctccgactacgcccggcagggggcaggcttctctctgcgctacgagatcttcaagacaggctctgaagattgctcaaaaaacttcacaagccccaacgggaccatcgaatctcctgggtttcctgagaagtatccacacaacttggactgcacctttaccatcctggccaaacccaagatggagatcatcctgcagttcctgatctttgacctggagcatgaccctttgcaggtgggagagggggactgcaagtacgattggctggacatctgggatggcattccacatgttggccccctgattggcaagtactgtgggaccaaaacaccctctgaacttcgttcatcgacggggatcctctccctgacctttcacacggacatggcggtggccaaggatggcttctctgcgcgttactacctggtccaccaagagccactagagaactttcagtgcaatgttcctctgggcatggagtctggccggattgctaatgaacagatcagtgcctcatctacctactctgatgggaggtggacccctcaacaaagccggctccatggtgatgacaatggctggacccccaacttggattccaacaaggagtatctccaggtggacctgcgctttttaaccatgctcacggccatcgcaacacagggagcgatttccagggaaacacagaatggctactatgtcaaatcctacaagctggaagtcagcactaatggagaggactggatggtgtaccggcatggcaaaaaccacaaggtatttcaagccaacaacgatgcaactgaggtggttctgaacaagctccacgctccactgctgacaaggtttgttagaatccgccctcagacctggcactcaggtatcgccctccggctggagctcttcggctgccgggtcacagatgctccctgctccaacatgctggggatgctctcaggcctcattgcagactcccagatctccgcctcttccacccaggaatacctctggagccccagtgcagcccgcctggttagcagccgctcgggctggttccctcgaatccctcaggcccagcccggtgaggagtggcttcaggtagatctgggaacacccaagacagtgaaaggtgtcatcatccagggagcccgcggaggagacagtatcactgctgtggaagccagagcatttgtgcgcaagttcaaagtctcctacagcctaaacggcaaggactgggaatacattcaggaccccaggacccagcagccaaagctgttcgaagggaacatgcactatgacacccctgacatccgaaggtttgaccccattccggcacagtatgtgcgggtatacccggagaggtggtcgccggcggggattgggatgcggctggaggtgctgggctgtgactggacagactccaagcccacggtagagacgctgggacccactgtgaagagcgaagagacaaccaccccctaccccaccgaagaggaggccacagagtgtggggagaactgcagctttgaggatgacaaagatttgcagctcccttcgggattcaattgcaacttcgatttcctcgaggagccctgtggttggatgtatgaccatgccaagtggctccggaccacctgggccagcagctccagcccaaacgaccggacgtttccagatgacaggaatttcttgcggctgcagagtgacagccagagagagggccagtatgcccggctcatcagcccccctgtccacctgccccgaagcccggtgtgcatggagttccagtaccaggccacgggcggccgcggggtggcgctgcaggtggtgcgggaagccagccaggagagcaagttgctgtgggtcatccgtgaggaccagggcggcgagtggaagcacgggcggatcatcctgcccagctacgacatggagtaccagattgtgttcgagggagtgatagggaaaggacgttccggagagattgccattgatgacattcggataagcactgatgtcccactggagaactgcatggaacccatctcggcttttgcagggggcaccctcctgccagggaccgagcccacagtggacacggtgcccatgcagcccatcccagcctactggtattacgtaatggccgccgggggcgccgtgctggtgctggtctccgtcgcgctggccctggtgctccactaccaccggttccgctatgcggccaagaagaccgatcactccatcacctacaaaacctcccactacaccaacggggcccctctggcggtggagcccaccctaaccattaagctagagcaagaccgtggctcgcactgctgagggccgaagcaagaacagcacccaaaacaaacgagaaagactgcaaacatgttgcctcgattttgcacttttttctcctcgcctagtttctgtgtgaactctcagacatctctttcccggatccccaaccctgagcactcttatcaatcccaaccatcctccttgggttcattttggtttctggtttttctttttcctttttgttgattccaaaccaacaaacccaactctaatgctgcatcttggactatccgaagagatccacccccaagcactccacaactcaaggctcagctggttttgttccagagactggttcgcttgttttttccccttgccttatcccatacctcctctcagtgggcagtctgccaggagacgtgaggggaagcctggatctgtgtgtatgtacatagtagacatgtgtgtgtgtgaatagctctctgtgtgtgggtgtgtgagagagcggctggttcattgtgtgtgtgtttgggcgaggggtgagtgttcagagagggcccctttaactcttatgttacttctcctggggtacattttacaagaaaataatatactgtacaagttttgtttacttggagaagagattgaagctttttgttgccttatcta

SEQ ID NO: 2801 - DNA, 2926 bp, Homo sapiens
  source 1..2926: mol_type = genomic DNA
cccagctctggaaagagccaccttctccaaaatggatatgtttcctctcacctgggttttcttagccctctacttttcaagacaccaagtgagaggccaaccagacccaccgtgcggaggtcgtttgaattccaaagatgctggctatatcacctctcccggttacccccaggactacccctcccaccagaactgcgagtggattgtttacgcccccgaacccaaccagaagattgtcctcaacttcaaccctcactttgaaatcgagaagcacgactgcaagtatgactttatcgagattcgggatggggacagtgaatccgcagacctcctgggcaaacactgtgggaacatcgccccgcccaccatcatctcctcgggctccatgctctacatcaggttcacctccgactacgcccggcagggggcaggcttctctctgcgctacgagatcttcaagacaggctctgaagattgctcaaaaaacttcacaagccccaacgggaccatcgaatctcctgggtttcctgagaagtatccacacaacttggactgcacctttaccatcctggccaaacccaagatggagatcatcctgcagttcctgatctttgacctggagcatgaccctttgcaggtgggagagggggactgcaagtacgattggctggacatctgggatggcattccacatgttggccccctgattggcaagtactgtgggaccaaaacaccctctgaacttcgttcatcgacggggatcctctccctgacctttcacacggacatggcggtggccaaggatggcttctctgcgcgttactacctggtccaccaagagccactagagaactttcagtgcaatgttcctctgggcatggagtctggccggattgctaatgaacagatcagtgcctcatctacctactctgatgggaggtggacccctcaacaaagccggctccatggtgatgacaatggctggacccccaacttggattccaacaaggagtatctccaggtggacctgcgctttttaaccatgctcacggccatcgcaacacagggagcgatttccagggaaacacagaatggctactatgtcaaatcctacaagctggaagtcagcactaatggagaggactggatggtgtaccggcatggcaaaaaccacaaggtatttcaagccaacaacgatgcaactgaggtggttctgaacaagctccacgctccactgctgacaaggtttgttagaatccgccctcagacctggcactcaggtatcgccctccggctggagctcttcggctgccgggtcacagatgctccctgctccaacatgctggggatgctctcaggcctcattgcagactcccagatctccgcctcttccacccaggaatacctctggagccccagtgcagcccgcctggttagcagccgctcgggctggttccctcgaatccctcaggcccagcccggtgaggagtggcttcaggtagatctgggaacacccaagacagtgaaaggtgtcatcatccagggagcccgcggaggagacagtatcactgctgtggaagccagagcatttgtgcgcaagttcaaagtctcctacagcctaaacggcaaggactgggaatacattcaggaccccaggacccagcagccaaagctgttcgaagggaacatgcactatgacacccctgacatccgaaggtttgaccccattccggcacagtatgtgcgggtatacccggagaggtggtcgccggcggggattgggatgcggctggaggtgctgggctgtgactggacagactccaagcccacggtagagacgctgggacccactgtgaagagcgaagagacaaccaccccctaccccaccgaagaggaggccacagagtgtggggagaactgcagctttgaggatgacaaagatttgcagctcccttcgggattcaattgcaacttcgatttcctcgaggagccctgtggttggatgtatgaccatgccaagtggctccggaccacctgggccagcagctccagcccaaacgaccggacgtttccagatgacaggaatttcttgcggctgcagagtgacagccagagagagggccagtatgcccggctcatcagcccccctgtccacctgccccgaagcccggtgtgcatggagttccagtaccaggccacgggcggccgcggggtggcgctgcaggtggtgcgggaagccagccaggagagcaagttgctgtgggtcatccgtgaggaccagggcggcgagtggaagcacgggcggatcatcctgcccagctacgacatggagtaccagattgtgttcgagggagtgatagggaaaggacgttccggagagattgccattgatgacattcggataagcactgatgtcccactggagaactgcatggaacccatctcggcttttgcagtggacatcccagaaatacatgagagagaaggatatgaagatgaaattgatgatgaatacgaggtggactggagcaattcttcttctgcaacctcagggtctggcgccccctcgaccgacaaagaaaagagctggctgtacaccctggatcccatcctcatcaccatcatcgccatgagctcactgggcgtcctcctgggggccacctgtgcaggcctcctgctctactgcacctgttcctactcgggcctgagctcccgaagctgcaccacactggagaactacaacttcgagctctacgatggccttaagcacaaggtcaagatgaaccaccaaaagtgctgctccgaggcatgacggattgcacctgaatcctatctgacgtttcattccagcaagaggggctggggaagattacatttttttttcctttggaaactgaatgccataatctcgatcaaaccgatccag

SEQ ID NO: 2802 - DNA, 6662 bp, Homo sapiens
  source 1..6662: mol_type = genomic DNA
cagagatcgcgagcgaggcaccagcctgcagccggcccccagcacatcctcagccgcacagacactcggcgaggtggaggtgagggcgggcgccagcgaactcggagaggggctcgctcactcccaggcgatcccagccgccaccgccgccgcaccagcagcagcaacagcagcagcagcttccttcctcagactcccctcgagaggctggccaagcgggtgtagccgttgggggaggctcccgccgggggaacccggcgaggacaagagcagggcggccgccttccactcgggctgtccggcggcggctgcctccgcccgtgtgtccgtcaagggtgccgcgggatgtgtgtcagtttacgcctctgagatcacacagctgcctgggggccgtgtgatgcccaaggcaagtcttggttttaattattattattatcattattgttacgcttggctttcgggaaatactcgtgatatttgtaggataaaggaaatgacactttgaggaactggagagaacatatatgcgttttgtttttaagaggaaaaccgtgttctcttcccggcttgttccctctttgctgatttcaggagctactctcctcctggtgaggtggaaattccagcaagaatagaggtgaagacaagccaccaggactcaggagggaaacgctgaccattagaaacctctgcataagacgttgtaaggaggaaaataaaagagagaaaaacacaaagatttaaacaagaaacctacgaacccagctctggaaagagccaccttctccaaaatggatatgtttcctctcacctgggttttcttagccctctacttttcaagacaccaagtgagaggccaaccagacccaccgtgcggaggtcgtttgaattccaaagatgctggctatatcacctctcccggttacccccaggactacccctcccaccagaactgcgagtggattgtttacgcccccgaacccaaccagaagattgtcctcaacttcaaccctcactttgaaatcgagaagcacgactgcaagtatgactttatcgagattcgggatggggacagtgaatccgcagacctcctgggcaaacactgtgggaacatcgccccgcccaccatcatctcctcgggctccatgctctacatcaggttcacctccgactacgcccggcagggggcaggcttctctctgcgctacgagatcttcaagacaggctctgaagattgctcaaaaaacttcacaagccccaacgggaccatcgaatctcctgggtttcctgagaagtatccacacaacttggactgcacctttaccatcctggccaaacccaagatggagatcatcctgcagttcctgatctttgacctggagcatgaccctttgcaggtgggagagggggactgcaagtacgattggctggacatctgggatggcattccacatgttggccccctgattggcaagtactgtgggaccaaaacaccctctgaacttcgttcatcgacggggatcctctccctgacctttcacacggacatggcggtggccaaggatggcttctctgcgcgttactacctggtccaccaagagccactagagaactttcagtgcaatgttcctctgggcatggagtctggccggattgctaatgaacagatcagtgcctcatctacctactctgatgggaggtggacccctcaacaaagccggctccatggtgatgacaatggctggacccccaacttggattccaacaaggagtatctccaggtggacctgcgctttttaaccatgctcacggccatcgcaacacagggagcgatttccagggaaacacagaatggctactatgtcaaatcctacaagctggaagtcagcactaatggagaggactggatggtgtaccggcatggcaaaaaccacaaggtatttcaagccaacaacgatgcaactgaggtggttctgaacaagctccacgctccactgctgacaaggtttgttagaatccgccctcagacctggcactcaggtatcgccctccggctggagctcttcggctgccgggtcacagatgctccctgctccaacatgctggggatgctctcaggcctcattgcagactcccagatctccgcctcttccacccaggaatacctctggagccccagtgcagcccgcctggttagcagccgctcgggctggttccctcgaatccctcaggcccagcccggtgaggagtggcttcaggtagatctgggaacacccaagacagtgaaaggtgtcatcatccagggagcccgcggaggagacagtatcactgctgtggaagccagagcatttgtgcgcaagttcaaagtctcctacagcctaaacggcaaggactgggaatacattcaggaccccaggacccagcagccaaagctgttcgaagggaacatgcactatgacacccctgacatccgaaggtttgaccccattccggcacagtatgtgcgggtatacccggagaggtggtcgccggcggggattgggatgcggctggaggtgctgggctgtgactggacagactccaagcccacggtagagacgctgggacccactgtgaagagcgaagagacaaccaccccctaccccaccgaagaggaggccacagagtgtggggagaactgcagctttgaggatgacaaagatttgcagctcccttcgggattcaattgcaacttcgatttcctcgaggagccctgtggttggatgtatgaccatgccaagtggctccggaccacctgggccagcagctccagcccaaacgaccggacgtttccagatgacaggaatttcttgcggctgcagagtgacagccagagagagggccagtatgcccggctcatcagcccccctgtccacctgccccgaagcccggtgtgcatggagttccagtaccaggccacgggcggccgcggggtggcgctgcaggtggtgcgggaagccagccaggagagcaagttgctgtgggtcatccgtgaggaccagggcggcgagtggaagcacgggcggatcatcctgcccagctacgacatggagtaccagattgtgttcgagggagtgatagggaaaggacgttccggagagattgccattgatgacattcggataagcactgatgtcccactggagaactgcatggaacccatctcggcttttgcaggtgagaattttaaagtggacatcccagaaatacatgagagagaaggatatgaagatgaaattgatgatgaatacgaggtggactggagcaattcttcttctgcaacctcagggtctggcgccccctcgaccgacaaagaaaagagctggctgtacaccctggatcccatcctcatcaccatcatcgccatgagctcactgggcgtcctcctgggggccacctgtgcaggcctcctgctctactgcacctgttcctactcgggcctgagctcccgaagctgcaccacactggagaactacaacttcgagctctacgatggccttaagcacaaggtcaagatgaaccaccaaaagtgctgctccgaggcatgacggattgcacctgaatcctatctgacgtttcattccagcaagaggggctggggaagattacatttttttttcctttggaaactgaatgccataatctcgatcaaaccgatccagaataccgaaggtatggacaggacagaaaagcgagtcgcaggaggaagggagatgcagccgcacaggggatgattaccctcctaggaccgcggtggctaagtcattgcaggaacggggctgtgttctctgctgggacaaaacaggagctcatctctttggggtcacagttctattttgtttgtgagtttgtattattattattattattattattattatattttatttctttggtctgtgagcaactcaaagaggcagaagaggagaatgacttttccagaatagaagtggagcagtgatcattattctccgctttctctttctaatcaacacttgaaaagcaaagtgtcttttcagcctttccatctttacaaataaaactcaaaaaagccgtccagcttatcccatcctctgattgtcttctgacttaagggatttactgtggtgtaggttctgccagccaaccctacaagctgccatttccagtcctagcatttaagtaggatgttgttgcctttaacttttcttatccaggggaaaattgccattttagggtcagcatgaacagctctttcttgtatgcgatttaaaacaaactggaaaggaaacttcacacgtcaaaatccatagaagcgcctggacgaggcttaaagtgctttgtgagtgaataggagccattcgctaattctagacccacagtgtctggtggtggggcttcccttgtggggcttctggtggtggttttgccttttcttttccctcctccatgttcttctaaaacatatacatatatacatacacacatacacatattcttcaggtctctaagcccctggaagcagcattgtgtgatattctcagaggcaggggaaaatagagggaaaaatagagactattggtatgttctccccatcagcgagttattgtaactggtcaccactggacgggaaggagaacagaggagagggaaagagaagcccaacctctgtgatcatatgagggccaaggctgagcagtgtagacagagaccctttgaaatgcatttgtctctcaaatagactagtaaacaccgacttctcctttgggttacaaacaccatttcaacctttcgggagagtcagagctaggatgtacaagaactgattctaaccagaagtccgcaagtactgtggacaagaatgcttaaccatgctgcttcagccttgagagacctaggttcttacacatatgcacacacgcatacacacatgcacgcacacacacatacacacatgcacgcacgcacgcatgcacaccaatttatgtttttattaagtgccttgaaaaaatgaagaaaaatgtattttccctttatgtaaaaattagtgaatatcttatgaattaaggcattcctctttccctaaccccgatggctccattcccaagtaccccaactcactgctgatcctattaaaggaatgagtcctgctacccgagtggtagtcatagccctagatgactctcaactactcttcaaagggaggcatcaggaatagaatgaaactgtgtgaaggataagattgttcgcatcaagatccaaatcttgatttcatattaacgcctaaggattgcctgtgtgctggaaatatatttgaaactcaaccagtatgcccagcctattgcatatcattgtcagaccatttttgctgctgtggtcacccacgatttcatttgtcttatacccaggtgaaaggggaagggtgaatgggactggctggttcctttaaatgttaacttatggaaatgctagttcaaatggtaatgtcacagtgttttgtatgcagagagcaagagttcaaccaacagctgtttattcatgtgtgtgtgtctttgctgctttgagttctctgtatctactgtgtatgtgaatggtcatgtgggactcagtggtggtgttgtgactttgacctagggtccgagtgtcacagctgatcttggcactcggcactcattggcacagtggtagttagaggtgaaaagtagagctgtcaagcccaagggcttagctttagggctcctcctgagttcggcccacagtagaagcaagattttaactagccccttttcctcttcaccctcccatgatgcgcagtgttcagaaagctggtaagtcctagggatttccagaagtagcctgcagaagaaggtaagtttgaaagccactccaggggtcctgatgctgtcatgctcagtgagccattttacagttctccaaagtctagccctgtttcggacctgcacttcacctctaagttatgtacaactcaacctgcatccctctaaaagtcctatatccatattcaccattggctaatttgaggccctgagtgggccttgaatgctaaaaagaagcagggtacgcagggctacatgtagataccacaccaaggctggaggctggtctgtcataagacagaaagaaagacgctgggcccaattttgacttggccaggggacaccttggtgtgtttgttatctttatctgtgggtaggctagctgacccatctccttgagtcattccctttgggaaaccccactgccagtattgatctcctttttgccttgtactgaatgacacattacctccacactctcccggactaggtggtcaacagggccacagggttgctttctgtctttggtggggcaggggagttgacagggatgagggtccaaggaataagcatgaatgacaagaaaacaagggaaagagttaacctgtcacatagcaggttaactttttcagggtttgcagttagaggtattcgaccattcactggctgagccagatcacgggaacttgagagcttttactgtgattcttcaatgtaaaaaataaacaacaatgtcaaactgtgtttatatgatttgtataaagcctttttaagattactatttaaataaacattataccagagata

SEQ ID NO: 2803 - DNA, 2730 bp, Homo sapiens
  source 1..2730: mol_type = genomic DNA
atggatatgtttcctctcacctgggttttcttagccctctacttttcaagacaccaagtgagaggccaaccagacccaccgtgcggaggtcgtttgaattccaaagatgctggctatatcacctctcccggttacccccaggactacccctcccaccagaactgcgagtggattgtttacgcccccgaacccaaccagaagattgtcctcaacttcaaccctcactttgaaatcgagaagcacgactgcaagtatgactttatcgagattcgggatggggacagtgaatccgcagacctcctgggcaaacactgtgggaacatcgccccgcccaccatcatctcctcgggctccatgctctacatcaggttcacctccgactacgcccggcagggggcaggcttctctctgcgctacgagatcttcaagacaggctctgaagattgctcaaaaaacttcacaagccccaacgggaccatcgaatctcctgggtttcctgagaagtatccacacaacttggactgcacctttaccatcctggccaaacccaagatggagatcatcctgcagttcctgatctttgacctggagcatgaccctttgcaggtgggagagggggactgcaagtacgattggctggacatctgggatggcattccacatgttggccccctgattggcaagtactgtgggaccaaaacaccctctgaacttcgttcatcgacggggatcctctccctgacctttcacacggacatggcggtggccaaggatggcttctctgcgcgttactacctggtccaccaagagccactagagaactttcagtgcaatgttcctctgggcatggagtctggccggattgctaatgaacagatcagtgcctcatctacctactctgatgggaggtggacccctcaacaaagccggctccatggtgatgacaatggctggacccccaacttggattccaacaaggagtatctccaggtggacctgcgctttttaaccatgctcacggccatcgcaacacagggagcgatttccagggaaacacagaatggctactatgtcaaatcctacaagctggaagtcagcactaatggagaggactggatggtgtaccggcatggcaaaaaccacaaggtatttcaagccaacaacgatgcaactgaggtggttctgaacaagctccacgctccactgctgacaaggtttgttagaatccgccctcagacctggcactcaggtatcgccctccggctggagctcttcggctgccgggtcacagatgctccctgctccaacatgctggggatgctctcaggcctcattgcagactcccagatctccgcctcttccacccaggaatacctctggagccccagtgcagcccgcctggttagcagccgctcgggctggttccctcgaatccctcaggcccagcccggtgaggagtggcttcaggtagatctgggaacacccaagacagtgaaaggtgtcatcatccagggagcccgcggaggagacagtatcactgctgtggaagccagagcatttgtgcgcaagttcaaagtctcctacagcctaaacggcaaggactgggaatacattcaggaccccaggacccagcagccaaagctgttcgaagggaacatgcactatgacacccctgacatccgaaggtttgaccccattccggcacagtatgtgcgggtatacccggagaggtggtcgccggcggggattgggatgcggctggaggtgctgggctgtgactggacagactccaagcccacggtagagacgctgggacccactgtgaagagcgaagagacaaccaccccctaccccaccgaagaggaggccacagagtgtggggagaactgcagctttgaggatgacaaagatttgcagctcccttcgggattcaattgcaacttcgatttcctcgaggagccctgtggttggatgtatgaccatgccaagtggctccggaccacctgggccagcagctccagcccaaacgaccggacgtttccagatgacaggaatttcttgcggctgcagagtgacagccagagagagggccagtatgcccggctcatcagcccccctgtccacctgccccgaagcccggtgtgcatggagttccagtaccaggccacgggcggccgcggggtggcgctgcaggtggtgcgggaagccagccaggagagcaagttgctgtgggtcatccgtgaggaccagggcggcgagtggaagcacgggcggatcatcctgcccagctacgacatggagtaccagattgtgttcgagggagtgatagggaaaggacgttccggagagattgccattgatgacattcggataagcactgatgtcccactggagaactgcatggaacccatctcggcttttgcagatgaatacgaggtggactggagcaattcttcttctgcaacctcagggtctggcgccccctcgaccgacaaagaaaagagctggctgtacaccctggatcccatcctcatcaccatcatcgccatgagctcactgggcgtcctcctgggggccacctgtgcaggcctcctgctctactgcacctgttcctactcgggcctgagctcccgaagctgcaccacactggagaactacaacttcgagctctacgatggccttaagcacaaggtcaagatgaaccaccaaaagtgctgctccgaggcatga

SEQ ID NO: 2804 - DNA, 2386 bp, Homo sapiens
  source 1..2386: mol_type = genomic DNA
cgcgagcgaggcaccagcctgcagccggcccccagcacatcctcagccgcacagacactcggcgaggtggaggtgagggcgggcgccagcgaactcggagaggggctcgctcactcccaggcgatcccagccgccaccgccgccgcaccagcagcagcaacagcagcagcagcttccttcctcagactcccctcgagaggctggccaagcgggtgtagccgttgggggaggctcccgccgggggaacccggcgaggacaagagcagggcggccgccttccactcgggctgtccggcggcggctgcctccgcccgtgtgtccgtcaagggtgccgcgggatgtgtgtcagtttacgcctctgagatcacacagctgcctgggggccgtgtgatgcccaaggagctactctcctcctggtgaggtggaaattccagcaagaatagaggtgaagacaagccaccaggactcaggagggaaacgctgaccattagaaacctctgcataagacgttgtaaggaggaaaataaaagagagaaaaacacaaagatttaaacaagaaacctacgaacccagctctggaaagagccaccttctccaaaatggatatgtttcctctcacctgggttttcttagccctctacttttcaagacaccaagtgagaggccaaccagacccaccgtgcggaggtcgtttgaattccaaagatgctggctatatcacctctcccggttacccccaggactacccctcccaccagaactgcgagtggattgtttacgcccccgaacccaaccagaagattgtcctcaacttcaaccctcactttgaaatcgagaagcacgactgcaagtatgactttatcgagattcgggatggggacagtgaatccgcagacctcctgggcaaacactgtgggaacatcgccccgcccaccatcatctcctcgggctccatgctctacatcaggttcacctccgactacgcccggcagggggcaggcttctctctgcgctacgagatcttcaagacaggctctgaagattgctcaaaaaacttcacaagccccaacgggaccatcgaatctcctgggtttcctgagaagtatccacacaacttggactgcacctttaccatcctggccaaacccaagatggagatcatcctgcagttcctgatctttgacctggagcatgaccctttgcaggtgggagagggggactgcaagtacgattggctggacatctgggatggcattccacatgttggccccctgattggcaagtactgtgggaccaaaacaccctctgaacttcgttcatcgacggggatcctctccctgacctttcacacggacatggcggtggccaaggatggcttctctgcgcgttactacctggtccaccaagagccactagagaactttcagtgcaatgttcctctgggcatggagtctggccggattgctaatgaacagatcagtgcctcatctacctactctgatgggaggtggacccctcaacaaagccggctccatggtgatgacaatggctggacccccaacttggattccaacaaggagtatctccaggtggacctgcgctttttaaccatgctcacggccatcgcaacacagggagcgatttccagggaaacacagaatggctactatgtcaaatcctacaagctggaagtcagcactaatggagaggactggatggtgtaccggcatggcaaaaaccacaaggtatttcaagccaacaacgatgcaactgaggtggttctgaacaagctccacgctccactgctgacaaggtttgttagaatccgccctcagacctggcactcaggtatcgccctccggctggagctcttcggctgccgggtcacagatgctccctgctccaacatgctggggatgctctcaggcctcattgcagactcccagatctccgcctcttccacccaggaatacctctggagccccagtgcagcccgcctggttagcagccgctcgggctggttccctcgaatccctcaggcccagcccggtgaggagtggcttcaggtagatctgggaacacccaagacagtgaaaggtgtcatcatccagggagcccgcggaggagacagtatcactgctgtggaagccagagcatttgtgcgcaagttcaaagtctcctacagcctaaacggcaaggactgggaatacattcaggaccccaggacccagcagccaaaggtaggctgttcttggaggcctctgtaacgttaccctcaacagggaggctaagtgtggtacagggagttgagactgatgatgtcccatctaaacagtcgtcatccaactcctgaaatccaataaaacaaatatcgtttgagagatta

SEQ ID NO: 2805 - DNA, 583 bp, Homo sapiens
  source 1..583: mol_type = genomic DNA
agagatcgcgagcgaggcaccagcctgcagccggcccccagcacatcctcagccgcacagacactcggcgaggtggaggagctactctcctcctggtgaggtggaaattccagcaagaatagaggtgaagacaagccaccaggactcaggagggaaacgctgaccattagaaacctctgcataagacgttgtaaggaggaaaataaaagagagaaaaacacaaagatttaaacaagaaacctacgaacccagctctggaaagagccaccttctccaaaatggatatgtttcctctcacctgggttttcttagccctctacttttcaagacaccaagtgagaggccaaccagacccaccgtgcggaggtcgtttgaattccaaagatgctggctatatcacctctcccggttacccccaggactacccctcccaccagaactgcgagtggattgtttacgcccccgaacccaaccagaagattgtcctcaacttcaaccctcactttgaaatcgagaagcacgactgcaagtatgactttatcgagattcgggatggggacagtgaatccgcagacctcctggg

SEQ ID NO: 2806 - DNA, 6644 bp, Homo sapiens
  source 1..6644: mol_type = genomic DNA
cagagatcgcgagcgaggcaccagcctgcagccggcccccagcacatcctcagccgcacagacactcggcgaggtggaggtgagggcgggcgccagcgaactcggagaggggctcgctcactcccaggcgatcccagccgccaccgccgccgcaccagcagcagcaacagcagcagcagcttccttcctcagactcccctcgagaggctggccaagcgggtgtagccgttgggggaggctcccgccgggggaacccggcgaggacaagagcagggcggccgccttccactcgggctgtccggcggcggctgcctccgcccgtgtgtccgtcaagggtgccgcgggatgtgtgtcagtttacgcctctgagatcacacagctgcctgggggccgtgtgatgcccaaggcaagtcttggttttaattattattattatcattattgttacgcttggctttcgggaaatactcgtgatatttgtaggataaaggaaatgacactttgaggaactggagagaacatatatgcgttttgtttttaagaggaaaaccgtgttctcttcccggcttgttccctctttgctgatttcaggagctactctcctcctggtgaggtggaaattccagcaagaatagaggtgaagacaagccaccaggactcaggagggaaacgctgaccattagaaacctctgcataagacgttgtaaggaggaaaataaaagagagaaaaacacaaagatttaaacaagaaacctacgaacccagctctggaaagagccaccttctccaaaatggatatgtttcctctcacctgggttttcttagccctctacttttcaagacaccaagtgagaggccaaccagacccaccgtgcggaggtcgtttgaattccaaagatgctggctatatcacctctcccggttacccccaggactacccctcccaccagaactgcgagtggattgtttacgcccccgaacccaaccagaagattgtcctcaacttcaaccctcactttgaaatcgagaagcacgactgcaagtatgactttatcgagattcgggatggggacagtgaatccgcagacctcctgggcaaacactgtgggaacatcgccccgcccaccatcatctcctcgggctccatgctctacatcaggttcacctccgactacgcccggcagggggcaggcttctctctgcgctacgagatcttcaagacaggctctgaagattgctcaaaaaacttcacaagccccaacgggaccatcgaatctcctgggtttcctgagaagtatccacacaacttggactgcacctttaccatcctggccaaacccaagatggagatcatcctgcagttcctgatctttgacctggagcatgaccctttgcaggtgggagagggggactgcaagtacgattggctggacatctgggatggcattccacatgttggccccctgattggcaagtactgtgggaccaaaacaccctctgaacttcgttcatcgacggggatcctctccctgacctttcacacggacatggcggtggccaaggatggcttctctgcgcgttactacctggtccaccaagagccactagagaactttcagtgcaatgttcctctgggcatggagtctggccggattgctaatgaacagatcagtgcctcatctacctactctgatgggaggtggacccctcaacaaagccggctccatggtgatgacaatggctggacccccaacttggattccaacaaggagtatctccaggtggacctgcgctttttaaccatgctcacggccatcgcaacacagggagcgatttccagggaaacacagaatggctactatgtcaaatcctacaagctggaagtcagcactaatggagaggactggatggtgtaccggcatggcaaaaaccacaaggtatttcaagccaacaacgatgcaactgaggtggttctgaacaagctccacgctccactgctgacaaggtttgttagaatccgccctcagacctggcactcaggtatcgccctccggctggagctcttcggctgccgggtcacagatgctccctgctccaacatgctggggatgctctcaggcctcattgcagactcccagatctccgcctcttccacccaggaatacctctggagccccagtgcagcccgcctggttagcagccgctcgggctggttccctcgaatccctcaggcccagcccggtgaggagtggcttcaggtagatctgggaacacccaagacagtgaaaggtgtcatcatccagggagcccgcggaggagacagtatcactgctgtggaagccagagcatttgtgcgcaagttcaaagtctcctacagcctaaacggcaaggactgggaatacattcaggaccccaggacccagcagccaaagctgttcgaagggaacatgcactatgacacccctgacatccgaaggtttgaccccattccggcacagtatgtgcgggtatacccggagaggtggtcgccggcggggattgggatgcggctggaggtgctgggctgtgactggacagactccaagcccacggtagagacgctgggacccactgtgaagagcgaagagacaaccaccccctaccccaccgaagaggaggccacagagtgtggggagaactgcagctttgaggatgacaaagatttgcagctcccttcgggattcaattgcaacttcgatttcctcgaggagccctgtggttggatgtatgaccatgccaagtggctccggaccacctgggccagcagctccagcccaaacgaccggacgtttccagatgacaggaatttcttgcggctgcagagtgacagccagagagagggccagtatgcccggctcatcagcccccctgtccacctgccccgaagcccggtgtgcatggagttccagtaccaggccacgggcggccgcggggtggcgctgcaggtggtgcgggaagccagccaggagagcaagttgctgtgggtcatccgtgaggaccagggcggcgagtggaagcacgggcggatcatcctgcccagctacgacatggagtaccagattgtgttcgagggagtgatagggaaaggacgttccggagagattgccattgatgacattcggataagcactgatgtcccactggagaactgcatggccacagtctctgcaagtatagtggacatcccagaaatacatgagagagaaggatatgaagatgaaattgatgatgaatacgaggtggactggagcaattcttcttctgcaacctcagggtctggcgccccctcgaccgacaaagaaaagagctggctgtacaccctggatcccatcctcatcaccatcatcgccatgagctcactgggcgtcctcctgggggccacctgtgcaggcctcctgctctactgcacctgttcctactcgggcctgagctcccgaagctgcaccacactggagaactacaacttcgagctctacgatggccttaagcacaaggtcaagatgaaccaccaaaagtgctgctccgaggcatgacggattgcacctgaatcctatctgacgtttcattccagcaagaggggctggggaagattacatttttttttcctttggaaactgaatgccataatctcgatcaaaccgatccagaataccgaaggtatggacaggacagaaaagcgagtcgcaggaggaagggagatgcagccgcacaggggatgattaccctcctaggaccgcggtggctaagtcattgcaggaacggggctgtgttctctgctgggacaaaacaggagctcatctctttggggtcacagttctattttgtttgtgagtttgtattattattattattattattattattatattttatttctttggtctgtgagcaactcaaagaggcagaagaggagaatgacttttccagaatagaagtggagcagtgatcattattctccgctttctctttctaatcaacacttgaaaagcaaagtgtcttttcagcctttccatctttacaaataaaactcaaaaaagccgtccagcttatcccatcctctgattgtcttctgacttaagggatttactgtggtgtaggttctgccagccaaccctacaagctgccatttccagtcctagcatttaagtaggatgttgttgcctttaacttttcttatccaggggaaaattgccattttagggtcagcatgaacagctctttcttgtatgcgatttaaaacaaactggaaaggaaacttcacacgtcaaaatccatagaagcgcctggacgaggcttaaagtgctttgtgagtgaataggagccattcgctaattctagacccacagtgtctggtggtggggcttcccttgtggggcttctggtggtggttttgccttttcttttccctcctccatgttcttctaaaacatatacatatatacatacacacatacacatattcttcaggtctctaagcccctggaagcagcattgtgtgatattctcagaggcaggggaaaatagagggaaaaatagagactattggtatgttctccccatcagcgagttattgtaactggtcaccactggacgggaaggagaacagaggagagggaaagagaagcccaacctctgtgatcatatgagggccaaggctgagcagtgtagacagagaccctttgaaatgcatttgtctctcaaatagactagtaaacaccgacttctcctttgggttacaaacaccatttcaacctttcgggagagtcagagctaggatgtacaagaactgattctaaccagaagtccgcaagtactgtggacaagaatgcttaaccatgctgcttcagccttgagagacctaggttcttacacatatgcacacacgcatacacacatgcacgcacacacacatacacacatgcacgcacgcacgcatgcacaccaatttatgtttttattaagtgccttgaaaaaatgaagaaaaatgtattttccctttatgtaaaaattagtgaatatcttatgaattaaggcattcctctttccctaaccccgatggctccattcccaagtaccccaactcactgctgatcctattaaaggaatgagtcctgctacccgagtggtagtcatagccctagatgactctcaactactcttcaaagggaggcatcaggaatagaatgaaactgtgtgaaggataagattgttcgcatcaagatccaaatcttgatttcatattaacgcctaaggattgcctgtgtgctggaaatatatttgaaactcaaccagtatgcccagcctattgcatatcattgtcagaccatttttgctgctgtggtcacccacgatttcatttgtcttatacccaggtgaaaggggaagggtgaatgggactggctggttcctttaaatgttaacttatggaaatgctagttcaaatggtaatgtcacagtgttttgtatgcagagagcaagagttcaaccaacagctgtttattcatgtgtgtgtgtctttgctgctttgagttctctgtatctactgtgtatgtgaatggtcatgtgggactcagtggtggtgttgtgactttgacctagggtccgagtgtcacagctgatcttggcactcggcactcattggcacagtggtagttagaggtgaaaagtagagctgtcaagcccaagggcttagctttagggctcctcctgagttcggcccacagtagaagcaagattttaactagccccttttcctcttcaccctcccatgatgcgcagtgttcagaaagctggtaagtcctagggatttccagaagtagcctgcagaagaaggtaagtttgaaagccactccaggggtcctgatgctgtcatgctcagtgagccattttacagttctccaaagtctagccctgtttcggacctgcacttcacctctaagttatgtacaactcaacctgcatccctctaaaagtcctatatccatattcaccattggctaatttgaggccctgagtgggccttgaatgctaaaaagaagcagggtacgcagggctacatgtagataccacaccaaggctggaggctggtctgtcataagacagaaagaaagacgctgggcccaattttgacttggccaggggacaccttggtgtgtttgttatctttatctgtgggtaggctagctgacccatctccttgagtcattccctttgggaaaccccactgccagtattgatctcctttttgccttgtactgaatgacacattacctccacactctcccggactaggtggtcaacagggccacagggttgctttctgtctttggtggggcaggggagttgacagggatgagggtccaaggaataagcatgaatgacaagaaaacaagggaaagagttaacctgtcacatagcaggttaactttttcagggtttgcagttagaggtattcgaccattcactggctgagccagatcacgggaacttgagagcttttactgtgattcttcaatgtaaaaaataaacaacaatgtcaaactgtgtttatatgatttgtataaagcctttttaagattactatttaaataaacattataccagag

SEQ ID NO: 2807 - DNA, 3521 bp, Homo sapiens
  source 1..3521: mol_type = genomic DNA
cagagatcgcgagcgaggcaccagcctgcagccggcccccagcacatcctcagccgcacagacactcggcgaggtggaggtgagggcgggcgccagcgaactcggagaggggctcgctcactcccaggcgatcccagccgccaccgccgccgcaccagcagcagcaacagcagcagcagcttccttcctcagactcccctcgagaggctggccaagcgggtgtagccgttgggggaggctcccgccgggggaacccggcgaggacaagagcagggcggccgccttccactcgggctgtccggcggcggctgcctccgcccgtgtgtccgtcaagggtgccgcgggatgtgtgtcagtttacgcctctgagatcacacagctgcctgggggccgtgtgatgcccaaggcaagtcttggttttaattattattattatcattattgttacgcttggctttcgggaaatactcgtgatatttgtaggataaaggaaatgacactttgaggaactggagagaacatatatgcgttttgtttttaagaggaaaaccgtgttctcttcccggcttgttccctctttgctgatttcaggagctactctcctcctggtgaggtggaaattccagcaagaatagaggtgaagacaagccaccaggactcaggagggaaacgctgaccattagaaacctctgcataagacgttgtaaggaggaaaataaaagagagaaaaacacaaagatttaaacaagaaacctacgaacccagctctggaaagagccaccttctccaaaatggatatgtttcctctcacctgggttttcttagccctctacttttcaagacaccaagtgagaggccaaccagacccaccgtgcggaggtcgtttgaattccaaagatgctggctatatcacctctcccggttacccccaggactacccctcccaccagaactgcgagtggattgtttacgcccccgaacccaaccagaagattgtcctcaacttcaaccctcactttgaaatcgagaagcacgactgcaagtatgactttatcgagattcgggatggggacagtgaatccgcagacctcctgggcaaacactgtgggaacatcgccccgcccaccatcatctcctcgggctccatgctctacatcaggttcacctccgactacgcccggcagggggcaggcttctctctgcgctacgagatcttcaagacaggctctgaagattgctcaaaaaacttcacaagccccaacgggaccatcgaatctcctgggtttcctgagaagtatccacacaacttggactgcacctttaccatcctggccaaacccaagatggagatcatcctgcagttcctgatctttgacctggagcatgaccctttgcaggtgggagagggggactgcaagtacgattggctggacatctgggatggcattccacatgttggccccctgattggcaagtactgtgggaccaaaacaccctctgaacttcgttcatcgacggggatcctctccctgacctttcacacggacatggcggtggccaaggatggcttctctgcgcgttactacctggtccaccaagagccactagagaactttcagtgcaatgttcctctgggcatggagtctggccggattgctaatgaacagatcagtgcctcatctacctactctgatgggaggtggacccctcaacaaagccggctccatggtgatgacaatggctggacccccaacttggattccaacaaggagtatctccaggtggacctgcgctttttaaccatgctcacggccatcgcaacacagggagcgatttccagggaaacacagaatggctactatgtcaaatcctacaagctggaagtcagcactaatggagaggactggatggtgtaccggcatggcaaaaaccacaaggtatttcaagccaacaacgatgcaactgaggtggttctgaacaagctccacgctccactgctgacaaggtttgttagaatccgccctcagacctggcactcaggtatcgccctccggctggagctcttcggctgccgggtcacagatgctccctgctccaacatgctggggatgctctcaggcctcattgcagactcccagatctccgcctcttccacccaggaatacctctggagccccagtgcagcccgcctggttagcagccgctcgggctggttccctcgaatccctcaggcccagcccggtgaggagtggcttcaggtagatctgggaacacccaagacagtgaaaggtgtcatcatccagggagcccgcggaggagacagtatcactgctgtggaagccagagcatttgtgcgcaagttcaaagtctcctacagcctaaacggcaaggactgggaatacattcaggaccccaggacccagcagccaaagctgttcgaagggaacatgcactatgacacccctgacatccgaaggtttgaccccattccggcacagtatgtgcgggtatacccggagaggtggtcgccggcggggattgggatgcggctggaggtgctgggctgtgactggacagactccaagcccacggtagagacgctgggacccactgtgaagagcgaagagacaaccaccccctaccccaccgaagaggaggccacagagtgtggggagaactgcagctttgaggatgacaaagatttgcagctcccttcgggattcaattgcaacttcgatttcctcgaggagccctgtggttggatgtatgaccatgccaagtggctccggaccacctgggccagcagctccagcccaaacgaccggacgtttccagatgacaggaatttcttgcggctgcagagtgacagccagagagagggccagtatgcccggctcatcagcccccctgtccacctgccccgaagcccggtgtgcatggagttccagtaccaggccacgggcggccgcggggtggcgctgcaggtggtgcgggaagccagccaggagagcaagttgctgtgggtcatccgtgaggaccagggcggcgagtggaagcacgggcggatcatcctgcccagctacgacatggagtaccagattgtgttcgagggagtgatagggaaaggacgttccggagagattgccattgatgacattcggataagcactgatgtcccactggagaactgcatgggtcccaaagcatgtatcgcagatgaatacgaggtggactggagcaattcttcttctgcaacctcagggtctggcgccccctcgaccgacaaagaaaagagctggctgtacaccctggatcccatcctcatcaccatcatcgccatgagctcactgggcgtcctcctgggggccacctgtgcaggcctcctgctctactgcacctgttcctactcgggcctgagctcccgaagctgcaccacactggagaactacaacttcgagctctacgatggccttaagcacaaggtcaagatgaaccaccaaaagtgctgctccgaggcatga

SEQ ID NO: 2808 - DNA, 865 bp, Homo sapiens
  source 1..865: mol_type = genomic DNA
gtcaacgattgggctgagtcggagacttcctttcctgattggccgtgttgtacggcggcttctcgcgcagctgatgacctggaagtgatgcctaaagctgtggaccgcgtgggctcgcctccctgggactaggtttcagcggccgctgcgatgaccaaaataaaggcagatcccgacgggcccgaggctcaggcggaggcgtgttccggggagcgcacctaccaggagctgctggtcaaccagaaccccatcgcgcagcccctggcttctcgccgcctcacgcggaagctctacaaatgcatcaagaaagcggtgaagcagaagcagattcggcgcggggtgaaagaggttcagaaatttgtcaacaaaggagaaaaagggatcatggttttggcaggagacacactgcccattgaggtatactgccatctcccagtcatgtgtgaggaccgaaatttgccctatgtctatatcccctctaagacggacctgggtgcagccgcaggctccaagcgccccacctgtgtgataatggtcaagccccatgaggagtaccaggaggcttacgatgagtgcctggaggaggtgcagtccctgcccctacccctatgaggggctccggtagcacctgggcacctgccgctggaagctattgggctggcagcaggacgactggctgtcctcctgcccacccacactgacggcatcttcccagttccccaaggcacgccttcttcccaggcagctctaacagccctttcatgaaggtaatgctagtcttctgtccatcagtgccatttcctgtagaactaaaggctgttccaagaatgtggggtggggaaagtaaatgctaagactaaaatgt

SEQ ID NO: 2809 - DNA, 599 bp, Homo sapiens
  source 1..599: mol_type = genomic DNA
gcggccgctgcgatgaccaaaataaaggcagatcccgacgggcccgaggctcaggcggaggcgtgttccggggagcgcacctaccaggagctgctggtcaaccagaaccccatcgcgcagcccctggcttctcgccgcctcacgcggaagctctacaaatgcatcaagaaagcggtgaagcagaagcagattcggcgcggggtgaaagaggttcagaaatttgtcaacaaaggagaaaaagggacctgggtgcagccgcaggctccaagcgccccacctgtgtgataatggtcaagccccatgaggagtaccaggaggcttacgatgagtgcctggaggaggtgcagtccctgcccctacccctatgaggggctccggtagcacctgggcacctgccgctggaagctattgggctggcagcaggacgactggctgtcctcctgcccacccacactgacggcatcttcccagttccccaaggcacgccttcttcccaggcagctctaacagccctttcatgaaggtaatgctagtcttctgtccatcagtgccatttcctgtagaactaaaggctgttccaagaatgtggggtggggaaa

SEQ ID NO: 2810 - DNA, 4666 bp, Homo sapiens
  source 1..4666: mol_type = genomic DNA
aagtcgcactcccgcctcatccaaggcagcctgcgtggctcccgggagcgcgcacgtcccggagcccatgccgaccgcaggcgccgtatccgcgctcgtctagcagccccggttacgcggttgcacgtcggccccagccctgaggagccggaccgatgtggaaactgctgcccgccgcgggcccggcaggaggagaaccatacagacttttgactggcgttgagtacgttgttggaaggaaaaactgtgccattctgattgaaaatgatcagtcgatcagccgaaatcatgctgtgttaactgctaacttttctgtaaccaacctgagtcaaacagatgaaatccctgtattgacattaaaagataattctaagtatggtacctttgttaatgaggaaaaaatgcagaatggcttttcccgaactttgaagtcgggggatggtattacttttggagtgtttggaagtaaattcagaatagagtatgagcctttggttgcatgctcttcttgtttagatgtctctgggaaaactgctttaaatcaagctatattgcaacttggaggatttactgtaaacaattggacagaagaatgcactcaccttgtcatggtatcagtgaaagttaccattaaaacaatatgtgcactcatttgtggacgtccaattgtaaagccagaatattttactgaattcctgaaagcagttgagtccaagaagcagcctccacaaattgaaagtttttacccacctcttgatgaaccatctattggaagtaaaaatgttgatctgtcaggacggcaggaaagaaaacaaatcttcaaagggaaaacatttatatttttgaatgccaaacagcataagaaattgagttccgcagttgtctttggaggtggggaagctaggttgataacagaagagaatgaagaagaacataatttctttttggctccgggaacgtgtgttgttgatacaggaataacaaactcacagaccttaattcctgactgtcagaagaaatggattcagtcaataatggatatgctccaaaggcaaggtcttagacctattcctgaagcagaaattggattggcggtgattttcatgactacaaagaattactgtgatcctcagggccatcccagtacaggattaaagacaacaactccaggaccaagcctttcacaaggcgtgtcagttgatgaaaaactaatgccaagcgccccagtgaacactacaacatacgtagctgacacagaatcagagcaagcagatacatgggatttgagtgaaaggccaaaagaaatcaaagtctccaaaatggaacaaaaattcagaatgctttcacaagatgcacccactgtaaaggagtcctgcaaaacaagctctaataataatagtatggtatcaaatactttggctaagatgagaatcccaaactatcagctttcaccaactaaattgccaagtataaataaaagtaaagatagggcttctcagcagcagcagaccaactccatcagaaactactttcagccgtctaccaaaaaaagggaaagggatgaagaaaatcaagaaatgtcttcatgcaaatcagcaagaatagaaacgtcttgttctcttttagaacaaacacaacctgctacaccctcattgtggaaaaataaggagcagcatctatctgagaatgagcctgtggacacaaactcagacaataacttatttacagatacagatttaaaatctattgtgaaaaattctgccagtaaatctcatgctgcagaaaagctaagatcaaataaaaaaagggaaatggatgatgtggccatagaagatgaagtattggaacagttattcaaggacacaaaaccagagttagaaattgatgtgaaagttcaaaaacaggaggaagatgtcaatgttagaaaaaggccaaggatggatatagaaacaaatgacactttcagtgatgaagcagtaccagaaagtagcaaaatatctcaagaaaatgaaattgggaagaaacgtgaactcaaggaagactcactatggtcagctaaagaaatatctaacaatgacaaacttcaggatgatagtgagatgcttccaaaaaagctgttattgactgaatttagatcactggtgattaaaaactctacttccagaaatccatctggcataaatgatgattatggtcaactaaaaaatttcaagaaattcaaaaaggtcacatatcctggagcaggaaaacttccacacatcattggaggatcagatctaatagctcatcatgctcgaaagaatacagaactagaagagtggctaaggcaggaaatggaggtacaaaatcaacatgcaaaagaagagtctcttgctgatgatctttttagatacaatccttatttaaaaaggagaagataactgaggattttaaaaagaagccatggaaaaacttcctagtaagcatctacttcaggccaacaaggttatatgaatatatagtgtatagaagcgatttaagttacaatgttttatggcctaaatttattaaataaaatgcacaaaactttgattcttttgtatgtaacaattgtttgttctgttttcaggctttgtcattgcatctttttttcatttttaaatgtgttttgtttattaaatagttaatatagtcacagttcaaaattctaaatgtacgtaaggtaaagactaaagtcacccttccaccattgtcctagctacttggttcccctcagaaaaaaattcatgatactcatttcttatgaatctttccagggatttttgagtcctattcaaattcctatttttaaataatttcctacacaaatgatagcataacatatgcagtgttctacaccttgcttttttacttagtagattaaaaattataggaatatcaatataatgtttttaatattttttcttttccattatgctgtagtcttacctaaactctggtgatccaaacaaaatggcttcagtggtgcagatgtcacctacatgttattctagtactagaaactgaagaccatgtggagacttcatcaaacatgggtttagttttcaccagaatggaaagacctgtacccctttttggtggtcttactgagctgggtgggtgtctgttttgagcttatttagagtcctagttttcctacttataaagtagaaatggtgagattgttttctttttctaccttaaagggagatggtaagaaacaatgaatgtcttttttcaaactttattgacaagtgattttcaagtctgtgttcaaaaatatattcatgtacctgtgatccagcaagaagggagttccagtcaagagtcactacaactgattagttgtttagagaatgagaaatggaacagtgaggaatggaggccatatttccatgacttcccttgtaaacagaagcaacagaagggacaagaggctggcctctacatcactctcaccttccaaatcttgtggaagtgcatctacttgccagaaccaaattaacttacttccaagttctggctgcttgcaggtggaactccagctgcaagggagttagggaaatgaaggtctttttttaaaagcttctcagccttcctagggaacagaaattgggtgagccaatctgcaatttctactacaggcattgagaccagttagattattgaaatattatagagagttatgaacacttaaattatgatagtggtatgacattggatagaacatgggatactttagaagtagaattgacagggcatattagttgatgaaatggagtcatttgagtctcttaatagccatgtatcataattaccaagtgaagctggtggaacatatggtctccattttacagttaaggaatataatggacagattaatattgttctctgtcatgcccacaatccctttctaaggaagactgccctactatagcagtttttatatttgtcaatttatgaatataatgaatgagagttctggtacctcctgtctttacaaatattggtgttgtcagtatttttcctttttaaccattccaatcggtgtgtagtgatgtttcattttggttttaatttgtatatccctgatagctataattgggtcatagaaattctttatacattctagatgcaagtctcttgtcggatatatgtattgagatattacacctagtctgtggcttgactgttttctttatgtcttttgatgaatagaagttttaaattttgacaaggtcaaatttatttttttcttttgtttgatattttttctctccaatttaaccccaagatttcagatattctgctctattatataaactttatatttttatatttgtgatctaccttgaattgatatgtatgttgtgaattatggatcagggttctttttttcccccatacaagtatccagtcattgtaacactgtttattgaaagaattatcctttcctcattaaattaccttgccaattagtaaaaaatcaattaaccataatggtggatctgtttctggactttctgtttggttacactgaaatgtttgtccatccttgcactcactcataccatactgccttgaattactgtagctgcatagatgctccttaagttgggattacattgtaataaacgcaatgtaagtt

SEQ ID NO: 2811 - DNA, 1544 bp, Homo sapiens
  source 1..1544: mol_type = genomic DNA
gagcgcgcacgtcccggagcccatgccgaccgcaggcgccgtatccgcgctcgtctagcagccccggttacgcggttgcacgtcggccccagccctgaggagccggaccgatgtggaaactgctgcccgccgcgggcccggcaggaggagaaccatacagacttttgactggcgttgagtacgttgttggaaggaaaaactgtgccattctgattgaaaatgatcagtcgatcagccgaaatcatgctgtgttaactgctaacttttctgtaaccaacctgagtcaaacagatgaaatccctgtattgacattaaaagataattctaagtatggtacctttgttaatgaggaaaaaatgcagaatggcttttcccgaactttgaagtcgggggatggtattacttttggagtgtttggaagtaaattcagaatagagtatgagcctttggttgcatgctcttcttgtttagatgtctctgggaaaactgctttaaatcaagctatattgcaacttggaggatttactgtaaacaattggacagaagaatgcactcaccttgtcatggtatcagtgaaagttaccattaaaacaatatgtgcactcatttgtggacgtccaattgtaaagccagaatattttactgaattcctgaaagcagttgagtccaagaagcagcctccacaaattgaaagtttttacccacctcttgatgaaccatctattggaagtaaaaatgttgatctgtcaggacggcaggaaagaaaacaaatcttcaaagggaaaacatttatatttttgaatgccaaacagcataagaaattgagttccgcagttgtctttggaggtggggaagctaggttgataacagaagagaatgaagaagaacataatttctttttggctccgggaacgtgtgttgttgatacaggaataacaaactcacagaccttaattcctgactgtcagaagaaatggattcagtcaataatggatatgctccaaaggcaaggtcttagacctattcctgaagcagaaattggattggcggtgattttcatgactacaaagaattactgtgatcctcagggccatcccagtacaggattaaagacaacaactccaggaccaagcctttcacaaggcgtgtcagttgatgaaaaactaatgccaagcgccccagtgaacactacaacatacgtagctgacacagaatcagagcaagcagatacatgggatttgagtgaaaggccaaaagaaatcaaagtctccaaaatggaacaaaaattcagaatgctttcacaagatgcacccactgtaaaggagtcctgcaaaacaagctctaataataatagtatggtatcaaatactttggctaagatgagaatcccaaactatcagctttcaccaactaaattgccaagtataaataaaagtaaagatagggcttctcagcagcagcagaccaactccatcagaaactactttcagccgtctaccaaaaaaagagagagactccatctcaaaaaaaaaaaaaaaaaaaag

SEQ ID NO: 2812 - DNA, 1700 bp, Homo sapiens
  source 1..1700: mol_type = genomic DNA
atggaaattgtagttccctgctgcggtcccagttacagcgtgaatcccttagcgcaccgcctccccaagtgctgccagcatgctgcccctccacgctagggacttgcctgcctctgccgcagcgcagatctgatgcggtggtttcctccaaagaaagcgggatactccgggccctgccgcgcgcaccgccgctccgtcacggagccgctttacttccgggtgcgacgtctacccacccaggacttcctgggacgagccgtcccccgccccagccacgcctctgagtcgcgctgcgcaggcgccattgggcagagggattggcaagcttgcgtgccccagcgacacaggcctcgaggctgtctctgacaagtgttcacaggaggtggggacgcctctgcgcgaggaacgaggagctacgggcctgggcccggttattgccatgggcagcggctgccgcatcgaatgcatattcttcagcgagttccaccccacgctgggacccaagatcacctatcaggtccctgaagacttcatctcccgagagctgtttgacacagtccaagtgtacatcatcaccaagccagagctgcagaacaagcttatcactgtcacagctatggaaaagaagctgatcggctgtcctgtgtgcatcgaacacaagaagtacagccgcaatgctctcctcttcaacctgggcttcgtgtgtgatgcccaggccaagacctgcgccctcgagcccattgttaaaaagctggctggctatctgaccacactagagctagagagcagcttcgtgtccatggaggagagcaagcagaagttggtgcccatcatgaccatcttgctggaggagctaaatgcctcaggccggtgcactctgcccattgatgagtccaacaccatccacttgaaggtgattgagcagcggccagaccctccggtggcccaggagtatgatgtacctgtctttaccaaagacaaggaggatttcttcaactcacagtgggacctcactacacaacaaatcctgccctacattgatgggttccgccacatccagaagatttcagcagaggcagatgtggagctcaacctggtgcgcattgctatccagaacctgctgtactacggcgttgtgacactggtgtccatcctccagtactccaatgtatactgcccaacgcccaaggtccaggacctggtagatgacaagtccctgcaagaggcatgtctatcctacgtgaccaagcaagggcacaagagggccagtctccgggatgtgttccagctatactgcagcctgagccctggcactaccgtgcgagacctcattggccgccacccccagcagctgcagcatgttgatgaacggaagctgatccagttcgggcttatgaagaacctcatcaggcgactacagaagtatcctgtgcgggtgactcgggaagagcagagccaccctgcccggctttatacaggctgccacagctatgacgagatctgctgcaagacaggcatgagctaccatgagctggatgagcggcttgaaaatgaccccaacatcatcatctgctggaagtgaggctggtagtgactggatggacacattgctgtgggtagtccctcctactaggaggcttgtcatactgtctagaggttgactcttagttctgtaaataaagacatccatttcaaacagc

SEQ ID NO: 2813 - DNA, 2186 bp, Homo sapiens
  source 1..2186: mol_type = genomic DNA
agactgacagacacgtagaccaacagtgcggccccagggttcgtccccagactcgctcgctcatttgttggcgactggggctcagcgcagcgaagcccgatgtggtccggaggcagtgggaaggcgcggggctgggaggccgcggcgggagggaggagcagccccggcaggctcagccgccgccgaatcatgtcgatgagtccaaagcacacgactccgttctcagtgtctgacatcttgagtcccctggaggaaagctacaagaaagtgggcatggagggcggcggcctcggggctccgctggcggcgtacaggcagggccaggcggcaccgccaacagcggccatgcagcagcacgccgtggggcaccacggcgccgtcaccgccgcctaccacatgacggcggcgggggtgccccagctctcgcactccgccgtggggggctactgcaacggcaacctgggcaacatgagcgagctgccgccgtaccaggacaccatgaggaacagcgcctctggccccggatggtacggcgccaacccagacccgcgcttccccgccatctcccgcttcatgggcccggcgagcggcatgaacatgagcggcatgggcggcctgggctcgctgggggacgtgagcaagaacatggccccgctgccaagcgcgccgcgcaggaagcgccgggtgctcttctcgcaggcgcaggtgtacgagctggagcgacgcttcaagcaacagaagtacctgtcggcgccggagcgcgagcacctggccagcatgatccacctgacgcccacgcaggtcaagatctggttccagaaccaccgctacaaaatgaagcgccaggccaaggacaaggcggcgcagcagcaactgcagcaggacagcggcggcggcgggggcggcgggggcaccgggtgcccgcagcagcaacaggctcagcagcagtcgccgcgacgcgtggcggtgccggtcctggtgaaagacggcaaaccgtgccaggcgggtgcccccgcgccgggcgccgccagcctacaaggccacgcgcagcagcaggcgcagcaccaggcgcaggccgcgcaggcggcggcagcggccatctccgtgggcagcggtggcgccggccttggcgcacacccgggccaccagccaggcagcgcaggccagtctccggacctggcgcaccacgccgccagccccgcggcgctgcagggccaggtatccagcctgtcccacctgaactcctcgggctcggactacggcaccatgtcctgctccaccttgctatacggtcggacctggtgagaggacgccgggccggccctagcccagcgctctgcctcaccgcttccctcctgcccgccacacagaccaccatccaccgctgctccacgcgcttcgacttttcttaacaacctggccgcgtttagaccaaggaacaaaaaaaccacaaaggccaaactgctggacgtctttctttttttccccccctaaaatttgtgggtttttttttttaaaaaaagaaaatgaaaaacaaccaagcgcatccaatctcaaggaatctttaagcagagaagggcataaaacagctttggggtgtctttttttggtgattcaaatgggttttccacgctagggcggggcacagattggagagggctctgtgctgacatggctctggactctaaagaccaaacttcactctgggcacactctgccagcaaagaggactcgcttgtaaataccaggatttttttttttttttgaagggaggacgggagctggggagaggaaagagtcttcaacataacccacttgtcactgacacaaaggaagtgccccctccccggcaccctctggccgcctaggctcagcggcgaccgccctccgcgaaaatagtttgtttaatgtgaacttgtagctgtaaaacgctgtcaaaagttggactaaatgcctagtttttagtaatctgtacattttgttgtaaaaagaaaaaccactcccagtccccagcccttcacattttttatgggcattgacaaatctgtgtatattatttggcagtttggtatttgcggcgtcagtctttttctgttgtaacttatgtagatatttggcttaaatatagttcctaagaagcttctaataaattatacaaattaaaaagattctttttctgattaaaa

SEQ ID NO: 2814 - DNA, 2330 bp, Homo sapiens
  source 1..2330: mol_type = genomic DNA
ttaaaggtgtttaccttgtcatcagcatgtaagctaattatctcgggcaagatgtaggcttctattgtcttgttgctttagcgcttacgccccgcctctggtggctgcctaaaacctggcgccgggctaaaacaaacgcgaggcagcccccgagcctccactcaagccaattaaggaggactcggtccactccgttacgtgtacatccaacaagatcggcgttaaggtaacaccagaatatttggcaaagggagaaaaaaaaagcagcgaggcttcgccttccccctctcccttttttttcctcctcttccttcctcctccagccgccgccgaatcatgtcgatgagtccaaagcacacgactccgttctcagtgtctgacatcttgagtcccctggaggaaagctacaagaaagtgggcatggagggcggcggcctcggggctccgctggcggcgtacaggcagggccaggcggcaccgccaacagcggccatgcagcagcacgccgtggggcaccacggcgccgtcaccgccgcctaccacatgacggcggcgggggtgccccagctctcgcactccgccgtggggggctactgcaacggcaacctgggcaacatgagcgagctgccgccgtaccaggacaccatgaggaacagcgcctctggccccggatggtacggcgccaacccagacccgcgcttccccgccatctcccgcttcatgggcccggcgagcggcatgaacatgagcggcatgggcggcctgggctcgctgggggacgtgagcaagaacatggccccgctgccaagcgcgccgcgcaggaagcgccgggtgctcttctcgcaggcgcaggtgtacgagctggagcgacgcttcaagcaacagaagtacctgtcggcgccggagcgcgagcacctggccagcatgatccacctgacgcccacgcaggtcaagatctggttccagaaccaccgctacaaaatgaagcgccaggccaaggacaaggcggcgcagcagcaactgcagcaggacagcggcggcggcgggggcggcgggggcaccgggtgcccgcagcagcaacaggctcagcagcagtcgccgcgacgcgtggcggtgccggtcctggtgaaagacggcaaaccgtgccaggcgggtgcccccgcgccgggcgccgccagcctacaaggccacgcgcagcagcaggcgcagcaccaggcgcaggccgcgcaggcggcggcagcggccatctccgtgggcagcggtggcgccggccttggcgcacacccgggccaccagccaggcagcgcaggccagtctccggacctggcgcaccacgccgccagccccgcggcgctgcagggccaggtatccagcctgtcccacctgaactcctcgggctcggactacggcaccatgtcctgctccaccttgctatacggtcggacctggtgagaggacgccgggccggccctagcccagcgctctgcctcaccgcttccctcctgcccgccacacagaccaccatccaccgctgctccacgcgcttcgacttttcttaacaacctggccgcgtttagaccaaggaacaaaaaaaccacaaaggccaaactgctggacgtctttctttttttccccccctaaaatttgtgggtttttttttttaaaaaaagaaaatgaaaaacaaccaagcgcatccaatctcaaggaatctttaagcagagaagggcataaaacagctttggggtgtctttttttggtgattcaaatgggttttccacgctagggcggggcacagattggagagggctctgtgctgacatggctctggactctaaagaccaaacttcactctgggcacactctgccagcaaagaggactcgcttgtaaataccaggatttttttttttttttgaagggaggacgggagctggggagaggaaagagtcttcaacataacccacttgtcactgacacaaaggaagtgccccctccccggcaccctctggccgcctaggctcagcggcgaccgccctccgcgaaaatagtttgtttaatgtgaacttgtagctgtaaaacgctgtcaaaagttggactaaatgcctagtttttagtaatctgtacattttgttgtaaaaagaaaaaccactcccagtccccagcccttcacattttttatgggcattgacaaatctgtgtatattatttggcagtttggtatttgcggcgtcagtctttttctgttgtaacttatgtagatatttggcttaaatatagttcctaagaagcttctaataaattatacaaattaaaaagattctttttctgatta

SEQ ID NO: 2815 - DNA, 2583 bp, Homo sapiens
  source 1..2583: mol_type = genomic DNA
agcaacgcgggggacacccccgattccgctggggagcgcagcccacagctccccctcgccaggcgcccaaggaccctcaaggcgcggggcccacacttgaagcctgggaacgcgcagacaggaaaccctcttcctcctaagcagtttcttgctcgtcggatgagaggcgcccaattgaagcagaatgatcctcatctactaatatccagcgtggccacaaagcgactggccatttacgccaccactttaaacaaagatatttggttattcccgggaagcaagagcacttttgcatggctgagctgcgggcggaggcgagcctcggcccagcctcccgcccgctgagctgcccgcacctcggcattcgccccctcctggccagcgctccagccgccggggttcaggctcagttccgcccggcaacagacagacgggcactcacgccgctccctgctcgcgcgctccctgaagcatcagaggggaaaacagcgtggctctgggctcgggtgctggggctgtgatgtcctcggaaagtcagctccagccccagatccccgcgtgtctgggagatgggcgagggtcagggacaccagccgccgccgaatcatgtcgatgagtccaaagcacacgactccgttctcagtgtctgacatcttgagtcccctggaggaaagctacaagaaagtgggcatggagggcggcggcctcggggctccgctggcggcgtacaggcagggccaggcggcaccgccaacagcggccatgcagcagcacgccgtggggcaccacggcgccgtcaccgccgcctaccacatgacggcggcgggggtgccccagctctcgcactccgccgtggggggctactgcaacggcaacctgggcaacatgagcgagctgccgccgtaccaggacaccatgaggaacagcgcctctggccccggatggtacggcgccaacccagacccgcgcttccccgccatctcccgcttcatgggcccggcgagcggcatgaacatgagcggcatgggcggcctgggctcgctgggggacgtgagcaagaacatggccccgctgccaagcgcgccgcgcaggaagcgccgggtgctcttctcgcaggcgcaggtgtacgagctggagcgacgcttcaagcaacagaagtacctgtcggcgccggagcgcgagcacctggccagcatgatccacctgacgcccacgcaggtcaagatctggttccagaaccaccgctacaaaatgaagcgccaggccaaggacaaggcggcgcagcagcaactgcagcaggacagcggcggcggcgggggcggcgggggcaccgggtgcccgcagcagcaacaggctcagcagcagtcgccgcgacgcgtggcggtgccggtcctggtgaaagacggcaaaccgtgccaggcgggtgcccccgcgccgggcgccgccagcctacaaggccacgcgcagcagcaggcgcagcaccaggcgcaggccgcgcaggcggcggcagcggccatctccgtgggcagcggtggcgccggccttggcgcacacccgggccaccagccaggcagcgcaggccagtctccggacctggcgcaccacgccgccagccccgcggcgctgcagggccaggtatccagcctgtcccacctgaactcctcgggctcggactacggcaccatgtcctgctccaccttgctatacggtcggacctggtgagaggacgccgggccggccctagcccagcgctctgcctcaccgcttccctcctgcccgccacacagaccaccatccaccgctgctccacgcgcttcgacttttcttaacaacctggccgcgtttagaccaaggaacaaaaaaaccacaaaggccaaactgctggacgtctttctttttttccccccctaaaatttgtgggtttttttttttaaaaaaagaaaatgaaaaacaaccaagcgcatccaatctcaaggaatctttaagcagagaagggcataaaacagctttggggtgtctttttttggtgattcaaatgggttttccacgctagggcggggcacagattggagagggctctgtgctgacatggctctggactctaaagaccaaacttcactctgggcacactctgccagcaaagaggactcgcttgtaaataccaggatttttttttttttttgaagggaggacgggagctggggagaggaaagagtcttcaacataacccacttgtcactgacacaaaggaagtgccccctccccggcaccctctggccgcctaggctcagcggcgaccgccctccgcgaaaatagtttgtttaatgtgaacttgtagctgtaaaacgctgtcaaaagttggactaaatgcctagtttttagtaatctgtacattttgttgtaaaaagaaaaaccactcccagtccccagcccttcacattttttatgggcattgacaaatctgtgtatattatttggcagtttggtatttgcggcgtcagtctttttctgttgtaacttatgtagatatttggcttaaatatagttcctaagaagcttctaataaattatacaaattaaaaa

SEQ ID NO: 2816 - DNA, 1417 bp, Homo sapiens
  source 1..1417: mol_type = genomic DNA
gcccgatgtggtccggaggcagtgggaaggcgcggggctgggaggccgcggcgggagggaggagcagccccggcaggctcagcgcttacgccccgcctctggtggctgcctaaaacctggcgccgggctaaaacaaacgcgaggcagcccccgagcctccactcaagccaattaaggaggactcggtccactccgttacgtgtacatccaacaagatcggcgttaagccgccgccgaatcatgtcgatgagtccaaagcacacgactccgttctcagtgtctgacatcttgagtcccctggaggaaagctacaagaaagtgggcatggagggcggcggcctcggggctccgctggcggcgtacaggcagggccaggcggcaccgccaacagcggccatgcagcagcacgccgtggggcaccacggcgccgtcaccgccgcctaccacatgacggcggcgggggtgccccagctctcgcactccgccgtggggggctactgcaacggcaacctgggcaacatgagcgagctgccgccgtaccaggacaccatgaggaacagcgcctctggccccggatggtacggcgccaacccagacccgcgcttccccgccatctcccgcttcatgggcccggcgagcggcatgaacatgagcggcatgggcggcctgggctcgctgggggacgtgagcaagaacatggccccgctgccaagcgcgccgcgcaggaagcgccgggtgctcttctcgcaggcgcaggtgtacgagctggagcgacgcttcaagcaacagaagtacctgtcggcgccggagcgcgagcacctggccagcatgatccacctgacgcccacgcaggtcaagatctggttccagaaccaccgctacaaaatgaagcgccaggccaaggacaaggcggcgcagcagcaactgcagcaggacagcggcggcggcgggggcggcgggggcaccgggtgcccgcagcagcaacaggctcagcagcagtcgccgcgacgcgtggcggtgccggtcctggtgaaagacggcaaaccgtgccaggcgggtgcccccgcgccgggcgccgccagcctacaaggccacgcgcagcagcaggcgcagcaccaggcgcaggccgcgcaggcggcggcagcggccatctccgtgggcagcggtggcgccggccttggcgcacacccgggccaccagccaggcagcgcaggccagtctccggacctggcgcaccacgccgccagccccgcggcgctgcagggccaggtatccagcctgtcccacctgaactcctcgggctcggactacggcaccatgtcctgctccaccttgctatacggtcggacctggtgagaggacgccgggccggccctagcccagcgctctgcctcaccgcttccctcctgcccgccac

SEQ ID NO: 2817 - DNA, 653 bp, Homo sapiens
  source 1..653: mol_type = genomic DNA
aatatccagcgtggccacaaagcgactggccatttacgccaccactttaaacaaagatatttggttattcccgggaagcaagagcacttttgcatggctgagctgcgggcggaggcgagcctcggcccagcctcccgcccgctgagctgcccgcacctcggcattcgccccctcctggccagcgctccagccgccggggttcaggctcagttccgcccggcaacagacagacgggcactcacgccgctccctgctcgcgcgctccctgaagcatcagaggggaaaacagcgtggctctgggctcgggtgctggggctgtgatgtcctcggaaagtcagctccagccccagatccccgcgtgtctgggagatgggcgagggtcagggacaccagggggaaagggggcggggagcagaggtgtccctctgacggcggcagaagagaggcagacagactgacagacacgtagaccaacagtgcggccccagggttcgtccccagactcgctcgctcatttgttggcgactggggctcagcgcagcgaagcccgatgtggtccggaggcagtgggaaggcgcggggctgggaggccgcggcgggagggaggagcagccccggcaggctcagcgcttacgccccgcctctggtggctg

SEQ ID NO: 2818 - DNA, 3101 bp, Homo sapiens
  source 1..3101: mol_type = genomic DNA
atgctcagggttccggagccgcggcccggggaggcgaaagcggagggggccgcgccgccgaccccgtccaagccgctcacgtccttcctcatccaggacatcctgcgggacggcgcgccggaggaggccgagacgctggcagagaccgagccagaaaggcacttggggtcttatctgttggactctgaaaacacttcaggcgcccttccaaggcttccccaaacccctaagcagccgcagaagcgctcccgagctgccttctcccacactcaggtgatcgagttggagaggaagttcagccatcagaagtacctgtcggcccctgaacgggcccacctggccaagaacctcaagctcacggagacccaagtgaagatatggttccagaacagacgctataagactaagcgaaagcagctctcctcggagctgggagacttggagaagcactcctctttgccggccctgaaagaggaggccttctcccgggcctccctggtctccgtgtataacagctatccttactacccatacctgtactgcgtgggcagctggagcccagctttttggtaatgccagctcaggtgacaaccattatgatcaaaaactgccttccccagggtgtctctatgaaaagcacaaggggccaaggtcagggagcaagaggtgtgcacaccaaagctattggagatttgcgtggaaatctcagattcttcactggtgagacaatgaaacaacagagacagtgaaagttttaatacctaagtcattcctccagtgcatactgtaggtcattttttttgcttctggctacctgtttgaaggggagagagggaaaatcaagtggtattttccagcactttgtatgattttggatgagttgtacacccaaggattctgttctgcaactccatcctcctgtgtcactgaatatcaactctgaaagagcaaacctaacaggagaaaggacaaccaggatgaggatgtcaccaactgaattaaacttaagtccagaagcctcctgttggccttggaatatggccaaggctctctctgtccctgtaaaagagaggggcaaatagagagtctccaagagaacgccctcatgctcagcacatatttgcatgggagggggagatgggtgggaggagatgaaaatatcagcttttcttattcctttttattccttttaaaatggtatgccaacttaagtatttacagggtggcccaaatagaacaagatgcactcgctgtgattttaagacaagctgtataaacagaactccactgcaagagggggggccgggccaggagaatctccgcttgtccaagacaggggcctaaggagggtctccacactgctgctaggggctgttgcatttttttattagtagaaagtggaaaggcctcttctcaacttttttcccttgggctggagaatttagaatcagaagtttcctggagttttcaggctatcatatatactgtatcctgaaaggcaacataattcttccttccctccttttaaaattttgtgttcctttttgcagcaattactcactaaagggcttcattttagtccagatttttagtctggctgcacctaacttatgcctcgcttatttagcccgagatctggtctttttttttttttttttttttttttttccgtctccccaaagctttatctgtcttgactttttaaaaaagtttgggggcagattctgaattggctaaaagacatgcatttttaaaactagcaactcttatttctttcctttaaaaatacatagcattaaatcccaaatcctatttaaagacctgacagcttgagaaggtcactactgcatttataggaccttctggtggttctgctgttacgtttgaagtctgacaatccttgagaatctttgcatgcagaggaggtaagaggtattggattttcacagaggaagaacacagcgcagaatgaagggccaggcttactgagctgtccagtggagggctcatgggtgggacatggaaaagaaggcagcctaggccctggggagcccagtccactgagcaagcaagggactgagtgagccttttgcaggaaaaggctaagaaaaaggaaaaccattctaaaacacaacaagaaactgtccaaatgctttgggaactgtgtttattgcctataatgggtccccaaaatgggtaacctagacttcagagagaatgagcagagagcaaaggagaaatctggctgtccttccattttcattctgttatctcaggtgagctggtagaggggagacattagaaaaaaatgaaacaacaaaacaattactaatgaggtacgctgaggcctgggagtctcttgactccactacttaattccgtttagtgagaaacctttcaattttcttttattagaagggccagcttactgttggtggcaaaattgccaacataagttaatagaaagttggccaatttcaccccattttctgtggtttgggctccacattgcaatgttcaatgccacgtgctgctgacaccgaccggagtactagccagcacaaaaggcagggtagcctgaattgctttctgctctttacatttcttttaaaataagcatttagtgctcagtccctactgagtactctttctctcccctcctctgaatttaattctttcaacttgcaatttgcaaggattacacatttcactgtgatgtatattgtgttgcaaaaaaaaaaaaaaagtgtctttgtttaaaattacttggtttgtgaatccatcttgctttttccccattggaactagtcattaacccatctctgaactggtagaaaaacatctgaagagctagtctatcagcatctgacaggtgaattggatggttctcagaaccatttcacccagacagcctgtttctatcctgtttaataaattagtttgggttctctacatgcataacaaaccctgctccaatctgtcacataaaagtctgtgacttgaagtttagtcagcacccccaccaaactttatttttctatgtgttttttgcaacatatgagtgttttgaaaataaagtacccatgtctttattagattta

SEQ ID NO: 2819 - DNA, 3271 bp, Homo sapiens
  source 1..3271: mol_type = genomic DNA
ccgggcgggtgcattcaggccaaggcggggccgccgggatgctcagggttccggagccgcggcccggggaggcgaaagcggagggggccgcgccgccgaccccgtccaagccgctcacgtccttcctcatccaggacatcctgcgggacggcgcgcagcggcaaggcggccgcacgagcagccagagacagcgcgacccggagccggagccagagccagagccagagggaggacgcagccgcgccggggcgcagaacgaccagctgagcaccgggccccgcgccgcgccggaggaggccgagacgctggcagagaccgagccagaaaggcacttggggtcttatctgttggactctgaaaacacttcaggcgcccttccaaggcttccccaaacccctaagcagccgcagaagcgctcccgagctgccttctcccacactcaggtgatcgagttggagaggaagttcagccatcagaagtacctgtcggcccctgaacgggcccacctggccaagaacctcaagctcacggagacccaagtgaagatatggttccagaacagacgctataagactaagcgaaagcagctctcctcggagctgggagacttggagaagcactcctctttgccggccctgaaagaggaggccttctcccgggcctccctggtctccgtgtataacagctatccttactacccatacctgtactgcgtgggcagctggagcccagctttttggtaatgccagctcaggtgacaaccattatgatcaaaaactgccttccccagggtgtctctatgaaaagcacaaggggccaaggtcagggagcaagaggtgtgcacaccaaagctattggagatttgcgtggaaatctcagattcttcactggtgagacaatgaaacaacagagacagtgaaagttttaatacctaagtcattcctccagtgcatactgtaggtcattttttttgcttctggctacctgtttgaaggggagagagggaaaatcaagtggtattttccagcactttgtatgattttggatgagttgtacacccaaggattctgttctgcaactccatcctcctgtgtcactgaatatcaactctgaaagagcaaacctaacaggagaaaggacaaccaggatgaggatgtcaccaactgaattaaacttaagtccagaagcctcctgttggccttggaatatggccaaggctctctctgtccctgtaaaagagaggggcaaatagagagtctccaagagaacgccctcatgctcagcacatatttgcatgggagggggagatgggtgggaggagatgaaaatatcagcttttcttattcctttttattccttttaaaatggtatgccaacttaagtatttacagggtggcccaaatagaacaagatgcactcgctgtgattttaagacaagctgtataaacagaactccactgcaagagggggggccgggccaggagaatctccgcttgtccaagacaggggcctaaggagggtctccacactgctgctaggggctgttgcatttttttattagtagaaagtggaaaggcctcttctcaacttttttcccttgggctggagaatttagaatcagaagtttcctggagttttcaggctatcatatatactgtatcctgaaaggcaacataattcttccttccctccttttaaaattttgtgttcctttttgcagcaattactcactaaagggcttcattttagtccagatttttagtctggctgcacctaacttatgcctcgcttatttagcccgagatctggtctttttttttttttttttttttttttttccgtctccccaaagctttatctgtcttgactttttaaaaaagtttgggggcagattctgaattggctaaaagacatgcatttttaaaactagcaactcttatttctttcctttaaaaatacatagcattaaatcccaaatcctatttaaagacctgacagcttgagaaggtcactactgcatttataggaccttctggtggttctgctgttacgtttgaagtctgacaatccttgagaatctttgcatgcagaggaggtaagaggtattggattttcacagaggaagaacacagcgcagaatgaagggccaggcttactgagctgtccagtggagggctcatgggtgggacatggaaaagaaggcagcctaggccctggggagcccagtccactgagcaagcaagggactgagtgagccttttgcaggaaaaggctaagaaaaaggaaaaccattctaaaacacaacaagaaactgtccaaatgctttgggaactgtgtttattgcctataatgggtccccaaaatgggtaacctagacttcagagagaatgagcagagagcaaaggagaaatctggctgtccttccattttcattctgttatctcaggtgagctggtagaggggagacattagaaaaaaatgaaacaacaaaacaattactaatgaggtacgctgaggcctgggagtctcttgactccactacttaattccgtttagtgagaaacctttcaattttcttttattagaagggccagcttactgttggtggcaaaattgccaacataagttaatagaaagttggccaatttcaccccattttctgtggtttgggctccacattgcaatgttcaatgccacgtgctgctgacaccgaccggagtactagccagcacaaaaggcagggtagcctgaattgctttctgctctttacatttcttttaaaataagcatttagtgctcagtccctactgagtactctttctctcccctcctctgaatttaattctttcaacttgcaatttgcaaggattacacatttcactgtgatgtatattgtgttgcaaaaaaaaaaaaaaagtgtctttgtttaaaattacttggtttgtgaatccatcttgctttttccccattggaactagtcattaacccatctctgaactggtagaaaaacatctgaagagctagtctatcagcatctgacaggtgaattggatggttctcagaaccatttcacccagacagcctgtttctatcctgtttaataaattagtttgggttctctacatgcataacaaaccctgctccaatctgtcacataaaagtctgtgacttgaagtttagtcagcacccccaccaaactttatttttctatgtgttttttgcaacatatgagtgttttgaaaataaagtacccatgtctttattagattta

SEQ ID NO: 2820 - DNA, 713 bp, Homo sapiens
  source 1..713: mol_type = genomic DNA
atgctcagggttccggagccgcggcccggggaggccgagacgctggcagagaccgagccagaaaggcacttggggtcttatctgttggactctgaaaacacttcaggcgcccttccaaggcttccccaaacccctaagcagccgcagaagcgctcccgagctgccttctcccacactcaggtgatcgagttggagaggaagttcagccatcagaagtacctgtcggcccctgaacgggcccacctggccaagaacctcaagctcacggagacccaagtgaagatatggttccagaacagacgctataagactaagcgaaagcagctctcctcggagctgggagacttggagaagcactcctctttgccggccctgaaagaggaggccttctcccgggcctccctggtctccgtgtataacagctatccttactacccatacctgtactgcgtgggcagctggagcccagctttttggtaatgccagctcaggtgacaaccattatgatcaaaaactgccttccccagggtgtctctatgaaaagcacaaggggccaaggtcagggagcaagaggtgtgcacaccaaagctattggagatttgcgtggaaatctcagattcttcactggtgagacaatgaaacaacagagacagtgaaagttttaatacctaagtcattcctccagtgcatactgtaggtcattttttttgctt

SEQ ID NO: 2821 - DNA, 6088 bp, Homo sapiens
  source 1..6088: mol_type = genomic DNA
cttctggtgtgagactctgtaggtttcattactccttttgggtcctgattaaatcctgttgactcaagaccttagagcatttactggtaaagtctctgactgcgcgattttttttttgcattttagttccttaaatattttctcactgcttcctactaaaggacggacagagcatttgttcttcagccacatactttccttccactggccagcattctcctctattagactagaactgtggataaacctcagaaaatggccacccagcagaaagcctctgacgagaggatctcccagtttgatcacaatttgctgccagagctgtctgctcttctgggcctagatgcagttcagttggcaaaggaactagaagaagaggagcagaaggagcgagcaaaaatgcagaaaggctacaactctcaaatgcgcagtgaagcaaaaaggttaaagacttttgtgacttatgagccgtacagctcatggataccacaggagatggcggccgctgggttttacttcactggggtaaaatctgggattcagtgcttctgctgtagcctaatcctctttggtgccggcctcacgagactccccatagaagaccacaagaggtttcatccagattgtgggttccttttgaacaaggatgttggtaacattgccaagtacgacataagggtgaagaatctgaagagcaggctgagaggaggtaaaatgaggtaccaagaagaggaggctagacttgcgtccttcaggaactggccattttatgtccaagggatatccccttgtgtgctctcagaggctggctttgtctttacaggtaaacaggacacggtacagtgtttttcctgtggtggatgtttaggaaattgggaagaaggagatgatccttggaaggaacatgccaaatggttccccaaatgtgaatttcttcggagtaagaaatcctcagaggaaattacccagtatattcaaagctacaagggatttgttgacataacgggagaacattttgtgaattcctgggtccagagagaattacctatggcatcagcttattgcaatgacagcatctttgcttacgaagaactacggctggactcttttaaggactggccccgggaatcagctgtgggagttgcagcactggccaaagcaggtcttttctacacaggtataaaggacatcgtccagtgcttttcctgtggagggtgtttagagaaatggcaggaaggtgatgacccattagacgatcacaccagatgttttcccaattgtccatttctccaaaatatgaagtcctctgcggaagtgactccagaccttcagagccgtggtgaactttgtgaattactggaaaccacaagtgaaagcaatcttgaagattcaatagcagttggtcctatagtgccagaaatggcacagggtgaagcccagtggtttcaagaggcaaagaatctgaatgagcagctgagagcagcttataccagcgccagtttccgccacatgtctttgcttgatatctcttccgatctggccacggaccacttgctgggctgtgatctgtctattgcttcaaaacacatcagcaaacctgtgcaagaacctctggtgctgcctgaggtctttggcaacttgaactctgtcatgtgtgtggagggtgaagctggaagtggaaagacggtcctcctgaagaaaatagcttttctgtgggcatctggatgctgtcccctgttaaacaggttccagctggttttctacctctcccttagttccaccagaccagacgaggggctggccagtatcatctgtgaccagctcctagagaaagaaggatctgttactgaaatgtgcgtgaggaacattatccagcagttaaagaatcaggtcttattccttttagatgactacaaagaaatatgttcaatccctcaagtcataggaaaactgattcaaaaaaaccacttatcccggacctgcctattgattgctgtccgtacaaacagggccagggacatccgccgatacctagagaccattctagagatcaaagcatttcccttttataatactgtctgtatattacggaagctcttttcacataatatgactcgtctgcgaaagtttatggtttactttggaaagaaccaaagtttgcagaagatacagaaaactcctctctttgtggcggcgatctgtgctcattggtttcagtatccttttgacccatcctttgatgatgtggctgttttcaagtcctatatggaacgcctttccttaaggaacaaagcgacagctgaaattctcaaagcaactgtgtcctcctgtggtgagctggccttgaaagggtttttttcatgttgctttgagtttaatgatgatgatctcgcagaagcaggggttgatgaagatgaagatctaaccatgtgcttgatgagcaaatttacagcccagagactaagaccattctaccggtttttaagtcctgccttccaagaatttcttgcggggatgaggctgattgaactcctggattcagataggcaggaacatcaagatttgggactgtatcatttgaaacaaatcaactcacccatgatgactgtaagcgcctacaacaattttttgaactatgtctccagcctcccttcaacaaaagcagggcccaaaattgtgtctcatttgctccatttagtggataacaaagagtcattggagaatatatctgaaaatgatgactacttaaagcaccagccagaaatttcactgcagatgcagttacttaggggattgtggcaaatttgtccacaagcttacttttcaatggtttcagaacatttactggttcttgccctgaaaactgcttatcaaagcaacactgttgctgcgtgttctccatttgttttgcaattccttcaagggagaacactgactttgggtgcgcttaacttacagtactttttcgaccacccagaaagcttgtcattgttgaggagcatccacttcccaatacgaggaaataagacatcacccagagcacatttttcagttctggaaacatgttttgacaaatcacaggtgccaactatagatcaggactatgcttctgcctttgaacctatgaatgaatgggagcgaaatttagctgaaaaagaggataatgtaaagagctatatggatatgcagcgcagggcatcaccagaccttagtactggctattggaaactttctccaaagcagtacaagattccctgtctagaagtcgatgtgaatgatattgatgttgtaggccaggatatgcttgagattctaatgacagttttctcagcttcacagcgcatcgaactccatttaaaccacagcagaggctttatagaaagcatccgcccagctcttgagctgtctaaggcctctgtcaccaagtgctccataagcaagttggaactcagcgcagccgaacaggaactgcttctcaccctgccttccctggaatctcttgaagtctcagggacaatccagtcacaagaccaaatctttcctaatctggataagttcctgtgcctgaaagaactgtctgtggatctggagggcaatataaatgttttttcagtcattcctgaagaatttccaaacttccaccatatggagaaattattgatccaaatttcagctgagtatgatccttccaaactagtaaaattaattcaaaattctccaaaccttcatgttttccatctgaagtgtaacttcttttcggattttgggtctctcatgactatgcttgtttcctgtaagaaactcacagaaattaagttttcggattcattttttcaagccgtcccatttgttgccagtttgccaaattttatttctctgaagatattaaatcttgaaggccagcaatttcctgatgaggaaacatcagaaaaatttgcctacattttaggttctcttagtaacctggaagaattgatccttcctactggggatggaatttatcgagtggccaaactgatcatccagcagtgtcagcagcttcattgtctccgagtcctctcatttttcaagactttgaatgatgacagcgtggtggaaattgccaaagtagcaatcagtggaggtttccagaaacttgagaacctaaagctttcaatcaatcacaagattacagaggaaggatacagaaatttctttcaagcactggacaacatgccaaacttgcaggagttggacatctccaggcatttcacagagtgtatcaaagctcaggccacaacagtcaagtctttgagtcaatgtgtgttacgactaccaaggctcattagactgaacatgttaagttggctcttggatgcagatgatattgcattgcttaatgtcatgaaagaaagacatcctcaatctaagtacttaactattctccagaaatggatactgccgttctctccaatcattcagaaataaaagattcagctaaaaactgctgaatcaataatttgtcttggggcatattgaggatgtaaaaaaagttgttgattaatgctaaaaaccaaattatccaaaattattttattaaatattgcatacaaaagaaaatgtgtaaggcttgctaaaaaacaaaacaaaacaaaacacagtcctgcatactcaccaccaagctcaagaaataaatcatcaccaatacctttgaggtccctgagtaatccaccccagctaaaggcaaacccttcaatcaagtttatacagcaaaccctccattgtccatggtcaacagggaaggggttggggacaggtctgccaatctatctaaaagccacaatatggaagaagtattcaatttatataataaatggctaacttaacggttgaatcactttcatacatggatgaaacgggtttaacacaggatccacatgaatcttctgtgggccaagagatgttccttaatccttgtagaacctgttttctatattgaactagctttggtacagtagagttaacttactttccatttatccactgccaatataaagaggaaacaggggttagggaaaaatgacttcattccagaggcttctcagagttcaacatatgctataatttagaattttcttatgaatccactctacttgggtagaaaatattttatctctagtgattgcatattatttccatatcatagtatttcatagtattatatttgatatgagtgtctatatcaatgtcagtgtccagaatttcgttcctaccagttaagtagttttctgaacggccagaagaccattcgaaattcatgatactactataagttggtaaacaaccatacttttatcctcatttttattctcactaagaaaaaagtcaactcccctccccttgcccaagtatgaaatatagggacagtatgtatggtgtggtctcatttgtttagaaaaccacttatgactgggtgcggtggctcacacctgtaatcccagcactttgggaggctgaggcgggcgaatcatttgaggtgaggaattcgagaccagcctggccagcatggtgaaaccccatctctactaaaaatacaaaaattagccaggtgtggtggcacatgcctgtagtcccagccactagggcggctgagacgcaagacttgcttgaacccgggaggcagaggttgcagtgagccaagatggcgccactgcattccagcctgggcaacagagcaagaccctgtctgtctcaaaacaaaaaacaaaaccacttatattgctagctacattaagaatttctgaatatgttactgagcttgcttgtggtaaccatttataatatcagaaagtatatgtacaccaaaacatgttgaacatccatgttgtacaactgaaatataaataattttgtcaattatacctaaataaaactggaaaaaaatttctggaagtttatatctaaaaatgttaatagtgcgtacctctaggaagtgggcctggaagccattcttacttttcagtctctcccattctgtactgttttttgttttactttcgtgcctgcattatttttctatttaaaacaaaaataaatctagtttagcact

SEQ ID NO: 2822 - DNA, 3777 bp, Homo sapiens
  source 1..3777: mol_type = genomic DNA
atgccacttcatattggggacttcgtctgggattccaaggtgcattcattgcaaagttccttaaatattttctcactgcttcctactaaaggacggacagagcatttgttcttcagccacatactttccttccactggccagcattctcctctattagactagaactgtggataaacctcagatgtgaatttcttcggagtaagaaatcctcagaggaaattacccagtatattcaaagctacaagggatttgttgacataacgggagaacattttgtgaattcctgggtccagagagaattacctatggcatcagcttattgcaatgacagcatctttgcttacgaagaactacggctggactcttttaaggactggccccgggaatcagctgtgggagttgcagcactggccaaagcaggtcttttctacacaggtataaaggacatcgtccagtgcttttcctgtggagggtgtttagagaaatggcaggaaggtgatgacccattagacgatcacaccagatgttttcccaattgtccatttctccaaaatatgaagtcctctgcggaagtgactccagaccttcagagccgtggtgaactttgtgaattactggaaaccacaagtgaaagcaatcttgaagattcaatagcagttggtcctatagtgccagaaatggcacagggtgaagcccagtggtttcaagaggcaaagaatctgaatgagcagctgagagcagcttataccagcgccagtttccgccacatgtctttgcttgatatctcttccgatctggccacggaccacttgctgggctgtgatctgtctattgcttcaaaacacatcagcaaacctgtgcaagaacctctggtgctgcctgaggtctttggcaacttgaactctgtcatgtgtgtggagggtgaagctggaagtggaaagacggtcctcctgaagaaaatagcttttctgtgggcatctggatgctgtcccctgttaaacaggttccagctggttttctacctctcccttagttccaccagaccagacgaggggctggccagtatcatctgtgaccagctcctagagaaagaaggatctgttactgaaatgtgcgtgaggaacattatccagcagttaaagaatcaggtcttattccttttagatgactacaaagaaatatgttcaatccctcaagtcataggaaaactgattcaaaaaaaccacttatcccggacctgcctattgattgctgtccgtacaaacagggccagggacatccgccgatacctagagaccattctagagatcaaagcatttcccttttataatactgtctgtatattacggaagctcttttcacataatatgactcgtctgcgaaagtttatggtttactttggaaagaaccaaagtttgcagaagatacagaaaactcctctctttgtggcggcgatctgtgctcattggtttcagtatccttttgacccatcctttgatgatgtggctgttttcaagtcctatatggaacgcctttccttaaggaacaaagcgacagctgaaattctcaaagcaactgtgtcctcctgtggtgagctggccttgaaagggtttttttcatgttgctttgagtttaatgatgatgatctcgcagaagcaggggttgatgaagatgaagatctaaccatgtgcttgatgagcaaatttacagcccagagactaagaccattctaccggtttttaagtcctgccttccaagaatttcttgcggggatgaggctgattgaactcctggattcagataggcaggaacatcaagatttgggactgtatcatttgaaacaaatcaactcacccatgatgactgtaagcgcctacaacaattttttgaactatgtctccagcctcccttcaacaaaagcagggcccaaaattgtgtctcatttgctccatttagtggataacaaagagtcattggagaatatatctgaaaatgatgactacttaaagcaccagccagaaatttcactgcagatgcagttacttaggggattgtggcaaatttgtccacaagcttacttttcaatggtttcagaacatttactggttcttgccctgaaaactgcttatcaaagcaacactgttgctgcgtgttctccatttgttttgcaattccttcaagggagaacactgactttgggtgcgcttaacttacagtactttttcgaccacccagaaagcttgtcattgttgaggagcatccacttcccaatacgaggaaataagacatcacccagagcacatttttcagttctggaaacatgttttgacaaatcacaggtgccaactatagatcaggactatgcttctgcctttgaacctatgaatgaatgggagcgaaatttagctgaaaaagaggataatgtaaagagctatatggatatgcagcgcagggcatcaccagaccttagtactggctattggaaactttctccaaagcagtacaagattccctgtctagaagtcgatgtgaatgatattgatgttgtaggccaggatatgcttgagattctaatgacagttttctcagcttcacagcgcatcgaactccatttaaaccacagcagaggctttatagaaagcatccgcccagctcttgagctgtctaaggcctctgtcaccaagtgctccataagcaagttggaactcagcgcagccgaacaggaactgcttctcaccctgccttccctggaatctcttgaagtctcagggacaatccagtcacaagaccaaatctttcctaatctggataagttcctgtgcctgaaagaactgtctgtggatctggagggcaatataaatgttttttcagtcattcctgaagaatttccaaacttccaccatatggagaaattattgatccaaatttcagctgagtatgatccttccaaactagtaaaattaattcaaaattctccaaaccttcatgttttccatctgaagtgtaacttcttttcggattttgggtctctcatgactatgcttgtttcctgtaagaaactcacagaaattaagttttcggattcattttttcaagccgtcccatttgttgccagtttgccaaattttatttctctgaagatattaaatcttgaaggccagcaatttcctgatgaggaaacatcagaaaaatttgcctacattttaggttctcttagtaacctggaagaattgatccttcctactggggatggaatttatcgagtggccaaactgatcatccagcagtgtcagcagcttcattgtctccgagtcctctcatttttcaagactttgaatgatgacagcgtggtggaaattgccaaagtagcaatcagtggaggtttccagaaacttgagaacctaaagctttcaatcaatcacaagattacagaggaaggatacagaaatttctttcaagcactggacaacatgccaaacttgcaggagttggacatctccaggcatttcacagagtgtatcaaagctcaggccacaacagtcaagtctttgagtcaatgtgtgttacgactaccaaggctcattagactgaacatgttaagttggctcttggatgcagatgatattgcattgcttaatgtcatgaaagaaagacatcctcaatctaagtacttaactattctccagaaatggatactgccgttctctccaatcattcagaaataaaagattcagctaaaaactgctgaatcaataatttgtcttggggcatattga

SEQ ID NO: 2823 - DNA, 6124 bp, Homo sapiens
  source 1..6124: mol_type = genomic DNA
acaaaaggtcctgtgctcacctgggacccttctggacgttgccctgtgtacctcttcgactgcctgttcatctacgacgaaccccgggtattgaccccagacaacaatgccacttcatattggggacttcgtctgggattccaaggtgcattcattgcaaagttccttaaatattttctcactgcttcctactaaaggacggacagagcatttgttcttcagccacatactttccttccactggccagcattctcctctattagactagaactgtggataaacctcagaaaatggccacccagcagaaagcctctgacgagaggatctcccagtttgatcacaatttgctgccagagctgtctgctcttctgggcctagatgcagttcagttggcaaaggaactagaagaagaggagcagaaggagcgagcaaaaatgcagaaaggctacaactctcaaatgcgcagtgaagcaaaaaggttaaagacttttgtgacttatgagccgtacagctcatggataccacaggagatggcggccgctgggttttacttcactggggtaaaatctgggattcagtgcttctgctgtagcctaatcctctttggtgccggcctcacgagactccccatagaagaccacaagaggtttcatccagattgtgggttccttttgaacaaggatgttggtaacattgccaagtacgacataagggtgaagaatctgaagagcaggctgagaggaggtaaaatgaggtaccaagaagaggaggctagacttgcgtccttcaggaactggccattttatgtccaagggatatccccttgtgtgctctcagaggctggctttgtctttacaggtaaacaggacacggtacagtgtttttcctgtggtggatgtttaggaaattgggaagaaggagatgatccttggaaggaacatgccaaatggttccccaaatgtgaatttcttcggagtaagaaatcctcagaggaaattacccagtatattcaaagctacaagggatttgttgacataacgggagaacattttgtgaattcctgggtccagagagaattacctatggcatcagcttattgcaatgacagcatctttgcttacgaagaactacggctggactcttttaaggactggccccgggaatcagctgtgggagttgcagcactggccaaagcaggtcttttctacacaggtataaaggacatcgtccagtgcttttcctgtggagggtgtttagagaaatggcaggaaggtgatgacccattagacgatcacaccagatgttttcccaattgtccatttctccaaaatatgaagtcctctgcggaagtgactccagaccttcagagccgtggtgaactttgtgaattactggaaaccacaagtgaaagcaatcttgaagattcaatagcagttggtcctatagtgccagaaatggcacagggtgaagcccagtggtttcaagaggcaaagaatctgaatgagcagctgagagcagcttataccagcgccagtttccgccacatgtctttgcttgatatctcttccgatctggccacggaccacttgctgggctgtgatctgtctattgcttcaaaacacatcagcaaacctgtgcaagaacctctggtgctgcctgaggtctttggcaacttgaactctgtcatgtgtgtggagggtgaagctggaagtggaaagacggtcctcctgaagaaaatagcttttctgtgggcatctggatgctgtcccctgttaaacaggttccagctggttttctacctctcccttagttccaccagaccagacgaggggctggccagtatcatctgtgaccagctcctagagaaagaaggatctgttactgaaatgtgcgtgaggaacattatccagcagttaaagaatcaggtcttattccttttagatgactacaaagaaatatgttcaatccctcaagtcataggaaaactgattcaaaaaaaccacttatcccggacctgcctattgattgctgtccgtacaaacagggccagggacatccgccgatacctagagaccattctagagatcaaagcatttcccttttataatactgtctgtatattacggaagctcttttcacataatatgactcgtctgcgaaagtttatggtttactttggaaagaaccaaagtttgcagaagatacagaaaactcctctctttgtggcggcgatctgtgctcattggtttcagtatccttttgacccatcctttgatgatgtggctgttttcaagtcctatatggaacgcctttccttaaggaacaaagcgacagctgaaattctcaaagcaactgtgtcctcctgtggtgagctggccttgaaagggtttttttcatgttgctttgagtttaatgatgatgatctcgcagaagcaggggttgatgaagatgaagatctaaccatgtgcttgatgagcaaatttacagcccagagactaagaccattctaccggtttttaagtcctgccttccaagaatttcttgcggggatgaggctgattgaactcctggattcagataggcaggaacatcaagatttgggactgtatcatttgaaacaaatcaactcacccatgatgactgtaagcgcctacaacaattttttgaactatgtctccagcctcccttcaacaaaagcagggcccaaaattgtgtctcatttgctccatttagtggataacaaagagtcattggagaatatatctgaaaatgatgactacttaaagcaccagccagaaatttcactgcagatgcagttacttaggggattgtggcaaatttgtccacaagcttacttttcaatggtttcagaacatttactggttcttgccctgaaaactgcttatcaaagcaacactgttgctgcgtgttctccatttgttttgcaattccttcaagggagaacactgactttgggtgcgcttaacttacagtactttttcgaccacccagaaagcttgtcattgttgaggagcatccacttcccaatacgaggaaataagacatcacccagagcacatttttcagttctggaaacatgttttgacaaatcacaggtgccaactatagatcaggactatgcttctgcctttgaacctatgaatgaatgggagcgaaatttagctgaaaaagaggataatgtaaagagctatatggatatgcagcgcagggcatcaccagaccttagtactggctattggaaactttctccaaagcagtacaagattccctgtctagaagtcgatgtgaatgatattgatgttgtaggccaggatatgcttgagattctaatgacagttttctcagcttcacagcgcatcgaactccatttaaaccacagcagaggctttatagaaagcatccgcccagctcttgagctgtctaaggcctctgtcaccaagtgctccataagcaagttggaactcagcgcagccgaacaggaactgcttctcaccctgccttccctggaatctcttgaagtctcagggacaatccagtcacaagaccaaatctttcctaatctggataagttcctgtgcctgaaagaactgtctgtggatctggagggcaatataaatgttttttcagtcattcctgaagaatttccaaacttccaccatatggagaaattattgatccaaatttcagctgagtatgatccttccaaactagtaaaattaattcaaaattctccaaaccttcatgttttccatctgaagtgtaacttcttttcggattttgggtctctcatgactatgcttgtttcctgtaagaaactcacagaaattaagttttcggattcattttttcaagccgtcccatttgttgccagtttgccaaattttatttctctgaagatattaaatcttgaaggccagcaatttcctgatgaggaaacatcagaaaaatttgcctacattttaggttctcttagtaacctggaagaattgatccttcctactggggatggaatttatcgagtggccaaactgatcatccagcagtgtcagcagcttcattgtctccgagtcctctcatttttcaagactttgaatgatgacagcgtggtggaaattgccaaagtagcaatcagtggaggtttccagaaacttgagaacctaaagctttcaatcaatcacaagattacagaggaaggatacagaaatttctttcaagcactggacaacatgccaaacttgcaggagttggacatctccaggcatttcacagagtgtatcaaagctcaggccacaacagtcaagtctttgagtcaatgtgtgttacgactaccaaggctcattagactgaacatgttaagttggctcttggatgcagatgatattgcattgcttaatgtcatgaaagaaagacatcctcaatctaagtacttaactattctccagaaatggatactgccgttctctccaatcattcagaaataaaagattcagctaaaaactgctgaatcaataatttgtcttggggcatattgaggatgtaaaaaaagttgttgattaatgctaaaaaccaaattatccaaaattattttattaaatattgcatacaaaagaaaatgtgtaaggcttgctaaaaaacaaaacaaaacaaaacacagtcctgcatactcaccaccaagctcaagaaataaatcatcaccaatacctttgaggtccctgagtaatccaccccagctaaaggcaaacccttcaatcaagtttatacagcaaaccctccattgtccatggtcaacagggaaggggttggggacaggtctgccaatctatctaaaagccacaatatggaagaagtattcaatttatataataaatggctaacttaacggttgaatcactttcatacatggatgaaacgggtttaacacaggatccacatgaatcttctgtgggccaagagatgttccttaatccttgtagaacctgttttctatattgaactagctttggtacagtagagttaacttactttccatttatccactgccaatataaagaggaaacaggggttagggaaaaatgacttcattccagaggcttctcagagttcaacatatgctataatttagaattttcttatgaatccactctacttgggtagaaaatattttatctctagtgattgcatattatttccatatcatagtatttcatagtattatatttgatatgagtgtctatatcaatgtcagtgtccagaatttcgttcctaccagttaagtagttttctgaacggccagaagaccattcgaaattcatgatactactataagttggtaaacaaccatacttttatcctcatttttattctcactaagaaaaaagtcaactcccctccccttgcccaagtatgaaatatagggacagtatgtatggtgtggtctcatttgtttagaaaaccacttatgactgggtgcggtggctcacacctgtaatcccagcactttgggaggctgaggcgggcgaatcatttgaggtgaggaattcgagaccagcctggccagcatggtgaaaccccatctctactaaaaatacaaaaattagccaggtgtggtggcacatgcctgtagtcccagccactagggcggctgagacgcaagacttgcttgaacccgggaggcagaggttgcagtgagccaagatggcgccactgcattccagcctgggcaacagagcaagaccctgtctgtctcaaaacaaaaaacaaaaccacttatattgctagctacattaagaatttctgaatatgttactgagcttgcttgtggtaaccatttataatatcagaaagtatatgtacaccaaaacatgttgaacatccatgttgtacaactgaaatataaataattttgtcaattatacctaaataaaactggaaaaaaatttctggaagtttatatctaaaaatgttaatagtgcgtacctctaggaagtgggcctggaagccattcttacttttcagtctctcccattctgtactgttttttgttttactttcgtgcctgcattatttttctatttaaaacaaaaataaatctagtttagcact

SEQ ID NO: 2824 - DNA, 4543 bp, Homo sapiens
  source 1..4543: mol_type = genomic DNA
tggcacagatctccagaaacccttgtaatttcctgagtgacaggggtgatagaaacatcttttattagaatacttggtcttggttcctgacacaagagcttctaagacctttggaatctccaagtgataagagtgtatgacagtgagctaactggtggctgggatcctttagacaacttcaggatgggggctatcccctgaaagactaaggcatgattagaggtctgggatttgcagccccacgcctcgacctccagagagggtaaaagggctggagattgattaaccaccagttgccagtgatttaaccaatcatgcctaagtgatggcacctccattaaaaaataaaccacaggtttggagagctttcggtttggttaaccccaaccacataccaagaaggcgatgcacctcaaactgcatgaagacaaaaggtcctgtgctcacctgggacccttctggacgttgccctgtgtacctcttcgactgcctgttcatctacgacgaaccccgggtattgaccccagacaacaatgccacttcatattggggacttcgtctgggattccaaggtgcattcattgcaaagttccttaaatattttctcactgcttcctactaaaggacggacagagcatttgttcttcagccacatactttccttccactggccagcattctcctctattagactagaactgtggataaacctcagatgtgaatttcttcggagtaagaaatcctcagaggaaattacccagtatattcaaagctacaagggatttgttgacataacgggagaacattttgtgaattcctgggtccagagagaattacctatggcatcagcttattgcaatgacagcatctttgcttacgaagaactacggctggactcttttaaggactggccccgggaatcagctgtgggagttgcagcactggccaaagcaggtcttttctacacaggtataaaggacatcgtccagtgcttttcctgtggagggtgtttagagaaatggcaggaaggtgatgacccattagacgatcacaccagatgttttcccaattgtccatttctccaaaatatgaagtcctctgcggaagtgactccagaccttcagagccgtggtgaactttgtgaattactggaaaccacaagtgaaagcaatcttgaagattcaatagcagttggtcctatagtgccagaaatggcacagggtgaagcccagtggtttcaagaggcaaagaatctgaatgagcagctgagagcagcttataccagcgccagtttccgccacatgtctttgcttgatatctcttccgatctggccacggaccacttgctgggctgtgatctgtctattgcttcaaaacacatcagcaaacctgtgcaagaacctctggtgctgcctgaggtctttggcaacttgaactctgtcatgtgtgtggagggtgaagctggaagtggaaagacggtcctcctgaagaaaatagcttttctgtgggcatctggatgctgtcccctgttaaacaggttccagctggttttctacctctcccttagttccaccagaccagacgaggggctggccagtatcatctgtgaccagctcctagagaaagaaggatctgttactgaaatgtgcgtgaggaacattatccagcagttaaagaatcaggtcttattccttttagatgactacaaagaaatatgttcaatccctcaagtcataggaaaactgattcaaaaaaaccacttatcccggacctgcctattgattgctgtccgtacaaacagggccagggacatccgccgatacctagagaccattctagagatcaaagcatttcccttttataatactgtctgtatattacggaagctcttttcacataatatgactcgtctgcgaaagtttatggtttactttggaaagaaccaaagtttgcagaagatacagaaaactcctctctttgtggcggcgatctgtgctcattggtttcagtatccttttgacccatcctttgatgatgtggctgttttcaagtcctatatggaacgcctttccttaaggaacaaagcgacagctgaaattctcaaagcaactgtgtcctcctgtggtgagctggccttgaaagggtttttttcatgttgctttgagtttaatgatgatgatctcgcagaagcaggggttgatgaagatgaagatctaaccatgtgcttgatgagcaaatttacagcccagagactaagaccattctaccggtttttaagtcctgccttccaagaatttcttgcggggatgaggctgattgaactcctggattcagataggcaggaacatcaagatttgggactgtatcatttgaaacaaatcaactcacccatgatgactgtaagcgcctacaacaattttttgaactatgtctccagcctcccttcaacaaaagcagggcccaaaattgtgtctcatttgctccatttagtggataacaaagagtcattggagaatatatctgaaaatgatgactacttaaagcaccagccagaaatttcactgcagatgcagttacttaggggattgtggcaaatttgtccacaagcttacttttcaatggtttcagaacatttactggttcttgccctgaaaactgcttatcaaagcaacactgttgctgcgtgttctccatttgttttgcaattccttcaagggagaacactgactttgggtgcgcttaacttacagtactttttcgaccacccagaaagcttgtcattgttgaggagcatccacttcccaatacgaggaaataagacatcacccagagcacatttttcagttctggaaacatgttttgacaaatcacaggtgccaactatagatcaggactatgcttctgcctttgaacctatgaatgaatgggagcgaaatttagctgaaaaagaggataatgtaaagagctatatggatatgcagcgcagggcatcaccagaccttagtactggctattggaaactttctccaaagcagtacaagattccctgtctagaagtcgatgtgaatgatattgatgttgtaggccaggatatgcttgagattctaatgacagttttctcagcttcacagcgcatcgaactccatttaaaccacagcagaggctttatagaaagcatccgcccagctcttgagctgtctaaggcctctgtcaccaagtgctccataagcaagttggaactcagcgcagccgaacaggaactgcttctcaccctgccttccctggaatctcttgaagtctcagggacaatccagtcacaagaccaaatctttcctaatctggataagttcctgtgcctgaaagaactgtctgtggatctggagggcaatataaatgttttttcagtcattcctgaagaatttccaaacttccaccatatggagaaattattgatccaaatttcagctgagtatgatccttccaaactagtaaaattaattcaaaattctccaaaccttcatgttttccatctgaagtgtaacttcttttcggattttgggtctctcatgactatgcttgtttcctgtaagaaactcacagaaattaagttttcggattcattttttcaagccgtcccatttgttgccagtttgccaaattttatttctctgaagatattaaatcttgaaggccagcaatttcctgatgaggaaacatcagaaaaatttgcctacattttaggttctcttagtaacctggaagaattgatccttcctactggggatggaatttatcgagtggccaaactgatcatccagcagtgtcagcagcttcattgtctccgagtcctctcatttttcaagactttgaatgatgacagcgtggtggaaattgccaaagtagcaatcagtggaggtttccagaaacttgagaacctaaagctttcaatcaatcacaagattacagaggaaggatacagaaatttctttcaagcactggacaacatgccaaacttgcaggagttggacatctccaggcatttcacagagtgtatcaaagctcaggccacaacagtcaagtctttgagtcaatgtgtgttacgactaccaaggctcattagactgaacatgttaagttggctcttggatgcagatgatattgcattgcttaatgtcatgaaagaaagacatcctcaatctaagtacttaactattctccagaaatggatactgccgttctctccaatcattcagaaataaaagattcagctaaaaactgctgaatcaataatttgtcttggggcatattgaggatgtaaaaaaagttgttgattaatgctaaaaaccaaattatccaaaattattttattaaatattgcatacaaaagaaaatgtgtaaggcttgctaaaaaacaaaacaaaacaaaacacagtcctgcatactcaccaccaagctcaagaaataaatcatcaccaatacctttgaggtccctgagtaatccaccccagctaaaggcaaacccttcaatcaagtttatacagca

SEQ ID NO: 2825 - DNA, 1193 bp, Homo sapiens
  source 1..1193: mol_type = genomic DNA
ctgggctccgcgccggggtccgagtcccacgaagccccggcccgagccgccggatgcccgcgcgcagcggggcccaggtcatgcagcctgggcccccatgccgtgcagctcgcacatatgtggggcagagcagccaccctgcccccagcagcagccgtccatcgtcagacgtgatcatttcctgaggcctcgagtgtgtcagggtgtttgtgcctcataacaacccacaggatggtcacccccgctttgcagatgaagaaaccaaagcagttttgccgacggatggggcaaaagaagcagcgaccagctagagcagggcagccacacagctcgtccgacgcagcccaggcacctgcagagcagccacacagctcgtccgatgcagcccaggcaccttgccccagggagcgctgcttgggaccgcccaccactccgggcccataccgcagcatctatttctcaagcccaaagggccaccttacccgactggggttggagttcttcgaccagccggcagtccccctggcccgggcatttctgggacaggtcctagtccggcgacttcctaatggcacagaactccgaggccgcatcgtggagaccgaggcatacctggggccagaggatgaagccgcccactcaaggggtggccggcagaccccccgcaaccgaggcatgttcatgaagccggggaccctgtacgtgtacatcatttacggcatgtacttctgcatgaacatctccagccagggggacggggcttgcgtcttgctgcgagcactggagcccctggaaggtctggagaccatgcgtcagcttcgcagcaccctccggaaaggcaccgccagccgtgtcctcaaggaccgcgagctctgcagtggcccctccaagctgtgccaggccctggccatcaacaagagctttgaccagagggacctggcacaggatgaagctgtatggctggagcgtggtcccctggagcccagtgagccggctgtagtggcagcagcccgggtgggcgtcggccatgcaggggagtgggcccggaaacccctccgcttctatgtccggggcagcccctgggtcagtgtggtcgacagagtggctgagcaggacacacaggcctgagcaaagggcctgcccagacaagattttttaattgtttaaaaaccgaataaatgttttatttctag

SEQ ID NO: 2826 - DNA, 1205 bp, Homo sapiens
  source 1..1205: mol_type = genomic DNA
cgcatcgggcccgggaatcggtccggacctggcggtgggcgctgggaagaggatccacctccacgtggcccgccccgccccgggggcgcagccagttcccggcgctcactgccccccttctcccggcttccgtccccttctgcgcaggcgccgctccgccccggtcctaggggtgcttccgtggtcggcggctgctgggctccgcgccggggtccgagtcccacgaagccccggcccgagccgccggatgcccgcgcgcagcggggcccagttttgccgacggatggggcaaaagaagcagcgaccagctagagcagggcagccacacagctcgtccgacgcagcccaggcacctgcagagcagccacacagctcgtccgatgcagcccaggcaccttgccccagggagcgctgcttgggaccgcccaccactccgggcccataccgcagcatctatttctcaagcccaaagggccaccttacccgactggggttggagttcttcgaccagccggcagtccccctggcccgggcatttctgggacaggtcctagtccggcgacttcctaatggcacagaactccgaggccgcatcgtggagaccgaggcatacctggggccagaggatgaagccgcccactcaaggggtggccggcagaccccccgcaaccgaggcatgttcatgaagccggggaccctgtacgtgtacatcatttacggcatgtacttctgcatgaacatctccagccagggggacggggcttgcgtcttgctgcgagcactggagcccctggaaggtctggagaccatgcgtcagcttcgcagcaccctccggaaaggcaccgccagccgtgtcctcaaggaccgcgagctctgcagtggcccctccaagctgtgccaggccctggccatcaacaagagctttgaccagagggacctggcacaggatgaagctgtatggctggagcgtggtcccctggagcccagtgagccggctgtagtggcagcagcccgggtgggcgtcggccatgcaggggagtgggcccggaaacccctccgcttctatgtccggggcagcccctgggtcagtgtggtcgacagagtggctgagcaggacacacaggcctgagcaaagggcctgcccagacaagattttttaattgtttaaaaaccgaataaatgttttatttctagaaaactgtgcc

SEQ ID NO: 2827 - DNA, 1028 bp, Homo sapiens
  source 1..1028: mol_type = genomic DNA
gtcacactcatctgagggctccagacacatggcctgtgcgtctgtcctgcccagcgtctcccacctgacgcggccaggtgcccagttgctcttcaaggccttttcagttttgccgacggatggggcaaaagaagcagcgaccagctagagcagggcagccacacagctcgtccgacgcagcccaggcacctgcagagcagccacacagctcgtccgatgcagcccaggcaccttgccccagggagcgctgcttgggaccgcccaccactccgggcccataccgcagcatctatttctcaagcccaaagggccaccttacccgactggggttggagttcttcgaccagccggcagtccccctggcccgggcatttctgggacaggtcctagtccggcgacttcctaatggcacagaactccgaggccgcatcgtggagaccgaggcatacctggggccagaggatgaagccgcccactcaaggggtggccggcagaccccccgcaaccgaggcatgttcatgaagccggggaccctgtacgtgtacatcatttacggcatgtacttctgcatgaacatctccagccagggggacggggcttgcgtcttgctgcgagcactggagcccctggaaggtctggagaccatgcgtcagcttcgcagcaccctccggaaaggcaccgccagccgtgtcctcaaggaccgcgagctctgcagtggcccctccaagctgtgccaggccctggccatcaacaagagctttgaccagagggacctggcacaggatgaagctgtatggctggagcgtggtcccctggagcccagtgagccggctgtagtggcagcagcccgggtgggcgtcggccatgcaggggagtgggcccggaaacccctccgcttctatgtccggggcagcccctgggtcagtgtggtcgacagagtggctgagcaggacacacaggcctgagcaaagggcctgcccagacaagattttttaattgtttaaaaaccgaataaatgttttatttct

SEQ ID NO: 2828 - DNA, 884 bp, Homo sapiens
  source 1..884: mol_type = genomic DNA
gtaggaccaggtgtcacactcatctgagggctccagacacatggcctgtgcgtctgtcctgcccagcgtctcccacctgacgcggccaggtgcccagttgctcttcaaggccttttcagttttgccgacggatggggcaaaagaagcagcgaccagctagagcagggcagccacacagctcgtccgacgcagcccaggcacctgcagagcagccacacagctcgtccgatgcagcccaggcaccttgccccagggagcgctgcttgggaccgcccaccactccgggcccataccgcagcatctatttctcaagcccaaagggccaccttacccgactggggttggagttcttcgaccagccggcagtccccctggcccgggcatttctgggacaggtcctagtccggcgacttcctaatggcacagaactccgaggccgcatcgtggagaccgaggcatacctggggccagaggatgaagccgcccactcaaggggtggccggcagaccccccgcaaccgaggcatgttcatgaagccggggaccctgtacgtgtacatcatttacggcatgtacttctgcatgaacatctccagccagggggacggggcttgcgtcttgctgcgagcactggagcccctggaaggtctggagaccatgcgtcagcttcgcagcaccctccggaaaggcaccgccagccgtgtcctcaaggaccgcgagctctgcagtggcccctccaagctgtgccaggccctggccatcaacaagagctttgaccagagggacctggcacaggatgaagctgtatggctggagcgtggtcccctggagcccagtgagccggctgtagtggcagcagcccgggtgggcgtcggccatgcaggg

SEQ ID NO: 2829 - DNA, 1665 bp, Homo sapiens
  source 1..1665: mol_type = genomic DNA
atgcacgcccactgcctgcccttccttctgcacgcctggtgggccctactccaggcgggtgctgcgacggtggccactgcgctcctgcgtacgcgggggcagccctcgtcgccatcccctctggcgtacatgctgagcctctaccgcgacccgctgccgagggcagacatcatccgcagcctacaggcagaagatgtggcagtggatgggcagaactggacgtttgcttttgacttctccttcctgagccaacaagaggatctggcatgggctgagctccggctgcagctgtccagccctgtggacctccccactgagggctcacttgccattgagattttccaccagccaaagcccgacacagagcaggcttcagacagctgcttagagcggtttcagatggacctattcactgtcactttgtcccaggtcaccttttccttgggcagcatggttttggaggtgaccaggcctctctccaagtggctgaagcaccctggggccctggagaagcagatgtccagggtagctggagagtgctggccgcggccccccacaccgcctgccaccaatgtgctccttatgctctactccaacctctcgcaggagcagaggcagctgggtgggtccaccttgctgtgggaagccgagagctcctggcgggcccaggagggacagctgtcctgggagtggggcaagaggcaccgtcgacatcacttgccagacagaagtcaactgtgtcggaaggtcaagttccaggtggacttcaacctgatcggatggggctcctggatcatctaccccaagcagtacaacgcctatcgctgtgagggcgagtgtcctaatcctgttggggaggagtttcatccgaccaaccatgcatacatccagagtctgctgaaacgttaccagccccaccgagtcccttccacttgttgtgccccagtgaagaccaagccgctgagcatgctgtatgtggataatggcagagtgctcctagatcaccataaagacatgatcgtggaagaatgtgggtgcctctgatgacatcctggagggagactggatttgcctgcactctggaaggctgggaaactcctggaagacatgataaccatctaatccagtaaggagaaacagagaggggcaaagttgctctgcccaccagaactgaagaggaggggctgcccactctgtaaatgaagggctcagtggagtctggccaagcacagaggctgctgtcaggaagagggaggaagaagcctgtgcagggggctggctggatgttctctttactgaaaagacagtggcaaggaaaagcacaagtgcatgagttctttactggattttttaaaaacctgtgaaccccccgaaactgtatgtgaaagttgagacatatgtgcatgtattttggaggtgggatgaagtcacctatagctttcatgtattctccaaagtagtctgtgtgtgacctgtccccctccccaaagattaaggatcactgtatagattaaaaagagtccgtcaatctcattgcctcaggctgggttgggggagccccacagctttctggctggccagtggcaatctactggccttgtccagaggctcactggagtggttctctgctaatgagctgtacaacaataaagccattgtctagtt

SEQ ID NO: 2830 - DNA, 1066 bp, Homo sapiens
  source 1..1066: mol_type = genomic DNA
gaccaacagttggggatacagactaaagatgtggcagtggatgggcagaactggacgtttgcttttgacttctccttcctgagccaacaagaggatctggcatgggctgagctccggctgcagctgtccagccctgtggacctccccactgagggctcacttgccattgagattttccaccagccaaagcccgacacagagcaggcttcagacagctgcttagagcggtttcagatggacctattcactgtcactttgtcccaggtcaccttttccttgggcagcatggttttggaggtgaccaggcctctctccaagtggctgaagcaccctggggccctggagaagcagatgtccagggtagctggagagtgctggccgcggccccccacaccgcctgccaccaatgtgctccttatgctctactccaacctctcgcaggagcagaggcagctgggtgggtccaccttgctgtgggaagccgagagctcctggcgggcccaggagggacagctgtcctgggagtggggcaagaggcaccgtcgacatcacttgccagacagaagtcaactgtgtcggaaggtcaagttccaggtggacttcaacctgatcggatggggctcctggatcatctaccccaagcagtacaacgcctatcgctgtgagggcgagtgtcctaatcctgttggggaggagtttcatccgaccaaccatgcatacatccagagtctgctgaaacgttaccagccccaccgagtcccttccacttgttgtgccccagtgaagaccaagccgctgagcatgctgtatgtggataatggcagagtgctcctagatcaccataaagacatgatcgtggaagaatgtgggtgcctctgatgacatcctggagggagactggatttgcctgcactctggaaggctgggaaactcctggaagacatgataaccatctaatccagtaaggagaaacagagaggggcaaagttgctctgcccaccagaactgaagaggaggggctgcccactctgtaaatgaagggctcagtggagtctggccaagcaca

SEQ ID NO: 2831 - DNA, 796 bp, Homo sapiens
  source 1..796: mol_type = genomic DNA
aagaggtgttcgggatcctgagaggaaaaagaaaggagtgtagtcgcgggagtgggttaggccctgtggctaggtaccatagagtctctacacaggactaagtcagcctggtgtgcaggggaggcagacacacaaacagaaaattggactacagtgctaagatgctgtaagaagaggttaactaaaggacaggaagatggggccaagagatggtgctactgtctactttagggatcgtctttcaaggcgaggggcctcctatctcaagctgtgatacaggaaccatggccaactgtgagcgtaccttcattgcgatcaaaccagatggggtccagcggggtcttgtgggagagattatcaagcgttttgagcagaaaggattccgccttgttggtctgaaattcatgcaagcttccgaagatcttctcaaggaacactacgttgacctgaaggaccgtccattctttgccggcctggtgaaatacatgcactcagggccggtagttgccatggtctgggaggggctgaatgtggtgaagacgggccgagtcatgctcggggagaccaaccctgcagactccaagcctgggaccatccgtggagacttctgcatacaagttggcaggaacattatacatggcagtgattctgtggagagtgcagagaaggagatcggcttgtggtttcaccctgaggaactggtagattacacgagctgtgctcagaactggatctatgaatgacaggagggcagaccacattgcttttcacatccatttcccctccttcccatggg

SEQ ID NO: 2832 - DNA, 986 bp, Homo sapiens
  source 1..986: mol_type = genomic DNA
gtgcaagtgctgcgaaccacgtgggtcccgggcgcgtttcgggtgctggcggctgcagccggagttcaaacctaagcagctggaagggccctgtggctaggtaccatagagtctctacacaggactaagtcagcctggtgtgcaggggaggcagacacacaaacagaaaattggactacagtgctaagatgctgtaagaagaggttaactaaaggacaggaagatggggccaagagatggtgctactgtctactttagggatcgtctttcaaggcgaggggcctcctatctcaagctgtgatacaggaaccatggccaactgtgagcgtaccttcattgcgatcaaaccagatggggtccagcggggtcttgtgggagagattatcaagcgttttgagcagaaaggattccgccttgttggtctgaaattcatgcaagcttccgaagatcttctcaaggaacactacgttgacctgaaggaccgtccattctttgccggcctggtgaaatacatgcactcagggccggtagttgccatggtctgggaggggctgaatgtggtgaagacgggccgagtcatgctcggggagaccaaccctgcagactccaagcctgggaccatccgtggagacttctgcatacaagttggcaggaacattatacatggcagtgattctgtggagagtgcagagaaggagatcggcttgtggtttcaccctgaggaactggtagattacacgagctgtgctcagaactggatctatgaatgacaggagggcagaccacattgcttttcacatccatttcccctccttcccatgggcagaggaccaggctgtaggaaatctagttatttacaggaacttcatcataatttggagggaagctcttggagctgtgagttctccctgtacagtgttaccatccccgaccatctgattaaaatgcttcctcccagcataggattcattgagttggttacttca

SEQ ID NO: 2833 - DNA, 940 bp, Homo sapiens
  source 1..940: mol_type = genomic DNA
gggctctccggcagcggatctgcgcagaagcgttccgtgcgtgcaagtgctgcgaaccacgtgggtcccgggcgcgtttcgggtgctggcggctgcagccggagttcaaacctaagcagctggaaggaaccatggccaactgtgagcgtaccttcattgcgatcaaaccagatggggtccagcggggtcttgtgggagagattatcaagcgttttgagcagaaaggattccgccttgttggtctgaaattcatgcaagcttccgaagatcttctcaaggaacactacgttgacctgaaggaccgtccattctttgccggcctggtgaaatacatgcactcagggccggtagttgccatggtctgggaggggctgaatgtggtgaagacgggccgagtcatgctcggggagaccaaccctgcagactccaagcctgggaccatccgtggagacttctgcatacaagttggcaggaacattatacatggcagtgattctgtggagagtgcagagaaggagatcggcttgtggtttcaccctgaggaactggtagattacacgagctgtgctcagaactggatctatgaatgacaggagggcagaccacattgcttttcacatccatttcccctccttcccatgggcagaggaccaggctgtaggaaatctagttatttacaggaacttcatcataatttggagggaagctcttggagctgtgagttctccctgtacagtgttaccatccccgaccatctgattaaaatgcttcctcccagcataggattcattgagttggttacttcatattgttgcattgcttttttttccttcttttcatgtacactgaataacctgacctaatagagagtgtaaatactataaaaatgatttattttgaggtctcacatacacacaggcattctttgcctgcccttctt

SEQ ID NO: 2834 - DNA, 510 bp, Homo sapiens
  source 1..510: mol_type = genomic DNA
ggacatttttagggtgtatttctggcgctttagtcctgttttctcctggacaatttatgcttgccccgcaccccatcgtgcgattctccgcagtctttgggctttgtctctctctctttttttttttttggaagttgcagaatggtgataaatgattttctttgctcctattgactgctaggccctgtggctaggtaccatagagtctctacacaggactaagtcagcctggtgtgcaggggaggcagacacacaaacagaaaattggactacagtgctaagatgctgtaagaagaggttaactaaaggacaggaagatggggccaagagatggtgctactgtctactttagggatcgtctttcaaggcgaggggcctcctatctcaagctgtgatacaggaaccatggccaactgtgagcgtaccttcattgcgatcaaaccagatggggtccagcggggtcttgtgggagagattatcaagcgttttgagcagaaaggattccgcctt

SEQ ID NO: 2835 - DNA, 995 bp, Homo sapiens
  source 1..995: mol_type = genomic DNA
gcgggccgggcgtcatgggcggcctcttctggcgctccgcgctgcgggggctgcgctgcggcccgcgggccccgggcccgagcctgctagtgcgccacggctcgggagggccctcctggacccgggagcggaccctggtggcggtgaagcccgatggcgtgcaacggcggctcgttggggacgtgatccagcgctttgagaggcggggcttcacgctggtggggatgaagatgctgcaggcaccagagagcgtccttgccgagcactaccaggacctgcggaggaagcccttctaccctgccctcatccgctacatgagctctgggcctgtggtggccatggtctgggaagggtacaatgtcgtccgcgcctcgagggccatgattggacacaccgactcggctgaggctgccccaggaaccataaggggtgacttcagcgtccacatcagcaggaatgtcatccacgccagcgactccgtggagggggcccagcgggagatccagctgtggttccagagcagtgagctggtgagctgggcagacgggggccagcacagcagcatccacccagcctgaggctcaagctgcccttaccaccccatcccccacgcaggaccaactacctccgtcagcaagaacccaagcccacatccaaacctgcctgtcccaaaccacttacttccctgttcacctctgccccaccccagcccagaggagtttgagccaccaacttcagtgcctttctgtaccccaagccagcacaagattggaccaatcctttttgcaccaaagtgccggacaacctttgtggtgggggggggtcttcacattatcataacctctcctctaaaggggaggcattaaaattcactgtgcccagcacatgggtggtacactaattatgacttcccccagctctgaggtagaaatgacgcctttatgcaagttgtaaggagttgaacagtaaagaggaagttttgcacacccagttcc

SEQ ID NO: 2836 - DNA, 766 bp, Homo sapiens
  source 1..766: mol_type = genomic DNA
gcgggccgggcgtcatgggcggcctcttctggcgctccgcgctgcgggggctgcgctgcggcccgcgggccccgggcccgagcctgctagtgcgccacggctcggggctccctccatcggctctgaaaagagggccctcctggacccgggagcggaccctggtggcggtgaagcccgatggcgtgcaacggcggctcgttggggacgtgatccagcgctttgagaggcggggcttcacgctggtggggatgaagatgctgcaggcaccagagagcgtccttgccgagcactaccaggacctgcggaggaagcccttctaccctgccctcatccgctacatgagctctgggcctgtggtggccatggtctgggaagggtacaatgtcgtccgcgcctcgagggccatgattggacacaccgactcggctgaggctgccccaggaaccataaggggtgacttcagcgtccacatcagcaggaatgtcatccacgccagcgactccgtggagggggcccagcgggagatccagctgtggttccagagcagtgagctggtgagctgggcagacgggggccagcacagcagcatccacccagcctgaggctcaagctgcccttaccaccccatcccccacgcaggaccaactacctccgtcagcaagaacccaagcccacatccaaacctgcctgtcccaaaccacttacttccctgttcacctctgccccaccccagcccagaggagtttgagccaccaacttcagtgcc

SEQ ID NO: 2837 - DNA, 1232 bp, Homo sapiens
  source 1..1232: mol_type = genomic DNA
cctccttctcccgccctggggctcacgtgggaatttcaccctccattggagggggctcagaccagggcttctagacctccttttggtccgtgaatttatttttgagacagagtcttgctctattgctcaggctggagtgcagcggtgcagtcacagctcactgcagcctcaatctcctgggctcacgcgatcctcctgcctcagcctcccgagtgggccttcctccgtgggaaagcgttaaaacgatagttaacggttgcgtcggtgtaaagacgaatgcaattcgagaaggattcattattattttgttttttcttctgatttttaacagaaattggcgttgaacatttcccccgagggccctcctggacccgggagcggaccctggtggcggtgaagcccgatggcgtgcaacggcggctcgttggggacgtgatccagcgctttgagaggcggggcttcacgctggtggggatgaagatgctgcaggcaccagagagcgtccttgccgagcactaccaggacctgcggaggaagcccttctaccctgccctcatccgctacatgagctctgggcctgtggtggccatggtctgggaagggtacaatgtcgtccgcgcctcgagggccatgattggacacaccgactcggctgaggctgccccaggaaccataaggggtgacttcagcgtccacatcagcaggaatgtcatccacgccagcgactccgtggagggggcccagcgggagatccagctgtggttccagagcagtgagctggtgagctgggcagacgggggccagcacagcagcatccacccagcctgaggctcaagctgcccttaccaccccatcccccacgcaggaccaactacctccgtcagcaagaacccaagcccacatccaaacctgcctgtcccaaaccacttacttccctgttcacctctgccccaccccagcccagaggagtttgagccaccaacttcagtgcctttctgtaccccaagccagcacaagattggaccaatcctttttgcaccaaagtgccggacaacctttgtggtgggggggggtcttcacattatcataacctctcctctaaaggggaggcattaaaattcactgtgcccagcacatgggtggtacactaattatgacttcccccagctctgaggtagaaatgacgcctttatgcaagttgtaaggagttgaacagtaaagaggaagttttg

SEQ ID NO: 2838 - DNA, 966 bp, Homo sapiens
  source 1..966: mol_type = genomic DNA
ctggcgctccgcgctgcgggggctgcgctgcggcccgcgggccccgggcccgagcctgctagtgcgccacggctcgggagggccctcctggacccgggagcggaccctggtggcggtgaagcccgatggcgtgcaacggcggctcgttggggacgtgatccagcgctttgagaggcggggcttcacgctggtggggatgaagatgctgcaggcaccagagagcgtccttgccgagcactaccaggacctgcggaggaagcccttctaccctgccctcatccgctacatgagctctgggcctgtggtggccatggtctgggaagggtacaatgtcgtccgcgcctcgagggccatgattggacacaccgactcggctgaggctgccccaggaaccataaggggtgacttcagcgtccacatcagcagtcacaggcttgctcccctagacagagggcaacgggagcagcagatggtccctgggattcctcagggtgcacatgaagcctgagcctcacattgctcctgtcctggcacaggaatgtcatccacgccagcgactccgtggagggggcccagcgggagatccagctgtggttccagagcagtgagctggtgagctgggcagacgggggccagcacagcagcatccacccagcctgaggctcaagctgcccttaccaccccatcccccacgcaggaccaactacctccgtcagcaagaacccaagcccacatccaaacctgcctgtcccaaaccacttacttccctgttcacctctgccccaccccagcccagaggagtttgagccaccaacttcagtgcctttctgtaccccaagccagcacaagattggaccaatcctttttgcaccaaagtgccggacaacctttgtggtgggggggggtcttcacattatcataacctctcctctaaaggggaggcattaaaattcactgtgcccagca

SEQ ID NO: 2839 - DNA, 1111 bp, Homo sapiens
  source 1..1111: mol_type = genomic DNA
cagcggcccgcgggccgggcgtcatgggcggcctcttctggcgctccgcgctgcgggggctgcgctgcggcccgcgggccccgggcccgagcctgctagtgcgccacggctcgggagggccctcctggacccgggagcggaccctggtggcggtgaagcccgatggcgtgcaacggcggctcgttggggacgtgatccagcgctttgagaggcggggcttcacgctggtggggatgaagatgctgcaggcaccagagagcgtccttgccgagcactaccaggacctgcggaggaagcccttctaccctgccctcatccgctacatgagctctgggcctgtggtggccatggtctgggaagggtacaatgtcgtccgcgcctcgagggccatgattggacacaccgactcggctgaggctgccccaggaaccataaggggtgacttcagcgtccacatcagcaggaatgtcatccacgccagcgactccgtggagggggcccagcgggagatccagctgtggttccagagcagtgagctgtccccgacgggagcgccatggcccagccgccgcccgacgtggagggggacgactgtctccccgcgtaccgccacctcttctgcccggacctgctgcgggacaaagtggccttcatcacaggaggcggctctgggattgggttccggattgctgagattttcatgcggcacggctgccatacggtgattgccagtaggagcctgccgcgagtgctgacgagatgggttttcaccacgttgaccaggctggtctcgaattcctgacctcaggtgatccgcccacctcagcctcccaaagtgccaggattacaggccgccaggaagctggctggggccaccggccggcgctgcctccctctctctatggacgtccgagcgcccccagctgtcatggccgccgtggaccaggctctgaaggagtttggcagaatcgacattctcattaactgtgcggccgggaacttcctgtgccccgctggcgccttgtccttcaacgccttcaagaccgtgatggacatcgataccagcggcaccttcaatgtgtctcgtgtgctctatgagaagttcttccgg

SEQ ID NO: 2840 - DNA, 985 bp, Homo sapiens
  source 1..985: mol_type = genomic DNA
ggggagccgctccgctggggcgttcgctgaaggccaagttaggccagaatctgactgggacgtcaggccccaagtccccggccccgccgctgcccggcccccccagctgccacctcacaggacgatccatgtcccagggctccctccatcggctctgaaaagtgagccgccgcctgcaatgcccgcaccagccgcagcagagccccaggctacacaaggcgccctgcaaactgggttttgggggaacaaaccaaccagggggtcttcctcccgtgggcttcagccgcctgctggggttaacttttcctcctggcctggcggagcccctttggctctgtccagattctgtgggacatacagggtctgggctcctctggaaaccagggacccgatgccggagggtagcttggctctggagcagcctgggactataggaaggagggccctcctggacccgggagcggaccctggtggcggtgaagcccgatggcgtgcaacggcggctcgttggggacgtgatccagcgctttgagaggcggggcttcacgctggtggggatgaagatgctgcaggcaccagagagcgtccttgccgagcactaccaggacctgcggaggaagcccttctaccctgccctcatccgctacatgagctctgggcctgtggtggccatggtctgggaagggtacaatgtcgtccgcgcctcgagggccatgattggacacaccgactcggctgaggctgccccaggaaccataaggggtgacttcagcgtccacatcagcaggaatgtcatccacgccagcgactccgtggagggggcccagcgggagatccagctgtggttccagagcagtgagctggtgagctgggcagacgggggccagcacagcagcatccacccagcctgaggctcaagctgcccttaccaccccatcccccacgcaggaccaactacctccgtcagcaagaacccaagcccaca

SEQ ID NO: 2841 - DNA, 719 bp, Homo sapiens
  source 1..719: mol_type = genomic DNA
attggagggggctcagaccagggcttctagacctccttttggtccgtgaatttatttttgagacagagtcttgctctattgctcaggctggagtgcagcggtgcagtcacagctcactgcagcctcaatctcctgggctcacgcgatcctcctgcctcagcctcccgagtgggccttcctccgtgggaaagcgttaaaacgatagttaacggttgcgtcggtgtaaagacgaatgcaattcgagaaggattcattattattttgttttttcttctgatttttaacagaaattggcgttgaacatttccccccgtcccctccagaggaggacggctggggcggagctcagcgctgaccctgggtctggaagcgacaggccttgaaactccacagcagcacaggccccgtctcctggctcggacagaaccctgctaccttccctcttcaatcttcaggcccctttttgtccgtgtttccagggctcacctggagggccctcctggacccgggagcggaccctggtggcggtgaagcccgatggcgtgcaacggcggctcgttggggacgtgatccagcgctttgagaggcggggcttcacgctggtggggatgaagatgctgcaggcaccagagagcgtccttgccgagcactaccaggacctgcggaggaagcccttctaccctgccctcatccgctacatgagctctgggcctgtggtg

SEQ ID NO: 2842 - DNA, 551 bp, Homo sapiens
  source 1..551: mol_type = genomic DNA
ttccggttatgcaggaaggaaattgacgaacacgtgacgcggtcgggcggaccactgcagactgagcggtggaccgaattgggaccgctggcttataagcgatcatgtttctccagtattacctcaacgagcagggagatcgagtctatacgctgaagaaatttgacccgatgggacaacagacctgctcagcccatcctgctcggttctccccagatgacaaatactctcgacaccgaatcaccatcaagaaacgcttcaaggtgctcatgacccagcaaccgcgccctgtcctctgagggtcccttaaactgatgtcttttctgccacctgttacccctcggagactccgtaaccaaactcttcggactgtgagccctgatgcctttttgccagccatactctttggcatccagtctctcgtggcgattgattatgcttgtgtgaggcaatcatggtggcatcacccataaagggaacacatttgacttttttttctcatattttaaattactacaagattattaaagataaaatgatttgaaaaactc

SEQ ID NO: 2843 - DNA, 9371 bp, Homo sapiens
  source 1..9371: mol_type = genomic DNA
gcgcgtgtgcgtcccagccccgccggccagcgcaggaggccgccgcccgggcgcagagggcagccggtggggaggcatgccgccgctcctggcgcccctgctctgcctggcgctgctgcccgcgctcgccgcacgaggcccgcgatgctcccagcccggtgagacctgcctgaatggcgggaagtgtgaagcggccaatggcacggaggcctgcgtctgtggcggggccttcgtgggcccgcgatgccaggaccccaacccgtgcctcagcaccccctgcaagaacgccgggacatgccacgtggtggaccgcagaggcgtggcagactatgcctgcagctgtgccctgggcttctctgggcccctctgcctgacacccctggacaatgcctgcctcaccaacccctgccgcaacgggggcacctgcgacctgctcacgctgacggagtacaagtgccgctgcccgcccggctggtcagggaaatcgtgccagcaggctgacccgtgcgcctccaacccctgcgccaacggtggccagtgcctgcccttcgaggcctcctacatctgccactgcccacccagcttccatggccccacctgccggcaggatgtcaacgagtgtggccagaagcccgggctttgccgccacggaggcacctgccacaacgaggtcggctcctaccgctgcgtctgccgcgccacccacactggccccaactgcgagcggccctacgtgccctgcagcccctcgccctgccagaacgggggcacctgccgccccacgggcgacgtcacccacgagtgtgcctgcctgccaggcttcaccggccagaactgtgaggaaaatatcgacgattgtccaggaaacaactgcaagaacgggggtgcctgtgtggacggcgtgaacacctacaactgccgctgcccgccagagtggacaggtcagtactgtaccgaggatgtggacgagtgccagctgatgccaaatgcctgccagaacggcgggacctgccacaacacccacggtggctacaactgcgtgtgtgtcaacggctggactggtgaggactgcagcgagaacattgatgactgtgccagcgccgcctgcttccacggcgccacctgccatgaccgtgtggcctccttctactgcgagtgtccccatggccgcacaggtctgctgtgccacctcaacgacgcatgcatcagcaacccctgtaacgagggctccaactgcgacaccaaccctgtcaatggcaaggccatctgcacctgcccctcggggtacacgggcccggcctgcagccaggacgtggatgagtgctcgctgggtgccaacccctgcgagcatgcgggcaagtgcatcaacacgctgggctccttcgagtgccagtgtctgcagggctacacgggcccccgatgcgagatcgacgtcaacgagtgcgtctcgaacccgtgccagaacgacgccacctgcctggaccagattggggagttccagtgcatctgcatgcccggctacgagggtgtgcactgcgaggtcaacacagacgagtgtgccagcagcccctgcctgcacaatggccgctgcctggacaagatcaatgagttccagtgcgagtgccccacgggcttcactgggcatctgtgccagtacgatgtggacgagtgtgccagcaccccctgcaagaatggtgccaagtgcctggacggacccaacacttacacctgtgtgtgcacggaagggtacacggggacgcactgcgaggtggacatcgatgagtgcgaccccgacccctgccactacggctcctgcaaggacggcgtcgccaccttcacctgcctctgccgcccaggctacacgggccaccactgcgagaccaacatcaacgagtgctccagccagccctgccgccacgggggcacctgccaggaccgcgacaacgcctacctctgcttctgcctgaaggggaccacaggacccaactgcgagatcaacctggatgactgtgccagcagcccctgcgactcgggcacctgtctggacaagatcgatggctacgagtgtgcctgtgagccgggctacacagggagcatgtgtaacatcaacatcgatgagtgtgcgggcaacccctgccacaacgggggcacctgcgaggacggcatcaatggcttcacctgccgctgccccgagggctaccacgaccccacctgcctgtctgaggtcaatgagtgcaacagcaacccctgcgtccacggggcctgccgggacagcctcaacgggtacaagtgcgactgtgaccctgggtggagtgggaccaactgtgacatcaacaacaatgagtgtgaatccaacccttgtgtcaacggcggcacctgcaaagacatgaccagtggctacgtgtgcacctgccgggagggcttcagcggtcccaactgccagaccaacatcaacgagtgtgcgtccaacccatgtctgaaccagggcacgtgtattgacgacgttgccgggtacaagtgcaactgcctgctgccctacacaggtgccacgtgtgaggtggtgctggccccgtgtgcccccagcccctgcagaaacggcggggagtgcaggcaatccgaggactatgagagcttctcctgtgtctgccccacgggctggcaagggcagacctgtgaggtcgacatcaacgagtgcgttctgagcccgtgccggcacggcgcatcctgccagaacacccacggcggctaccgctgccactgccaggccggctacagtgggcgcaactgcgagaccgacatcgacgactgccggcccaacccgtgtcacaacgggggctcctgcacagacggcatcaacacggccttctgcgactgcctgcccggcttccggggcactttctgtgaggaggacatcaacgagtgtgccagtgacccctgccgcaacggggccaactgcacggactgcgtggacagctacacgtgcacctgccccgcaggcttcagcgggatccactgtgagaacaacacgcctgactgcacagagagctcctgcttcaacggtggcacctgcgtggacggcatcaactcgttcacctgcctgtgtccacccggcttcacgggcagctactgccagcacgatgtcaatgagtgcgactcacagccctgcctgcatggcggcacctgtcaggacggctgcggctcctacaggtgcacctgcccccagggctacactggccccaactgccagaaccttgtgcactggtgtgactcctcgccctgcaagaacggcggcaaatgctggcagacccacacccagtaccgctgcgagtgccccagcggctggaccggcctttactgcgacgtgcccagcgtgtcctgtgaggtggctgcgcagcgacaaggtgttgacgttgcccgcctgtgccagcatggagggctctgtgtggacgcgggcaacacgcaccactgccgctgccaggcgggctacacaggcagctactgtgaggacctggtggacgagtgctcacccagcccctgccagaacggggccacctgcacggactacctgggcggctactcctgcaagtgcgtggccggctaccacggggtgaactgctctgaggagatcgacgagtgcctctcccacccctgccagaacgggggcacctgcctcgacctccccaacacctacaagtgctcctgcccacggggcactcagggtgtgcactgtgagatcaacgtggacgactgcaatccccccgttgaccccgtgtcccggagccccaagtgctttaacaacggcacctgcgtggaccaggtgggcggctacagctgcacctgcccgccgggcttcgtgggtgagcgctgtgagggggatgtcaacgagtgcctgtccaatccctgcgacgcccgtggcacccagaactgcgtgcagcgcgtcaatgacttccactgcgagtgccgtgctggtcacaccgggcgccgctgcgagtccgtcatcaatggctgcaaaggcaagccctgcaagaatgggggcacctgcgccgtggcctccaacaccgcccgcgggttcatctgcaagtgccctgcgggcttcgagggcgccacgtgtgagaatgacgctcgtacctgcggcagcctgcgctgcctcaacggcggcacatgcatctccggcccgcgcagccccacctgcctgtgcctgggccccttcacgggccccgaatgccagttcccggccagcagcccctgcctgggcggcaacccctgctacaaccaggggacctgtgagcccacatccgagagccccttctaccgttgcctgtgccccgccaaattcaacgggctcttgtgccacatcctggactacagcttcgggggtggggccgggcgcgacatccccccgccgctgatcgaggaggcgtgcgagctgcccgagtgccaggaggacgcgggcaacaaggtctgcagcctgcagtgcaacaaccacgcgtgcggctgggacggcggtgactgctccctcaacttcaatgacccctggaagaactgcacgcagtctctgcagtgctggaagtacttcagtgacggccactgtgacagccagtgcaactcagccggctgcctcttcgacggctttgactgccagcgtgcggaaggccagtgcaaccccctgtacgaccagtactgcaaggaccacttcagcgacgggcactgcgaccagggctgcaacagcgcggagtgcgagtgggacgggctggactgtgcggagcatgtacccgagaggctggcggccggcacgctggtggtggtggtgctgatgccgccggagcagctgcgcaacagctccttccacttcctgcgggagctcagccgcgtgctgcacaccaacgtggtcttcaagcgtgacgcacacggccagcagatgatcttcccctactacggccgcgaggaggagctgcgcaagcaccccatcaagcgtgccgccgagggctgggccgcacctgacgccctgctgggccaggtgaaggcctcgctgctccctggtggcagcgagggtgggcggcggcggagggagctggaccccatggacgtccgcggctccatcgtctacctggagattgacaaccggcagtgtgtgcaggcctcctcgcagtgcttccagagtgccaccgacgtggccgcattcctgggagcgctcgcctcgctgggcagcctcaacatcccctacaagatcgaggccgtgcagagtgagaccgtggagccgcccccgccggcgcagctgcacttcatgtacgtggcggcggccgcctttgtgcttctgttcttcgtgggctgcggggtgctgctgtcccgcaagcgccggcggcagcatggccagctctggttccctgagggcttcaaagtgtctgaggccagcaagaagaagcggcgggagcccctcggcgaggactccgtgggcctcaagcccctgaagaacgcttcagacggtgccctcatggacgacaaccagaatgagtggggggacgaggacctggagaccaagaagttccggttcgaggagcccgtggttctgcctgacctggacgaccagacagaccaccggcagtggactcagcagcacctggatgccgctgacctgcgcatgtctgccatggcccccacaccgccccagggtgaggttgacgccgactgcatggacgtcaatgtccgcgggcctgatggcttcaccccgctcatgatcgcctcctgcagcgggggcggcctggagacgggcaacagcgaggaagaggaggacgcgccggccgtcatctccgacttcatctaccagggcgccagcctgcacaaccagacagaccgcacgggcgagaccgccttgcacctggccgcccgctactcacgctctgatgccgccaagcgcctgctggaggccagcgcagatgccaacatccaggacaacatgggccgcaccccgctgcatgcggctgtgtctgccgacgcacaaggtgtcttccagatcctgatccggaaccgagccacagacctggatgcccgcatgcatgatggcacgacgccactgatcctggctgcccgcctggccgtggagggcatgctggaggacctcatcaactcacacgccgacgtcaacgccgtagatgacctgggcaagtccgccctgcactgggccgccgccgtgaacaatgtggatgccgcagttgtgctcctgaagaacggggctaacaaagatatgcagaacaacagggaggagacacccctgtttctggccgcccgggagggcagctacgagaccgccaaggtgctgctggaccactttgccaaccgggacatcacggatcatatggaccgcctgccgcgcgacatcgcacaggagcgcatgcatcacgacatcgtgaggctgctggacgagtacaacctggtgcgcagcccgcagctgcacggagccccgctggggggcacgcccaccctgtcgcccccgctctgctcgcccaacggctacctgggcagcctcaagcccggcgtgcagggcaagaaggtccgcaagcccagcagcaaaggcctggcctgtggaagcaaggaggccaaggacctcaaggcacggaggaagaagtcccaggacggcaagggctgcctgctggacagctccggcatgctctcgcccgtggactccctggagtcaccccatggctacctgtcagacgtggcctcgccgccactgctgccctccccgttccagcagtctccgtccgtgcccctcaaccacctgcctgggatgcccgacacccacctgggcatcgggcacctgaacgtggcggccaagcccgagatggcggcgctgggtgggggcggccggctggcctttgagactggcccacctcgtctctcccacctgcctgtggcctctggcaccagcaccgtcctgggctccagcagcggaggggccctgaatttcactgtgggcgggtccaccagtttgaatggtcaatgcgagtggctgtcccggctgcagagcggcatggtgccgaaccaatacaaccctctgcgggggagtgtggcaccaggccccctgagcacacaggccccctccctgcagcatggcatggtaggcccgctgcacagtagccttgctgccagcgccctgtcccagatgatgagctaccagggcctgcccagcacccggctggccacccagcctcacctggtgcagacccagcaggtgcagccacaaaacttacagatgcagcagcagaacctgcagccagcaaacatccagcagcagcaaagcctgcagccgccaccaccaccaccacagccgcaccttggcgtgagctcagcagccagcggccacctgggccggagcttcctgagtggagagccgagccaggcagacgtgcagccactgggccccagcagcctggcggtgcacactattctgccccaggagagccccgccctgcccacgtcgctgccatcctcgctggtcccacccgtgaccgcagcccagttcctgacgcccccctcgcagcacagctactcctcgcctgtggacaacacccccagccaccagctacaggtgcctgagcaccccttcctcaccccgtcccctgagtcccctgaccagtggtccagctcgtccccgcattccaacgtctccgactggtccgagggcgtctccagccctcccaccagcatgcagtcccagatcgcccgcattccggaggccttcaagtaaacggcgcgccccacgagaccccggcttcctttcccaagccttcgggcgtctgtgtgcgctctgtggatgccagggccgaccagaggagcctttttaaaacacatgtttttatacaaaataagaacgaggattttaattttttttagtatttatttatgtacttttattttacacagaaacactgcctttttatttatatgtactgttttatctggccccaggtagaaacttttatctattctgagaaaacaagcaagttctgagagccagggttttcctacgtaggatgaaaagattcttctgtgtttataaaatataaacaaagattcatgatttataaatgccatttatttattgattccttttttcaaaatccaaaaagaaatgatgttggagaagggaagttgaacgagcatagtccaaaaagctcctggggcgtccaggccgcgccctttccccgacgcccacccaaccccaagccagcccggccgctccaccagcatcacctgcctgttaggagaagctgcatccagaggcaaacggaggcaaagctggctcaccttccgcacgcggattaatttgcatctgaaataggaaacaagtgaaagcatatgggttagatgttgccatgtgttttagatggtttcttgcaagcatgcttgtgaaaatgtgttctcggagtgtgtatgccaagagtgcacccatggtaccaatcatgaatctttgtttcaggttcagtattatgtagttgttcgttggttatacaagttcttggtccctccagaaccaccccggccccctgcccgttcttgaaatgtaggcatcatgcatgtcaaacatgagatgtgtggactgtggcacttgcctgggtcacacacggaggcatcctacccttttctggggaaagacactgcctgggctgaccccggtggcggccccagcacctcagcctgcacagtgtcccccaggttccgaagaagatgctccagcaacacagcctgggccccagctcgcgggacccgaccccccgtgggctcccgtgttttgtaggagacttgccagagccgggcacattgagctgtgcaacgccgtgggctgcgtcctttggtcctgtccccgcagccctggcagggggcatgcggtcgggcaggggctggagggaggcgggggctgcccttgggccacccctcctagtttgggaggagcagatttttgcaataccaagtatagcctatggcagaaaaaatgtctgtaaatatgtttttaaaggtggattttgtttaaaaaatcttaatgaatgagtctgttgtgtgtcatgccagtgagggacgtcagacttggctcagctcggggagccttagccgcccatgcactggggacgctccgctgccgtgccgcctgcactcctcagggcagcctcccccggctctacgggggccgcgtggtgccatccccagggggcatgaccagatgcgtcccaagatgttgatttttactgtgttttataaaatagagtgtagtttacagaaaaagactttaaaagtgatctacatgaggaactgtagatgatgtatttttttcatcttttttgttaactgatttgcaataaaaatgatactgatggtga

SEQ ID NO: 2844 - DNA, 6745 bp, Homo sapiens
  source 1..6745: mol_type = genomic DNA
agacgtgaggcttgcagcaggccgaggaggaagaagaggggcagtgggagcagaggaggtggctcctgccccagtgagagctctgagggtccctgcctgaagagggacagggaccggggcttggagaaggggctgtggaatgcagcccccttcactgctgctgctgctgctgctgctgctgctgctatgtgtctcagtggtcagacccagagggctgctgtgtgggagtttcccagaaccctgtgccaatggaggcacctgcctgagcctgtctctgggacaagggacctgccagtgtgcccctggcttcctgggtgagacgtgccagtttcctgacccctgccagaacgcccagctctgccaaaatggaggcagctgccaagccctgcttcctgctcccctagggctccccagctctccctctccattgacacccagcttcttgtgcacttgcctccctggcttcactggtgagagatgccaggccaagcttgaagacccttgtcctccctccttctgttccaaaaggggccgctgccacatccaggcctcgggccgcccacagtgctcctgcatgcctggatggacaggtgagcagtgccagcttcgggacttctgttcagccaacccatgtgttaatggaggggtgtgtctggccacatacccccagatccagtgccactgcccaccgggcttcgagggccatgcctgtgaacgtgatgtcaacgagtgcttccaggacccaggaccctgccccaaaggcacctcctgccataacaccctgggctccttccagtgcctctgccctgtggggcaggagggtccacgttgtgagctgcgggcaggaccctgccctcctaggggctgttcgaatgggggcacctgccagctgatgccagagaaagactccacctttcacctctgcctctgtcccccaggtttcataggcccagactgtgaggtgaatccagacaactgtgtcagccaccagtgtcagaatgggggcacttgccaggatgggctggacacctacacctgcctctgcccagaaacctggacaggctgggactgctccgaagatgtggatgagtgtgagacccagggtccccctcactgcagaaacgggggcacctgccagaactctgctggtagctttcactgcgtgtgtgtgagtggctggggcggcacaagctgtgaggagaacctggatgactgtattgctgccacctgtgccccgggatccacctgcattgaccgggtgggctctttctcctgcctctgcccacctggacgcacaggactcctgtgccacttggaagacatgtgtctgagccagccgtgccatggggatgcccaatgcagcaccaaccccctcacaggctccacactctgcctgtgtcagcctggctattcggggcccacctgccaccaggacctggacgagtgtctgatggcccagcaaggcccaagtccctgtgaacatggcggttcctgcctcaacactcctggctccttcaactgcctctgtccacctggctacacaggctcccgttgtgaggctgatcacaatgagtgcctctcccagccctgccacccaggaagcacctgtctggacctacttgccaccttccactgcctctgcccgccaggcttagaagggcagctctgtgaggtggagaccaacgagtgtgcctcagctccctgcctgaaccacgcggattgccatgacctgctcaacggcttccagtgcatctgcctgcctggattctccggcacccgatgtgaggaggatatcgatgagtgcagaagctctccctgtgccaatggtgggcagtgccaggaccagcctggagccttccactgcaagtgtctcccaggctttgaagggccacgctgtcaaacagaggtggatgagtgcctgagtgacccatgtcccgttggagccagctgccttgatcttccaggagccttcttttgcctctgcccctctggtttcacaggccagctctgtgaggttcccctgtgtgctcccaacctgtgccagcccaagcagatatgtaaggaccagaaagacaaggccaactgcctctgtcctgatggaagccctggctgtgccccacctgaggacaactgcacctgccaccacgggcactgccagagatcctcatgtgtgtgtgacgtgggttggacggggccagagtgtgaggcagagctagggggctgcatctctgcaccctgtgcccatggggggacctgctacccccagccctctggctacaactgcacctgccctacaggctacacaggacccacctgtagtgaggagatgacagcttgtcactcagggccatgtctcaatggcggctcctgcaaccctagccctggaggctactactgcacctgccctccaagccacacagggccccagtgccaaaccagcactgactactgtgtgtctgccccgtgcttcaatgggggtacctgtgtgaacaggcctggcaccttctcctgcctctgtgccatgggcttccagggcccgcgctgtgagggaaagctccgccccagctgtgcagacagcccctgtaggaatagggcaacctgccaggacagccctcagggtccccgctgcctctgccccactgtctacaccggaggcagctgccagactctgatggacttatgtgcccagaagccctgcccacgcaattcccactgcctccagactgggccctccttccactgcttgtgcctccagggatggaccgggcctctctgcaaccttccactgtcctcctgccagaaggctgcactgagccaaggcatagacgtctcttccctttgccacaatggaggcctctgtgtcgacagcggcccctcctatttctgccactgcccccctggattccaaggcagcctgtgccaggatcacgtgaacccatgtgagtccaggccttgccagaacggggccacctgcatggcccagcccagtgggtatctctgccagtgtgccccaggctacgatggacagaactgctcaaaggaactcgatgcttgtcagtcccaaccctgtcacaaccatggaacctgtactcccaaacctggaggcttccactgtgcctgccctccaggctttgtggggctacgctgtgagggagacgtggacgagtgtctggaccagccctgccaccccacaggcactgcagcctgccactctctggccaatgccttctactgccagtgtctgcctggacacacaggccagtggtgtgaggtggagatagacccctgccacagccaaccctgctttcatggagggacctgtgaggccacagcaggatcacccctgggtttcatctgccactgccccaagggttttgaaggccccacctgcagccacagggccccttcctgcggcttccatcactgccaccacggaggcctgtgtctgccctcccctaagccaggcttcccaccacgctgtgcctgcctcagtggctatgggggtcctgactgcctgaccccaccagctcctaaaggctgtggccctccctccccatgcctatacaatggcagctgctcagagaccacgggcttggggggcccaggctttcgatgctcctgccctcacagctctccagggccccggtgtcagaaacccggagccaaggggtgtgagggcagaagtggagatggggcctgcgatgctggctgcagtggcccgggaggaaactgggatggaggggactgctctctgggagtcccagacccctggaagggctgcccctcccactctcggtgctggcttctcttccgggacgggcagtgccacccacagtgtgactctgaagagtgtctgtttgatggctacgactgtgagacccctccagcctgcactccagcctatgaccagtactgccatgatcacttccacaacgggcactgtgagaaaggctgcaacactgcagagtgtggctgggatggaggtgactgcaggcctgaagatggggacccagagtgggggccctccctggccctgctggtggtactgagccccccagccctagaccagcagctgtttgccctggcccgggtgctgtccctgactctgagggtaggactctgggtaaggaaggatcgtgatggcagggacatggtgtacccctatcctggggcccgggctgaagaaaagctaggaggaactcgggaccccacctatcaggagagagcagcccctcaaacgcagcccctgggcaaggagaccgactccctcagtgctgggtttgtggtggtcatgggtgtggatttgtcccgctgtggccctgaccacccggcatcccgctgtccctgggaccctgggcttctactccgcttccttgctgcgatggctgcagtgggagccctggagcccctgctgcctggaccactgctggctgtccaccctcatgcagggaccgcaccccctgccaaccagcttccctggcctgtgctgtgctccccagtggccggggtgattctcctggccctaggggctcttctcgtcctccagctcatccggcgtcgacgccgagagcatggagctctctggctgccccctggtttcactcgacggcctcggactcagtcagctccccaccgacgccggcccccactaggcgaggacagcattggtctcaaggcactgaagccaaaggcagaagttgatgaggatggagttgtgatgtgctcaggccctgaggagggagaggaggtgggccaggctgaagaaacaggcccaccctccacgtgccagctctggtctctgagtggtggctgtggggcgctccctcaggcagccatgctaactcctccccaggaatctgagatggaagcccctgacctggacacccgtggacctgatggggtgacacccctgatgtcagcagtttgctgtggggaagtacagtccgggaccttccaaggggcatggttgggatgtcctgagccctgggaacctctgctggatggaggggcctgtccccaggctcacaccgtgggcactggggagacccccctgcacctggctgcccgattctcccggccaaccgctgcccgccgcctccttgaggctggagccaaccccaaccagccagaccgggcagggcgcacaccccttcatgctgctgtggctgctgatgctcgggaggtctgccagcttctgctccgtagcagacaaactgcagtggacgctcgcacagaggacgggaccacacccttgatgctggctgccaggctggcggtggaagacctggttgaagaactgattgcagcccaagcagacgtgggggccagagataaatgggggaaaactgcgctgcactgggctgctgccgtgaacaacgcccgagccgcccgctcgcttctccaggccggagccgataaagatgcccaggacaacagggagcagacgccgctattcctggcggcgcgggaaggagcggtggaagtagcccagctactgctggggctgggggcagcccgagagctgcgggaccaggctgggctagcgccggcggacgtcgctcaccaacgtaaccactgggatctgctgacgctgctggaaggggctgggccaccagaggcccgtcacaaagccacgccgggccgcgaggctgggcccttcccgcgcgcacggacggtgtcagtaagcgtgcccccgcatgggggcggggctctgccgcgctgccggacgctgtcagccggagcaggccctcgtgggggcggagcttgtctgcaggctcggacttggtccgtagacttggctgcgcgggggggcggggcctattctcattgccggagcctctcgggagtaggagcaggaggaggcccgacccctcgcggccgtaggttttctgcaggcatgcgcgggcctcggcccaaccctgcgataatgcgaggaagatacggagtggctgccgggcgcggaggcagggtctcaacggatgactggccctgtgattgggtggccctgggagcttgcggttctgcctccaacattccgatcccgcctccttgccttactccgtccccggagcggggatcacctcaacttgactgtggtcccccagccctccaagaaatgcccataaaccaaggaggagagggtaaaaaatagaagaatacatggtagggaggaattccaaaaatgattacccattaaaaggcaggctggaaggccttcctggttttaagatggatcccccaaaatgaagggttgtgagtttagtttctctcctaaaatgaatgtatgcccaccagagcagacatcttccacgtggagaagctgcagctctggaaagagggtttaagatgctaggatgaggcaggcccagtcctcctccagaaaataagacaggccacaggagggcagagtggagtggaaatacccctaagttggaaccaagaattgcaggcatatgggatgtaagatgttctttcctatatatggtttccaaagggtgcccctatgatccattgtccccactgcccacaaatggctgacaaatatttattgggcacctactatgtgccaggcactgtgtaggtgctgaaaagtggccaagggccacccccgctgatgactccttgcattccctcccctcacaacaaagaactccactgtggggatgaagcgcttcttctagccactgctatcgctatttaagaaccctaaatctgtcacccataataaagctgatttgaagtgtta

SEQ ID NO: 2845 - DNA, 957 bp, Homo sapiens
  source 1..957: mol_type = genomic DNA
gatgtcagcagtttgctgtggggaagtacagtccgggaccttccaaggggcatggttgggatgtcctgagccctgggaacctctgctggatggaggggcctgtccccaggctcacaccgtgggcactggggagacccccctgcacctggctgcccgattctcccggccaaccgctgcccgccgcctccttgaggctggagccaaccccaaccagccagaccgggcagggcgcacaccccttcatgctgctgtggctgctgatgctcgggaggtctgccagcttctgctccgtagcagacaaactgcagtggacgctcgcacagaggacgggaccacacccttgatgctggctgccaggctggcggtggaagacctggttgaagaactgattgcagcccaagcagacgtgggggccagagataaatggggagcagacgccgctattcctggcggcgcgggaaggagcggtggaagtagcccagctactgctggggctgggggcagcccgagagctgcgggaccaggctgggctagcgccggcggacgtcgctcaccaacgtaaccactgggatctgctgacgctgctggaaggggctgggccaccagaggcccgtcacaaagccacgccgggccgcgaggctgggcccttcccgcgcgcacggacggtgtcagtaagcgtgcccccgcatgggggcggggctctgccgcgctgccggacgctgtcagccggagcaggccctcgtgggggcggagcttgtctgcaggctcggacttggtccgtagacttggctgcgcgggggggcggggcctattctcattgccggagcctctcgggagtaggagcaggaggaggcccgacccctcgcggccgtaggttttctgcaggcatgcgcgggcctcggcccaaccctgcgataatgcgaggaagatacggagtggctgccgggcgcggaggca

SEQ ID NO: 2846 - DNA, 1067 bp, Homo sapiens
  source 1..1067: mol_type = genomic DNA
ggccgcatgggccgccgggatgtgtagtccgcaggagtccggcatgaccgccttgagcgcgaggatgctgacccggagccggagcctgggacccggggctgggccgcgggggtgtagggaggagcccgggcctctccggagaagagaggctgcagcagaagcgaggaaaagccacagccccgtgaagcgtccgcggaaagcacagagactgcgtgtggcctatgagggctcggacagtgagaaaggtgagggggctgagcccctcaaggtgccagtctgggagccccaggactggcagcaacagctggtcaacatccgtgccatgaggaacaaaaaggatgcacctgtggaccatctggggactgagcactgctatgactccagtgcccccccaaaggtacgcaggtaccaggtgctgctgtcactgatgctctccagccaaaccaaagaccaggtgacggcgggcgccatgcagcgactgcgggcgcggggcctgacggtggacagcatcctgcagacagatgatgccacgctgggcaagctcatctaccccgtcggtttctggaggagcaaggtgaaatacatcaagcagaccagcgccatcctgcagcagcactacggtggggacatcccagcctctgtggccgagctggtggcgctgccgggtgttgggcccaagatggcacacctggctatggctgtggcctggggcactgtgtcaggcattgcagtggacacgcatgtgcacagaatcgccaacaggctgaggtggaccaagaaggcaaccaagtccccagaggagacccgcgccgccctggaggagtggctgcctagggagctgtggcacgagatcaatggactcttggtgggcttcggccagcagacctgtctgcctgtgcaccctcgctgccacgcctgcctcaaccaagccctctgcccggccgcccagggtctctgatggccgcatggctctggccgaggtgccgctgtggccaccgtctgtgaagtggctttacgcttcaggaagccacgcctgttgaataaagctttggtgtgtttgcagatgg

SEQ ID NO: 2847 - DNA, 4914 bp, Homo sapiens
  source 1..4914: mol_type = genomic DNA
cgcccaagtccctctactcgcgagaatctgtctatgatcttctcccaaaggagttacagttacctccatctagagaaacatctgtagcatcaatgagtcagacaagcggtggtgaggcaggctcgcctcctccagctgttgttgctgctggatttgcctctgaagcagggagtgtctgcattaaaaatgacctgtagttctctgcttcatagatgcttcttcagctccctcctcttcctccatgggcggtgcttgcagctcctttaccacctcttccagccctaccatttattctacctcagtcaccgacagcaaggctatgcaagtggagagctgctcctcagccgtgggggtaagtaacagaggggtaagtgaaaagcagttaaccagtaacacagttcagcagcatccatcaacaccgaagaggcacacagtcttgtacatctcaccaccacctgaggacttgctggataacagtcggatgtcctgccaggatgaggggtgtggattggaatctgagcagagctgcagtatgtggatggaggattccccctccaacttcagtaacatgagcaccagttcctacaatgataacactgaggtacctcgtaaatcacgaaaacgaaatccaaagcagaggccgggggtcaaacgacgagattgtgaagaatctaatatggatatatttgatgccgacagtgccaaagcacctcactatgtgctttctcagcttaccacggacaacaaaggcaactcaaaagcgggaaatggaacattggaaaaccaaaaaggaactggagtaaagaagagccctatgttgtgtggacaatatcctgttaaaagtgagggaaaggagctgaagatagttgtacaacctgagacacagcaccgagctcggtacctgactgagggcagccgtggctcagtgaaagatagaacacagcaaggctttcctacagtaaagctggaaggccataatgaacctgtagtgttgcaagtgtttgtgggcaacgactctggacgagtgaaaccacatggattttatcaggcctgcagagtaactggacgaaatacaactccttgcaaagaagtggacattgaaggcactactgttatagaagtcggccttgatcctagcaacaacatgacactggcggtggactgcgtagggatattgaaattgaggaatgctgatgtcgaagccagaataggaattgctggttccaagaagaaaagcactcgtgccagattggtttttcgagttaatatcatgaggaaagatggctccactttgacactgcaaacaccctcttctccaattttgtgtactcagccagcaggagtgccagaaatcttaaagaaaagcttgcatagctgttcagtgaaaggagaagaagaagtgtttttaatcggcaagaactttctgaaaggaactaaagttattttccaagaaaatgtttctgatgaaaactcttggaagtcagaagctgaaattgatatggaactatttcatcagaatcatcttattgtgaaggttcctccctatcatgaccaacatataactttgcctgtgtcagtgggaatatatgtagtgacaaatgctggaagatctcatgatgttcaaccattcacttacactccagacccagcagcagctggtgctttgaatgtaaatgtgaagaaggaaatatctagtccagcaagaccttgctcttttgaagaggccatgaaagcaatgaaaactactggatgtaatttagataaggtaaatattatccctaatgccctgatgactccactcataccaagcagtatgattaagagtgaagatgttactccaatggaagtaacagcagaaaaaagatcttccactatttttaagactacaaagtctgttggatcaactcagcaaacattagaaaacatctcaaacatagcaggaaatggctctttttcatcaccatcatcttcccacctaccttctgaaaatgaaaaacagcagcagattcagcccaaggcatacaacccagagaccctgacaactattcaaacccaggacatctcacagcctggtacttttccagcagtttctgcttctagtcagctgcccaacagcgatgcactattgcagcaggctacacagtttcagacaagagaaactcagtctagagagatattacagtcagatggtacagtggttaatttgtcacaactgactgaggcatcacaacaacagcagcagtcaccactacaagaacaagcacagactttacagcagcagatttcatcaaatatttttccatcaccaaatagtgtgagtcagcttcagaatactattcagcagctgcaagcagggagtttcacaggcagtactgctagtggcagcagtggaagtgttgacttggtccaacaagttttagaggcacagcagcagttatcttcagttttattttctgctccagatggtaatgagaatgttcaagagcagcttagtgcagatatttttcaacaagtcagtcaaattcagagtggtgtaagccctggaatgttttcctcaacagagccaacagtccataccagaccagataatttattacctggaagagctgaaagtgttcatccacagtctgaaaacacgttatctaatcaacagcagcagcagcagcagcaacagcaagtgatggaatcttcagccgcaatggtgatggagatgcaacagagtatctgccaggcagctgcccagattcagtcagagttattcccttcaactgcttcagcaaatggaaaccttcagcaatcgccagtttaccagcagacttctcacatgatgagtgcattgtctaccaatgaggatatgcaaatgcagtgtgaattgttttcttctcctcctgcagtttctggaaatgaaacttctacaactaccacacagcaggttgcaacccctggcactaccatgtttcagacatcaagttcaggagatggagaagaaactggaacacaagcaaaacagattcagaacagtgtctttcagaccatggtccaaatgcaacatagtggggacaatcaacctcaagttaaccttttttcatccacaaaaagtatgatgagtgttcagaatagtggtacccaacaacaaggtaatggtttattccagcaagggaatgagatgatgtcacttcaatctggaaattttttgcagcagtcttctcattcacaggcccaactttttcatcctcaaaatcctattgccgatgctcagaacctttcccaggaaactcaaggttctctctttcatagtccaaatcctattgtccacagtcagacttctacaacctcctctgaacaaatgcagcctccaatgtttcactctcaaagtaccattgctgtgttacagggctcttcagttcctcaagaccagcagtcaaccaacatatttctttcccagagtcccatgaataatcttcagactaacacagtagcccaagaagcattttttgcagcaccgaactcaatttctccacttcagtcaacatcaaacagtgaacaacaagctgctttccaacagcaagctccaatatcacacatccagactcctatgctttcccaagaacaggcacaacccccgcagcagggtttatttcagcctcaggtggccctgggctcccttccacctaatccaatgcctcaaagccaacaaggaaccatgttccagtcacagcactcaatagttgccatgcagagtaactctccatcccaggaacagcagcagcagcagcaacagcagcagcaacagcagcagcaacaacaacagagcattttattcagtaatcagaataccatggctacaatggcgtctccaaagcaaccaccaccaaacatgatattcaacccaaatcaaaatccaatggctaatcaggagcaacagaaccagtcaatttttcaccaacaaagtaacatggccccaatgaatcaagagcaacagcccatgcaatttcagagtcagtccacagtttcctcacttcagaacccaggtcctacccagtcggaatcatcacagacccccttgttccatagctctcctcagattcagttggtacaagggtcacctagttctcaagagcagcaagtaactctcttcttatctccagcatccatgtctgccttgcagaccagtataaatcaacaagatatgcaacagtctcctctttattcccctcagaacaacatgcctggaattcaaggagccacatcttcgcctcaaccacaggctactttatttcacaacacagcaggaggcacaatgaaccaactgcagaattctcctggctcatctcagcagacatcaggaatgttcttatttggcattcaaaataactgtagtcagcttttaacctctggaccagctacattgcctgatcagttgatggccataagtcagccaggccaaccacaaaacgagggccagccacctgtgacaacacttctttctcagcaaatgccagagaattctccactggcatcctctataaacaccaaccagaacatcgaaaagattgatttgcttgtttcattgcaaaaccaagggaacaacttgactggctccttttaactggatatgtaagtattgcattttggcttcttattgaaaagcatcagattttattcttcttaacagatttaggttaagtaatagtagttctaatcttttaaaatgtggctttctcacaagatgatacttttttactctgaataaaattattctgaatgatagcttatggtcatatagttaatacagaccaggccgggcgtggtggctcatgcctgtaatcccagcactttgagagaccaaggtgggcggatcacgaggtcaggcgatcgagaccatcctggctaacatggtgaaaccccgtctct

SEQ ID NO: 2848 - DNA, 6376 bp, Homo sapiens
  source 1..6376: mol_type = genomic DNA
ccgtcctgaacccctctcctggtcaccgagaatcagtccccgtggagttccccctccacctcgccatcgtttcctcggtcctcggcccagtggaagtcactaccctcgaggaggaggcagcggcagccgccctcgcgtcgccgcccccggttcggtgcccgcggtcccggagaggaggtgccgccgccaccgccgctccccccctcccgctgccctcgggccgggctgggtcgagctgcgatgccctcggacttcatctcattgctcagcgcggacctagacctggaatcgcccaagtccctctactcgcgagattctctgaagttacacccatcacagaattttcatagagctggactattggaagaatctgtctatgatcttctcccaaaggagttacagttacctccatctagagaaacatctgtagcatcaatgagtcagacaagcggtggtgaggcaggctcgcctcctccagctgttgttgctgctgatgcttcttcagctccctcctcttcctccatgggcggtgcttgcagctcctttaccacctcttccagccctaccatttattctacctcagtcaccgacagcaaggctatgcaagtggagagctgctcctcagccgtgggggtaagtaacagaggggtaagtgaaaagcagttaaccagtaacacagttcagcagcatccatcaacaccgaagaggcacacagtcttgtacatctcaccaccacctgaggacttgctggataacagtcggatgtcctgccaggatgaggggtgtggattggaatctgagcagagctgcagtatgtggatggaggattccccctccaacttcagtaacatgagcaccagttcctacaatgataacactgaggtacctcgtaaatcacgaaaacgaaatccaaagcagaggccgggggtcaaacgacgagattgtgaagaatctaatatggatatatttgatgccgacagtgccaaagcacctcactatgtgctttctcagcttaccacggacaacaaaggcaactcaaaagcgggaaatggaacattggaaaaccaaaaaggaactggagtaaagaagagccctatgttgtgtggacaatatcctgttaaaagtgagggaaaggagctgaagatagttgtacaacctgagacacagcaccgagctcggtacctgactgagggcagccgtggctcagtgaaagatagaacacagcaaggctttcctacagtaaagctggaaggccataatgaacctgtagtgttgcaagtgtttgtgggcaacgactctggacgagtgaaaccacatggattttatcaggcctgcagagtaactggacgaaatacaactccttgcaaagaagtggacattgaaggcactactgttatagaagtcggccttgatcctagcaacaacatgacactggcggtggactgcgtagggatattgaaattgaggaatgctgatgtcgaagccagaataggaattgctggttccaagaagaaaagcactcgtgccagattggtttttcgagttaatatcatgaggaaagatggctccactttgacactgcaaacaccctcttctccaattttgtgtactcagccagcaggagtgccagaaatcttaaagaaaagcttgcatagctgttcagtgaaaggagaagaagaagtgtttttaatcggcaagaactttctgaaaggaactaaagttattttccaagaaaatgtttctgatgaaaactcttggaagtcagaagctgaaattgatatggaactatttcatcagaatcatcttattgtgaaggttcctccctatcatgaccaacatataactttgcctgtgtcagtgggaatatatgtagtgacaaatgctggaagatctcatgatgttcaaccattcacttacactccagacccagcagctggtgctttgaatgtaaatgtgaagaaggaaatatctagtccagcaagaccttgctcttttgaagaggccatgaaagcaatgaaaactactggatgtaatttagataaggtaaatattatccctaatgccctgatgactccactcataccaagcagtatgattaagagtgaagatgttactccaatggaagtaacagcagaaaaaagatcttccactatttttaagactacaaagtctgttggatcaactcagcaaacattagaaaacatctcaaacatagcaggaaatggctctttttcatcaccatcatcttcccacctaccttctgaaaatgaaaaacagcagcagattcagcccaaggcatacaacccagagaccctgacaactattcaaacccaggacatctcacagcctggtacttttccagcagtttctgcttctagtcagctgcccaacagcgatgcactattgcagcaggctacacagtttcagacaagagaaactcagtctagagagatattacagtcagatggtacagtggttaatttgtcacaactgactgaggcatcacaacaacagcagcagtcaccactacaagaacaagcacagactttacagcagcagatttcatcaaatatttttccatcaccaaatagtgtgagtcagcttcagaatactattcagcagctgcaagcagggagtttcacaggcagtactgctagtggcagcagtggaagtgttgacttggtccaacaagttttagaggcacagcagcagttatcttcagttttattttctgctccagatggtaatgagaatgttcaagagcagcttagtgcagatatttttcaacaagtcagtcaaattcagagtggtgtaagccctggaatgttttcctcaacagagccaacagtccataccagaccagataatttattacctggaagagctgaaagtgttcatccacagtctgaaaacacgttatctaatcaacagcagcagcagcagcagcaacagcaagtgatggaatcttcagccgcaatggtgatggagatgcaacagagtatctgccaggcagctgcccagattcagtcagagttattcccttcaactgcttcagcaaatggaaaccttcagcaatcgccagtttaccagcagacttctcacatgatgagtgcattgtctaccaatgaggatatgcaaatgcagtgtgaattgttttcttctcctcctgcagtttctggaaatgaaacttctacaactaccacacagcaggttgcaacccctggcactaccatgtttcagacatcaagttcaggagatggagaagaaactggaacacaagcaaaacagattcagaacagtgtctttcagaccatggtccaaatgcaacatagtggggacaatcaacctcaagttaaccttttttcatccacaaaaagtatgatgagtgttcagaatagtggtacccaacaacaaggtaatggtttattccagcaagggaatgagatgatgtcacttcaatctggaaattttttgcagcagtcttctcattcacaggcccaactttttcatcctcaaaatcctattgccgatgctcagaacctttcccaggaaactcaaggttctctctttcatagtccaaatcctattgtccacagtcagacttctacaacctcctctgaacaaatgcagcctccaatgtttcactctcaaagtaccattgctgtgttacagggctcttcagttcctcaagaccagcagtcaaccaacatatttctttcccagagtcccatgaataatcttcagactaacacagtagcccaagaagcattttttgcagcaccgaactcaatttctccacttcagtcaacatcaaacagtgaacaacaagctgctttccaacagcaagctccaatatcacacatccagactcctatgctttcccaagaacaggcacaacccccgcagcagggtttatttcagcctcaggtggccctgggctcccttccacctaatccaatgcctcaaagccaacaaggaaccatgttccagtcacagcactcaatagttgccatgcagagtaactctccatcccaggaacagcagcagcagcagcaacagcagcagcaacagcagcagcaacaacaacagagcattttattcagtaatcagaataccatggctacaatggcgtctccaaagcaaccaccaccaaacatgatattcaacccaaatcaaaatccaatggctaatcaggagcaacagaaccagtcaatttttcaccaacaaagtaacatggccccaatgaatcaagagcaacagcccatgcaatttcagagtcagtccacagtttcctcacttcagaacccaggtcctacccagtcggaatcatcacagacccccttgttccatagctctcctcagattcagttggtacaagggtcacctagttctcaagagcagcaagtaactctcttcttatctccagcatccatgtctgccttgcagaccagtataaatcaacaagatatgcaacagtctcctctttattcccctcagaacaacatgcctggaattcaaggagccacatcttcgcctcaaccacaggctactttatttcacaacacagcaggaggcacaatgaaccaactgcagaattctcctggctcatctcagcagacatcaggaatgttcttatttggcattcaaaataactgtagtcagcttttaacctctggaccagctacattgcctgatcagttgatggccataagtcagccaggccaaccacaaaacgagggccagccacctgtgacaacacttctttctcagcaaatgccagagaattctccactggcatcctctataaacaccaaccagaacatcgaaaagattgatttgcttgtttcattgcaaaaccaagggaacaacttgactggctccttttaactggatataaattccacgaagaaaatcctgattccaagatgtcctgagatcttgtggttccatgagaattattactttaaaaacaaaacaaaatataaaaaactgtgtttgagtaaactgatagattttactctgactgcaaaagagcacacctatgctgcttgttgcagtaactaaccaccaatgttaacatcttcatattttatattcctaataacagtgatgactgagaatctatttgagtttccagctggcagaattaattgttattattttcctaggcgcaatttccttaaacgtacagtttaaattcaaggctggaccactcagttattattgctattagaaaataatatatcatgtttacttttgttcttcattattttctttcctgcattgttttagtcaagtaatggcttttgaaaaagtaaagttcaataataactaaggctgtgatttttttcaatataaaaggcacagctgttggccaaagtgaaggaatcttttttcagttttattggagaaactgaagggtaacattctaacaagtaaactgtatgtgcagataaaagtactcttgatttaacacaaaggcagatgatacacttataaaactgggaacagctggaatgcttcttgattttattttttcagagagttgttagttctctgggtttctactaaggggtttagccataactgtgcatagaaaaataattatctgtaaaaaatgaaggggataatatatgataaattatgttctgatatcctcctacagtagtttaaattgacagaaaaatttgaatgttttcttcttaacccagtcttaggctggtattccctttttatatatatctatattacttttcacctctttttcactttactttagagaactattaatatactactggcttcatgaccctgtagcatctttggccactttaatctagggtgacctagcaatcctgcagcacagggcagagagtactgtcttaggaattattaggagttgattcctgagaaacaacacatttttccccatgaacggtgctgttctgaagtcttcaaatttttccctctaataggaaacagtataaattttaattaaaaaaaaaaggcaaactaaaatttcttgaaatatcacttctccctgatctgcagtgagtataaattcacttgtcacctcagtgctttacagtttgaagtggtcacttacctgatggttcccacaagccttaggctttacagggttgtatcattgacttaaaatgaagaattaacttgtgttacatctataaagagcaaaataacacactccagaacttggcagttgtagcattagttatacagttttgggtgttcttgccacccgtgggatgcctgcttctcactaccacctgtgtctggacacatgcttatgtctcattttccttttggcatgtggaaagctgtcaatgcagtgtaaggccaacgtgtgtgtggcttc

SEQ ID NO: 2849 - DNA, 14219 bp, Homo sapiens
  source 1..14219: mol_type = genomic DNA
tgcaacggaaacttttggctccacgaacagaaaagcaagagcaaaaactcagttaaatgcgttcttcctccatctttgcctagtccaaaaggaaaaaaaaagaaacagaaaaaagaaaaactgtttggaagagtagcgttgaggtttgctttttacctgtttttcctctagaacagccaggtggattcacatgatccaattttttaattgtcttctatgtcccactccgaataacccggatgccccagcacaatcagagagatcgttttttttaaaaaaaatttcagcctccaaaggtaggaggggagtgttaggggagaaagtactttaattaaaaatcaataactcgaggtttttgggatacggtttgccatttcctaattaagaaatgggtttgacagtccctttgtacacactgctatgcaaaccccaaagggttggcggctgtccgggcgatgacactccggtcccctgcgagaccccgggccagccaggcccgtccgccgccggcctctggggtccgtccccggctcgcgcagacctctcgcttctctcggctctgtctcctgcgctcagctctgctcggggccggccgcctcaggctcgccgccaccaggtcgttgcaaataccttttccctccccggggccccagcgcgcggccacctcccagcctccccccctcccaccctggcagcggggccctttcccggctcaggaacagcagcagcccgggccgcgccggcaggaagcgaggcccatgttgctgctgttccctggcgcgcctccccgccctccgggggccgccacggctcttccgcgctcccgggcacccccctccgcgcctgcgctgtgccccacgggggcggggctcagattcctgtcagcggcggcggcggtggcggcgaccgtcagttttcgctgaggagaaacacgaaacggaccctttggctctcccccttccccttccccgtcctgaacccctctcctggtcaccgagaatcagtccccgtggagttccccctccacctcgccatcgtttcctcggtcctcggcccagtggaagtcactaccctcgaggaggaggcagcggcagccgccctcgcgtcgccgcccccggttcggtgcccgcggtcccggagaggaggtgccgccgccaccgccgctccccccctcccgctgccctcgggccgggctgggtcgagctgcgatgccctcggacttcatctcattgctcagcgcggacctagacctggaatcgcccaagtccctctactcgcgagattctctgaagttacacccatcacagaattttcatagagctggactattggaagaatctgtctatgatcttctcccaaaggagttacagttacctccatctagagaaacatctgtagcatcaatgagtcagacaagcggtggtgaggcaggctcgcctcctccagctgttgttgctgctggatttgcctctgaagcagggagtgtctgcattaaaaatgacctgtagttctctgcttcatagatgcttcttcagctccctcctcttcctccatgggcggtgcttgcagctcctttaccacctcttccagccctaccatttattctacctcagtcaccgacagcaaggctatgcaagtggagagctgctcctcagccgtgggggtaagtaacagaggggtaagtgaaaagcagttaaccagtaacacagttcagcagcatccatcaacaccgaagaggcacacagtcttgtacatctcaccaccacctgaggacttgctggataacagtcggatgtcctgccaggatgaggggtgtggattggaatctgagcagagctgcagtatgtggatggaggattccccctccaacttcagtaacatgagcaccagttcctacaatgataacactgaggtacctcgtaaatcacgaaaacgaaatccaaagcagaggccgggggtcaaacgacgagattgtgaagaatctaatatggatatatttgatgccgacagtgccaaagcacctcactatgtgctttctcagcttaccacggacaacaaaggcaactcaaaagcgggaaatggaacattggaaaaccaaaaaggaactggagtaaagaagagccctatgttgtgtggacaatatcctgttaaaagtgagggaaaggagctgaagatagttgtacaacctgagacacagcaccgagctcggtacctgactgagggcagccgtggctcagtgaaagatagaacacagcaaggctttcctacagtaaagctggaaggccataatgaacctgtagtgttgcaagtgtttgtgggcaacgactctggacgagtgaaaccacatggattttatcaggcctgcagagtaactggacgaaatacaactccttgcaaagaagtggacattgaaggcactactgttatagaagtcggccttgatcctagcaacaacatgacactggcggtggactgcgtagggatattgaaattgaggaatgctgatgtcgaagccagaataggaattgctggttccaagaagaaaagcactcgtgccagattggtttttcgagttaatatcatgaggaaagatggctccactttgacactgcaaacaccctcttctccaattttgtgtactcagccagcaggagtgccagaaatcttaaagaaaagcttgcatagctgttcagtgaaaggagaagaagaagtgtttttaatcggcaagaactttctgaaaggaactaaagttattttccaagaaaatgtttctgatgaaaactcttggaagtcagaagctgaaattgatatggaactatttcatcagaatcatcttattgtgaaggttcctccctatcatgaccaacatataactttgcctgtgtcagtgggaatatatgtagtgacaaatgctggaagatctcatgatgttcaaccattcacttacactccagacccagcagcagctggtgctttgaatgtaaatgtgaagaaggaaatatctagtccagcaagaccttgctcttttgaagaggccatgaaagcaatgaaaactactggatgtaatttagataaggtaaatattatccctaatgccctgatgactccactcataccaagcagtatgattaagagtgaagatgttactccaatggaagtaacagcagaaaaaagatcttccactatttttaagactacaaagtctgttggatcaactcagcaaacattagaaaacatctcaaacatagcaggaaatggctctttttcatcaccatcatcttcccacctaccttctgaaaatgaaaaacagcagcagattcagcccaaggcatacaacccagagaccctgacaactattcaaacccaggacatctcacagcctggtacttttccagcagtttctgcttctagtcagctgcccaacagcgatgcactattgcagcaggctacacagtttcagacaagagaaactcagtctagagagatattacagtcagatggtacagtggttaatttgtcacaactgactgaggcatcacaacaacagcagcagtcaccactacaagaacaagcacagactttacagcagcagatttcatcaaatatttttccatcaccaaatagtgtgagtcagcttcagaatactattcagcagctgcaagcagggagtttcacaggcagtactgctagtggcagcagtggaagtgttgacttggtccaacaagttttagaggcacagcagcagttatcttcagttttattttctgctccagatggtaatgagaatgttcaagagcagcttagtgcagatatttttcaacaagtcagtcaaattcagagtggtgtaagccctggaatgttttcctcaacagagccaacagtccataccagaccagataatttattacctggaagagctgaaagtgttcatccacagtctgaaaacacgttatctaatcaacagcagcagcagcagcagcaacagcaagtgatggaatcttcagccgcaatggtgatggagatgcaacagagtatctgccaggcagctgcccagattcagtcagagttattcccttcaactgcttcagcaaatggaaaccttcagcaatcgccagtttaccagcagacttctcacatgatgagtgcattgtctaccaatgaggatatgcaaatgcagtgtgaattgttttcttctcctcctgcagtttctggaaatgaaacttctacaactaccacacagcaggttgcaacccctggcactaccatgtttcagacatcaagttcaggagatggagaagaaactggaacacaagcaaaacagattcagaacagtgtctttcagaccatggtccaaatgcaacatagtggggacaatcaacctcaagttaaccttttttcatccacaaaaagtatgatgagtgttcagaatagtggtacccaacaacaaggtaatggtttattccagcaagggaatgagatgatgtcacttcaatctggaaattttttgcagcagtcttctcattcacaggcccaactttttcatcctcaaaatcctattgccgatgctcagaacctttcccaggaaactcaaggttctctctttcatagtccaaatcctattgtccacagtcagacttctacaacctcctctgaacaaatgcagcctccaatgtttcactctcaaagtaccattgctgtgttacagggctcttcagttcctcaagaccagcagtcaaccaacatatttctttcccagagtcccatgaataatcttcagactaacacagtagcccaagaagcattttttgcagcaccgaactcaatttctccacttcagtcaacatcaaacagtgaacaacaagctgctttccaacagcaagctccaatatcacacatccagactcctatgctttcccaagaacaggcacaacccccgcagcagggtttatttcagcctcaggtggccctgggctcccttccacctaatccaatgcctcaaagccaacaaggaaccatgttccagtcacagcactcaatagttgccatgcagagtaactctccatcccaggaacagcagcagcagcagcaacagcagcagcaacagcagcagcaacaacaacagagcattttattcagtaatcagaataccatggctacaatggcgtctccaaagcaaccaccaccaaacatgatattcaacccaaatcaaaatccaatggctaatcaggagcaacagaaccagtcaatttttcaccaacaaagtaacatggccccaatgaatcaagagcaacagcccatgcaatttcagagtcagtccacagtttcctcacttcagaacccaggtcctacccagtcggaatcatcacagacccccttgttccatagctctcctcagattcagttggtacaagggtcacctagttctcaagagcagcaagtaactctcttcttatctccagcatccatgtctgccttgcagaccagtataaatcaacaagatatgcaacagtctcctctttattcccctcagaacaacatgcctggaattcaaggagccacatcttcgcctcaaccacaggctactttatttcacaacacagcaggaggcacaatgaaccaactgcagaattctcctggctcatctcagcagacatcaggaatgttcttatttggcattcaaaataactgtagtcagcttttaacctctggaccagctacattgcctgatcagttgatggccataagtcagccaggccaaccacaaaacgagggccagccacctgtgacaacacttctttctcagcaaatgccagagaattctccactggcatcctctataaacaccaaccagaacatcgaaaagattgatttgcttgtttcattgcaaaaccaagggaacaacttgactggctccttttaactggatataaattccacgaagaaaatcctgattccaagatgtcctgagatcttgtggttccatgagaattattactttaaaaacaaaacaaaatataaaaaactgtgtttgagtaaactgatagattttactctgactgcaaaagagcacacctatgctgcttgttgcagtaactaaccaccaatgttaacatcttcatattttatattcctaataacagtgatgactgagaatctatttgagtttccagctggcagaattaattgttattattttcctaggcgcaatttccttaaacgtacagtttaaattcaaggctggaccactcagttattattgctattagaaaataatatatcatgtttacttttgttcttcattattttctttcctgcattgttttagtcaagtaatggcttttgaaaaagtaaagttcaataataactaaggctgtgatttttttcaatataaaaggcacagctgttggccaaagtgaaggaatcttttttcagttttattggagaaactgaagggtaacattctaacaagtaaactgtatgtgcagataaaagtactcttgatttaacacaaaggcagatgatacacttataaaactgggaacagctggaatgcttcttgattttattttttcagagagttgttagttctctgggtttctactaaggggtttagccataactgtgcatagaaaaataattatctgtaaaaaatgaaggggataatatatgataaattatgttctgatatcctcctacagtagtttaaattgacagaaaaatttgaatgttttcttcttaacccagtcttaggctggtattccctttttatatatatctatattacttttcacctctttttcactttactttagagaactattaatatactactggcttcatgaccctgtagcatctttggccactttaatctagggtgacctagcaatcctgcagcacagggcagagagtactgtcttaggaattattaggagttgattcctgagaaacaacacatttttccccatgaacggtgctgttctgaagtcttcaaatttttccctctaataggaaacagtataaattttaattaaaaaaaaaaggcaaactaaaatttcttgaaatatcacttctccctgatctgcagtgagtataaattcacttgtcacctcagtgctttacagtttgaagtggtcacttacctgatggttcccacaagccttaggctttacagggttgtatcattgacttaaaatgaagaattaacttgtgttacatctataaagagcaaaataacacactccagaacttggcagttgtagcattagttatacagttttgggtgttcttgccacccgtgggatgcctgcttctcactaccacctgtgtctggacacatgcttatgtctcattttccttttggcatgtggaaagctgtcaatgcagtgtaaggccaacgtgtgtgtggcttctatgtgttgagataatgttttggtatccttgtccgtttcatttattttttaagtgtacaaaaaataacctgttaattgttgaaggctacttttctgttctttttttttttttttttctatcctgtacatttagttgaactgtgcggaattgtggtgttggttttgtttacacagccagatttttccttctttttgttttgtgatgatcttcctttgttctttgaatgtgctcttttgtctttttctcttttttctcatgttttcttccctccacctccacccctttctttctttctctctctgattgagaggcattgaattacgttttcagtagtacaggcttcttgccgatatgaagggaacttttcagaaagagacctactctgggtcatttaattttgaatacagttttcaatcgttcaagttttggatggtttatatctaatgtgtgtttcatttttttggaaagctatattttgtatttaggaaatggtatactattttgctatttgtactgagtgagtacattggcataaatatagaaatttatatatatacatatatataaactattcttttttgccacacatttttgtggtaaatttgtgagtttgtctgatgttctaccacaacgtggcgtctgataacagtgagggggggtggggtttgttatgtctttattgagtatttaagtatcttttgaaacaaatgacctgttcatctgtggccattccatcaggcagttagttccttgatgtcagtagtgggctaaaggcagcttactgtgtgtttgctggagctttcactcagccaagtgttagagtcaggaaacccattgaggcaatggcgtcaaatggtgtttcacaagaatgagccattcagtctttgctcactatatatttaatattttattattgttgttattgttattattaattggctttctgtattctatgccttttatttataaagacactaagaaaacccatgtttgtaattttaataacatttttcccatcttgtaatatccagagctactttataaattctctgaaccaaaagtattttcctcagtgtatctcttctcccccagcccctattgggaaaaattacccagtatagttcaggttatgaggaggatcagccacacaatccagtgcttcagtttgaaaatgtaaaattctaaccctaaagtagggttggttgaaatttcagacaaagcaaacccagcaggtataaaaagtagtataaatacaaatctgtaagttatttttgaattttctgaacttttttctaagagattacataggagactaaagaaatctatctgttcaagttctaattaggatgattgttaatactgcactgtggatgaagtggcgactggcttgtgtgctgacttctgtggtttagcaagaggtttattgttatcaaatgctaattggcaatgccaagtcactgggaccaattttctgttttataatatctaagtttagaacagaatatatacctgaactgtagtggtttgatcggatggagacagaaaacccgatttttattctcataaattttgtggttatttatacaagggctgtgctatgctaccatattcttgttcaataataataggtttgttgttttttttacattgttaaatgttccttacccctaaaggtcaatgttaagtacaacattctgaaaatacaatttggctacgaagagtattcatcttctttgaagctcagtggttgatatttgtgctaataatgcaatttcctgattactgttacaagttatagctacatatgggagagactcagtgagccagcaaaggccatagaaacaacaatttattaaatgtatttatggcagaaggacctaaataaactgtgagccaccttttcttctttatattgttacatttaagtgttcttgctttcagcaactcacattaatgcttggagcttatctctttctctctctctctctctctctctgtgtgtgtgtgtgtatgtgtgtgtgtgtgtgtgtgtgtttccttattgtcattccattatatatccacaccaacatgggtgacgataattcaaagtcatattttgcctctaagcttgatcatgttacctttatgattaaagtatcatgttatttagccaatgcaaatctgttttaaaacaaatagtttaaaaaaagaacaagtttttaagggctttattatagaagaagtattaatgaaggactttccttcctccctccctttcctcccctccctgcctcccttcttcccttccatctccccctcctccctgccttctttgtttctccttcccttattcctccctccctcctttctcccttccttcctttcttccattcatccttccttgccttttatttttattttttgtaatatcacatgtgctgtagtttggaattttattctagtgcatttcttgctcatcagaacctcagctaatctacctaggaaaaatagtatcaaaggaaatgagaaagttgtatctgagtccctccagaactaagataattctttttgaccatttaagcctttataaatgcgttttgaccatttaagcctttataaatgcttgttttaggaaagtgaatctgttagatgcatcaacaaataatgaccaggacaaaacgatttaataattaaagtctcaaatcaccatggttatacattttcaccagaaatagtaatcttacaatttttcatttttctgatgaagatttctgttccaatatctgtttcctaatagattttttaaattaattagctttcctctgctttatgaccacaggttttatccctaaccgagacagctgtcttatatctgcatgccttagactgtgtggagggactccatgaagaaagaccataggttagaaaaataactcatagtatataccctagtaagtgggttagtagaatctcataacatgtattaaaaagaggttttcttctctgcttgtttgtgtcactagagcaaaattgtagagataatgctcataatgcagtaaatatcagaataatatctacaatatcatttgtggatggtcccaggtcccagtgctctagttactttacttctttttttttttttgagatggagtcttgctctgtctctcaggctagagcagtgtgcgatctcagctcactgcagcctccacctcccaggttcaagcgattctcctgcctcagcctcccaagtagccaggattacaggcaccctccactaggcccggctaattttttttgtatttttttagtagagatggggttttgccatgttggccaggctggtttcgaactcctaacctccagtgatccacctgcctcggcgtcccaaagtgctaggattacaggcatgagccaccacatccggcctaattacttctttaatccccatttatttttatgccattctagcctcatttattaataaaattatgtttttactttctctttcaggaaattttttaaattaatattttatatctagatctaatgctatggaaaagtgcctttttatcatttataatttcatttttcactatttccaaaaacacataaacaaatagtttcagtaggtcccagcttttactttttccatttaaaccttcttttctccatttcttccctttggcttaagaataaaagaaaaggtacattgctagaattgtttctttgggagagggtaaaagattacagaattagactgttcagcctttatataaactaaatttgtcttcatctcaaccagctaatggtaggtcttatctgaatactcatgagaattttagcatctgtgaaactccatgcaccagatgtgtgtaaatttcaggaagaaagtgttgaaagcattttctctgatgttaattagatggaaataaatcactaaaacatagtttaggtaaagcctgattatgccacttttttttaactagacagggcaaagttgtttatgttagtgtacttcttgtctatcctcagttaatttacctagacaaaaagtgtcaaaggaaatgagaaaaaggttatatctgactccctccagacctaagataattccttttgatcagatacagtcagatggagtgccttggtttttgttaattttgcctctattccagctccttaccacagcggtggtgcttaaagaaaggatcatcagcaacaggtcaggatagttctacctttgggatagggctgctttccccgtgctagtatttctgtgactgttagtggcactgaggactgcaaacttttatgcaatattcttaataccctattgatattatgcactttaatcattccaaagaagccaagaatgctgtatagtgatgattccttcctaatgaattcatcttaactatttagaatgttatgtcccttttcttttggatagccaacttggtataaatgttatatggatttttctaaaatgactatataggacttaagactttgaaatgtaatttacttataaggggaaataattatgctttagcacatcattttagaaacgtcacattttagaaacattcagcttgctaacctacatgtttgggaattcattaaaaccagttgtctatatattttgtgccatgtatataagaacattacaatatatctttttctacatatgtagtatgtgcaaccagtggttctcagagtatggttctcagcccaccagctagtatcagtatcacctgggaactagttagaaatgtaaattctttggccccatcccagacatactgagtcagaaactctggaatagggcccccgcaatctgttttcacaagccctccaggtgattctgatgcacactttaaagtttaggaaccactgggctaagactctgttgagatatagagtttttcttccactcagactgatatagttatacattgttcttcatgtaaattcagcttaacctggttatctataatcttttattggcaaaagttaattctcagtactgcctatagagatacagtgtattttatgtacatacacaattagtctaattcttgataattcagttaatttagtttggcattttcctaccacttactaaaaggtttacattaaatgactgatttaaatatataggtgcaatgttctatgtttattttaattgttatgacatttaagtagctaatataattgaccggtgctaaagtctcctgtttatccataaaatgggtacattatgggcagtgtaatacaagctttcttttcattgcctagtactttaccagcagaccacagttttgccctggctagaccaaccctcagaacaaaatcatcattccttgtatttatatttgtatctgagatagtaaacaagatggctggccaggtcaacatggcaccttaacttatttttttaataggtaaaacttcttcaaaagtagcttgctttgtataagaactaagctatcagtatagatatagctatccttggagcttatgtttcagacaagaattatttactaaaataaataataaacaagataatgcattatacaatttgggcatttctcgtttctcaagtgtatgcatcatggtaaatataaactaaccacaagataggtagattgattcatttcattttaatctccttgtgtaattcagtacctccataattgttctaatcttcttcccactgtttacaaattaccagttaattaactcgtgaaagaaaaattcacatatcagaataaaaataaatgtatactcactttataaaaatcaccactgctgtctttccttaatactagcagtggaaatgtaagtggcttactctacaaattttggtgctggcaaatacataggcaaactgttgggagctgctctagttacattcctcccttcttattccctttttctcttcctcactttattgcataacatattcctgtacccaaagcattctaccacagttctatttgactcccacttgtaataactcctttaaaaaattccatgtttaaccatatgaccctgcttgcttactcatattctccctccctctccccttcctttctctctcttccagaagtcatttgcctggtttgaaatattttgtagggattgcttattatattattttagctgatgaacctcaggacaacgtctacacacacacacatacatacacgcacacaaaatctcagctgttgaagagtgggcttggaatcagacttctgtgtccagtaaaaaactcctgcactgaagtcattgtgacttgagtagttacagactgattccagtgaacttgatctaatttcttttgatctaatgaatgtgtctgcttaccttgtttccttttaattgataagctccaagtagttgctaattttttgacaactttaaatgagtttcattcacttcttttacttaatgttttaagtatagtaccaataatttcattaacctgttctcaagtggtttagctaccattctgccatttttaatttttatttaattttatttgcttgagcacactgatcaaccactgaactgccttcttccattgtcctgcaatgatataagggttacatttttgtgtatatggctttcatagttgggatttcagagcactgataccagatattttcagtttgttctctgggggaatttcatttgcatctatgtttttagctatctgtgataacttgttaaatattaaaaagatattttgcttctattggaacatttgtatactcgcaactatatttctgtaaacagctgcagtcaaaaataaaacactgaaagtt

SEQ ID NO: 2850 - DNA, 13229 bp, Homo sapiens
  source 1..13229: mol_type = genomic DNA
gcggcggtggcggcgaccgtcagttttcgctgaggagaaacacgaaacggaccctttggctctcccccttccccttccccgtcctgaacccctctcctggtcaccgagaatcagtccccgtggagttccccctccacctcgccatcgtttcctcggtcctcggcccagtggaagtcactaccctcgaggaggaggcagcggcagccgccctcgcgtcgccgcccccggttcggtgcccgcggtcccggagaggaggtgccgccgccaccgccgctccccccctcccgctgccctcgggccgggctgggtcgagctgcgatgccctcggacttcatctcattgctcagcgcggacctagacctggaatcgcccaagtccctctactcgcgagaatctgtctatgatcttctcccaaaggagttacagttacctccatctagagaaacatctgtagcatcaatgagtcagacaagcggtggtgaggcaggctcgcctcctccagctgttgttgctgctgatgcttcttcagctccctcctcttcctccatgggcggtgcttgcagctcctttaccacctcttccagccctaccatttattctacctcagtcaccgacagcaaggctatgcaagtggagagctgctcctcagccgtgggggtaagtaacagaggggtaagtgaaaagcagttaaccagtaacacagttcagcagcatccatcaacaccgaagaggcacacagtcttgtacatctcaccaccacctgaggacttgctggataacagtcggatgtcctgccaggatgaggggtgtggattggaatctgagcagagctgcagtatgtggatggaggattccccctccaacttcagtaacatgagcaccagttcctacaatgataacactgaggtacctcgtaaatcacgaaaacgaaatccaaagcagaggccgggggtcaaacgacgagattgtgaagaatctaatatggatatatttgatgccgacagtgccaaagcacctcactatgtgctttctcagcttaccacggacaacaaaggcaactcaaaagcgggaaatggaacattggaaaaccaaaaaggaactggagtaaagaagagccctatgttgtgtggacaatatcctgttaaaagtgagggaaaggagctgaagatagttgtacaacctgagacacagcaccgagctcggtacctgactgagggcagccgtggctcagtgaaagatagaacacagcaaggctttcctacagtaaagctggaaggccataatgaacctgtagtgttgcaagtgtttgtgggcaacgactctggacgagtgaaaccacatggattttatcaggcctgcagagtaactggacgaaatacaactccttgcaaagaagtggacattgaaggcactactgttatagaagtcggccttgatcctagcaacaacatgacactggcggtggactgcgtagggatattgaaattgaggaatgctgatgtcgaagccagaataggaattgctggttccaagaagaaaagcactcgtgccagattggtttttcgagttaatatcatgaggaaagatggctccactttgacactgcaaacaccctcttctccaattttgtgtactcagccagcaggagtgccagaaatcttaaagaaaagcttgcatagctgttcagtgaaaggagaagaagaagtgtttttaatcggcaagaactttctgaaaggaactaaagttattttccaagaaaatgtttctgatgaaaactcttggaagtcagaagctgaaattgatatggaactatttcatcagaatcatcttattgtgaaggttcctccctatcatgaccaacatataactttgcctgtgtcagtgggaatatatgtagtgacaaatgctggaagatctcatgatgttcaaccattcacttacactccagacccagcagcagctggtgctttgaatgtaaatgtgaagaaggaaatatctagtccagcaagaccttgctcttttgaagaggccatgaaagcaatgaaaactactggatgtaatttagataaggtaaatattatccctaatgccctgatgactccactcataccaagcagtatgattaagagtgaagatgttactccaatggaagtaacagcagaaaaaagatcttccactatttttaagactacaaagtctgttggatcaactcagcaaacattagaaaacatctcaaacatagcaggaaatggctctttttcatcaccatcatcttcccacctaccttctgaaaatgaaaaacagcagcagattcagcccaaggcatacaacccagagaccctgacaactattcaaacccaggacatctcacagcctggtacttttccagcagtttctgcttctagtcagctgcccaacagcgatgcactattgcagcaggctacacagtttcagacaagagaaactcagtctagagagatattacagtcagatggtacagtggttaatttgtcacaactgactgaggcatcacaacaacagcagcagtcaccactacaagaacaagcacagactttacagcagcagatttcatcaaatatttttccatcaccaaatagtgtgagtcagcttcagaatactattcagcagctgcaagcagggagtttcacaggcagtactgctagtggcagcagtggaagtgttgacttggtccaacaagttttagaggcacagcagcagttatcttcagttttattttctgctccagatggtaatgagaatgttcaagagcagcttagtgcagatatttttcaacaagtcagtcaaattcagagtggtgtaagccctggaatgttttcctcaacagagccaacagtccataccagaccagataatttattacctggaagagctgaaagtgttcatccacagtctgaaaacacgttatctaatcaacagcagcagcagcagcagcaacagcaagtgatggaatcttcagccgcaatggtgatggagatgcaacagagtatctgccaggcagctgcccagattcagtcagagttattcccttcaactgcttcagcaaatggaaaccttcagcaatcgccagtttaccagcagacttctcacatgatgagtgcattgtctaccaatgaggatatgcaaatgcagtgtgaattgttttcttctcctcctgcagtttctggaaatgaaacttctacaactaccacacagcaggttgcaacccctggcactaccatgtttcagacatcaagttcaggagatggagaagaaactggaacacaagcaaaacagattcagaacagtgtctttcagaccatggtccaaatgcaacatagtggggacaatcaacctcaagttaaccttttttcatccacaaaaagtatgatgagtgttcagaatagtggtacccaacaacaaggtaatggtttattccagcaagggaatgagatgatgtcacttcaatctggaaattttttgcagcagtcttctcattcacaggcccaactttttcatcctcaaaatcctattgccgatgctcagaacctttcccaggaaactcaaggttctctctttcatagtccaaatcctattgtccacagtcagacttctacaacctcctctgaacaaatgcagcctccaatgtttcactctcaaagtaccattgctgtgttacagggctcttcagttcctcaagaccagcagtcaaccaacatatttctttcccagagtcccatgaataatcttcagactaacacagtagcccaagaagcattttttgcagcaccgaactcaatttctccacttcagtcaacatcaaacagtgaacaacaagctgctttccaacagcaagctccaatatcacacatccagactcctatgctttcccaagaacaggcacaacccccgcagcagggtttatttcagcctcaggtggccctgggctcccttccacctaatccaatgcctcaaagccaacaaggaaccatgttccagtcacagcactcaatagttgccatgcagagtaactctccatcccaggaacagcagcagcagcagcaacagcagcagcaacagcagcagcaacaacaacagagcattttattcagtaatcagaataccatggctacaatggcgtctccaaagcaaccaccaccaaacatgatattcaacccaaatcaaaatccaatggctaatcaggagcaacagaaccagtcaatttttcaccaacaaagtaacatggccccaatgaatcaagagcaacagcccatgcaatttcagagtcagtccacagtttcctcacttcagaacccaggtcctacccagtcggaatcatcacagacccccttgttccatagctctcctcagattcagttggtacaagggtcacctagttctcaagagcagcaagtaactctcttcttatctccagcatccatgtctgccttgcagaccagtataaatcaacaagatatgcaacagtctcctctttattcccctcagaacaacatgcctggaattcaaggagccacatcttcgcctcaaccacaggctactttatttcacaacacagcaggaggcacaatgaaccaactgcagaattctcctggctcatctcagcagacatcaggaatgttcttatttggcattcaaaataactgtagtcagcttttaacctctggaccagctacattgcctgatcagttgatggccataagtcagccaggccaaccacaaaacgagggccagccacctgtgacaacacttctttctcagcaaatgccagagaattctccactggcatcctctataaacaccaaccagaacatcgaaaagattgatttgcttgtttcattgcaaaaccaagggaacaacttgactggctccttttaactggatataaattccacgaagaaaatcctgattccaagatgtcctgagatcttgtggttccatgagaattattactttaaaaacaaaacaaaatataaaaaactgtgtttgagtaaactgatagattttactctgactgcaaaagagcacacctatgctgcttgttgcagtaactaaccaccaatgttaacatcttcatattttatattcctaataacagtgatgactgagaatctatttgagtttccagctggcagaattaattgttattattttcctaggcgcaatttccttaaacgtacagtttaaattcaaggctggaccactcagttattattgctattagaaaataatatatcatgtttacttttgttcttcattattttctttcctgcattgttttagtcaagtaatggcttttgaaaaagtaaagttcaataataactaaggctgtgatttttttcaatataaaaggcacagctgttggccaaagtgaaggaatcttttttcagttttattggagaaactgaagggtaacattctaacaagtaaactgtatgtgcagataaaagtactcttgatttaacacaaaggcagatgatacacttataaaactgggaacagctggaatgcttcttgattttattttttcagagagttgttagttctctgggtttctactaaggggtttagccataactgtgcatagaaaaataattatctgtaaaaaatgaaggggataatatatgataaattatgttctgatatcctcctacagtagtttaaattgacagaaaaatttgaatgttttcttcttaacccagtcttaggctggtattccctttttatatatatctatattacttttcacctctttttcactttactttagagaactattaatatactactggcttcatgaccctgtagcatctttggccactttaatctagggtgacctagcaatcctgcagcacagggcagagagtactgtcttaggaattattaggagttgattcctgagaaacaacacatttttccccatgaacggtgctgttctgaagtcttcaaatttttccctctaataggaaacagtataaattttaattaaaaaaaaaaggcaaactaaaatttcttgaaatatcacttctccctgatctgcagtgagtataaattcacttgtcacctcagtgctttacagtttgaagtggtcacttacctgatggttcccacaagccttaggctttacagggttgtatcattgacttaaaatgaagaattaacttgtgttacatctataaagagcaaaataacacactccagaacttggcagttgtagcattagttatacagttttgggtgttcttgccacccgtgggatgcctgcttctcactaccacctgtgtctggacacatgcttatgtctcattttccttttggcatgtggaaagctgtcaatgcagtgtaaggccaacgtgtgtgtggcttctatgtgttgagataatgttttggtatccttgtccgtttcatttattttttaagtgtacaaaaaataacctgttaattgttgaaggctacttttctgttctttttttttttttttttctatcctgtacatttagttgaactgtgcggaattgtggtgttggttttgtttacacagccagatttttccttctttttgttttgtgatgatcttcctttgttctttgaatgtgctcttttgtctttttctcttttttctcatgttttcttccctccacctccacccctttctttctttctctctctgattgagaggcattgaattacgttttcagtagtacaggcttcttgccgatatgaagggaacttttcagaaagagacctactctgggtcatttaattttgaatacagttttcaatcgttcaagttttggatggtttatatctaatgtgtgtttcatttttttggaaagctatattttgtatttaggaaatggtatactattttgctatttgtactgagtgagtacattggcataaatatagaaatttatatatatacatatatataaactattcttttttgccacacatttttgtggtaaatttgtgagtttgtctgatgttctaccacaacgtggcgtctgataacagtgagggggggtggggtttgttatgtctttattgagtatttaagtatcttttgaaacaaatgacctgttcatctgtggccattccatcaggcagttagttccttgatgtcagtagtgggctaaaggcagcttactgtgtgtttgctggagctttcactcagccaagtgttagagtcaggaaacccattgaggcaatggcgtcaaatggtgtttcacaagaatgagccattcagtctttgctcactatatatttaatattttattattgttgttattgttattattaattggctttctgtattctatgccttttatttataaagacactaagaaaacccatgtttgtaattttaataacatttttcccatcttgtaatatccagagctactttataaattctctgaaccaaaagtattttcctcagtgtatctcttctcccccagcccctattgggaaaaattacccagtatagttcaggttatgaggaggatcagccacacaatccagtgcttcagtttgaaaatgtaaaattctaaccctaaagtagggttggttgaaatttcagacaaagcaaacccagcaggtataaaaagtagtataaatacaaatctgtaagttatttttgaattttctgaacttttttctaagagattacataggagactaaagaaatctatctgttcaagttctaattaggatgattgttaatactgcactgtggatgaagtggcgactggcttgtgtgctgacttctgtggtttagcaagaggtttattgttatcaaatgctaattggcaatgccaagtcactgggaccaattttctgttttataatatctaagtttagaacagaatatatacctgaactgtagtggtttgatcggatggagacagaaaacccgatttttattctcataaattttgtggttatttatacaagggctgtgctatgctaccatattcttgttcaataataataggtttgttgttttttttacattgttaaatgttccttacccctaaaggtcaatgttaagtacaacattctgaaaatacaatttggctacgaagagtattcatcttctttgaagctcagtggttgatatttgtgctaataatgcaatttcctgattactgttacaagttatagctacatatgggagagactcagtgagccagcaaaggccatagaaacaacaatttattaaatgtatttatggcagaaggacctaaataaactgtgagccaccttttcttctttatattgttacatttaagtgttcttgctttcagcaactcacattaatgcttggagcttatctctttctctctctctctctctctctctgtgtgtgtgtgtgtatgtgtgtgtgtgtgtgtgtgtgtttccttattgtcattccattatatatccacaccaacatgggtgacgataattcaaagtcatattttgcctctaagcttgatcatgttacctttatgattaaagtatcatgttatttagccaatgcaaatctgttttaaaacaaatagtttaaaaaaagaacaagtttttaagggctttattatagaagaagtattaatgaaggactttccttcctccctccctttcctcccctccctgcctcccttcttcccttccatctccccctcctccctgccttctttgtttctccttcccttattcctccctccctcctttctcccttccttcctttcttccattcatccttccttgccttttatttttattttttgtaatatcacatgtgctgtagtttggaattttattctagtgcatttcttgctcatcagaacctcagctaatctacctaggaaaaatagtatcaaaggaaatgagaaagttgtatctgagtccctccagaactaagataattctttttgaccatttaagcctttataaatgcgttttgaccatttaagcctttataaatgcttgttttaggaaagtgaatctgttagatgcatcaacaaataatgaccaggacaaaacgatttaataattaaagtctcaaatcaccatggttatacattttcaccagaaatagtaatcttacaatttttcatttttctgatgaagatttctgttccaatatctgtttcctaatagattttttaaattaattagctttcctctgctttatgaccacaggttttatccctaaccgagacagctgtcttatatctgcatgccttagactgtgtggagggactccatgaagaaagaccataggttagaaaaataactcatagtatataccctagtaagtgggttagtagaatctcataacatgtattaaaaagaggttttcttctctgcttgtttgtgtcactagagcaaaattgtagagataatgctcataatgcagtaaatatcagaataatatctacaatatcatttgtggatggtcccaggtcccagtgctctagttactttacttctttttttttttttgagatggagtcttgctctgtctctcaggctagagcagtgtgcgatctcagctcactgcagcctccacctcccaggttcaagcgattctcctgcctcagcctcccaagtagccaggattacaggcaccctccactaggcccggctaattttttttgtatttttttagtagagatggggttttgccatgttggccaggctggtttcgaactcctaacctccagtgatccacctgcctcggcgtcccaaagtgctaggattacaggcatgagccaccacatccggcctaattacttctttaatccccatttatttttatgccattctagcctcatttattaataaaattatgtttttactttctctttcaggaaattttttaaattaatattttatatctagatctaatgctatggaaaagtgcctttttatcatttataatttcatttttcactatttccaaaaacacataaacaaatagtttcagtaggtcccagcttttactttttccatttaaaccttcttttctccatttcttccctttggcttaagaataaaagaaaaggtacattgctagaattgtttctttgggagagggtaaaagattacagaattagactgttcagcctttatataaactaaatttgtcttcatctcaaccagctaatggtaggtcttatctgaatactcatgagaattttagcatctgtgaaactccatgcaccagatgtgtgtaaatttcaggaagaaagtgttgaaagcattttctctgatgttaattagatggaaataaatcactaaaacatagtttaggtaaagcctgattatgccacttttttttaactagacagggcaaagttgtttatgttagtgtacttcttgtctatcctcagttaatttacctagacaaaaagtgtcaaaggaaatgagaaaaaggttatatctgactccctccagacctaagataattccttttgatcagatacagtcagatggagtgccttggtttttgttaattttgcctctattccagctccttaccacagcggtggtgcttaaagaaaggatcatcagcaacaggtcaggatagttctacctttgggatagggctgctttccccgtgctagtatttctgtgactgttagtggcactgaggactgcaaacttttatgcaatattcttaataccctattgatattatgcactttaatcattccaaagaagccaagaatgctgtatagtgatgattccttcctaatgaattcatcttaactatttagaatgttatgtcccttttcttttggatagccaacttggtataaatgttatatggatttttctaaaatgactatataggacttaagactttgaaatgtaatttacttataaggggaaataattatgctttagcacatcattttagaaacgtcacattttagaaacattcagcttgctaacctacatgtttgggaattcattaaaaccagttgtctatatattttgtgccatgtatataagaacattacaatatatctttttctacatatgtagtatgtgcaaccagtggttctcagagtatggttctcagcccaccagctagtatcagtatcacctgggaactagttagaaatgtaaattctttggccccatcccagacatactgagtcagaaactctggaatagggcccccgcaatctgttttcacaagccctccaggtgattctgatgcacactttaaagtttaggaaccactgggctaagactctgttgagatatagagtttttcttccactcagactgatatagttatacattgttcttcatgtaaattcagcttaacctggttatctataatcttttattggcaaaagttaattctcagtactgcctatagagatacagtgtattttatgtacatacacaattagtctaattcttgataattcagttaatttagtttggcattttcctaccacttactaaaaggtttacattaaatgactgatttaaatatataggtgcaatgttctatgtttattttaattgttatgacatttaagtagctaatataattgaccggtgctaaagtctcctgtttatccataaaatgggtacattatgggcagtgtaatacaagctttcttttcattgcctagtactttaccagcagaccacagttttgccctggctagaccaaccctcagaacaaaatcatcattccttgtatttatatttgtatctgagatagtaaacaagatggctggccaggtcaacatggcaccttaacttatttttttaataggtaaaacttcttcaaaagtagcttgctttgtataagaactaagctatcagtatagatatagctatccttggagcttatgtttcagacaagaattatttactaaaataaataataaacaagataatgcattatacaatttgggcatttctcgtttctcaagtgtatgcatcatggtaaatataaactaaccacaagataggtagattgattcatttcattttaatctccttgtgtaattcagtacctccataattgttctaatcttcttcccactgtttacaaattaccagttaattaactcgtgaaagaaaaattcacatatcagaataaaaataaatgtatactcactttataaaaatcaccactgctgtctttccttaatactagcagtggaaatgtaagtggcttactctacaaattttggtgctggcaaatacataggcaaactgttgggagctgctctagttacattcctcccttcttattccctttttctcttcctcactttattgcataacatattcctgtacccaaagcattctaccacagttctatttgactcccacttgtaataactcctttaaaaaattccatgtttaaccatatgaccctgcttgcttactcatattctccctccctctccccttcctttctctctcttccagaagtcatttgcctggtttgaaatattttgtagggattgcttattatattattttagctgatgaacctcaggacaacgtctacacacacacacatacatacacgcacacaaaatctcagctgttgaagagtgggcttggaatcagacttctgtgtccagtaaaaaactcctgcactgaagtcattgtgacttgagtagttacagactgattccagtgaacttgatctaatttcttttgatctaatgaatgtgtctgcttaccttgtttccttttaattgataagctccaagtagttgctaattttttgacaactttaaatgagtttcattcacttcttttacttaatgttttaagtatagtaccaataatttcattaacctgttctcaagtggtttagctaccattctgccatttttaatttttatttaattttatttgcttgagcacactgatcaaccactgaactgccttcttccattgtcctgcaatgatataagggttacatttttgtgtatatggctttcatagttgggatttcagagcactgataccagatattttcagtttgttctctgggggaatttcatttgcatctatgtttttagctatctgtgataacttgttaaatattaaaaagatattttgcttctattggaacatttgtatactcgcaactatatttctgtaaacagctgcagtcaaaaataaaacactgaaagttttcattttgcagtgga

SEQ ID NO: 2851 - DNA, 13067 bp, Homo sapiens
  source 1..13067: mol_type = genomic DNA
ccggttcggtgcccgcggtcccggagaggaggtgccgccgccaccgccgctccccccctcccgctgccctcgggccgggctgggtcgagctgcgatgccctcggacttcatctcattgctcagcgcggacctagacctggaatcgcccaagtccctctactcgcgagaatctgtctatgatcttctcccaaaggagttacagttacctccatctagagaaacatctgtagcatcaatgagtcagacaagcggtggtgaggcaggctcgcctcctccagctgttgttgctgctggatttgcctctgaagcagggagtgtctgcattaaaaatgacctgtagttctctgcttcatagatgcttcttcagctccctcctcttcctccatgggcggtgcttgcagctcctttaccacctcttccagccctaccatttattctacctcagtcaccgacagcaaggctatgcaagtggagagctgctcctcagccgtgggggtaagtaacagaggggtaagtgaaaagcagttaaccagtaacacagttcagcagcatccatcaacaccgaagaggcacacagtcttgtacatctcaccaccacctgaggacttgctggataacagtcggatgtcctgccaggatgaggggtgtggattggaatctgagcagagctgcagtatgtggatggaggattccccctccaacttcagtaacatgagcaccagttcctacaatgataacactgaggtacctcgtaaatcacgaaaacgaaatccaaagcagaggccgggggtcaaacgacgagattgtgaagaatctaatatggatatatttgatgccgacagtgccaaagcacctcactatgtgctttctcagcttaccacggacaacaaaggcaactcaaaagcgggaaatggaacattggaaaaccaaaaaggaactggagtaaagaagagccctatgttgtgtggacaatatcctgttaaaagtgagggaaaggagctgaagatagttgtacaacctgagacacagcaccgagctcggtacctgactgagggcagccgtggctcagtgaaagatagaacacagcaaggctttcctacagtaaagctggaaggccataatgaacctgtagtgttgcaagtgtttgtgggcaacgactctggacgagtgaaaccacatggattttatcaggcctgcagagtaactggacgaaatacaactccttgcaaagaagtggacattgaaggcactactgttatagaagtcggccttgatcctagcaacaacatgacactggcggtggactgcgtagggatattgaaattgaggaatgctgatgtcgaagccagaataggaattgctggttccaagaagaaaagcactcgtgccagattggtttttcgagttaatatcatgaggaaagatggctccactttgacactgcaaacaccctcttctccaattttgtgtactcagccagcaggagtgccagaaatcttaaagaaaagcttgcatagctgttcagtgaaaggagaagaagaagtgtttttaatcggcaagaactttctgaaaggaactaaagttattttccaagaaaatgtttctgatgaaaactcttggaagtcagaagctgaaattgatatggaactatttcatcagaatcatcttattgtgaaggttcctccctatcatgaccaacatataactttgcctgtgtcagtgggaatatatgtagtgacaaatgctggaagatctcatgatgttcaaccattcacttacactccagacccagcagcagctggtgctttgaatgtaaatgtgaagaaggaaatatctagtccagcaagaccttgctcttttgaagaggccatgaaagcaatgaaaactactggatgtaatttagataaggtaaatattatccctaatgccctgatgactccactcataccaagcagtatgattaagagtgaagatgttactccaatggaagtaacagcagaaaaaagatcttccactatttttaagactacaaagtctgttggatcaactcagcaaacattagaaaacatctcaaacatagcaggaaatggctctttttcatcaccatcatcttcccacctaccttctgaaaatgaaaaacagcagcagattcagcccaaggcatacaacccagagaccctgacaactattcaaacccaggacatctcacagcctggtacttttccagcagtttctgcttctagtcagctgcccaacagcgatgcactattgcagcaggctacacagtttcagacaagagaaactcagtctagagagatattacagtcagatggtacagtggttaatttgtcacaactgactgaggcatcacaacaacagcagcagtcaccactacaagaacaagcacagactttacagcagcagatttcatcaaatatttttccatcaccaaatagtgtgagtcagcttcagaatactattcagcagctgcaagcagggagtttcacaggcagtactgctagtggcagcagtggaagtgttgacttggtccaacaagttttagaggcacagcagcagttatcttcagttttattttctgctccagatggtaatgagaatgttcaagagcagcttagtgcagatatttttcaacaagtcagtcaaattcagagtggtgtaagccctggaatgttttcctcaacagagccaacagtccataccagaccagataatttattacctggaagagctgaaagtgttcatccacagtctgaaaacacgttatctaatcaacagcagcagcagcagcagcaacagcaagtgatggaatcttcagccgcaatggtgatggagatgcaacagagtatctgccaggcagctgcccagattcagtcagagttattcccttcaactgcttcagcaaatggaaaccttcagcaatcgccagtttaccagcagacttctcacatgatgagtgcattgtctaccaatgaggatatgcaaatgcagtgtgaattgttttcttctcctcctgcagtttctggaaatgaaacttctacaactaccacacagcaggttgcaacccctggcactaccatgtttcagacatcaagttcaggagatggagaagaaactggaacacaagcaaaacagattcagaacagtgtctttcagaccatggtccaaatgcaacatagtggggacaatcaacctcaagttaaccttttttcatccacaaaaagtatgatgagtgttcagaatagtggtacccaacaacaaggtaatggtttattccagcaagggaatgagatgatgtcacttcaatctggaaattttttgcagcagtcttctcattcacaggcccaactttttcatcctcaaaatcctattgccgatgctcagaacctttcccaggaaactcaaggttctctctttcatagtccaaatcctattgtccacagtcagacttctacaacctcctctgaacaaatgcagcctccaatgtttcactctcaaagtaccattgctgtgttacagggctcttcagttcctcaagaccagcagtcaaccaacatatttctttcccagagtcccatgaataatcttcagactaacacagtagcccaagaagcattttttgcagcaccgaactcaatttctccacttcagtcaacatcaaacagtgaacaacaagctgctttccaacagcaagctccaatatcacacatccagactcctatgctttcccaagaacaggcacaacccccgcagcagggtttatttcagcctcaggtggccctgggctcccttccacctaatccaatgcctcaaagccaacaaggaaccatgttccagtcacagcactcaatagttgccatgcagagtaactctccatcccaggaacagcagcagcagcagcaacagcagcagcaacagcagcagcaacaacaacagagcattttattcagtaatcagaataccatggctacaatggcgtctccaaagcaaccaccaccaaacatgatattcaacccaaatcaaaatccaatggctaatcaggagcaacagaaccagtcaatttttcaccaacaaagtaacatggccccaatgaatcaagagcaacagcccatgcaatttcagagtcagtccacagtttcctcacttcagaacccaggtcctacccagtcggaatcatcacagacccccttgttccatagctctcctcagattcagttggtacaagggtcacctagttctcaagagcagcaagtaactctcttcttatctccagcatccatgtctgccttgcagaccagtataaatcaacaagatatgcaacagtctcctctttattcccctcagaacaacatgcctggaattcaaggagccacatcttcgcctcaaccacaggctactttatttcacaacacagcaggaggcacaatgaaccaactgcagaattctcctggctcatctcagcagacatcaggaatgttcttatttggcattcaaaataactgtagtcagcttttaacctctggaccagctacattgcctgatcagttgatggccataagtcagccaggccaaccacaaaacgagggccagccacctgtgacaacacttctttctcagcaaatgccagagaattctccactggcatcctctataaacaccaaccagaacatcgaaaagattgatttgcttgtttcattgcaaaaccaagggaacaacttgactggctccttttaactggatataaattccacgaagaaaatcctgattccaagatgtcctgagatcttgtggttccatgagaattattactttaaaaacaaaacaaaatataaaaaactgtgtttgagtaaactgatagattttactctgactgcaaaagagcacacctatgctgcttgttgcagtaactaaccaccaatgttaacatcttcatattttatattcctaataacagtgatgactgagaatctatttgagtttccagctggcagaattaattgttattattttcctaggcgcaatttccttaaacgtacagtttaaattcaaggctggaccactcagttattattgctattagaaaataatatatcatgtttacttttgttcttcattattttctttcctgcattgttttagtcaagtaatggcttttgaaaaagtaaagttcaataataactaaggctgtgatttttttcaatataaaaggcacagctgttggccaaagtgaaggaatcttttttcagttttattggagaaactgaagggtaacattctaacaagtaaactgtatgtgcagataaaagtactcttgatttaacacaaaggcagatgatacacttataaaactgggaacagctggaatgcttcttgattttattttttcagagagttgttagttctctgggtttctactaaggggtttagccataactgtgcatagaaaaataattatctgtaaaaaatgaaggggataatatatgataaattatgttctgatatcctcctacagtagtttaaattgacagaaaaatttgaatgttttcttcttaacccagtcttaggctggtattccctttttatatatatctatattacttttcacctctttttcactttactttagagaactattaatatactactggcttcatgaccctgtagcatctttggccactttaatctagggtgacctagcaatcctgcagcacagggcagagagtactgtcttaggaattattaggagttgattcctgagaaacaacacatttttccccatgaacggtgctgttctgaagtcttcaaatttttccctctaataggaaacagtataaattttaattaaaaaaaaaaggcaaactaaaatttcttgaaatatcacttctccctgatctgcagtgagtataaattcacttgtcacctcagtgctttacagtttgaagtggtcacttacctgatggttcccacaagccttaggctttacagggttgtatcattgacttaaaatgaagaattaacttgtgttacatctataaagagcaaaataacacactccagaacttggcagttgtagcattagttatacagttttgggtgttcttgccacccgtgggatgcctgcttctcactaccacctgtgtctggacacatgcttatgtctcattttccttttggcatgtggaaagctgtcaatgcagtgtaaggccaacgtgtgtgtggcttctatgtgttgagataatgttttggtatccttgtccgtttcatttattttttaagtgtacaaaaaataacctgttaattgttgaaggctacttttctgttctttttttttttttttttctatcctgtacatttagttgaactgtgcggaattgtggtgttggttttgtttacacagccagatttttccttctttttgttttgtgatgatcttcctttgttctttgaatgtgctcttttgtctttttctcttttttctcatgttttcttccctccacctccacccctttctttctttctctctctgattgagaggcattgaattacgttttcagtagtacaggcttcttgccgatatgaagggaacttttcagaaagagacctactctgggtcatttaattttgaatacagttttcaatcgttcaagttttggatggtttatatctaatgtgtgtttcatttttttggaaagctatattttgtatttaggaaatggtatactattttgctatttgtactgagtgagtacattggcataaatatagaaatttatatatatacatatatataaactattcttttttgccacacatttttgtggtaaatttgtgagtttgtctgatgttctaccacaacgtggcgtctgataacagtgagggggggtggggtttgttatgtctttattgagtatttaagtatcttttgaaacaaatgacctgttcatctgtggccattccatcaggcagttagttccttgatgtcagtagtgggctaaaggcagcttactgtgtgtttgctggagctttcactcagccaagtgttagagtcaggaaacccattgaggcaatggcgtcaaatggtgtttcacaagaatgagccattcagtctttgctcactatatatttaatattttattattgttgttattgttattattaattggctttctgtattctatgccttttatttataaagacactaagaaaacccatgtttgtaattttaataacatttttcccatcttgtaatatccagagctactttataaattctctgaaccaaaagtattttcctcagtgtatctcttctcccccagcccctattgggaaaaattacccagtatagttcaggttatgaggaggatcagccacacaatccagtgcttcagtttgaaaatgtaaaattctaaccctaaagtagggttggttgaaatttcagacaaagcaaacccagcaggtataaaaagtagtataaatacaaatctgtaagttatttttgaattttctgaacttttttctaagagattacataggagactaaagaaatctatctgttcaagttctaattaggatgattgttaatactgcactgtggatgaagtggcgactggcttgtgtgctgacttctgtggtttagcaagaggtttattgttatcaaatgctaattggcaatgccaagtcactgggaccaattttctgttttataatatctaagtttagaacagaatatatacctgaactgtagtggtttgatcggatggagacagaaaacccgatttttattctcataaattttgtggttatttatacaagggctgtgctatgctaccatattcttgttcaataataataggtttgttgttttttttacattgttaaatgttccttacccctaaaggtcaatgttaagtacaacattctgaaaatacaatttggctacgaagagtattcatcttctttgaagctcagtggttgatatttgtgctaataatgcaatttcctgattactgttacaagttatagctacatatgggagagactcagtgagccagcaaaggccatagaaacaacaatttattaaatgtatttatggcagaaggacctaaataaactgtgagccaccttttcttctttatattgttacatttaagtgttcttgctttcagcaactcacattaatgcttggagcttatctctttctctctctctctctctctctctgtgtgtgtgtgtgtatgtgtgtgtgtgtgtgtgtgtgtttccttattgtcattccattatatatccacaccaacatgggtgacgataattcaaagtcatattttgcctctaagcttgatcatgttacctttatgattaaagtatcatgttatttagccaatgcaaatctgttttaaaacaaatagtttaaaaaaagaacaagtttttaagggctttattatagaagaagtattaatgaaggactttccttcctccctccctttcctcccctccctgcctcccttcttcccttccatctccccctcctccctgccttctttgtttctccttcccttattcctccctccctcctttctcccttccttcctttcttccattcatccttccttgccttttatttttattttttgtaatatcacatgtgctgtagtttggaattttattctagtgcatttcttgctcatcagaacctcagctaatctacctaggaaaaatagtatcaaaggaaatgagaaagttgtatctgagtccctccagaactaagataattctttttgaccatttaagcctttataaatgcgttttgaccatttaagcctttataaatgcttgttttaggaaagtgaatctgttagatgcatcaacaaataatgaccaggacaaaacgatttaataattaaagtctcaaatcaccatggttatacattttcaccagaaatagtaatcttacaatttttcatttttctgatgaagatttctgttccaatatctgtttcctaatagattttttaaattaattagctttcctctgctttatgaccacaggttttatccctaaccgagacagctgtcttatatctgcatgccttagactgtgtggagggactccatgaagaaagaccataggttagaaaaataactcatagtatataccctagtaagtgggttagtagaatctcataacatgtattaaaaagaggttttcttctctgcttgtttgtgtcactagagcaaaattgtagagataatgctcataatgcagtaaatatcagaataatatctacaatatcatttgtggatggtcccaggtcccagtgctctagttactttacttctttttttttttttgagatggagtcttgctctgtctctcaggctagagcagtgtgcgatctcagctcactgcagcctccacctcccaggttcaagcgattctcctgcctcagcctcccaagtagccaggattacaggcaccctccactaggcccggctaattttttttgtatttttttagtagagatggggttttgccatgttggccaggctggtttcgaactcctaacctccagtgatccacctgcctcggcgtcccaaagtgctaggattacaggcatgagccaccacatccggcctaattacttctttaatccccatttatttttatgccattctagcctcatttattaataaaattatgtttttactttctctttcaggaaattttttaaattaatattttatatctagatctaatgctatggaaaagtgcctttttatcatttataatttcatttttcactatttccaaaaacacataaacaaatagtttcagtaggtcccagcttttactttttccatttaaaccttcttttctccatttcttccctttggcttaagaataaaagaaaaggtacattgctagaattgtttctttgggagagggtaaaagattacagaattagactgttcagcctttatataaactaaatttgtcttcatctcaaccagctaatggtaggtcttatctgaatactcatgagaattttagcatctgtgaaactccatgcaccagatgtgtgtaaatttcaggaagaaagtgttgaaagcattttctctgatgttaattagatggaaataaatcactaaaacatagtttaggtaaagcctgattatgccacttttttttaactagacagggcaaagttgtttatgttagtgtacttcttgtctatcctcagttaatttacctagacaaaaagtgtcaaaggaaatgagaaaaaggttatatctgactccctccagacctaagataattccttttgatcagatacagtcagatggagtgccttggtttttgttaattttgcctctattccagctccttaccacagcggtggtgcttaaagaaaggatcatcagcaacaggtcaggatagttctacctttgggatagggctgctttccccgtgctagtatttctgtgactgttagtggcactgaggactgcaaacttttatgcaatattcttaataccctattgatattatgcactttaatcattccaaagaagccaagaatgctgtatagtgatgattccttcctaatgaattcatcttaactatttagaatgttatgtcccttttcttttggatagccaacttggtataaatgttatatggatttttctaaaatgactatataggacttaagactttgaaatgtaatttacttataaggggaaataattatgctttagcacatcattttagaaacgtcacattttagaaacattcagcttgctaacctacatgtttgggaattcattaaaaccagttgtctatatattttgtgccatgtatataagaacattacaatatatctttttctacatatgtagtatgtgcaaccagtggttctcagagtatggttctcagcccaccagctagtatcagtatcacctgggaactagttagaaatgtaaattctttggccccatcccagacatactgagtcagaaactctggaatagggcccccgcaatctgttttcacaagccctccaggtgattctgatgcacactttaaagtttaggaaccactgggctaagactctgttgagatatagagtttttcttccactcagactgatatagttatacattgttcttcatgtaaattcagcttaacctggttatctataatcttttattggcaaaagttaattctcagtactgcctatagagatacagtgtattttatgtacatacacaattagtctaattcttgataattcagttaatttagtttggcattttcctaccacttactaaaaggtttacattaaatgactgatttaaatatataggtgcaatgttctatgtttattttaattgttatgacatttaagtagctaatataattgaccggtgctaaagtctcctgtttatccataaaatgggtacattatgggcagtgtaatacaagctttcttttcattgcctagtactttaccagcagaccacagttttgccctggctagaccaaccctcagaacaaaatcatcattccttgtatttatatttgtatctgagatagtaaacaagatggctggccaggtcaacatggcaccttaacttatttttttaataggtaaaacttcttcaaaagtagcttgctttgtataagaactaagctatcagtatagatatagctatccttggagcttatgtttcagacaagaattatttactaaaataaataataaacaagataatgcattatacaatttgggcatttctcgtttctcaagtgtatgcatcatggtaaatataaactaaccacaagataggtagattgattcatttcattttaatctccttgtgtaattcagtacctccataattgttctaatcttcttcccactgtttacaaattaccagttaattaactcgtgaaagaaaaattcacatatcagaataaaaataaatgtatactcactttataaaaatcaccactgctgtctttccttaatactagcagtggaaatgtaagtggcttactctacaaattttggtgctggcaaatacataggcaaactgttgggagctgctctagttacattcctcccttcttattccctttttctcttcctcactttattgcataacatattcctgtacccaaagcattctaccacagttctatttgactcccacttgtaataactcctttaaaaaattccatgtttaaccatatgaccctgcttgcttactcatattctccctccctctccccttcctttctctctcttccagaagtcatttgcctggtttgaaatattttgtagggattgcttattatattattttagctgatgaacctcaggacaacgtctacacacacacacatacatacacgcacacaaaatctcagctgttgaagagtgggcttggaatcagacttctgtgtccagtaaaaaactcctgcactgaagtcattgtgacttgagtagttacagactgattccagtgaacttgatctaatttcttttgatctaatgaatgtgtctgcttaccttgtttccttttaattgataagctccaagtagttgctaattttttgacaactttaaatgagtttcattcacttcttttacttaatgttttaagtatagtaccaataatttcattaacctgttctcaagtggtttagctaccattctgccatttttaatttttatttaattttatttgcttgagcacactgatcaaccactgaactgccttcttccattgtcctgcaatgatataagggttacatttttgtgtatatggctttcatagttgggatttcagagcactgataccagatattttcagtttgttctctgggggaatttcatttgcatctatgtttttagctatctgtgataacttgttaaatattaaaaagatattttgcttctattggaacatttgtatactcgcaactatatttctgtaaacagctgcagtcaaaaataaaacactgaaagttttcattttgcagtgga

SEQ ID NO: 2852 - DNA, 14154 bp, Homo sapiens
  source 1..14154: mol_type = genomic DNA
tgcaacggaaacttttggctccacgaacagaaaagcaagagcaaaaactcagttaaatgcgttcttcctccatctttgcctagtccaaaaggaaaaaaaaagaaacagaaaaaagaaaaactgtttggaagagtagcgttgaggtttgctttttacctgtttttcctctagaacagccaggtggattcacatgatccaattttttaattgtcttctatgtcccactccgaataacccggatgccccagcacaatcagagagatcgttttttttaaaaaaaatttcagcctccaaaggtaggaggggagtgttaggggagaaagtactttaattaaaaatcaataactcgaggtttttgggatacggtttgccatttcctaattaagaaatgggtttgacagtccctttgtacacactgctatgcaaaccccaaagggttggcggctgtccgggcgatgacactccggtcccctgcgagaccccgggccagccaggcccgtccgccgccggcctctggggtccgtccccggctcgcgcagacctctcgcttctctcggctctgtctcctgcgctcagctctgctcggggccggccgcctcaggctcgccgccaccaggtcgttgcaaataccttttccctccccggggccccagcgcgcggccacctcccagcctccccccctcccaccctggcagcggggccctttcccggctcaggaacagcagcagcccgggccgcgccggcaggaagcgaggcccatgttgctgctgttccctggcgcgcctccccgccctccgggggccgccacggctcttccgcgctcccgggcacccccctccgcgcctgcgctgtgccccacgggggcggggctcagattcctgtcagcggcggcggcggtggcggcgaccgtcagttttcgctgaggagaaacacgaaacggaccctttggctctcccccttccccttccccgtcctgaacccctctcctggtcaccgagaatcagtccccgtggagttccccctccacctcgccatcgtttcctcggtcctcggcccagtggaagtcactaccctcgaggaggaggcagcggcagccgccctcgcgtcgccgcccccggttcggtgcccgcggtcccggagaggaggtgccgccgccaccgccgctccccccctcccgctgccctcgggccgggctgggtcgagctgcgatgccctcggacttcatctcattgctcagcgcggacctagacctggaatcgcccaagtccctctactcgcgagattctctgaagttacacccatcacagaattttcatagagctggactattggaagaatctgtctatgatcttctcccaaaggagttacagttacctccatctagagaaacatctgtagcatcaatgagtcagacaagcggtggtgaggcaggctcgcctcctccagctgttgttgctgctgatgcttcttcagctccctcctcttcctccatgggcggtgcttgcagctcctttaccacctcttccagccctaccatttattctacctcagtcaccgacagcaaggctatgcaagtggagagctgctcctcagccgtgggggtaagtaacagaggggtaagtgaaaagcagttaaccagtaacacagttcagcagcatccatcaacaccgaagaggcacacagtcttgtacatctcaccaccacctgaggacttgctggataacagtcggatgtcctgccaggatgaggggtgtggattggaatctgagcagagctgcagtatgtggatggaggattccccctccaacttcagtaacatgagcaccagttcctacaatgataacactgaggtacctcgtaaatcacgaaaacgaaatccaaagcagaggccgggggtcaaacgacgagattgtgaagaatctaatatggatatatttgatgccgacagtgccaaagcacctcactatgtgctttctcagcttaccacggacaacaaaggcaactcaaaagcgggaaatggaacattggaaaaccaaaaaggaactggagtaaagaagagccctatgttgtgtggacaatatcctgttaaaagtgagggaaaggagctgaagatagttgtacaacctgagacacagcaccgagctcggtacctgactgagggcagccgtggctcagtgaaagatagaacacagcaaggctttcctacagtaaagctggaaggccataatgaacctgtagtgttgcaagtgtttgtgggcaacgactctggacgagtgaaaccacatggattttatcaggcctgcagagtaactggacgaaatacaactccttgcaaagaagtggacattgaaggcactactgttatagaagtcggccttgatcctagcaacaacatgacactggcggtggactgcgtagggatattgaaattgaggaatgctgatgtcgaagccagaataggaattgctggttccaagaagaaaagcactcgtgccagattggtttttcgagttaatatcatgaggaaagatggctccactttgacactgcaaacaccctcttctccaattttgtgtactcagccagcaggagtgccagaaatcttaaagaaaagcttgcatagctgttcagtgaaaggagaagaagaagtgtttttaatcggcaagaactttctgaaaggaactaaagttattttccaagaaaatgtttctgatgaaaactcttggaagtcagaagctgaaattgatatggaactatttcatcagaatcatcttattgtgaaggttcctccctatcatgaccaacatataactttgcctgtgtcagtgggaatatatgtagtgacaaatgctggaagatctcatgatgttcaaccattcacttacactccagacccagcagctggtgctttgaatgtaaatgtgaagaaggaaatatctagtccagcaagaccttgctcttttgaagaggccatgaaagcaatgaaaactactggatgtaatttagataaggtaaatattatccctaatgccctgatgactccactcataccaagcagtatgattaagagtgaagatgttactccaatggaagtaacagcagaaaaaagatcttccactatttttaagactacaaagtctgttggatcaactcagcaaacattagaaaacatctcaaacatagcaggaaatggctctttttcatcaccatcatcttcccacctaccttctgaaaatgaaaaacagcagcagattcagcccaaggcatacaacccagagaccctgacaactattcaaacccaggacatctcacagcctggtacttttccagcagtttctgcttctagtcagctgcccaacagcgatgcactattgcagcaggctacacagtttcagacaagagaaactcagtctagagagatattacagtcagatggtacagtggttaatttgtcacaactgactgaggcatcacaacaacagcagcagtcaccactacaagaacaagcacagactttacagcagcagatttcatcaaatatttttccatcaccaaatagtgtgagtcagcttcagaatactattcagcagctgcaagcagggagtttcacaggcagtactgctagtggcagcagtggaagtgttgacttggtccaacaagttttagaggcacagcagcagttatcttcagttttattttctgctccagatggtaatgagaatgttcaagagcagcttagtgcagatatttttcaacaagtcagtcaaattcagagtggtgtaagccctggaatgttttcctcaacagagccaacagtccataccagaccagataatttattacctggaagagctgaaagtgttcatccacagtctgaaaacacgttatctaatcaacagcagcagcagcagcagcaacagcaagtgatggaatcttcagccgcaatggtgatggagatgcaacagagtatctgccaggcagctgcccagattcagtcagagttattcccttcaactgcttcagcaaatggaaaccttcagcaatcgccagtttaccagcagacttctcacatgatgagtgcattgtctaccaatgaggatatgcaaatgcagtgtgaattgttttcttctcctcctgcagtttctggaaatgaaacttctacaactaccacacagcaggttgcaacccctggcactaccatgtttcagacatcaagttcaggagatggagaagaaactggaacacaagcaaaacagattcagaacagtgtctttcagaccatggtccaaatgcaacatagtggggacaatcaacctcaagttaaccttttttcatccacaaaaagtatgatgagtgttcagaatagtggtacccaacaacaaggtaatggtttattccagcaagggaatgagatgatgtcacttcaatctggaaattttttgcagcagtcttctcattcacaggcccaactttttcatcctcaaaatcctattgccgatgctcagaacctttcccaggaaactcaaggttctctctttcatagtccaaatcctattgtccacagtcagacttctacaacctcctctgaacaaatgcagcctccaatgtttcactctcaaagtaccattgctgtgttacagggctcttcagttcctcaagaccagcagtcaaccaacatatttctttcccagagtcccatgaataatcttcagactaacacagtagcccaagaagcattttttgcagcaccgaactcaatttctccacttcagtcaacatcaaacagtgaacaacaagctgctttccaacagcaagctccaatatcacacatccagactcctatgctttcccaagaacaggcacaacccccgcagcagggtttatttcagcctcaggtggccctgggctcccttccacctaatccaatgcctcaaagccaacaaggaaccatgttccagtcacagcactcaatagttgccatgcagagtaactctccatcccaggaacagcagcagcagcagcaacagcagcagcaacagcagcagcaacaacaacagagcattttattcagtaatcagaataccatggctacaatggcgtctccaaagcaaccaccaccaaacatgatattcaacccaaatcaaaatccaatggctaatcaggagcaacagaaccagtcaatttttcaccaacaaagtaacatggccccaatgaatcaagagcaacagcccatgcaatttcagagtcagtccacagtttcctcacttcagaacccaggtcctacccagtcggaatcatcacagacccccttgttccatagctctcctcagattcagttggtacaagggtcacctagttctcaagagcagcaagtaactctcttcttatctccagcatccatgtctgccttgcagaccagtataaatcaacaagatatgcaacagtctcctctttattcccctcagaacaacatgcctggaattcaaggagccacatcttcgcctcaaccacaggctactttatttcacaacacagcaggaggcacaatgaaccaactgcagaattctcctggctcatctcagcagacatcaggaatgttcttatttggcattcaaaataactgtagtcagcttttaacctctggaccagctacattgcctgatcagttgatggccataagtcagccaggccaaccacaaaacgagggccagccacctgtgacaacacttctttctcagcaaatgccagagaattctccactggcatcctctataaacaccaaccagaacatcgaaaagattgatttgcttgtttcattgcaaaaccaagggaacaacttgactggctccttttaactggatataaattccacgaagaaaatcctgattccaagatgtcctgagatcttgtggttccatgagaattattactttaaaaacaaaacaaaatataaaaaactgtgtttgagtaaactgatagattttactctgactgcaaaagagcacacctatgctgcttgttgcagtaactaaccaccaatgttaacatcttcatattttatattcctaataacagtgatgactgagaatctatttgagtttccagctggcagaattaattgttattattttcctaggcgcaatttccttaaacgtacagtttaaattcaaggctggaccactcagttattattgctattagaaaataatatatcatgtttacttttgttcttcattattttctttcctgcattgttttagtcaagtaatggcttttgaaaaagtaaagttcaataataactaaggctgtgatttttttcaatataaaaggcacagctgttggccaaagtgaaggaatcttttttcagttttattggagaaactgaagggtaacattctaacaagtaaactgtatgtgcagataaaagtactcttgatttaacacaaaggcagatgatacacttataaaactgggaacagctggaatgcttcttgattttattttttcagagagttgttagttctctgggtttctactaaggggtttagccataactgtgcatagaaaaataattatctgtaaaaaatgaaggggataatatatgataaattatgttctgatatcctcctacagtagtttaaattgacagaaaaatttgaatgttttcttcttaacccagtcttaggctggtattccctttttatatatatctatattacttttcacctctttttcactttactttagagaactattaatatactactggcttcatgaccctgtagcatctttggccactttaatctagggtgacctagcaatcctgcagcacagggcagagagtactgtcttaggaattattaggagttgattcctgagaaacaacacatttttccccatgaacggtgctgttctgaagtcttcaaatttttccctctaataggaaacagtataaattttaattaaaaaaaaaaggcaaactaaaatttcttgaaatatcacttctccctgatctgcagtgagtataaattcacttgtcacctcagtgctttacagtttgaagtggtcacttacctgatggttcccacaagccttaggctttacagggttgtatcattgacttaaaatgaagaattaacttgtgttacatctataaagagcaaaataacacactccagaacttggcagttgtagcattagttatacagttttgggtgttcttgccacccgtgggatgcctgcttctcactaccacctgtgtctggacacatgcttatgtctcattttccttttggcatgtggaaagctgtcaatgcagtgtaaggccaacgtgtgtgtggcttctatgtgttgagataatgttttggtatccttgtccgtttcatttattttttaagtgtacaaaaaataacctgttaattgttgaaggctacttttctgttctttttttttttttttttctatcctgtacatttagttgaactgtgcggaattgtggtgttggttttgtttacacagccagatttttccttctttttgttttgtgatgatcttcctttgttctttgaatgtgctcttttgtctttttctcttttttctcatgttttcttccctccacctccacccctttctttctttctctctctgattgagaggcattgaattacgttttcagtagtacaggcttcttgccgatatgaagggaacttttcagaaagagacctactctgggtcatttaattttgaatacagttttcaatcgttcaagttttggatggtttatatctaatgtgtgtttcatttttttggaaagctatattttgtatttaggaaatggtatactattttgctatttgtactgagtgagtacattggcataaatatagaaatttatatatatacatatatataaactattcttttttgccacacatttttgtggtaaatttgtgagtttgtctgatgttctaccacaacgtggcgtctgataacagtgagggggggtggggtttgttatgtctttattgagtatttaagtatcttttgaaacaaatgacctgttcatctgtggccattccatcaggcagttagttccttgatgtcagtagtgggctaaaggcagcttactgtgtgtttgctggagctttcactcagccaagtgttagagtcaggaaacccattgaggcaatggcgtcaaatggtgtttcacaagaatgagccattcagtctttgctcactatatatttaatattttattattgttgttattgttattattaattggctttctgtattctatgccttttatttataaagacactaagaaaacccatgtttgtaattttaataacatttttcccatcttgtaatatccagagctactttataaattctctgaaccaaaagtattttcctcagtgtatctcttctcccccagcccctattgggaaaaattacccagtatagttcaggttatgaggaggatcagccacacaatccagtgcttcagtttgaaaatgtaaaattctaaccctaaagtagggttggttgaaatttcagacaaagcaaacccagcaggtataaaaagtagtataaatacaaatctgtaagttatttttgaattttctgaacttttttctaagagattacataggagactaaagaaatctatctgttcaagttctaattaggatgattgttaatactgcactgtggatgaagtggcgactggcttgtgtgctgacttctgtggtttagcaagaggtttattgttatcaaatgctaattggcaatgccaagtcactgggaccaattttctgttttataatatctaagtttagaacagaatatatacctgaactgtagtggtttgatcggatggagacagaaaacccgatttttattctcataaattttgtggttatttatacaagggctgtgctatgctaccatattcttgttcaataataataggtttgttgttttttttacattgttaaatgttccttacccctaaaggtcaatgttaagtacaacattctgaaaatacaatttggctacgaagagtattcatcttctttgaagctcagtggttgatatttgtgctaataatgcaatttcctgattactgttacaagttatagctacatatgggagagactcagtgagccagcaaaggccatagaaacaacaatttattaaatgtatttatggcagaaggacctaaataaactgtgagccaccttttcttctttatattgttacatttaagtgttcttgctttcagcaactcacattaatgcttggagcttatctctttctctctctctctctctctctctgtgtgtgtgtgtgtatgtgtgtgtgtgtgtgtgtgtgtttccttattgtcattccattatatatccacaccaacatgggtgacgataattcaaagtcatattttgcctctaagcttgatcatgttacctttatgattaaagtatcatgttatttagccaatgcaaatctgttttaaaacaaatagtttaaaaaaagaacaagtttttaagggctttattatagaagaagtattaatgaaggactttccttcctccctccctttcctcccctccctgcctcccttcttcccttccatctccccctcctccctgccttctttgtttctccttcccttattcctccctccctcctttctcccttccttcctttcttccattcatccttccttgccttttatttttattttttgtaatatcacatgtgctgtagtttggaattttattctagtgcatttcttgctcatcagaacctcagctaatctacctaggaaaaatagtatcaaaggaaatgagaaagttgtatctgagtccctccagaactaagataattctttttgaccatttaagcctttataaatgcgttttgaccatttaagcctttataaatgcttgttttaggaaagtgaatctgttagatgcatcaacaaataatgaccaggacaaaacgatttaataattaaagtctcaaatcaccatggttatacattttcaccagaaatagtaatcttacaatttttcatttttctgatgaagatttctgttccaatatctgtttcctaatagattttttaaattaattagctttcctctgctttatgaccacaggttttatccctaaccgagacagctgtcttatatctgcatgccttagactgtgtggagggactccatgaagaaagaccataggttagaaaaataactcatagtatataccctagtaagtgggttagtagaatctcataacatgtattaaaaagaggttttcttctctgcttgtttgtgtcactagagcaaaattgtagagataatgctcataatgcagtaaatatcagaataatatctacaatatcatttgtggatggtcccaggtcccagtgctctagttactttacttctttttttttttttgagatggagtcttgctctgtctctcaggctagagcagtgtgcgatctcagctcactgcagcctccacctcccaggttcaagcgattctcctgcctcagcctcccaagtagccaggattacaggcaccctccactaggcccggctaattttttttgtatttttttagtagagatggggttttgccatgttggccaggctggtttcgaactcctaacctccagtgatccacctgcctcggcgtcccaaagtgctaggattacaggcatgagccaccacatccggcctaattacttctttaatccccatttatttttatgccattctagcctcatttattaataaaattatgtttttactttctctttcaggaaattttttaaattaatattttatatctagatctaatgctatggaaaagtgcctttttatcatttataatttcatttttcactatttccaaaaacacataaacaaatagtttcagtaggtcccagcttttactttttccatttaaaccttcttttctccatttcttccctttggcttaagaataaaagaaaaggtacattgctagaattgtttctttgggagagggtaaaagattacagaattagactgttcagcctttatataaactaaatttgtcttcatctcaaccagctaatggtaggtcttatctgaatactcatgagaattttagcatctgtgaaactccatgcaccagatgtgtgtaaatttcaggaagaaagtgttgaaagcattttctctgatgttaattagatggaaataaatcactaaaacatagtttaggtaaagcctgattatgccacttttttttaactagacagggcaaagttgtttatgttagtgtacttcttgtctatcctcagttaatttacctagacaaaaagtgtcaaaggaaatgagaaaaaggttatatctgactccctccagacctaagataattccttttgatcagatacagtcagatggagtgccttggtttttgttaattttgcctctattccagctccttaccacagcggtggtgcttaaagaaaggatcatcagcaacaggtcaggatagttctacctttgggatagggctgctttccccgtgctagtatttctgtgactgttagtggcactgaggactgcaaacttttatgcaatattcttaataccctattgatattatgcactttaatcattccaaagaagccaagaatgctgtatagtgatgattccttcctaatgaattcatcttaactatttagaatgttatgtcccttttcttttggatagccaacttggtataaatgttatatggatttttctaaaatgactatataggacttaagactttgaaatgtaatttacttataaggggaaataattatgctttagcacatcattttagaaacgtcacattttagaaacattcagcttgctaacctacatgtttgggaattcattaaaaccagttgtctatatattttgtgccatgtatataagaacattacaatatatctttttctacatatgtagtatgtgcaaccagtggttctcagagtatggttctcagcccaccagctagtatcagtatcacctgggaactagttagaaatgtaaattctttggccccatcccagacatactgagtcagaaactctggaatagggcccccgcaatctgttttcacaagccctccaggtgattctgatgcacactttaaagtttaggaaccactgggctaagactctgttgagatatagagtttttcttccactcagactgatatagttatacattgttcttcatgtaaattcagcttaacctggttatctataatcttttattggcaaaagttaattctcagtactgcctatagagatacagtgtattttatgtacatacacaattagtctaattcttgataattcagttaatttagtttggcattttcctaccacttactaaaaggtttacattaaatgactgatttaaatatataggtgcaatgttctatgtttattttaattgttatgacatttaagtagctaatataattgaccggtgctaaagtctcctgtttatccataaaatgggtacattatgggcagtgtaatacaagctttcttttcattgcctagtactttaccagcagaccacagttttgccctggctagaccaaccctcagaacaaaatcatcattccttgtatttatatttgtatctgagatagtaaacaagatggctggccaggtcaacatggcaccttaacttatttttttaataggtaaaacttcttcaaaagtagcttgctttgtataagaactaagctatcagtatagatatagctatccttggagcttatgtttcagacaagaattatttactaaaataaataataaacaagataatgcattatacaatttgggcatttctcgtttctcaagtgtatgcatcatggtaaatataaactaaccacaagataggtagattgattcatttcattttaatctccttgtgtaattcagtacctccataattgttctaatcttcttcccactgtttacaaattaccagttaattaactcgtgaaagaaaaattcacatatcagaataaaaataaatgtatactcactttataaaaatcaccactgctgtctttccttaatactagcagtggaaatgtaagtggcttactctacaaattttggtgctggcaaatacataggcaaactgttgggagctgctctagttacattcctcccttcttattccctttttctcttcctcactttattgcataacatattcctgtacccaaagcattctaccacagttctatttgactcccacttgtaataactcctttaaaaaattccatgtttaaccatatgaccctgcttgcttactcatattctccctccctctccccttcctttctctctcttccagaagtcatttgcctggtttgaaatattttgtagggattgcttattatattattttagctgatgaacctcaggacaacgtctacacacacacacatacatacacgcacacaaaatctcagctgttgaagagtgggcttggaatcagacttctgtgtccagtaaaaaactcctgcactgaagtcattgtgacttgagtagttacagactgattccagtgaacttgatctaatttcttttgatctaatgaatgtgtctgcttaccttgtttccttttaattgataagctccaagtagttgctaattttttgacaactttaaatgagtttcattcacttcttttacttaatgttttaagtatagtaccaataatttcattaacctgttctcaagtggtttagctaccattctgccatttttaatttttatttaattttatttgcttgagcacactgatcaaccactgaactgccttcttccattgtcctgcaatgatataagggttacatttttgtgtatatggctttcatagttgggatttcagagcactgataccagatattttcagtttgttctctgggggaatttcatttgcatctatgtttttagctatctgtgataacttgttaaatattaaaaagatattttgcttctattggaacatttgtatactcgcaactatatttctgtaaacagctgcagtcaaaaataaaacactgaaagtt

SEQ ID NO: 2853 - DNA, 14157 bp, Homo sapiens
  source 1..14157: mol_type = genomic DNA
tgcaacggaaacttttggctccacgaacagaaaagcaagagcaaaaactcagttaaatgcgttcttcctccatctttgcctagtccaaaaggaaaaaaaaagaaacagaaaaaagaaaaactgtttggaagagtagcgttgaggtttgctttttacctgtttttcctctagaacagccaggtggattcacatgatccaattttttaattgtcttctatgtcccactccgaataacccggatgccccagcacaatcagagagatcgttttttttaaaaaaaatttcagcctccaaaggtaggaggggagtgttaggggagaaagtactttaattaaaaatcaataactcgaggtttttgggatacggtttgccatttcctaattaagaaatgggtttgacagtccctttgtacacactgctatgcaaaccccaaagggttggcggctgtccgggcgatgacactccggtcccctgcgagaccccgggccagccaggcccgtccgccgccggcctctggggtccgtccccggctcgcgcagacctctcgcttctctcggctctgtctcctgcgctcagctctgctcggggccggccgcctcaggctcgccgccaccaggtcgttgcaaataccttttccctccccggggccccagcgcgcggccacctcccagcctccccccctcccaccctggcagcggggccctttcccggctcaggaacagcagcagcccgggccgcgccggcaggaagcgaggcccatgttgctgctgttccctggcgcgcctccccgccctccgggggccgccacggctcttccgcgctcccgggcacccccctccgcgcctgcgctgtgccccacgggggcggggctcagattcctgtcagcggcggcggcggtggcggcgaccgtcagttttcgctgaggagaaacacgaaacggaccctttggctctcccccttccccttccccgtcctgaacccctctcctggtcaccgagaatcagtccccgtggagttccccctccacctcgccatcgtttcctcggtcctcggcccagtggaagtcactaccctcgaggaggaggcagcggcagccgccctcgcgtcgccgcccccggttcggtgcccgcggtcccggagaggaggtgccgccgccaccgccgctccccccctcccgctgccctcgggccgggctgggtcgagctgcgatgccctcggacttcatctcattgctcagcgcggacctagacctggaatcgcccaagtccctctactcgcgagattctctgaagttacacccatcacagaattttcatagagctggactattggaagaatctgtctatgatcttctcccaaaggagttacagttacctccatctagagaaacatctgtagcatcaatgagtcagacaagcggtggtgaggcaggctcgcctcctccagctgttgttgctgctgatgcttcttcagctccctcctcttcctccatgggcggtgcttgcagctcctttaccacctcttccagccctaccatttattctacctcagtcaccgacagcaaggctatgcaagtggagagctgctcctcagccgtgggggtaagtaacagaggggtaagtgaaaagcagttaaccagtaacacagttcagcagcatccatcaacaccgaagaggcacacagtcttgtacatctcaccaccacctgaggacttgctggataacagtcggatgtcctgccaggatgaggggtgtggattggaatctgagcagagctgcagtatgtggatggaggattccccctccaacttcagtaacatgagcaccagttcctacaatgataacactgaggtacctcgtaaatcacgaaaacgaaatccaaagcagaggccgggggtcaaacgacgagattgtgaagaatctaatatggatatatttgatgccgacagtgccaaagcacctcactatgtgctttctcagcttaccacggacaacaaaggcaactcaaaagcgggaaatggaacattggaaaaccaaaaaggaactggagtaaagaagagccctatgttgtgtggacaatatcctgttaaaagtgagggaaaggagctgaagatagttgtacaacctgagacacagcaccgagctcggtacctgactgagggcagccgtggctcagtgaaagatagaacacagcaaggctttcctacagtaaagctggaaggccataatgaacctgtagtgttgcaagtgtttgtgggcaacgactctggacgagtgaaaccacatggattttatcaggcctgcagagtaactggacgaaatacaactccttgcaaagaagtggacattgaaggcactactgttatagaagtcggccttgatcctagcaacaacatgacactggcggtggactgcgtagggatattgaaattgaggaatgctgatgtcgaagccagaataggaattgctggttccaagaagaaaagcactcgtgccagattggtttttcgagttaatatcatgaggaaagatggctccactttgacactgcaaacaccctcttctccaattttgtgtactcagccagcaggagtgccagaaatcttaaagaaaagcttgcatagctgttcagtgaaaggagaagaagaagtgtttttaatcggcaagaactttctgaaaggaactaaagttattttccaagaaaatgtttctgatgaaaactcttggaagtcagaagctgaaattgatatggaactatttcatcagaatcatcttattgtgaaggttcctccctatcatgaccaacatataactttgcctgtgtcagtgggaatatatgtagtgacaaatgctggaagatctcatgatgttcaaccattcacttacactccagacccagcagcagctggtgctttgaatgtaaatgtgaagaaggaaatatctagtccagcaagaccttgctcttttgaagaggccatgaaagcaatgaaaactactggatgtaatttagataaggtaaatattatccctaatgccctgatgactccactcataccaagcagtatgattaagagtgaagatgttactccaatggaagtaacagcagaaaaaagatcttccactatttttaagactacaaagtctgttggatcaactcagcaaacattagaaaacatctcaaacatagcaggaaatggctctttttcatcaccatcatcttcccacctaccttctgaaaatgaaaaacagcagcagattcagcccaaggcatacaacccagagaccctgacaactattcaaacccaggacatctcacagcctggtacttttccagcagtttctgcttctagtcagctgcccaacagcgatgcactattgcagcaggctacacagtttcagacaagagaaactcagtctagagagatattacagtcagatggtacagtggttaatttgtcacaactgactgaggcatcacaacaacagcagcagtcaccactacaagaacaagcacagactttacagcagcagatttcatcaaatatttttccatcaccaaatagtgtgagtcagcttcagaatactattcagcagctgcaagcagggagtttcacaggcagtactgctagtggcagcagtggaagtgttgacttggtccaacaagttttagaggcacagcagcagttatcttcagttttattttctgctccagatggtaatgagaatgttcaagagcagcttagtgcagatatttttcaacaagtcagtcaaattcagagtggtgtaagccctggaatgttttcctcaacagagccaacagtccataccagaccagataatttattacctggaagagctgaaagtgttcatccacagtctgaaaacacgttatctaatcaacagcagcagcagcagcagcaacagcaagtgatggaatcttcagccgcaatggtgatggagatgcaacagagtatctgccaggcagctgcccagattcagtcagagttattcccttcaactgcttcagcaaatggaaaccttcagcaatcgccagtttaccagcagacttctcacatgatgagtgcattgtctaccaatgaggatatgcaaatgcagtgtgaattgttttcttctcctcctgcagtttctggaaatgaaacttctacaactaccacacagcaggttgcaacccctggcactaccatgtttcagacatcaagttcaggagatggagaagaaactggaacacaagcaaaacagattcagaacagtgtctttcagaccatggtccaaatgcaacatagtggggacaatcaacctcaagttaaccttttttcatccacaaaaagtatgatgagtgttcagaatagtggtacccaacaacaaggtaatggtttattccagcaagggaatgagatgatgtcacttcaatctggaaattttttgcagcagtcttctcattcacaggcccaactttttcatcctcaaaatcctattgccgatgctcagaacctttcccaggaaactcaaggttctctctttcatagtccaaatcctattgtccacagtcagacttctacaacctcctctgaacaaatgcagcctccaatgtttcactctcaaagtaccattgctgtgttacagggctcttcagttcctcaagaccagcagtcaaccaacatatttctttcccagagtcccatgaataatcttcagactaacacagtagcccaagaagcattttttgcagcaccgaactcaatttctccacttcagtcaacatcaaacagtgaacaacaagctgctttccaacagcaagctccaatatcacacatccagactcctatgctttcccaagaacaggcacaacccccgcagcagggtttatttcagcctcaggtggccctgggctcccttccacctaatccaatgcctcaaagccaacaaggaaccatgttccagtcacagcactcaatagttgccatgcagagtaactctccatcccaggaacagcagcagcagcagcaacagcagcagcaacagcagcagcaacaacaacagagcattttattcagtaatcagaataccatggctacaatggcgtctccaaagcaaccaccaccaaacatgatattcaacccaaatcaaaatccaatggctaatcaggagcaacagaaccagtcaatttttcaccaacaaagtaacatggccccaatgaatcaagagcaacagcccatgcaatttcagagtcagtccacagtttcctcacttcagaacccaggtcctacccagtcggaatcatcacagacccccttgttccatagctctcctcagattcagttggtacaagggtcacctagttctcaagagcagcaagtaactctcttcttatctccagcatccatgtctgccttgcagaccagtataaatcaacaagatatgcaacagtctcctctttattcccctcagaacaacatgcctggaattcaaggagccacatcttcgcctcaaccacaggctactttatttcacaacacagcaggaggcacaatgaaccaactgcagaattctcctggctcatctcagcagacatcaggaatgttcttatttggcattcaaaataactgtagtcagcttttaacctctggaccagctacattgcctgatcagttgatggccataagtcagccaggccaaccacaaaacgagggccagccacctgtgacaacacttctttctcagcaaatgccagagaattctccactggcatcctctataaacaccaaccagaacatcgaaaagattgatttgcttgtttcattgcaaaaccaagggaacaacttgactggctccttttaactggatataaattccacgaagaaaatcctgattccaagatgtcctgagatcttgtggttccatgagaattattactttaaaaacaaaacaaaatataaaaaactgtgtttgagtaaactgatagattttactctgactgcaaaagagcacacctatgctgcttgttgcagtaactaaccaccaatgttaacatcttcatattttatattcctaataacagtgatgactgagaatctatttgagtttccagctggcagaattaattgttattattttcctaggcgcaatttccttaaacgtacagtttaaattcaaggctggaccactcagttattattgctattagaaaataatatatcatgtttacttttgttcttcattattttctttcctgcattgttttagtcaagtaatggcttttgaaaaagtaaagttcaataataactaaggctgtgatttttttcaatataaaaggcacagctgttggccaaagtgaaggaatcttttttcagttttattggagaaactgaagggtaacattctaacaagtaaactgtatgtgcagataaaagtactcttgatttaacacaaaggcagatgatacacttataaaactgggaacagctggaatgcttcttgattttattttttcagagagttgttagttctctgggtttctactaaggggtttagccataactgtgcatagaaaaataattatctgtaaaaaatgaaggggataatatatgataaattatgttctgatatcctcctacagtagtttaaattgacagaaaaatttgaatgttttcttcttaacccagtcttaggctggtattccctttttatatatatctatattacttttcacctctttttcactttactttagagaactattaatatactactggcttcatgaccctgtagcatctttggccactttaatctagggtgacctagcaatcctgcagcacagggcagagagtactgtcttaggaattattaggagttgattcctgagaaacaacacatttttccccatgaacggtgctgttctgaagtcttcaaatttttccctctaataggaaacagtataaattttaattaaaaaaaaaaggcaaactaaaatttcttgaaatatcacttctccctgatctgcagtgagtataaattcacttgtcacctcagtgctttacagtttgaagtggtcacttacctgatggttcccacaagccttaggctttacagggttgtatcattgacttaaaatgaagaattaacttgtgttacatctataaagagcaaaataacacactccagaacttggcagttgtagcattagttatacagttttgggtgttcttgccacccgtgggatgcctgcttctcactaccacctgtgtctggacacatgcttatgtctcattttccttttggcatgtggaaagctgtcaatgcagtgtaaggccaacgtgtgtgtggcttctatgtgttgagataatgttttggtatccttgtccgtttcatttattttttaagtgtacaaaaaataacctgttaattgttgaaggctacttttctgttctttttttttttttttttctatcctgtacatttagttgaactgtgcggaattgtggtgttggttttgtttacacagccagatttttccttctttttgttttgtgatgatcttcctttgttctttgaatgtgctcttttgtctttttctcttttttctcatgttttcttccctccacctccacccctttctttctttctctctctgattgagaggcattgaattacgttttcagtagtacaggcttcttgccgatatgaagggaacttttcagaaagagacctactctgggtcatttaattttgaatacagttttcaatcgttcaagttttggatggtttatatctaatgtgtgtttcatttttttggaaagctatattttgtatttaggaaatggtatactattttgctatttgtactgagtgagtacattggcataaatatagaaatttatatatatacatatatataaactattcttttttgccacacatttttgtggtaaatttgtgagtttgtctgatgttctaccacaacgtggcgtctgataacagtgagggggggtggggtttgttatgtctttattgagtatttaagtatcttttgaaacaaatgacctgttcatctgtggccattccatcaggcagttagttccttgatgtcagtagtgggctaaaggcagcttactgtgtgtttgctggagctttcactcagccaagtgttagagtcaggaaacccattgaggcaatggcgtcaaatggtgtttcacaagaatgagccattcagtctttgctcactatatatttaatattttattattgttgttattgttattattaattggctttctgtattctatgccttttatttataaagacactaagaaaacccatgtttgtaattttaataacatttttcccatcttgtaatatccagagctactttataaattctctgaaccaaaagtattttcctcagtgtatctcttctcccccagcccctattgggaaaaattacccagtatagttcaggttatgaggaggatcagccacacaatccagtgcttcagtttgaaaatgtaaaattctaaccctaaagtagggttggttgaaatttcagacaaagcaaacccagcaggtataaaaagtagtataaatacaaatctgtaagttatttttgaattttctgaacttttttctaagagattacataggagactaaagaaatctatctgttcaagttctaattaggatgattgttaatactgcactgtggatgaagtggcgactggcttgtgtgctgacttctgtggtttagcaagaggtttattgttatcaaatgctaattggcaatgccaagtcactgggaccaattttctgttttataatatctaagtttagaacagaatatatacctgaactgtagtggtttgatcggatggagacagaaaacccgatttttattctcataaattttgtggttatttatacaagggctgtgctatgctaccatattcttgttcaataataataggtttgttgttttttttacattgttaaatgttccttacccctaaaggtcaatgttaagtacaacattctgaaaatacaatttggctacgaagagtattcatcttctttgaagctcagtggttgatatttgtgctaataatgcaatttcctgattactgttacaagttatagctacatatgggagagactcagtgagccagcaaaggccatagaaacaacaatttattaaatgtatttatggcagaaggacctaaataaactgtgagccaccttttcttctttatattgttacatttaagtgttcttgctttcagcaactcacattaatgcttggagcttatctctttctctctctctctctctctctctgtgtgtgtgtgtgtatgtgtgtgtgtgtgtgtgtgtgtttccttattgtcattccattatatatccacaccaacatgggtgacgataattcaaagtcatattttgcctctaagcttgatcatgttacctttatgattaaagtatcatgttatttagccaatgcaaatctgttttaaaacaaatagtttaaaaaaagaacaagtttttaagggctttattatagaagaagtattaatgaaggactttccttcctccctccctttcctcccctccctgcctcccttcttcccttccatctccccctcctccctgccttctttgtttctccttcccttattcctccctccctcctttctcccttccttcctttcttccattcatccttccttgccttttatttttattttttgtaatatcacatgtgctgtagtttggaattttattctagtgcatttcttgctcatcagaacctcagctaatctacctaggaaaaatagtatcaaaggaaatgagaaagttgtatctgagtccctccagaactaagataattctttttgaccatttaagcctttataaatgcgttttgaccatttaagcctttataaatgcttgttttaggaaagtgaatctgttagatgcatcaacaaataatgaccaggacaaaacgatttaataattaaagtctcaaatcaccatggttatacattttcaccagaaatagtaatcttacaatttttcatttttctgatgaagatttctgttccaatatctgtttcctaatagattttttaaattaattagctttcctctgctttatgaccacaggttttatccctaaccgagacagctgtcttatatctgcatgccttagactgtgtggagggactccatgaagaaagaccataggttagaaaaataactcatagtatataccctagtaagtgggttagtagaatctcataacatgtattaaaaagaggttttcttctctgcttgtttgtgtcactagagcaaaattgtagagataatgctcataatgcagtaaatatcagaataatatctacaatatcatttgtggatggtcccaggtcccagtgctctagttactttacttctttttttttttttgagatggagtcttgctctgtctctcaggctagagcagtgtgcgatctcagctcactgcagcctccacctcccaggttcaagcgattctcctgcctcagcctcccaagtagccaggattacaggcaccctccactaggcccggctaattttttttgtatttttttagtagagatggggttttgccatgttggccaggctggtttcgaactcctaacctccagtgatccacctgcctcggcgtcccaaagtgctaggattacaggcatgagccaccacatccggcctaattacttctttaatccccatttatttttatgccattctagcctcatttattaataaaattatgtttttactttctctttcaggaaattttttaaattaatattttatatctagatctaatgctatggaaaagtgcctttttatcatttataatttcatttttcactatttccaaaaacacataaacaaatagtttcagtaggtcccagcttttactttttccatttaaaccttcttttctccatttcttccctttggcttaagaataaaagaaaaggtacattgctagaattgtttctttgggagagggtaaaagattacagaattagactgttcagcctttatataaactaaatttgtcttcatctcaaccagctaatggtaggtcttatctgaatactcatgagaattttagcatctgtgaaactccatgcaccagatgtgtgtaaatttcaggaagaaagtgttgaaagcattttctctgatgttaattagatggaaataaatcactaaaacatagtttaggtaaagcctgattatgccacttttttttaactagacagggcaaagttgtttatgttagtgtacttcttgtctatcctcagttaatttacctagacaaaaagtgtcaaaggaaatgagaaaaaggttatatctgactccctccagacctaagataattccttttgatcagatacagtcagatggagtgccttggtttttgttaattttgcctctattccagctccttaccacagcggtggtgcttaaagaaaggatcatcagcaacaggtcaggatagttctacctttgggatagggctgctttccccgtgctagtatttctgtgactgttagtggcactgaggactgcaaacttttatgcaatattcttaataccctattgatattatgcactttaatcattccaaagaagccaagaatgctgtatagtgatgattccttcctaatgaattcatcttaactatttagaatgttatgtcccttttcttttggatagccaacttggtataaatgttatatggatttttctaaaatgactatataggacttaagactttgaaatgtaatttacttataaggggaaataattatgctttagcacatcattttagaaacgtcacattttagaaacattcagcttgctaacctacatgtttgggaattcattaaaaccagttgtctatatattttgtgccatgtatataagaacattacaatatatctttttctacatatgtagtatgtgcaaccagtggttctcagagtatggttctcagcccaccagctagtatcagtatcacctgggaactagttagaaatgtaaattctttggccccatcccagacatactgagtcagaaactctggaatagggcccccgcaatctgttttcacaagccctccaggtgattctgatgcacactttaaagtttaggaaccactgggctaagactctgttgagatatagagtttttcttccactcagactgatatagttatacattgttcttcatgtaaattcagcttaacctggttatctataatcttttattggcaaaagttaattctcagtactgcctatagagatacagtgtattttatgtacatacacaattagtctaattcttgataattcagttaatttagtttggcattttcctaccacttactaaaaggtttacattaaatgactgatttaaatatataggtgcaatgttctatgtttattttaattgttatgacatttaagtagctaatataattgaccggtgctaaagtctcctgtttatccataaaatgggtacattatgggcagtgtaatacaagctttcttttcattgcctagtactttaccagcagaccacagttttgccctggctagaccaaccctcagaacaaaatcatcattccttgtatttatatttgtatctgagatagtaaacaagatggctggccaggtcaacatggcaccttaacttatttttttaataggtaaaacttcttcaaaagtagcttgctttgtataagaactaagctatcagtatagatatagctatccttggagcttatgtttcagacaagaattatttactaaaataaataataaacaagataatgcattatacaatttgggcatttctcgtttctcaagtgtatgcatcatggtaaatataaactaaccacaagataggtagattgattcatttcattttaatctccttgtgtaattcagtacctccataattgttctaatcttcttcccactgtttacaaattaccagttaattaactcgtgaaagaaaaattcacatatcagaataaaaataaatgtatactcactttataaaaatcaccactgctgtctttccttaatactagcagtggaaatgtaagtggcttactctacaaattttggtgctggcaaatacataggcaaactgttgggagctgctctagttacattcctcccttcttattccctttttctcttcctcactttattgcataacatattcctgtacccaaagcattctaccacagttctatttgactcccacttgtaataactcctttaaaaaattccatgtttaaccatatgaccctgcttgcttactcatattctccctccctctccccttcctttctctctcttccagaagtcatttgcctggtttgaaatattttgtagggattgcttattatattattttagctgatgaacctcaggacaacgtctacacacacacacatacatacacgcacacaaaatctcagctgttgaagagtgggcttggaatcagacttctgtgtccagtaaaaaactcctgcactgaagtcattgtgacttgagtagttacagactgattccagtgaacttgatctaatttcttttgatctaatgaatgtgtctgcttaccttgtttccttttaattgataagctccaagtagttgctaattttttgacaactttaaatgagtttcattcacttcttttacttaatgttttaagtatagtaccaataatttcattaacctgttctcaagtggtttagctaccattctgccatttttaatttttatttaattttatttgcttgagcacactgatcaaccactgaactgccttcttccattgtcctgcaatgatataagggttacatttttgtgtatatggctttcatagttgggatttcagagcactgataccagatattttcagtttgttctctgggggaatttcatttgcatctatgtttttagctatctgtgataacttgttaaatattaaaaagatattttgcttctattggaacatttgtatactcgcaactatatttctgtaaacagctgcagtcaaaaataaaacactgaaagtt

SEQ ID NO: 2854 - DNA, 2807 bp, Homo sapiens
  source 1..2807: mol_type = genomic DNA
gcgtcagagcgagactcagaggctccgaactcgccggcggagtcgccgcgccagatcccagcagcagggcgcgggcaccggggcgcgggcagggctcggagccaccgcgcaggtcctagggccgcggccgggccccgccacgcgcgcacacgcccctcgatgactttcctccggggcgcgcggcgctgagcccggggcgagggctgtcttcccggagacccgaccccggcagcgcggggcggccgcttctcctgtgcctccgcccgccgctccactccccgccgccgccgcgcggatgccaagcaccagctttccagtcccttccaagtttccacttggccctgcggctgcggtcttcgggagaggagaaactttggggcccgcgccgcgcgccggcggcaccatgaagtcagcggaggaagaacactatggctatgcatcctccaacgtcagccccgccctgccgctccccacggcgcactccaccctgccggccccgtgccacaaccttcagacctccacaccgggcatcatcccgccggcggatcacccctcggggtacggagcagctttggacggtgggcccgcgggctacttcctctcctccggccacaccaggcctgatggggcccctgccctggagagtcctcgcatcgagataacctcgtgcttgggcctgtaccacaacaataaccagtttttccacgatgtggaggtggaagacgtcctccctagctccaaacggtccccctccacggccacgctgagtctgcccagcctggaggcctacagagacccctcgtgcctgagcccggccagcagcctgtcctcccggagctgcaactcagaggcctcctcctacgagtccaactactcgtacccgtacgcgtccccccagacgtcgccatggcagtctccctgcgtgtctcccaagaccacggaccccgaggagggctttccccgcgggctgggggcctgcacactgctgggttccccgcggcactccccctccacctcgccccgcgccagcgtcactgaggagagctggctgggtgcccgctcctccagacccgcgtccccttgcaacaagaggaagtacagcctcaacggccggcagccgccctactcaccccaccactcgcccacgccgtccccgcacggctccccgcgggtcagcgtgaccgacgactcgtggttgggcaacaccacccagtacaccagctcggccatcgtggccgccatcaacgcgctgaccaccgacagcagcctggacctgggagatggcgtccctgtcaagtcccgcaagaccaccctggagcagccgccctcagtggcgctcaaggtggagcccgtcggggaggacctgggcagccccccgcccccggccgacttcgcgcccgaagactactcctctttccagcacatcaggaagggcggcttctgcgaccagtacctggcggtgccgcagcacccctaccagtgggcgaagcccaagcccctgtcccctacgtcctacatgagcccgaccctgcccgccctggactggcagctgccgtcccactcaggcccgtatgagcttcggattgaggtgcagcccaagtcccaccaccgagcccactacgagacggagggcagccggggggccgtgaaggcgtcggccggaggacaccccatcgtgcagctgcatggctacttggagaatgagccgctgatgctgcagcttttcattgggacggcggacgaccgcctgctgcgcccgcacgccttctaccaggtgcaccgcatcacagggaagaccgtgtccaccaccagccacgaggccatcctctccaacaccaaagtcctggagatcccactcctgccggagaacagcatgcgagccgtcattgactgtgccggaatcctgaaactcagaaactccgacattgaacttcggaaaggagagacggacatcgggaggaagaacacacgggtacggctggtgttccgcgttcacgtcccgcaacccagcggccgcacgctgtccctgcaggtggcctccaaccccatcgaatgctcccagcgctcagctcaggagctgcctctggtggagaagcagagcacggacagctatccggtcgtgggcgggaagaagatggtcctgtctggccacaacttcctgcaggactccaaggtcattttcgtggagaaagccccagatggccaccatgtctgggagatggaagcgaaaactgaccgggacctgtgcaagccgaattctctggtggttgagatcccgccatttcggaatcagaggataaccagccccgttcacgtcagtttctacgtctgcaacgggaagagaaagcgaagccagtaccagcgtttcacctaccttcccgccaacggtaacgccatctttctaaccgtaagccgtgaacatgagcgcgtggggtgctttttctaaagacgcagaaacgacgtcgccgtaaagcagcgtggcgtgttgcacatttaactgtgtgatgtcccgttagtgagaccgagccatcgatgccctgaaaaggaaaggaaaagggaagcttcggatgcattttccttgatccctgttgggggtggggggcgggggttgcatactcagatagtcacggttattttgcttcttgcgaatgtataacagccaaggggaaaacatggctcttctgctccaaaaaactgagggggtcctggtgtgcatttgcaccctaaagctgcttacggtgaaaaggcaaataggtatagctattttgcaggcacctttaggaataaactttgcttttaagcctgta

SEQ ID NO: 2855 - DNA, 4642 bp, Homo sapiens
  source 1..4642: mol_type = genomic DNA
gagccgccgggccggcggggaggcgggggaggtgttttccagctttaaaaaggcaggaggcagagcgcggccctgcgtcagagcgagactcagaggctccgaactcgccggcggagtcgccgcgccagatcccagcagcagggcgcgggcaccggggcgcgggcagggctcggagccaccgcgcaggtcctagggccgcggccgggccccgccacgcgcgcacacgcccctcgatgactttcctccggggcgcgcggcgctgagcccggggcgagggctgtcttcccggagacccgaccccggcagcgcggggcggccgcttctcctgtgcctccgcccgccgctccactccccgccgccgccgcgcggatgccaagcaccagctttccagtcccttccaagtttccacttggccctgcggctgcggtcttcgggagaggagaaactttggggcccgcgccgcgcgccggcggcaccatgaagtcagcggaggaagaacactatggctatgcatcctccaacgtcagccccgccctgccgctccccacggcgcactccaccctgccggccccgtgccacaaccttcagacctccacaccgggcatcatcccgccggcggatcacccctcggggtacggagcagctttggacggtgggcccgcgggctacttcctctcctccggccacaccaggcctgatggggcccctgccctggagagtcctcgcatcgagataacctcgtgcttgggcctgtaccacaacaataaccagtttttccacgatgtggaggtggaagacgtcctccctagctccaaacggtccccctccacggccacgctgagtctgcccagcctggaggcctacagagacccctcgtgcctgagcccggccagcagcctgtcctcccggagctgcaactcagaggcctcctcctacgagtccaactactcgtacccgtacgcgtccccccagacgtcgccatggcagtctccctgcgtgtctcccaagaccacggaccccgaggagggctttccccgcgggctgggggcctgcacactgctgggttccccgcggcactccccctccacctcgccccgcgccagcgtcactgaggagagctggctgggtgcccgctcctccagacccgcgtccccttgcaacaagaggaagtacagcctcaacggccggcagccgccctactcaccccaccactcgcccacgccgtccccgcacggctccccgcgggtcagcgtgaccgacgactcgtggttgggcaacaccacccagtacaccagctcggccatcgtggccgccatcaacgcgctgaccaccgacagcagcctggacctgggagatggcgtccctgtcaagtcccgcaagaccaccctggagcagccgccctcagtggcgctcaaggtggagcccgtcggggaggacctgggcagccccccgcccccggccgacttcgcgcccgaagactactcctctttccagcacatcaggaagggcggcttctgcgaccagtacctggcggtgccgcagcacccctaccagtgggcgaagcccaagcccctgtcccctacgtcctacatgagcccgaccctgcccgccctggactggcagctgccgtcccactcaggcccgtatgagcttcggattgaggtgcagcccaagtcccaccaccgagcccactacgagacggagggcagccggggggccgtgaaggcgtcggccggaggacaccccatcgtgcagctgcatggctacttggagaatgagccgctgatgctgcagcttttcattgggacggcggacgaccgcctgctgcgcccgcacgccttctaccaggtgcaccgcatcacagggaagaccgtgtccaccaccagccacgaggccatcctctccaacaccaaagtcctggagatcccactcctgccggagaacagcatgcgagccgtcattgactgtgccggaatcctgaaactcagaaactccgacattgaacttcggaaaggagagacggacatcgggaggaagaacacacgggtacggctggtgttccgcgttcacgtcccgcaacccagcggccgcacgctgtccctgcaggtggcctccaaccccatcgaatgctcccagcgctcagctcaggagctgcctctggtggagaagcagagcacggacagctatccggtcgtgggcgggaagaagatggtcctgtctggccacaacttcctgcaggactccaaggtcattttcgtggagaaagccccagatggccaccatgtctgggagatggaagcgaaaactgaccgggacctgtgcaagccgaattctctggtggttgagatcccgccatttcggaatcagaggataaccagccccgttcacgtcagtttctacgtctgcaacgggaagagaaagcgaagccagtaccagcgtttcacctaccttcccgccaacgttccaattataaaaacagaacccactgatgattatgagcctgctccaacctgtggaccggtgagccaggggttaagtcctctcccaagaccatactacagccagcagctcgcgatgccacccgaccccagctcctgcctcgtggccggcttcccgccctgtccgcagagaagcaccctgatgccagcggcccctggcgtgagccccaagctccacgacctttctcccgctgcctacaccaagggcgttgccagcccgggccactgtcacctcggactcccgcagccggccggagaggcccccgccgtccaggacgtgcccaggccagtggccacgcaccccggctcgcccgggcagccacccccggccctgctgccacagcagtaaatgaaataatacgaaatgacctctccagcacgagcacccactcctagttgccacattggagcactcagttcagcaggggtatgctgacttcagcagacaaagacttttgaataaataaactgaactcacacctggtaccactcagaacctccaactgactgaatgccaggagctgaacattaatatgtgcaaagattggctctccaacaagaaggaaagcagggaggaagggagaccactgtgtcacctggaggagaagtcatctcatgacaacagaagggaggtggccgggctgagcacgggagacccaccgtgcaggggcctttcatgggaacggcccacacgcagtttgaccccacgcccagcccttctggcacccctggggttcaatactggaagtgccttatttaaccagaccatcagggcatcatagaattgagcattgaatttgctactgtaggagtatttttaggagcagaaactgcaaacacatttcattgtgaggttttaccctctgtatgaatgaagagaacgctggaaggctgcgagaggactctagtatgagtctccaacatttggaacgtttcctgggctgtcacgtacactcctgctgccttacacagtgcattttagaatcttccagtctgtcatctcagctcttttgtaacatgcttcccttgtctgcgcggttgaaaccgtaggcttgttcatagtcgcatgctcgcatctttgtttttaatctggcttcgaacatagcacaagtaacttgaatagcacatcaataggttactggacaaaagcagaaaaacctgttacaggatagcctgcatttgcatgtgtgtacatatctaggcatctatttatgtataaataataacagagccgacgtgtcctcgcccaggagggcttccctgtcagcaataaccggcatccgttttggaacctgcgtctggggctccagtcgctgctcttgctggcgtccatcgccgcctcggacggccgtgcattttctcgtctcacgcagttcgaggaggaccctagaaagccaggagctgtgattgacagtagctgtaggttaccagacggcaacattagaaagtgattgtaaataacatgcaacctaagtgtaatatatttgttcagttataagatgattgtttcacagaagccttaccactctctgcttcatctaagaaaaccaataccaaaaacgccactttaatgctcagccctgcgttgtgtgttttcagatgagttactgttaacaggtaggtttgtgtaggccttgctgggcactctgtacaattagttgcttattacgtatgattactcacagcgatctattgttccatataaccaaaaagcatggtttattcattgaaacacggttgacctgaactcgtgccttaggaattaatgcccccttatggaacctgcctgaattgcacctgcgggtggaggctccggctgtgaagtcactgaacagaacgtcgctgatggagaaagggctcccgcagaaggaacggcctgtaccgtgcgctccggcacaatcgcgtctcttgtgtctcactcacggaaagaaacaacctgaaggccatcccgtcggtctgcacgtaaccgtgaagacgtgtggccgcgtcccacctgcggctgggtaccctgcacccggcactgtaggagtcacgtgcagcctttctcaggggactgtcattgaaaaggaaacgtttgatgtctgtgtcagctgtctttgtagttaggaaatagatccaataaagccgtatttttttgctggaca

SEQ ID NO: 2856 - DNA, 5030 bp, Homo sapiens
  source 1..5030: mol_type = genomic DNA
ggcgggcgctcggcgactcgtccccggggccccgcgcgggcccgggcagcaggggcgtgatgtcacggcagggagggggcgcgggagccgccgggccggcggggaggcgggggaggtgttttccagctttaaaaaggcaggaggcagagcgcggccctgcgtcagagcgagactcagaggctccgaactcgccggcggagtcgccgcgccagatcccagcagcagggcgcgggcaccggggcgcgggcagggctcggagccaccgcgcaggtcctagggccgcggccgggccccgccacgcgcgcacacgcccctcgatgactttcctccggggcgcgcggcgctgagcccggggcgagggctgtcttcccggagacccgaccccggcagcgcggggcggccgcttctcctgtgcctccgcccgccgctccactccccgccgccgccgcgcggatgccaagcaccagctttccagtcccttccaagtttccacttggccctgcggctgcggtcttcgggagaggagaaactttggggcccgcgccgcgcgccggcggcaccatgaagtcagcggaggaagaacactatggctatgcatcctccaacgtcagccccgccctgccgctccccacggcgcactccaccctgccggccccgtgccacaaccttcagacctccacaccgggcatcatcccgccggcggatcacccctcggggtacggagcagctttggacggtgggcccgcgggctacttcctctcctccggccacaccaggcctgatggggcccctgccctggagagtcctcgcatcgagataacctcgtgcttgggcctgtaccacaacaataaccagtttttccacgatgtggaggtggaagacgtcctccctagctccaaacggtccccctccacggccacgctgagtctgcccagcctggaggcctacagagacccctcgtgcctgagcccggccagcagcctgtcctcccggagctgcaactcagaggcctcctcctacgagtccaactactcgtacccgtacgcgtccccccagacgtcgccatggcagtctccctgcgtgtctcccaagaccacggaccccgaggagggctttccccgcgggctgggggcctgcacactgctgggttccccgcggcactccccctccacctcgccccgcgccagcgtcactgaggagagctggctgggtgcccgctcctccagacccgcgtccccttgcaacaagaggaagtacagcctcaacggccggcagccgccctactcaccccaccactcgcccacgccgtccccgcacggctccccgcgggtcagcgtgaccgacgactcgtggttgggcaacaccacccagtacaccagctcggccatcgtggccgccatcaacgcgctgaccaccgacagcagcctggacctgggagatggcgtccctgtcaagtcccgcaagaccaccctggagcagccgccctcagtggcgctcaaggtggagcccgtcggggaggacctgggcagccccccgcccccggccgacttcgcgcccgaagactactcctctttccagcacatcaggaagggcggcttctgcgaccagtacctggcggtgccgcagcacccctaccagtgggcgaagcccaagcccctgtcccctacgtcctacatgagcccgaccctgcccgccctggactggcagctgccgtcccactcaggcccgtatgagcttcggattgaggtgcagcccaagtcccaccaccgagcccactacgagacggagggcagccggggggccgtgaaggcgtcggccggaggacaccccatcgtgcagctgcatggctacttggagaatgagccgctgatgctgcagcttttcattgggacggcggacgaccgcctgctgcgcccgcacgccttctaccaggtgcaccgcatcacagggaagaccgtgtccaccaccagccacgaggccatcctctccaacaccaaagtcctggagatcccactcctgccggagaacagcatgcgagccgtcattgactgtgccggaatcctgaaactcagaaactccgacattgaacttcggaaaggagagacggacatcgggaggaagaacacacgggtacggctggtgttccgcgttcacgtcccgcaacccagcggccgcacgctgtccctgcaggtggcctccaaccccatcgaatgctcccagcgctcagctcaggagctgcctctggtggagaagcagagcacggacagctatccggtcgtgggcgggaagaagatggtcctgtctggccacaacttcctgcaggactccaaggtcattttcgtggagaaagccccagatggccaccatgtctgggagatggaagcgaaaactgaccgggacctgtgcaagccgaattctctggtggttgagatcccgccatttcggaatcagaggataaccagccccgttcacgtcagtttctacgtctgcaacgggaagagaaagcgaagccagtaccagcgtttcacctaccttcccgccaacgttccaattataaaaacagaacccactgatgattatgagcctgctccaacctgtggaccggtgagccaggggttaagtcctctcccaagaccatactacagccagcagctcgcgatgccacccgaccccagctcctgcctcgtggccggcttcccgccctgtccgcagagaagcaccctgatgccagcggcccctggcgtgagccccaagctccacgacctttctcccgctgcctacaccaagggcgttgccagcccgggccactgtcacctcggactcccgcagccggccggagaggcccccgccgtccaggacgtgcccaggccagtggccacgcaccccggctcgcccgggcagccacccccggccctgctgccacagcaggtgagtgcgcctccaagcagtagctgcccccctggtctcgaacactcgctctgccccagcagcccctctcctccactcccgcctgccacccaagagccgacctgcctgcagccctgcagcccagcgtgcccgcccgccacgggccgcccgcagcacctgccgtccacggtccgcagggacgagtctccgactgccgggccacggctgctgccagaggtgcatgaggacggtagtcctaatttggcccctattcctgtaacggtcaagcgagagcctgaagagttggaccagttgtacctggatgacgtaaatgaaataatacgaaatgacctctccagcacgagcacccactcctagttgccacattggagcactcagttcagcaggggtatgctgacttcagcagacaaagacttttgaataaataaactgaactcacacctggtaccactcagaacctccaactgactgaatgccaggagctgaacattaatatgtgcaaagattggctctccaacaagaaggaaagcagggaggaagggagaccactgtgtcacctggaggagaagtcatctcatgacaacagaagggaggtggccgggctgagcacgggagacccaccgtgcaggggcctttcatgggaacggcccacacgcagtttgaccccacgcccagcccttctggcacccctggggttcaatactggaagtgccttatttaaccagaccatcagggcatcatagaattgagcattgaatttgctactgtaggagtatttttaggagcagaaactgcaaacacatttcattgtgaggttttaccctctgtatgaatgaagagaacgctggaaggctgcgagaggactctagtatgagtctccaacatttggaacgtttcctgggctgtcacgtacactcctgctgccttacacagtgcattttagaatcttccagtctgtcatctcagctcttttgtaacatgcttcccttgtctgcgcggttgaaaccgtaggcttgttcatagtcgcatgctcgcatctttgtttttaatctggcttcgaacatagcacaagtaacttgaatagcacatcaataggttactggacaaaagcagaaaaacctgttacaggatagcctgcatttgcatgtgtgtacatatctaggcatctatttatgtataaataataacagagccgacgtgtcctcgcccaggagggcttccctgtcagcaataaccggcatccgttttggaacctgcgtctggggctccagtcgctgctcttgctggcgtccatcgccgcctcggacggccgtgcattttctcgtctcacgcagttcgaggaggaccctagaaagccaggagctgtgattgacagtagctgtaggttaccagacggcaacattagaaagtgattgtaaataacatgcaacctaagtgtaatatatttgttcagttataagatgattgtttcacagaagccttaccactctctgcttcatctaagaaaaccaataccaaaaacgccactttaatgctcagccctgcgttgtgtgttttcagatgagttactgttaacaggtaggtttgtgtaggccttgctgggcactctgtacaattagttgcttattacgtatgattactcacagcgatctattgttccatataaccaaaaagcatggtttattcattgaaacacggttgacctgaactcgtgccttaggaattaatgcccccttatggaacctgcctgaattgcacctgcgggtggaggctccggctgtgaagtcactgaacagaacgtcgctgatggagaaagggctcccgcagaaggaacggcctgtaccgtgcgctccggcacaatcgcgtctcttgtgtctcactcacggaaagaaacaacctgaaggccatcccgtcggtctgcacgtaaccgtgaagacgtgtggccgcgtcccacctgcggctgggtaccctgcacccggcactgtaggagtcacgtgcagcctttctcaggggactgtcattgaaaaggaaacgtttgatgtctgtgtcagctgtctttgtagttaggaaatagatccaataaagccgtatttttttgctgg

SEQ ID NO: 2857 - DNA, 4604 bp, Homo sapiens
  source 1..4604: mol_type = genomic DNA
gccgggagaaccgaacccctggcggccgcgaccccggctcccgccccggccccggcccgacccgccatgacggggctggaggaccaggagttcgacttcgagttcctcttcgagtttaaccagcgcgacgagggcgccgccgcggccgccccagaacactatggctatgcatcctccaacgtcagccccgccctgccgctccccacggcgcactccaccctgccggccccgtgccacaaccttcagacctccacaccgggcatcatcccgccggcggatcacccctcggggtacggagcagctttggacggtgggcccgcgggctacttcctctcctccggccacaccaggcctgatggggcccctgccctggagagtcctcgcatcgagataacctcgtgcttgggcctgtaccacaacaataaccagtttttccacgatgtggaggtggaagacgtcctccctagctccaaacggtccccctccacggccacgctgagtctgcccagcctggaggcctacagagacccctcgtgcctgagcccggccagcagcctgtcctcccggagctgcaactcagaggcctcctcctacgagtccaactactcgtacccgtacgcgtccccccagacgtcgccatggcagtctccctgcgtgtctcccaagaccacggaccccgaggagggctttccccgcgggctgggggcctgcacactgctgggttccccgcggcactccccctccacctcgccccgcgccagcgtcactgaggagagctggctgggtgcccgctcctccagacccgcgtccccttgcaacaagaggaagtacagcctcaacggccggcagccgccctactcaccccaccactcgcccacgccgtccccgcacggctccccgcgggtcagcgtgaccgacgactcgtggttgggcaacaccacccagtacaccagctcggccatcgtggccgccatcaacgcgctgaccaccgacagcagcctggacctgggagatggcgtccctgtcaagtcccgcaagaccaccctggagcagccgccctcagtggcgctcaaggtggagcccgtcggggaggacctgggcagccccccgcccccggccgacttcgcgcccgaagactactcctctttccagcacatcaggaagggcggcttctgcgaccagtacctggcggtgccgcagcacccctaccagtgggcgaagcccaagcccctgtcccctacgtcctacatgagcccgaccctgcccgccctggactggcagctgccgtcccactcaggcccgtatgagcttcggattgaggtgcagcccaagtcccaccaccgagcccactacgagacggagggcagccggggggccgtgaaggcgtcggccggaggacaccccatcgtgcagctgcatggctacttggagaatgagccgctgatgctgcagcttttcattgggacggcggacgaccgcctgctgcgcccgcacgccttctaccaggtgcaccgcatcacagggaagaccgtgtccaccaccagccacgaggccatcctctccaacaccaaagtcctggagatcccactcctgccggagaacagcatgcgagccgtcattgactgtgccggaatcctgaaactcagaaactccgacattgaacttcggaaaggagagacggacatcgggaggaagaacacacgggtacggctggtgttccgcgttcacgtcccgcaacccagcggccgcacgctgtccctgcaggtggcctccaaccccatcgaatgctcccagcgctcagctcaggagctgcctctggtggagaagcagagcacggacagctatccggtcgtgggcgggaagaagatggtcctgtctggccacaacttcctgcaggactccaaggtcattttcgtggagaaagccccagatggccaccatgtctgggagatggaagcgaaaactgaccgggacctgtgcaagccgaattctctggtggttgagatcccgccatttcggaatcagaggataaccagccccgttcacgtcagtttctacgtctgcaacgggaagagaaagcgaagccagtaccagcgtttcacctaccttcccgccaacgttccaattataaaaacagaacccactgatgattatgagcctgctccaacctgtggaccggtgagccaggggttaagtcctctcccaagaccatactacagccagcagctcgcgatgccacccgaccccagctcctgcctcgtggccggcttcccgccctgtccgcagagaagcaccctgatgccagcggcccctggcgtgagccccaagctccacgacctttctcccgctgcctacaccaagggcgttgccagcccgggccactgtcacctcggactcccgcagccggccggagaggcccccgccgtccaggacgtgcccaggccagtggccacgcaccccggctcgcccgggcagccacccccggccctgctgccacagcaggtgagtgcgcctccaagcagtagctgcccccctggtctcgaacactcgctctgccccagcagcccctctcctccactcccgcctgccacccaagagccgacctgcctgcagccctgcagcccagcgtgcccgcccgccacgggccgcccgcagcacctgccgtccacggtccgcagggacgagtctccgactgccgggccacggctgctgccagaggtgcatgaggacggtagtcctaatttggcccctattcctgtaacggtcaagcgagagcctgaagagttggaccagttgtacctggatgacgtaaatgaaataatacgaaatgacctctccagcacgagcacccactcctagttgccacattggagcactcagttcagcaggggtatgctgacttcagcagacaaagacttttgaataaataaactgaactcacacctggtaccactcagaacctccaactgactgaatgccaggagctgaacattaatatgtgcaaagattggctctccaacaagaaggaaagcagggaggaagggagaccactgtgtcacctggaggagaagtcatctcatgacaacagaagggaggtggccgggctgagcacgggagacccaccgtgcaggggcctttcatgggaacggcccacacgcagtttgaccccacgcccagcccttctggcacccctggggttcaatactggaagtgccttatttaaccagaccatcagggcatcatagaattgagcattgaatttgctactgtaggagtatttttaggagcagaaactgcaaacacatttcattgtgaggttttaccctctgtatgaatgaagagaacgctggaaggctgcgagaggactctagtatgagtctccaacatttggaacgtttcctgggctgtcacgtacactcctgctgccttacacagtgcattttagaatcttccagtctgtcatctcagctcttttgtaacatgcttcccttgtctgcgcggttgaaaccgtaggcttgttcatagtcgcatgctcgcatctttgtttttaatctggcttcgaacatagcacaagtaacttgaatagcacatcaataggttactggacaaaagcagaaaaacctgttacaggatagcctgcatttgcatgtgtgtacatatctaggcatctatttatgtataaataataacagagccgacgtgtcctcgcccaggagggcttccctgtcagcaataaccggcatccgttttggaacctgcgtctggggctccagtcgctgctcttgctggcgtccatcgccgcctcggacggccgtgcattttctcgtctcacgcagttcgaggaggaccctagaaagccaggagctgtgattgacagtagctgtaggttaccagacggcaacattagaaagtgattgtaaataacatgcaacctaagtgtaatatatttgttcagttataagatgattgtttcacagaagccttaccactctctgcttcatctaagaaaaccaataccaaaaacgccactttaatgctcagccctgcgttgtgtgttttcagatgagttactgttaacaggtaggtttgtgtaggccttgctgggcactctgtacaattagttgcttattacgtatgattactcacagcgatctattgttccatataaccaaaaagcatggtttattcattgaaacacggttgacctgaactcgtgccttaggaattaatgcccccttatggaacctgcctgaattgcacctgcgggtggaggctccggctgtgaagtcactgaacagaacgtcgctgatggagaaagggctcccgcagaaggaacggcctgtaccgtgcgctccggcacaatcgcgtctcttgtgtctcactcacggaaagaaacaacctgaaggccatcccgtcggtctgcacgtaaccgtgaagacgtgtggccgcgtcccacctgcggctgggtaccctgcacccggcactgtaggagtcacgtgcagcctttctcaggggactgtcattgaaaaggaaacgtttgatgtctgtgtcagctgtctttgtagttaggaaatagatccaataaagccgtatttttttgctgg

SEQ ID NO: 2858 - DNA, 3453 bp, Homo sapiens
  source 1..3453: mol_type = genomic DNA
ctcagaggctccgaactcgccggcggagtcgccgcgccagatcccagcagcagggcgcgggcaccggggcgcgggcagggctcggagccaccgcgcaggtcctagggccgcggccgggccccgccacgcgcgcacacgcccctcgatgactttcctccggggcgcgcggcgctgagcccggggcgagggctgtcttcccggagacccgaccccggcagcgcggggcggccgcttctcctgtgcctccgcccgccgctccactccccgccgccgccgcgcggatgccaagcaccagctttccagtcccttccaagtttccacttggccctgcggctgcggtcttcgggagaggagaaactttggggcccgcgccgcgcgccggcggcaccatgaagtcagcggaggaagcccgaccctgcccgccctggactggcagctgccgtcccactcaggcccgtatgagcttcggattgaggtgcagcccaagtcccaccaccgagcccactacgagacggagggcagccggggggccgtgaaggcgtcggccggaggacaccccatcgtgcagctgcatggctacttggagaatgagccgctgatgctgcagcttttcattgggacggcggacgaccgcctgctgcgcccgcacgccttctaccaggtgcaccgcatcacagggaagaccgtgtccaccaccagccacgaggccatcctctccaacaccaaagtcctggagatcccactcctgccggagaacagcatgcgagccgtcattgactgtgccggaatcctgaaactcagaaactccgacattgaacttcggaaaggagagacggacatcgggaggaagaacacacgggtacggctggtgttccgcgttcacgtcccgcaacccagcggccgcacgctgtccctgcaggtggcctccaaccccatcgaatgctcccagcgctcagctcaggagctgcctctggtggagaagcagagcacggacagctatccggtcgtgggcgggaagaagatggtcctgtctggccacaacttcctgcaggactccaaggtcattttcgtggagaaagccccagatggccaccatgtctgggagatggaagcgaaaactgaccgggacctgtgcaagccgaattctctggtggttgagatcccgccatttcggaatcagaggataaccagccccgttcacgtcagtttctacgtctgcaacgggaagagaaagcgaagccagtaccagcgtttcacctaccttcccgccaacgttccaattataaaaacagaacccactgatgattatgagcctgctccaacctgtggaccggtgagccaggggttaagtcctctcccaagaccatactacagccagcagctcgcgatgccacccgaccccagctcctgcctcgtggccggcttcccgccctgtccgcagagaagcaccctgatgccagcggcccctggcgtgagccccaagctccacgacctttctcccgctgcctacaccaagggcgttgccagcccgggccactgtcacctcggactcccgcagccggccggagaggcccccgccgtccaggacgtgcccaggccagtggccacgcaccccggctcgcccgggcagccacccccggccctgctgccacagcagtaaatgaaataatacgaaatgacctctccagcacgagcacccactcctagttgccacattggagcactcagttcagcaggggtatgctgacttcagcagacaaagacttttgaataaataaactgaactcacacctggtaccactcagaacctccaactgactgaatgccaggagctgaacattaatatgtgcaaagattggctctccaacaagaaggaaagcagggaggaagggagaccactgtgtcacctggaggagaagtcatctcatgacaacagaagggaggtggccgggctgagcacgggagacccaccgtgcaggggcctttcatgggaacggcccacacgcagtttgaccccacgcccagcccttctggcacccctggggttcaatactggaagtgccttatttaaccagaccatcagggcatcatagaattgagcattgaatttgctactgtaggagtatttttaggagcagaaactgcaaacacatttcattgtgaggttttaccctctgtatgaatgaagagaacgctggaaggctgcgagaggactctagtatgagtctccaacatttggaacgtttcctgggctgtcacgtacactcctgctgccttacacagtgcattttagaatcttccagtctgtcatctcagctcttttgtaacatgcttcccttgtctgcgcggttgaaaccgtaggcttgttcatagtcgcatgctcgcatctttgtttttaatctggcttcgaacatagcacaagtaacttgaatagcacatcaataggttactggacaaaagcagaaaaacctgttacaggatagcctgcatttgcatgtgtgtacatatctaggcatctatttatgtataaataataacagagccgacgtgtcctcgcccaggagggcttccctgtcagcaataaccggcatccgttttggaacctgcgtctggggctccagtcgctgctcttgctggcgtccatcgccgcctcggacggccgtgcattttctcgtctcacgcagttcgaggaggaccctagaaagccaggagctgtgattgacagtagctgtaggttaccagacggcaacattagaaagtgattgtaaataacatgcaacctaagtgtaatatatttgttcagttataagatgattgtttcacagaagccttaccactctctgcttcatctaagaaaaccaataccaaaaacgccactttaatgctcagccctgcgttgtgtgttttcagatgagttactgttaacaggtaggtttgtgtaggccttgctgggcactctgtacaattagttgcttattacgtatgattactcacagcgatctattgttccatataaccaaaaagcatggtttattcattgaaacacggttgacctgaactcgtgccttaggaattaatgcccccttatggaacctgcctgaattgcacctgcgggtggaggctccggctgtgaagtcactgaacagaacgtcgctgatggagaaagggctcccgcagaaggaacggcctgtaccgtgcgctccggcacaatcgcgtctcttgtgtctcactcacggaaagaaacaacctgaaggccatcccgtcggtctgcacgtaaccgtgaagacgtgtggccgcgtcccacctgcggctgggtaccctgcacccggcactgtaggagtcacgtgcagcctttctcaggggactgtcattgaaaaggaaacgtttgatgtctgtgtcagctgtctttgtagttaggaaatagatccaataaagccgtatttttttgctgga

SEQ ID NO: 2859 - DNA, 4469 bp, Homo sapiens
  source 1..4469: mol_type = genomic DNA
atgaagagcggaaccctagaacactatggctatgcatcctccaacgtcagccccgccctgccgctccccacggcgcactccaccctgccggccccgtgccacaaccttcagacctccacaccgggcatcatcccgccggcggatcacccctcggggtacggagcagctttggacggtgggcccgcgggctacttcctctcctccggccacaccaggcctgatggggcccctgccctggagagtcctcgcatcgagataacctcgtgcttgggcctgtaccacaacaataaccagtttttccacgatgtggaggtggaagacgtcctccctagctccaaacggtccccctccacggccacgctgagtctgcccagcctggaggcctacagagacccctcgtgcctgagcccggccagcagcctgtcctcccggagctgcaactcagaggcctcctcctacgagtccaactactcgtacccgtacgcgtccccccagacgtcgccatggcagtctccctgcgtgtctcccaagaccacggaccccgaggagggctttccccgcgggctgggggcctgcacactgctgggttccccgcggcactccccctccacctcgccccgcgccagcgtcactgaggagagctggctgggtgcccgctcctccagacccgcgtccccttgcaacaagaggaagtacagcctcaacggccggcagccgccctactcaccccaccactcgcccacgccgtccccgcacggctccccgcgggtcagcgtgaccgacgactcgtggttgggcaacaccacccagtacaccagctcggccatcgtggccgccatcaacgcgctgaccaccgacagcagcctggacctgggagatggcgtccctgtcaagtcccgcaagaccaccctggagcagccgccctcagtggcgctcaaggtggagcccgtcggggaggacctgggcagccccccgcccccggccgacttcgcgcccgaagactactcctctttccagcacatcaggaagggcggcttctgcgaccagtacctggcggtgccgcagcacccctaccagtgggcgaagcccaagcccctgtcccctacgtcctacatgagcccgaccctgcccgccctggactggcagctgccgtcccactcaggcccgtatgagcttcggattgaggtgcagcccaagtcccaccaccgagcccactacgagacggagggcagccggggggccgtgaaggcgtcggccggaggacaccccatcgtgcagctgcatggctacttggagaatgagccgctgatgctgcagcttttcattgggacggcggacgaccgcctgctgcgcccgcacgccttctaccaggtgcaccgcatcacagggaagaccgtgtccaccaccagccacgaggccatcctctccaacaccaaagtcctggagatcccactcctgccggagaacagcatgcgagccgtcattgactgtgccggaatcctgaaactcagaaactccgacattgaacttcggaaaggagagacggacatcgggaggaagaacacacgggtacggctggtgttccgcgttcacgtcccgcaacccagcggccgcacgctgtccctgcaggtggcctccaaccccatcgaatgctcccagcgctcagctcaggagctgcctctggtggagaagcagagcacggacagctatccggtcgtgggcgggaagaagatggtcctgtctggccacaacttcctgcaggactccaaggtcattttcgtggagaaagccccagatggccaccatgtctgggagatggaagcgaaaactgaccgggacctgtgcaagccgaattctctggtggttgagatcccgccatttcggaatcagaggataaccagccccgttcacgtcagtttctacgtctgcaacgggaagagaaagcgaagccagtaccagcgtttcacctaccttcccgccaacgttccaattataaaaacagaacccactgatgattatgagcctgctccaacctgtggaccggtgagccaggggttaagtcctctcccaagaccatactacagccagcagctcgcgatgccacccgaccccagctcctgcctcgtggccggcttcccgccctgtccgcagagaagcaccctgatgccagcggcccctggcgtgagccccaagctccacgacctttctcccgctgcctacaccaagggcgttgccagcccgggccactgtcacctcggactcccgcagccggccggagaggcccccgccgtccaggacgtgcccaggccagtggccacgcaccccggctcgcccgggcagccacccccggccctgctgccacagcaggtgagtgcgcctccaagcagtagctgcccccctggtctcgaacactcgctctgccccagcagcccctctcctccactcccgcctgccacccaagagccgacctgcctgcagccctgcagcccagcgtgcccgcccgccacgggccgcccgcagcacctgccgtccacggtccgcagggacgagtctccgactgccgggccacggctgctgccagaggtgcatgaggacggtagtcctaatttggcccctattcctgtaacggtcaagcgagagcctgaagagttggaccagttgtacctggatgacgtaaatgaaataatacgaaatgacctctccagcacgagcacccactcctagttgccacattggagcactcagttcagcaggggtatgctgacttcagcagacaaagacttttgaataaataaactgaactcacacctggtaccactcagaacctccaactgactgaatgccaggagctgaacattaatatgtgcaaagattggctctccaacaagaaggaaagcagggaggaagggagaccactgtgtcacctggaggagaagtcatctcatgacaacagaagggaggtggccgggctgagcacgggagacccaccgtgcaggggcctttcatgggaacggcccacacgcagtttgaccccacgcccagcccttctggcacccctggggttcaatactggaagtgccttatttaaccagaccatcagggcatcatagaattgagcattgaatttgctactgtaggagtatttttaggagcagaaactgcaaacacatttcattgtgaggttttaccctctgtatgaatgaagagaacgctggaaggctgcgagaggactctagtatgagtctccaacatttggaacgtttcctgggctgtcacgtacactcctgctgccttacacagtgcattttagaatcttccagtctgtcatctcagctcttttgtaacatgcttcccttgtctgcgcggttgaaaccgtaggcttgttcatagtcgcatgctcgcatctttgtttttaatctggcttcgaacatagcacaagtaacttgaatagcacatcaataggttactggacaaaagcagaaaaacctgttacaggatagcctgcatttgcatgtgtgtacatatctaggcatctatttatgtataaataataacagagccgacgtgtcctcgcccaggagggcttccctgtcagcaataaccggcatccgttttggaacctgcgtctggggctccagtcgctgctcttgctggcgtccatcgccgcctcggacggccgtgcattttctcgtctcacgcagttcgaggaggaccctagaaagccaggagctgtgattgacagtagctgtaggttaccagacggcaacattagaaagtgattgtaaataacatgcaacctaagtgtaatatatttgttcagttataagatgattgtttcacagaagccttaccactctctgcttcatctaagaaaaccaataccaaaaacgccactttaatgctcagccctgcgttgtgtgttttcagatgagttactgttaacaggtaggtttgtgtaggccttgctgggcactctgtacaattagttgcttattacgtatgattactcacagcgatctattgttccatataaccaaaaagcatggtttattcattgaaacacggttgacctgaactcgtgccttaggaattaatgcccccttatggaacctgcctgaattgcacctgcgggtggaggctccggctgtgaagtcactgaacagaacgtcgctgatggagaaagggctcccgcagaaggaacggcctgtaccgtgcgctccggcacaatcgcgtctcttgtgtctcactcacggaaagaaacaacctgaaggccatcccgtcggtctgcacgtaaccgtgaagacgtgtggccgcgtcccacctgcggctgggtaccctgcacccggcactgtaggagtcacgtgcagcctttctcaggggactgtcattgaaaaggaaacgtttgatgtctgtgtcagctgtctttgtagttaggaaatagatccaataaagccgtatttttttgctgg

SEQ ID NO: 2860 - DNA, 2799 bp, Homo sapiens
  source 1..2799: mol_type = genomic DNA
ccgaacccctggcggccgcgaccccggctcccgccccggccccggcccgacccgccatgacggggctggaggaccaggagttcgacttcgagttcctcttcgagtttaaccagcgcgacgagggcgccgccgcggccgccccagaacactatggctatgcatcctccaacgtcagccccgccctgccgctccccacggcgcactccaccctgccggccccgtgccacaaccttcagacctccacaccgggcatcatcccgccggcggatcacccctcggggtacggagcagctttggacggtgggcccgcgggctacttcctctcctccggccacaccaggcctgatggggcccctgccctggagagtcctcgcatcgagataacctcgtgcttgggcctgtaccacaacaataaccagtttttccacgatgtggaggtggaagacgtcctccctagctccaaacggtccccctccacggccacgctgagtctgcccagcctggaggcctacagagacccctcgtgcctgagcccggccagcagcctgtcctcccggagctgcaactcagaggcctcctcctacgagtccaactactcgtacccgtacgcgtccccccagacgtcgccatggcagtctccctgcgtgtctcccaagaccacggaccccgaggagggctttccccgcgggctgggggcctgcacactgctgggttccccgcggcactccccctccacctcgccccgcgccagcgtcactgaggagagctggctgggtgcccgctcctccagacccgcgtccccttgcaacaagaggaagtacagcctcaacggccggcagccgccctactcaccccaccactcgcccacgccgtccccgcacggctccccgcgggtcagcgtgaccgacgactcgtggttgggcaacaccacccagtacaccagctcggccatcgtggccgccatcaacgcgctgaccaccgacagcagcctggacctgggagatggcgtccctgtcaagtcccgcaagaccaccctggagcagccgccctcagtggcgctcaaggtggagcccgtcggggaggacctgggcagccccccgcccccggccgacttcgcgcccgaagactactcctctttccagcacatcaggaagggcggcttctgcgaccagtacctggcggtgccgcagcacccctaccagtgggcgaagcccaagcccctgtcccctacgtcctacatgagcccgaccctgcccgccctggactggcagctgccgtcccactcaggcccgtatgagcttcggattgaggtgcagcccaagtcccaccaccgagcccactacgagacggagggcagccggggggccgtgaaggcgtcggccggaggacaccccatcgtgcagctgcatggctacttggagaatgagccgctgatgctgcagcttttcattgggacggcggacgaccgcctgctgcgcccgcacgccttctaccaggtgcaccgcatcacagggaagaccgtgtccaccaccagccacgaggccatcctctccaacaccaaagtcctggagatcccactcctgccggagaacagcatgcgagccgtcattgactgtgccggaatcctgaaactcagaaactccgacattgaacttcggaaaggagagacggacatcgggaggaagaacacacgggtacggctggtgttccgcgttcacgtcccgcaacccagcggccgcacgctgtccctgcaggtggcctccaaccccatcgaatgctcccagcgctcagctcaggagctgcctctggtggagaagcagagcacggacagctatccggtcgtgggcgggaagaagatggtcctgtctggccacaacttcctgcaggactccaaggtcattttcgtggagaaagccccagatggccaccatgtctgggagatggaagcgaaaactgaccgggacctgtgcaagccgaattctctggtggttgagatcccgccatttcggaatcagaggataaccagccccgttcacgtcagtttctacgtctgcaacgggaagagaaagcgaagccagtaccagcgtttcacctaccttcccgccaacgttccaattataaaaacagaacccactgatgattatgagcctgctccaacctgtggaccggtgagccaggggttaagtcctctcccaagaccatactacagccagcagctcgcgatgccacccgaccccagctcctgcctcgtggccggcttcccgccctgtccgcagagaagcaccctgatgccagcggcccctggcgtgagccccaagctccacgacctttctcccgctgcctacaccaagggcgttgccagcccgggccactgtcacctcggactcccgcagccggccggagaggcccccgccgtccaggacgtgcccaggccagtggccacgcaccccggctcgcccgggcagccacccccggccctgctgccacagcaggtgagtgcgcctccaagcagtagctgcccccctggtctcgaacactcgctctgccccagcagcccctctcctccactcccgcctgccacccaagagccgacctgcctgcagccctgcagcccagcgtgcccgcccgccacgggccgcccgcagcacctgccgtccacggtccgcagggacgagtctccgactgccgggccacggctgctgccagaggtgcatgaggacggtagtcctaatttggcccctattcctgtaacggtcaagcgagagcctgaagagttggaccagttgtacctggatgacg

SEQ ID NO: 2861 - DNA, 2142 bp, Homo sapiens
  source 1..2142: mol_type = genomic DNA
atgccaagcaccagctttccagtcccttccaagtttccacttggccctgcggctgcggtcttcgggagaggagaaactttggggcccgcgccgcgcgccggcggcaccatgaagtcagcggaggaagaacactatggctatgcatcctccaacgtcagccccgccctgccgctccccacggcgcactccaccctgccggccccgtgccacaaccttcagacctccacaccgggcatcatcccgccggcggatcacccctcggggtacggagcagctttggacggtgggcccgcgggctacttcctctcctccggccacaccaggcctgatggggcccctgccctggagagtcctcgcatcgagataacctcgtgcttgggcctgtaccacaacaataaccagtttttccacgatgtggaggtggaagacgtcctccctagctccaaacggtccccctccacggccacgctgagtctgcccagcctggaggcctacagagacccctcgtgcctgagcccggccagcagcctgtcctcccggagctgcaactcagaggcctcctcctacgagtccaactactcgtacccgtacgcgtccccccagacgtcgccatggcagtctccctgcgtgtctcccaagaccacggaccccgaggagggctttccccgcgggctgggggcctgcacactgctgggttccccgcggcactccccctccacctcgccccgcgccagcgtcactgaggagagctggctgggtgcccgctcctccagacccgcgtccccttgcaacaagaggaagtacagcctcaacggccggcagccgccctactcaccccaccactcgcccacgccgtccccgcacggctccccgcgggtcagcgtgaccgacgactcgtggttgggcaacaccacccagtacaccagctcggccatcgtggccgccatcaacgcgctgaccaccgacagcagcctggacctgggagatggcgtccctgtcaagtcccgcaagaccaccctggagcagccgccctcagtggcgctcaaggtggagcccgtcggggaggacctgggcagccccccgcccccggccgacttcgcgcccgaagactactcctctttccagcacatcaggaagggcggcttctgcgaccagtacctggcggtgccgcagcacccctaccagtgggcgaagcccaagcccctgtcccctacgtcctacatgagcccgaccctgcccgccctggactggcagctgccgtcccactcaggcccgtatgagcttcggattgaggtgcagcccaagtcccaccaccgagcccactacgagacggagggcagccggggggccgtgaaggcgtcggccggaggacaccccatcgtgcagctgcatggctacttggagaatgagccgctgatgctgcagcttttcattgggacggcggacgaccgcctgctgcgcccgcacgccttctaccaggtgcaccgcatcacagggaagaccgtgtccaccaccagccacgaggccatcctctccaacaccaaagtcctggagatcccactcctgccggagaacagcatgcgagccgtcattgactgtgccggaatcctgaaactcagaaactccgacattgaacttcggaaaggagagacggacatcgggaggaagaacacacgggtacggctggtgttccgcgttcacgtcccgcaacccagcggccgcacgctgtccctgcaggtggcctccaaccccatcgaatgctcccagcgctcagctcaggagctgcctctggtggagaagcagagcacggacagctatccggtcgtgggcgggaagaagatggtcctgtctggccacaacttcctgcaggactccaaggtcattttcgtggagaaagccccagatggccaccatgtctgggagatggaagcgaaaactgaccgggacctgtgcaagccgaattctctggtggttgagatcccgccatttcggaatcagaggataaccagccccgttcacgtcagtttctacgtctgcaacgggaagagaaagcgaagccagtaccagcgtttcacctaccttcccgccaacgtaaatgaaataatacgaaatgacctctccagcacgagcacccactcctag

SEQ ID NO: 2862 - DNA, 1919 bp, Homo sapiens
  source 1..1919: mol_type = genomic DNA
gagaaccgaacccctggcggccgcgaccccggctcccgccccggccccggcccgacccgccatgacggggctggaggaccaggagttcgacttcgagttcctcttcgagtttaaccagcgcgacgagggcgccgccgcggccgccccagcccgaccctgcccgccctggactggcagctgccgtcccactcaggcccgtatgagcttcggattgaggtgcagcccaagtcccaccaccgagcccactacgagacggagggcagccggggggccgtgaaggcgtcggccggaggacaccccatcgtgcagctgcatggctacttggagaatgagccgctgatgctgcagcttttcattgggacggcggacgaccgcctgctgcgcccgcacgccttctaccaggtgcaccgcatcacagggaagaccgtgtccaccaccagccacgaggccatcctctccaacaccaaagtcctggagatcccactcctgccggagaacagcatgcgagccgtcattgactgtgccggaatcctgaaactcagaaactccgacattgaacttcggaaaggagagacggacatcgggaggaagaacacacgggtacggctggtgttccgcgttcacgtcccgcaacccagcggccgcacgctgtccctgcaggtggcctccaaccccatcgaatgctcccagcgctcagctcaggagctgcctctggtggagaagcagagcacggacagctatccggtcgtgggcgggaagaagatggtcctgtctggccacaacttcctgcaggactccaaggtcattttcgtggagaaagccccagatggccaccatgtctgggagatggaagcgaaaactgaccgggacctgtgcaagccgaattctctggtggttgagatcccgccatttcggaatcagaggataaccagccccgttcacgtcagtttctacgtctgcaacgggaagagaaagcgaagccagtaccagcgtttcacctaccttcccgccaacgttccaattataaaaacagaacccactgatgattatgagcctgctccaacctgtggaccggtgagccaggggttaagtcctctcccaagaccatactacagccagcagctcgcgatgccacccgaccccagctcctgcctcgtggccggcttcccgccctgtccgcagagaagcaccctgatgccagcggcccctggcgtgagccccaagctccacgacctttctcccgctgcctacaccaagggcgttgccagcccgggccactgtcacctcggactcccgcagccggccggagaggcccccgccgtccaggacgtgcccaggccagtggccacgcaccccggctcgcccgggcagccacccccggccctgctgccacagcaggtgagtgcgcctccaagcagtagctgcccccctggtctcgaacactcgctctgccccagcagcccctctcctccactcccgcctgccacccaagagccgacctgcctgcagccctgcagcccagcgtgcccgcccgccacgggccgcccgcagcacctgccgtccacggtccgcagggacgagtctccgactgccgggccacggctgctgccagaggtgcatgaggacggtagtcctaatttggcccctattcctgtaacggtcaagcgagagcctgaagagttggaccagttgtacctggatgacgtaaatgaaataatacgaaatgacctctccagcacgagcacccactcctagttgccacattggagcactcagttcagcaggggtatgctgacttcagcagacaaagacttttgaataaataaactgaactcacacctggtaccactcagaacctccaactgactgaatgccaggagctgaacattaatatgtgcaaagattggctctccaacaag

SEQ ID NO: 2863 - DNA, 7525 bp, Homo sapiens
  source 1..7525: mol_type = genomic DNA
agcaggaagctcgcgccgccgtcgccgccgccgctcagcttccccgggcgcgtccaggacccgctgcgccaggcgcgccgtccccggacccggcgtgcgtccctacgaggaaagggaccccgccgctcgagccgcctccgccagccccactgcgaggggtcccagagccagccgcgcccgccctcgcccccggccccgcagccttcccgccctgcgcgccatgaacgcccccgagcggcagccccaacccgacggcggggacgccccaggccacgagcctgggggcagcccccaagacgagcttgacttctccatcctcttcgactatgagtatttgaatccgaacgaagaagagccgaatgcacataaggtcgccagcccaccctccggacccgcataccccgatgatgtcctggactatggcctcaagccatacagcccccttgctagtctctctggcgagccccccggccgattcggagagccggatagggtagggccgcagaagtttctgagcgcggccaagccagcaggggcctcgggcctgagccctcggatcgagatcactccgtcccacgaactgatccaggcagtggggcccctccgcatgagagacgcgggcctcctggtggagcagccgcccctggccggggtggccgccagcccgaggttcaccctgcccgtgcccggcttcgagggctaccgcgagccgctttgcttgagccccgctagcagcggctcctctgccagcttcatttctgacaccttctccccctacacctcgccctgcgtctcgcccaataacggcgggcccgacgacctgtgtccgcagtttcaaaacatccctgctcattattcccccagaacctcgccaataatgtcacctcgaaccagcctcgccgaggacagctgcctgggccgccactcgcccgtgccccgtccggcctcccgctcctcatcgcctggtgccaagcggaggcattcgtgcgccgaggccttggttgccctgccgcccggagcctcaccccagcgctcccggagcccctcgccgcagccctcatctcacgtggcaccccaggaccacggctccccggctgggtacccccctgtggctggctctgccgtgatcatggatgccctgaacagcctcgccacggactcgccttgtgggatcccccccaagatgtggaagaccagccctgacccctcgccggtgtctgccgccccatccaaggccggcctgcctcgccacatctacccggccgtggagttcctggggccctgcgagcagggcgagaggagaaactcggctccagaatccatcctgctggttccgcccacttggcccaagccgctggtgcctgccattcccatctgcagcatcccagtgactgcatccctccctccacttgagtggccgctgtccagtcagtcaggctcttacgagctgcggatcgaggtgcagcccaagccacatcaccgggcccactatgagacagaaggcagccgaggggctgtcaaagctccaactggaggccaccctgtggttcagctccatggctacatggaaaacaagcctctgggacttcagatcttcattgggacagctgatgagcggatccttaagccgcacgccttctaccaggtgcaccgaatcacggggaaaactgtcaccaccaccagctatgagaagatagtgggcaacaccaaagtcctggagatacccttggagcccaaaaacaacatgagggcaaccatcgactgtgcggggatcttgaagcttagaaacgccgacattgagctgcggaaaggcgagacggacattggaagaaagaacacgcgggtgagactggttttccgagttcacatcccagagtccagtggcagaatcgtctctttacagactgcatctaaccccatcgagtgctcccagcgatctgctcacgagctgcccatggttgaaagacaagacacagacagctgcctggtctatggcggccagcaaatgatcctcacggggcagaactttacatccgagtccaaagttgtgtttactgagaagaccacagatggacagcaaatttgggagatggaagccacggtggataaggacaagagccagcccaacatgctttttgttgagatccctgaatatcggaacaagcatatccgcacacctgtaaaagtgaacttctacgtcatcaatgggaagagaaaacgaagtcagcctcagcactttacctaccacccagtcccagccatcaagacggagcccacggatgaatatgaccccactctgatctgcagccccacccatggaggcctggggagccagccttactacccccagcacccgatggtggccgagtccccctcctgcctcgtggccaccatggctccctgccagcagttccgcacggggctctcatcccctgacgcccgctaccagcaacagaacccagcggccgtactctaccagcggagcaagagcctgagccccagcctgctgggctatcagcagccggccctcatggccgccccgctgtcccttgcggacgctcaccgctctgtgctggtgcacgccggctcccagggccagagctcagccctgctccacccctctccgaccaaccagcaggcctcgcctgtgatccactactcacccaccaaccagcagctgcgctgcggaagccaccaggagttccagcacatcatgtactgcgagaatttcgcaccaggcaccaccagacctggcccgcccccggtcagtcaaggtcagaggctgagcccgggttcctaccccacagtcattcagcagcagaatgccacgagccaaagagccgccaaaaacggacccccggtcagtgaccaaaaggaagtattacctgcgggggtgaccattaaacaggagcagaacttggaccagacctacttggatgatgagctgatagacacacaccttagctggatacaaaacatattatgaaacagaatgactgtgatctttgatccgagaaatcaaagttaaagttaatgaaattatcaggaaggagttttcaggacctcctgccagaaatcagacgtaaaagaagccattatagcaagacaccttctgtatctgacccctcggagccctccacagcccctcaccttctgtctcctttcatgttcatctcccagcccggagtccacacgcggatcaatgtatgggcactaagcggactctcacttaaggagctcgccacctccctctaaacaccagagagaactcttcttttcggtttatgttttaaatcccagagagcatcctggttgatcttaatggtgttccgtccaaatagtaagcacctgctgaccaaaagcacattctacatgagacaggacactggaactctcctgagaacagagtgactggagcttggggggatggacgggggacagaagatgtgggcactgtgattaaaccccagcccttgcgttcgtttttccaggtcacagatacagctcctgtaccttttgaaggcaaggagttctcagagcaaccaaaggaacgtgacccaagagcccagcttacaggctgaagaaacccaaaaccctcgatagagacagaaactgaactgtcagtccttagagctcgcccagtccatgccacaactgggccacagctaaagctttatttttgaattctcattccaaaaccaaactgtcttgcccagacaagatcacctgttaagacttcttggcgttaagttatgacatgtatacgcgtttgttattattattttttctgctttaaaaggctgaccagggcacctagccctggagctgtcttggcgagctgttctttaacccctgcagcacgcagtcctgctaacacaatttccatagacttggggggctgacccaggctgcagagagcaagcacctgtctgctgcagctgtacaacctggatgctttgcaaggttccggcttgctttcttcctagcagccagagtgcttttccgtaaagcggtggagaatctcaagcatgtgcatttaattgaggaatagcagaagggctaaagcaaccaagaaaagaagtgtgggtatttttgttaagtaaaacagcccaagtgcttctggaggtgggtttctaccaagatagaggaaaagggctgaattccctctaagtgggacagccgagctcaggatgtgcttcccagcttcactggttaatttgacctgaacctatttaaagatcccttctgcccctgaagacctatccgcactcaaattctaacatgaagaaatctactcgaatgcatcctttactttgaatgagctctattcggttgcatgttatatgtgatttccttcctcccaactgtttccactgagcgcacccagtctcccctagtcttcctctgtgggtgtgatttttgtgatttttacaaacaaaacccttgaagttcttggcagatgtgtttgtttctgtttgcatgtactgcagataccccaggacaagcgggggattcatttttcagccattcagttgtttcctcaataatccgcagcaaagtgaaaatattcttagcactcagactgtacttagagtgttttctcagtccagtctgtacagtctgtaggcagaaggcctcagaagaaagtcatggccactcagtgcccactgtgggctttgtaagtcctggctctcccgtcaaggttacccagaggtaaaagcttcctgggagtggggccaggtgtgtttggcactccagatagaaggcaaaatgctcagattcgggcctgtgcacttgtatgcaacctgtcggtcgatacctagcatttatttttccctgacaatgaacgacctttccctcacccaccctaagctcaaagagtttagcaaaattctcttttaaataaacagaatgccagtaagaggttgacccctaccatggaacttctgggatgctaaatacttcctcatgaacaaaataagttccttattataagttccttatactagcagcttcacctaaagaattttctctccagcaatattgacttcactggggaaaagccaagagtgtgtggtgagtgatttgttctcactcgacctggctaggactggctaggagctgttttttgtacatgagggaatttgggctttcctcagttatctgaatgttttacccaagtgccttcctgctattgtagcaaagtagctcagcttccttgtccacagggtgaaaaaggactaatgcattttccatcagttttctaactatgttagcaaaaacggcctcctggtagctcaacctcctgtacgcgtgtgtgtgtgtaatacacacacaaataaacccctctgtttttctaagacatcttagctggatattataggaagcactttcataaacaactgtaacaaatcgcaaaggaaagagaaacaaaagcattagatttgagacataaacaggcaagagaaagtgtattaggaactgacagctatcaaggaagttttgtcagttacaaatgctaggaggaaattttgccaagaaggatggctcatgaaatatttccagtacgggaagaggcaataagatcctctaagagaatgagaaagtaggggtgtctaaatggtaaagatgggtgtgttgcacgtgtgttagaaggatctcagttgagtgaaggtttgcactgctacatctaagttaatgtaaatatgtagcactctgacaggtctaccgtgttgctgaatgtagtatatttccaaagtttgcaagtcttcctgtattgtacaaagatgctgctgcttgataatatgtatagcaatccagattagtatgttattaaattttattttcttacctgtatttttatgctttttacctgtcctcaaaatattacacccctgttggaattagatttatatttataaatggtcagaaatctttttaagtgtctctttttacacataggttgatttttttttcttaagagaaatgatgtattcttgaaacatttgttactcattccaggaaacaaaaacccatataataaaacccccactcagagcctgttagtcacctctctagaagatggcatctcaggagaaggaatggctttgtggaagaaggaatcacctttttcttgctcaagaattatgctgacttcagccctgagcctggatctggtcactgagaatcatcaagtgtctagatcctccccccaaaataactaatttagtaggtgattttgattttaaaaaattgacaccaaaaccctgcctgcattgtaatggaattcgaaaagaattcatgttcacagaactcaacgttcaggctaatatttacagaagggaccaaatctaaatcctggtagataactcctgtatgctttatccaaaggacacccacagttttccagcatagatataaccaaggatgaattgattccttcaaagaactgggaggcacggatattgcattttttgtttacatccagtagccaagacgcctcagtgagccagtcttgggcagaggctgtcacatttaggcagattggaagttggtatgttctaattctcactctggactacagtgaggctgaatttatcatgtcaaaaaaaaaaaaaaaaaaagacctttccaagtgctttctattgctcagaattgaaagaatgttttcatttcaagtttacaagaggcatggatggagttgtgacgttcttgacaagctgggctaacctttcccgaacttgtttcccggaggcaaggtgctcggtgacccagcgcatcttaaccttgggtctcctaggctcgaggctagggcattacgtttcgtggaaccaaagcagccaattgcatagcaagtattttcctgcattccaattaaatgcttaagaaaaagcagcatcctataaaattgtgatcataaacatccatttccctcagcttttgtgagtgccttgacttacagccaacatcactgtttaactcagtctgtttaaaaacaaacttttctggtggttgataacagagagttgctccctgagccatcagggtcctgggagctggaagtgaaagggttattaacattctacctttatgcagctgttggctgaccagaataaactccctgctgagttcaagctttgaatggaatggatgcaaatgatgttgtttccattagagcaggtgctcacagcattctgattggcctgagcagaccgaggctatggctgttgggacaagcttagcatcctggacatcttgtcaaagaacctcactcacccctctggcctctacagccctcagaggagagaaaaccaattctccaacaaacaggtctctccaacatggtggtgctggcaggcttaggtttagaaaatcctgactgttaaaggcgtttgaatacatcacattcctatgcaaatgtttttaatctccagtttaatgtagtttatttttcctatatgtaaagtatttttatacggcttgtatcatgatagtttagcaataaaacagttggaagcaacatcta

SEQ ID NO: 2864 - DNA, 1397 bp, Homo sapiens
  source 1..1397: mol_type = genomic DNA
gactccgccgagccgggagccgggaggcgcgcagctcccgggtcgctccgaggctcctcggccagggcagccccgcgggcacgcggtagagaagacggcgtcccctcggctgctggtcgatacaaacagatccccctttccaaacacgcgccaagtccccgtgccctccagatgcagagagaggctgcgttcagactggggcactgccatcccctccgcatcatggggtctgtggaccaagaacctcgccaataatgtcacctcgaaccagcctcgccgaggacagctgcctgggccgccactcgcccgtgccccgtccggcctcccgctcctcatcgcctggtgccaagcggaggcattcgtgcgccgaggccttggttgccctgccgcccggagcctcaccccagcgctcccggagcccctcgccgcagccctcatctcacgtggcaccccaggaccacggctccccggctgggtacccccctgtggctggctctgccgtgatcatggatgccctgaacagcctcgccacggactcgccttgtgggatcccccccaagatgtggaagaccagccctgacccctcgccggtgtctgccgccccatccaaggccggcctgcctcgccacatctacccggccgtggagttcctggggccctgcgagcagggcgagaggagaaactcggctccagaatccatcctgctggttccgcccacttggcccaagccgctggtgcctgccattcccatctgcagcatcccagtgactgcatccctccctccacttgagtggccgctgtccagtcagtcaggctcttacgagctgcggatcgaggtgcagcccaagccacatcaccgggcccactatgagacagaaggcagccgaggggctgtcaaagctccaactggaggccaccctgtggttcagctccatggctacatggaaaacaagcctctgggacttcagatcttcattgggacagctgatgagcggatccttaagccgcacgccttctaccaggtgcaccgaatcacggggaaaactgtcaccaccaccagctatgagaagatagtgggcaacaccaaagtcctggagatacccttggagccctccacagcccctcaccttctgtctcctttcatgttcatctcccagcccggagtccacacgcggatcaatgtatgggcactaagcggactctcacttaaggagctcgccacctccctctaaacaccagagagaactcttcttttcggtttatgttttaaatcccagagagcatcctggttgatcttaatggtgttccgtccaaatagtaagcacctgctgaccaaaagcacattctacatgagacaggacactggaactctcctgagaacagagtgactggagctt

SEQ ID NO: 2865 - DNA, 7437 bp, Homo sapiens
  source 1..7437: mol_type = genomic DNA
agcaggaagctcgcgccgccgtcgccgccgccgctcagcttccccgggcgcgtccaggacccgctgcgccaggcgcgccgtccccggacccggcgtgcgtccctacgaggaaagggaccccgccgctcgagccgcctccgccagccccactgcgaggggtcccagagccagccgcgcccgccctcgcccccggccccgcagccttcccgccctgcgcgccatgaacgcccccgagcggcagccccaacccgacggcggggacgccccaggccacgagcctgggggcagcccccaagacgagcttgacttctccatcctcttcgactatgagtatttgaatccgaacgaagaagagccgaatgcacataaggtcgccagcccaccctccggacccgcataccccgatgatgtcctggactatggcctcaagccatacagcccccttgctagtctctctggcgagccccccggccgattcggagagccggatagggtagggccgcagaagtttctgagcgcggccaagccagcaggggcctcgggcctgagccctcggatcgagatcactccgtcccacgaactgatccaggcagtggggcccctccgcatgagagacgcgggcctcctggtggagcagccgcccctggccggggtggccgccagcccgaggttcaccctgcccgtgcccggcttcgagggctaccgcgagccgctttgcttgagccccgctagcagcggctcctctgccagcttcatttctgacaccttctccccctacacctcgccctgcgtctcgcccaataacggcgggcccgacgacctgtgtccgcagtttcaaaacatccctgctcattattcccccagaacctcgccaataatgtcacctcgaaccagcctcgccgaggacagctgcctgggccgccactcgcccgtgccccgtccggcctcccgctcctcatcgcctggtgccaagcggaggcattcgtgcgccgaggccttggttgccctgccgcccggagcctcaccccagcgctcccggagcccctcgccgcagccctcatctcacgtggcaccccaggaccacggctccccggctgggtacccccctgtggctggctctgccgtgatcatggatgccctgaacagcctcgccacggactcgccttgtgggatcccccccaagatgtggaagaccagccctgacccctcgccggtgtctgccgccccatccaaggccggcctgcctcgccacatctacccggccgtggagttcctggggccctgcgagcagggcgagaggagaaactcggctccagaatccatcctgctggttccgcccacttggcccaagccgctggtgcctgccattcccatctgcagcatcccagtgactgcatccctccctccacttgagtggccgctgtccagtcagtcaggctcttacgagctgcggatcgaggtgcagcccaagccacatcaccgggcccactatgagacagaaggcagccgaggggctgtcaaagctccaactggaggccaccctgtggttcagctccatggctacatggaaaacaagcctctgggacttcagatcttcattgggacagctgatgagcggatccttaagccgcacgccttctaccaggtgcaccgaatcacggggaaaactgtcaccaccaccagctatgagaagatagtgggcaacaccaaagtcctggagatacccttggagcccaaaaacaacatgagggcaaccatcgactgtgcggggatcttgaagcttagaaacgccgacattgagctgcggaaaggcgagacggacattggaagaaagaacacgcgggtgagactggttttccgagttcacatcccagagtccagtggcagaatcgtctctttacagactgcatctaaccccatcgagtgctcccagcgatctgctcacgagctgcccatggttgaaagacaagacacagacagctgcctggtctatggcggccagcaaatgatcctcacggggcagaactttacatccgagtccaaagttgtgtttactgagaagaccacagatggacagcaaatttgggagatggaagccacggtggataaggacaagagccagcccaacatgctttttgttgagatccctgaatatcggaacaagcatatccgcacacctgtaaaagtgaacttctacgtcatcaatgggaagagaaaacgaagtcagcctcagcactttacctaccacccagtcccagccatcaagacggagcccacggatgaatatgaccccactctgatctgcagccccacccatggaggcctggggagccagccttactacccccagcacccgatggtggccgagtccccctcctgcctcgtggccaccatggctccctgccagcagttccgcacggggctctcatcccctgacgcccgctaccagcaacagaacccagcggccgtactctaccagcggagcaagagcctgagccccagcctgctgggctatcagcagccggccctcatggccgccccgctgtcccttgcggacgctcaccgctctgtgctggtgcacgccggctcccagggccagagctcagccctgctccacccctctccgaccaaccagcaggcctcgcctgtgatccactactcacccaccaaccagcagctgcgctgcggaagccaccaggagttccagcacatcatgtactgcgagaatttcgcaccaggcaccaccagacctggcccgcccccggtcagtcaaggtcagaggctgagcccgggttcctaccccacagtcattcagcagcagaatgccacgagccaaagagccgccaaaaacggacccccggtcagtgaccaaaaggaagtattacctgcgggggtgaccattaaacaggagcagaacttggaccagacctacttggatgatgttaatgaaattatcaggaaggagttttcaggacctcctgccagaaatcagacgtaaaagaagccattatagcaagacaccttctgtatctgacccctcggagccctccacagcccctcaccttctgtctcctttcatgttcatctcccagcccggagtccacacgcggatcaatgtatgggcactaagcggactctcacttaaggagctcgccacctccctctaaacaccagagagaactcttcttttcggtttatgttttaaatcccagagagcatcctggttgatcttaatggtgttccgtccaaatagtaagcacctgctgaccaaaagcacattctacatgagacaggacactggaactctcctgagaacagagtgactggagcttggggggatggacgggggacagaagatgtgggcactgtgattaaaccccagcccttgcgttcgtttttccaggtcacagatacagctcctgtaccttttgaaggcaaggagttctcagagcaaccaaaggaacgtgacccaagagcccagcttacaggctgaagaaacccaaaaccctcgatagagacagaaactgaactgtcagtccttagagctcgcccagtccatgccacaactgggccacagctaaagctttatttttgaattctcattccaaaaccaaactgtcttgcccagacaagatcacctgttaagacttcttggcgttaagttatgacatgtatacgcgtttgttattattattttttctgctttaaaaggctgaccagggcacctagccctggagctgtcttggcgagctgttctttaacccctgcagcacgcagtcctgctaacacaatttccatagacttggggggctgacccaggctgcagagagcaagcacctgtctgctgcagctgtacaacctggatgctttgcaaggttccggcttgctttcttcctagcagccagagtgcttttccgtaaagcggtggagaatctcaagcatgtgcatttaattgaggaatagcagaagggctaaagcaaccaagaaaagaagtgtgggtatttttgttaagtaaaacagcccaagtgcttctggaggtgggtttctaccaagatagaggaaaagggctgaattccctctaagtgggacagccgagctcaggatgtgcttcccagcttcactggttaatttgacctgaacctatttaaagatcccttctgcccctgaagacctatccgcactcaaattctaacatgaagaaatctactcgaatgcatcctttactttgaatgagctctattcggttgcatgttatatgtgatttccttcctcccaactgtttccactgagcgcacccagtctcccctagtcttcctctgtgggtgtgatttttgtgatttttacaaacaaaacccttgaagttcttggcagatgtgtttgtttctgtttgcatgtactgcagataccccaggacaagcgggggattcatttttcagccattcagttgtttcctcaataatccgcagcaaagtgaaaatattcttagcactcagactgtacttagagtgttttctcagtccagtctgtacagtctgtaggcagaaggcctcagaagaaagtcatggccactcagtgcccactgtgggctttgtaagtcctggctctcccgtcaaggttacccagaggtaaaagcttcctgggagtggggccaggtgtgtttggcactccagatagaaggcaaaatgctcagattcgggcctgtgcacttgtatgcaacctgtcggtcgatacctagcatttatttttccctgacaatgaacgacctttccctcacccaccctaagctcaaagagtttagcaaaattctcttttaaataaacagaatgccagtaagaggttgacccctaccatggaacttctgggatgctaaatacttcctcatgaacaaaataagttccttattataagttccttatactagcagcttcacctaaagaattttctctccagcaatattgacttcactggggaaaagccaagagtgtgtggtgagtgatttgttctcactcgacctggctaggactggctaggagctgttttttgtacatgagggaatttgggctttcctcagttatctgaatgttttacccaagtgccttcctgctattgtagcaaagtagctcagcttccttgtccacagggtgaaaaaggactaatgcattttccatcagttttctaactatgttagcaaaaacggcctcctggtagctcaacctcctgtacgcgtgtgtgtgtgtaatacacacacaaataaacccctctgtttttctaagacatcttagctggatattataggaagcactttcataaacaactgtaacaaatcgcaaaggaaagagaaacaaaagcattagatttgagacataaacaggcaagagaaagtgtattaggaactgacagctatcaaggaagttttgtcagttacaaatgctaggaggaaattttgccaagaaggatggctcatgaaatatttccagtacgggaagaggcaataagatcctctaagagaatgagaaagtaggggtgtctaaatggtaaagatgggtgtgttgcacgtgtgttagaaggatctcagttgagtgaaggtttgcactgctacatctaagttaatgtaaatatgtagcactctgacaggtctaccgtgttgctgaatgtagtatatttccaaagtttgcaagtcttcctgtattgtacaaagatgctgctgcttgataatatgtatagcaatccagattagtatgttattaaattttattttcttacctgtatttttatgctttttacctgtcctcaaaatattacacccctgttggaattagatttatatttataaatggtcagaaatctttttaagtgtctctttttacacataggttgatttttttttcttaagagaaatgatgtattcttgaaacatttgttactcattccaggaaacaaaaacccatataataaaacccccactcagagcctgttagtcacctctctagaagatggcatctcaggagaaggaatggctttgtggaagaaggaatcacctttttcttgctcaagaattatgctgacttcagccctgagcctggatctggtcactgagaatcatcaagtgtctagatcctccccccaaaataactaatttagtaggtgattttgattttaaaaaattgacaccaaaaccctgcctgcattgtaatggaattcgaaaagaattcatgttcacagaactcaacgttcaggctaatatttacagaagggaccaaatctaaatcctggtagataactcctgtatgctttatccaaaggacacccacagttttccagcatagatataaccaaggatgaattgattccttcaaagaactgggaggcacggatattgcattttttgtttacatccagtagccaagacgcctcagtgagccagtcttgggcagaggctgtcacatttaggcagattggaagttggtatgttctaattctcactctggactacagtgaggctgaatttatcatgtcaaaaaaaaaaaaaaaaaaagacctttccaagtgctttctattgctcagaattgaaagaatgttttcatttcaagtttacaagaggcatggatggagttgtgacgttcttgacaagctgggctaacctttcccgaacttgtttcccggaggcaaggtgctcggtgacccagcgcatcttaaccttgggtctcctaggctcgaggctagggcattacgtttcgtggaaccaaagcagccaattgcatagcaagtattttcctgcattccaattaaatgcttaagaaaaagcagcatcctataaaattgtgatcataaacatccatttccctcagcttttgtgagtgccttgacttacagccaacatcactgtttaactcagtctgtttaaaaacaaacttttctggtggttgataacagagagttgctccctgagccatcagggtcctgggagctggaagtgaaagggttattaacattctacctttatgcagctgttggctgaccagaataaactccctgctgagttcaagctttgaatggaatggatgcaaatgatgttgtttccattagagcaggtgctcacagcattctgattggcctgagcagaccgaggctatggctgttgggacaagcttagcatcctggacatcttgtcaaagaacctcactcacccctctggcctctacagccctcagaggagagaaaaccaattctccaacaaacaggtctctccaacatggtggtgctggcaggcttaggtttagaaaatcctgactgttaaaggcgtttgaatacatcacattcctatgcaaatgtttttaatctccagtttaatgtagtttatttttcctatatgtaaagtatttttatacggcttgtatcatgatagtttagcaataaaacagttggaagcaacatcta

SEQ ID NO: 2866 - DNA, 2974 bp, Homo sapiens
  source 1..2974: mol_type = genomic DNA
atgcagagagaggctgcgttcagactggggcactgccatcccctccgcatcatggggtctgtggaccaagaagagccgaatgcacataaggtcgccagcccaccctccggacccgcataccccgatgatgtcctggactatggcctcaagccatacagcccccttgctagtctctctggcgagccccccggccgattcggagagccggatagggtagggccgcagaagtttctgagcgcggccaagccagcaggggcctcgggcctgagccctcggatcgagatcactccgtcccacgaactgatccaggcagtggggcccctccgcatgagagacgcgggcctcctggtggagcagccgcccctggccggggtggccgccagcccgaggttcaccctgcccgtgcccggcttcgagggctaccgcgagccgctttgcttgagccccgctagcagcggctcctctgccagcttcatttctgacaccttctccccctacacctcgccctgcgtctcgcccaataacggcgggcccgacgacctgtgtccgcagtttcaaaacatccctgctcattattcccccagaacctcgccaataatgtcacctcgaaccagcctcgccgaggacagctgcctgggccgccactcgcccgtgccccgtccggcctcccgctcctcatcgcctggtgccaagcggaggcattcgtgcgccgaggccttggttgccctgccgcccggagcctcaccccagcgctcccggagcccctcgccgcagccctcatctcacgtggcaccccaggaccacggctccccggctgggtacccccctgtggctggctctgccgtgatcatggatgccctgaacagcctcgccacggactcgccttgtgggatcccccccaagatgtggaagaccagccctgacccctcgccggtgtctgccgccccatccaaggccggcctgcctcgccacatctacccggccgtggagttcctggggccctgcgagcagggcgagaggagaaactcggctccagaatccatcctgctggttccgcccacttggcccaagccgctggtgcctgccattcccatctgcagcatcccagtgactgcatccctccctccacttgagtggccgctgtccagtcagtcaggctcttacgagctgcggatcgaggtgcagcccaagccacatcaccgggcccactatgagacagaaggcagccgaggggctgtcaaagctccaactggaggccaccctgtggttcagctccatggctacatggaaaacaagcctctgggacttcagatcttcattgggacagctgatgagcggatccttaagccgcacgccttctaccaggtgcaccgaatcacggggaaaactgtcaccaccaccagctatgagaagatagtgggcaacaccaaagtcctggagatacccttggagcccaaaaacaacatgagggcaaccatcgactgtgcggggatcttgaagcttagaaacgccgacattgagctgcggaaaggcgagacggacattggaagaaagaacacgcgggtgagactggttttccgagttcacatcccagagtccagtggcagaatcgtctctttacagactgcatctaaccccatcgagtgctcccagcgatctgctcacgagctgcccatggttgaaagacaagacacagacagctgcctggtctatggcggccagcaaatgatcctcacggggcagaactttacatccgagtccaaagttgtgtttactgagaagaccacagatggacagcaaatttgggagatggaagccacggtggataaggacaagagccagcccaacatgctttttgttgagatccctgaatatcggaacaagcatatccgcacacctgtaaaagtgaacttctacgtcatcaatgggaagagaaaacgaagtcagcctcagcactttacctaccacccagtcccagccatcaagacggagcccacggatgaatatgaccccactctgatctgcagccccacccatggaggcctggggagccagccttactacccccagcacccgatggtggccgagtccccctcctgcctcgtggccaccatggctccctgccagcagttccgcacggggctctcatcccctgacgcccgctaccagcaacagaacccagcggccgtactctaccagcggagcaagagcctgagccccagcctgctgggctatcagcagccggccctcatggccgccccgctgtcccttgcggacgctcaccgctctgtgctggtgcacgccggctcccagggccagagctcagccctgctccacccctctccgaccaaccagcaggcctcgcctgtgatccactactcacccaccaaccagcagctgcgctgcggaagccaccaggagttccagcacatcatgtactgcgagaatttcgcaccaggcaccaccagacctggcccgcccccggtcagtcaaggtcagaggctgagcccgggttcctaccccacagtcattcagcagcagaatgccacgagccaaagagccgccaaaaacggacccccggtcagtgaccaaaaggaagtattacctgcgggggtgaccattaaacaggagcagaacttggaccagacctacttggatgatgagctgatagacacacaccttagctggatacaaaacatattatgaaacagaatgactgtgatctttgatccgagaaatcaaagttaaagttaatgaaattatcaggaaggagttttcaggacctcctgccagaaatcagacgtaaaagaagccattatagcaagacaccttctgtatctgacccctcggagccctccacagcccctcaccttctgtctcctttcatgttcatctcccagcccggagtccacacgcggatcaatgtatgggcactaagcggactctcacttaaggagctcgccacctccctcta

SEQ ID NO: 2867 - DNA, 6144 bp, Homo sapiens
  source 1..6144: mol_type = genomic DNA
gctgcagcaccctgggccacgccgatgactactgcaaactgtggcgcccacgacgagctcgacttcaaactcgtctttggcgaggacggggcgccggcgccgccgcccccgggctcgcggcctgcagatcttgagccagatgattgtgcatccatttacatctttaatgtagatccacctccatctactttaaccacaccactttgcttaccacatcatggattaccgtctcactcttctgttttgtcaccatcgtttcagctccaaagtcacaaaaactatgaaggaacttgtgagattcctgaatctaaatatagcccattaggtggtcccaaaccctttgagtgcccaagtattcaaattacatctatctctcctaactgtcatcaagaattagatgcacatgaagatgacctacagataaatgacccagaacgggaatttttggaaaggccttctagagatcatctctatcttcctcttgagccatcctaccgggagtcttctcttagtcctagtcctgccagcagcatctcttctaggagttggttctctgatgcatcttcttgtgaatcgctttcacatatttatgatgatgtggactcagagttgaatgaagctgcagcccgatttacccttggatcccctctgacttctcctggtggctctccagggggctgccctggagaagaaacttggcatcaacagtatggacttggacactcattatcacccaggcaatctccttgccactctcctagatccagtgtcactgatgagaattggctgagccccaggccagcctcaggaccctcatcaaggcccacatccccctgtgggaaacggaggcactccagtgctgaagtttgttatgctgggtccctttcaccccatcactcacctgttccttcacctggtcactcccccaggggaagtgtgacagaagatacgtggctcaatgcttctgtccatggtgggtcaggccttggccctgcagtttttccatttcagtactgtgtagagactgacatccctctcaaaacaaggaaaacttctgaagatcaagctgccatactaccaggaaaattagagctgtgttcagatgaccaagggagtttatcaccagcccgggagacttcaatagatgatggccttggatctcagtatcctttaaagaaagattcatgtggtgatcagtttctttcagttccttcaccctttacctggagcaaaccaaagcctggccacacccctatatttcgcacatcttcattacctccactagactggcctttaccagctcattttggacaatgtgaactgaaaatagaagtgcaacctaaaactcatcatcgagcccattatgaaactgaaggtagccgaggggcagtaaaagcatctactgggggacatcctgttgtgaagctcctgggctataacgaaaagccaataaatctacaaatgtttattgggacagcagatgatcgatatttacgacctcatgcattttaccaggtgcatcgaatcactgggaagacagtcgctactgcaagccaagagataataattgccagtacaaaagttctggaaattccacttcttcctgaaaataatatgtcagccagtattgattgtgcaggtattttgaaactccgcaattcagatatagaacttcgaaaaggagaaactgatattggcagaaagaatactagagtacgacttgtgtttcgtgtacacatcccacagcccagtggaaaagtcctttctctgcagatagcctctatacccgttgagtgctcccagcggtctgctcaagaacttcctcatattgagaagtacagtatcaacagttgttctgtaaatggaggtcatgaaatggttgtgactggatctaattttcttccagaatccaaaatcatttttcttgaaaaaggacaagatggacgacctcagtgggaggtagaagggaagataatcagggaaaaatgtcaaggggctcacattgtccttgaagttcctccatatcataacccagcagttacagctgcagtgcaggtgcacttttatctttgcaatggcaagaggaaaaaaagccagtctcaacgttttacttatacaccagttttgatgaagcaagaacacagagaagagattgatttgtcttcagttccatctttgcctgtgcctcatcctgctcagacccagaggccttcctctgattcagggtgttcacatgacagtgtactgtcaggacagagaagtttgatttgctccatcccacaaacatatgcatccatggtgacctcatcccatctgccacagttgcagtgtagagatgagagtgttagtaaagaacagcatatgattccttctccaattgtacaccagccttttcaagtcacaccaacacctcctgtggggtcttcctatcagcctatgcaaactaatgttgtgtacaatggaccaacttgtcttcctattaatgctgcctctagtcaagaatttgattcagttttgtttcagcaggatgcaactctttctggtttagtgaatcttggctgtcaaccactgtcatccataccatttcattcttcaaattcaggctcaacaggacatctcttagcccatacacctcattctgtgcataccctgcctcatctgcaatcaatgggatatcattgttcaaatacaggacaaagatctctttcttctccagtggctgaccagattacaggtcagccttcgtctcagttacaacctattacatatggtccttcacattcagggtctgctacaacagcttccccagcagcttctcatcccttggctagttcaccgctttctgggccaccatctcctcagcttcagcctatgccttaccaatctcctagctcaggaactgcctcatcaccgtctccagccaccagaatgcattctggacagcactcaactcaagcacaaagtacgggccaggggggtctttctgcaccttcatccttaatatgtcacagtttgtgtgatccagcgtcatttccacctgatggggcaactgtgagcattaaacctgaaccagaagatcgagagcctaactttgcaaccattggtctgcaggacatcactttagatgatgaccaatttatatctgacttggaacaccagccatcaggttcagcagagaaatggcctaaccacagtgtgctctcatgtccagctcctttctggagaatctagaggtgaacgagataattgggagagacatgtcccagatttctgtttcccaaggagcaggggtgagcaggcaggctcccctcccgagtcctgagtccctggatttaggaagatctgatgggctctaacagtgcttactgcagccttgtgtccaccaccaacttctcagcatgtttctctccttggaccttgggtttccaactctgcagccttcaggtctggggccaggagtgggacccaccatttgtggggaaagtagcattcctccacctcaggccttgggtagatttggcaaaagaacaggagcagcataggctgtttgagctttggggaaatgaactttgctttttatatttaactaggatacttttatatgatgggtgctttgagtgtgaatgcagcaggctctcttgtttccgaggtgctgcttttgcaggtgacctggttacttagctaggattggtgatttgtactgctttatggtcatttgaagggccctttagtttttatgataatttttaaaataggaacttttgataagaccttctagaagcaaaaaaaaaaaaaaaaaaaaaaaaaagaaaaaaaaagaaaagaaaaaaagaaaaagaaaaaaatatcccaagcccacacctatgcctcagaaagtcagcatgtgtcctgaagacgttcatagatttataggaaataaagccaaatgtagctcatacctctttataaaactaaactgttgttagataaaatgagaagagaccattccatcattgaagtgttggaatataaaaagacattccagagcatagccttttggtaactttctaggtaatcttgcaatctctccatactggctccatgttgaaattgctttttccctcaggaccctgggtaagatggctacatttaaggtgactctgaatggtggggttctagcttggtcactttcatttcttgccatcataaaaactagtaggctgtggagtgcgcttcctgtttgtgtcatctggtcgtagaaccttttccaaacagaagcatctgcctttggctgttctgtgacctttgaagccagtctcagtggtttaggcagctttgcagttctaactctagctagaggccaggctgtgtgcagagctaaagcacaaatgagcagtacatcagcatgggcagagaaaatacaggactccagatgggaaggttttaagagtcacactggcatggaaggcttatctgccattctatttatagcctgaaatgattctggcctaccctgtcctgtctgtatgatctaaaaaccagccttttccccagaaggctctgagcacatccagaagtgataacctgaccctccacaccaaagacaccctggtgctgctgctggtgagactggtgtccaaggcagggcccagcagaaactgcagcctgctgtctaccaaaggaggtacccgagttgggtactttaaaaaaaaaaaaaacctgcccttacccctctccctaatgggattttttttacctgttcctgggcccattacagagcctctgaagtttgcagtatgctttcaaatgaaataatatacttccattgattcaggaagcagattttttgagtgcctatatgtgagacagtgtgctggttgaaggcctgatgctgttattccaggagactgcaggcccttgatgccaggactctctctactaaggccagttcaggtctgggaaagggagctggcctattgcccaccacctgttgtcagtaggttaggagctgttgactcaggatgaggaagtatggtctttaaaaaaaacaaaatatattttagatttctcccctaaagttagttagagaaaaaggtctattcttcagcagatcactgtggcccctcttggagctgggtgttttcaaattttcttgaaaagtgagttgtgtcacagaatgtggatagtgagatttgcttctgggcctgtggttggacgcccacagcttcctttggaggggcaagaagttggcctctcggttgacattccagagaaatggccagacttgcccctacccttttgcccctggtgtagctgcctcacatgaggttattgcaagagttccccttgcaataccctttgtgccctcaagaattaaaagcctctatgatccagagttgctatgcaccaaattttgatgccttctaaataccttgatgcctgtagcactagaaatgctttcctatttaaaataaacattaaattttaaaatagagctttgtatactatgtaagcagttttatatcagctttgtaaaagctttggtgttaagagtcaatattttttggctttgtagataaagacttaaatttttgtgcaacatagtggtgttaaagcacacatccattggactatgcaaatcaatttctactagcagcactgagcaactgggcacgtgctagtacgcaccccctcctactctaactgtgctagctcttgggttgaggaatggaatgggtagccttctgcttactggagatgcacagagaaacatggctgaaaacagctttaaaaagaacatgtctttgggttcatgtgtggtgctgctgcccgggtgtaaactatccccacccagggccagccattatcaccagacctcttctgggcctggctgtgaagccctgtttttggtattcagaatggatctttaaggctcagatgggctcaaattgaaaccttgtgttttataaaatggatgtttagtaaaggaactggttctcagttatgtttacagcacttggaattgtgtgttcttgtacattttgtattttaaaaccttttatgggagtgcagtgctccttacacaaatacaaagggaagaagagccagcagttgaggctcctcagttttagtgctgaaataataaacagtgacaggtcaacagta

SEQ ID NO: 2868 - DNA, 6040 bp, Homo sapiens
  source 1..6040: mol_type = genomic DNA
gctgcagcaccctgggccacgccgatgactactgcaaactgtggcgcccacgacgagctcgacttcaaactcgtctttggcgaggacggggcgccggcgccgccgcccccgggctcgcggcctgcagatcttgagccagatgattgtgcatccatttacatctttaatgtagatccacctccatctactttaaccacaccactttgcttaccacatcatggattaccgtctcactcttctgttttgtcaccatcgtttcagctccaaagtcacaaaaactatgaaggaacttgtgagattcctgaatctaaatatagcccattaggtggtcccaaaccctttgagtgcccaagtattcaaattacatctatctctcctaactgtcatcaagaattagatgcacatgaagatgacctacagataaatgacccagaacgggaatttttggaaaggccttctagagatcatctctatcttcctcttgagccatcctaccgggagtcttctcttagtcctagtcctgccagcagcatctcttctaggagttggttctctgatgcatcttcttgtgaatcgctttcacatatttatgatgatgtggactcagagttgaatgaagctgcagcccgatttacccttggatcccctctgacttctcctggtggctctccagggggctgccctggagaagaaacttggcatcaacagtatggacttggacactcattatcacccaggcaatctccttgccactctcctagatccagtgtcactgatgagaattggctgagccccaggccagcctcaggaccctcatcaaggcccacatccccctgtgggaaacggaggcactccagtgctgaagtttgttatgctgggtccctttcaccccatcactcacctgttccttcacctggtcactcccccaggggaagtgtgacagaagatacgtggctcaatgcttctgtccatggtgggtcaggccttggccctgcagtttttccatttcagtactgtgtagagactgacatccctctcaaaacaaggaaaacttctgaagatcaagctgccatactaccaggaaaattagagctgtgttcagatgaccaagggagtttatcaccagcccgggagacttcaatagatgatggccttggatctcagtatcctttaaagaaagattcatgtggtgatcagtttctttcagttccttcaccctttacctggagcaaaccaaagcctggccacacccctatatttcgcacatcttcattacctccactagactggcctttaccagctcattttggacaatgtgaactgaaaatagaagtgcaacctaaaactcatcatcgagcccattatgaaactgaaggtagccgaggggcagtaaaagcatctactgggggacatcctgttgtgaagctcctgggctataacgaaaagccaataaatctacaaatgtttattgggacagcagatgatcgatatttacgacctcatgcattttaccaggtgcatcgaatcactgggaagacagtcgctactgcaagccaagagataataattgccagtacaaaagttctggaaattccacttcttcctgaaaataatatgtcagccagtattgattgtgcaggtattttgaaactccgcaattcagatatagaacttcgaaaaggagaaactgatattggcagaaagaatactagagtacgacttgtgtttcgtgtacacatcccacagcccagtggaaaagtcctttctctgcagatagcctctatacccgttgagtgctcccagcggtctgctcaagaacttcctcatattgagaagtacagtatcaacagttgttctgtaaatggaggtcatgaaatggttgtgactggatctaattttcttccagaatccaaaatcatttttcttgaaaaaggacaagatggacgacctcagtgggaggtagaagggaagataatcagggaaaaatgtcaaggggctcacattgtccttgaagttcctccatatcataacccagcagttacagctgcagtgcaggtgcacttttatctttgcaatggcaagaggaaaaaaagccagtctcaacgttttacttatacaccagttttgatgaagcaagaacacagagaagagattgatttgtcttcagttccatctttgcctgtgcctcatcctgctcagacccagaggccttcctctgattcagggtgttcacatgacagtgtactgtcaggacagagaagtttgatttgctccatcccacaaacatatgcatccatggtgacctcatcccatctgccacagttgcagtgtagagatgagagtgttagtaaagaacagcatatgattccttctccaattgtacaccagccttttcaagtcacaccaacacctcctgtggggtcttcctatcagcctatgcaaactaatgttgtgtacaatggaccaacttgtcttcctattaatgctgcctctagtcaagaatttgattcagttttgtttcagcaggatgcaactctttctggtttagtgaatcttggctgtcaaccactgtcatccataccatttcattcttcaaattcaggctcaacaggacatctcttagcccatacacctcattctgtgcataccctgcctcatctgcaatcaatgggatatcattgttcaaatacaggacaaagatctctttcttctccagtggctgaccagattacaggtcagccttcgtctcagttacaacctattacatatggtccttcacattcagggtctgctacaacagcttccccagcagcttctcatcccttggctagttcaccgctttctgggccaccatctcctcagcttcagcctatgccttaccaatctcctagctcaggaactgcctcatcaccgtctccagccaccagaatgcattctggacagcactcaactcaagcacaaagtacgggccaggggggtctttctgcaccttcatccttaatatgtcacagtttgtgtgatccagcgtcatttccacctgatggggcaactgtgagcattaaacctgaaccagaagatcgagagcctaactttgcaaccattggtctgcaggacatcactttagatgatgtgaacgagataattgggagagacatgtcccagatttctgtttcccaaggagcaggggtgagcaggcaggctcccctcccgagtcctgagtccctggatttaggaagatctgatgggctctaacagtgcttactgcagccttgtgtccaccaccaacttctcagcatgtttctctccttggaccttgggtttccaactctgcagccttcaggtctggggccaggagtgggacccaccatttgtggggaaagtagcattcctccacctcaggccttgggtagatttggcaaaagaacaggagcagcataggctgtttgagctttggggaaatgaactttgctttttatatttaactaggatacttttatatgatgggtgctttgagtgtgaatgcagcaggctctcttgtttccgaggtgctgcttttgcaggtgacctggttacttagctaggattggtgatttgtactgctttatggtcatttgaagggccctttagtttttatgataatttttaaaataggaacttttgataagaccttctagaagcaaaaaaaaaaaaaaaaaaaaaaaaaagaaaaaaaaagaaaagaaaaaaagaaaaagaaaaaaatatcccaagcccacacctatgcctcagaaagtcagcatgtgtcctgaagacgttcatagatttataggaaataaagccaaatgtagctcatacctctttataaaactaaactgttgttagataaaatgagaagagaccattccatcattgaagtgttggaatataaaaagacattccagagcatagccttttggtaactttctaggtaatcttgcaatctctccatactggctccatgttgaaattgctttttccctcaggaccctgggtaagatggctacatttaaggtgactctgaatggtggggttctagcttggtcactttcatttcttgccatcataaaaactagtaggctgtggagtgcgcttcctgtttgtgtcatctggtcgtagaaccttttccaaacagaagcatctgcctttggctgttctgtgacctttgaagccagtctcagtggtttaggcagctttgcagttctaactctagctagaggccaggctgtgtgcagagctaaagcacaaatgagcagtacatcagcatgggcagagaaaatacaggactccagatgggaaggttttaagagtcacactggcatggaaggcttatctgccattctatttatagcctgaaatgattctggcctaccctgtcctgtctgtatgatctaaaaaccagccttttccccagaaggctctgagcacatccagaagtgataacctgaccctccacaccaaagacaccctggtgctgctgctggtgagactggtgtccaaggcagggcccagcagaaactgcagcctgctgtctaccaaaggaggtacccgagttgggtactttaaaaaaaaaaaaaacctgcccttacccctctccctaatgggattttttttacctgttcctgggcccattacagagcctctgaagtttgcagtatgctttcaaatgaaataatatacttccattgattcaggaagcagattttttgagtgcctatatgtgagacagtgtgctggttgaaggcctgatgctgttattccaggagactgcaggcccttgatgccaggactctctctactaaggccagttcaggtctgggaaagggagctggcctattgcccaccacctgttgtcagtaggttaggagctgttgactcaggatgaggaagtatggtctttaaaaaaaacaaaatatattttagatttctcccctaaagttagttagagaaaaaggtctattcttcagcagatcactgtggcccctcttggagctgggtgttttcaaattttcttgaaaagtgagttgtgtcacagaatgtggatagtgagatttgcttctgggcctgtggttggacgcccacagcttcctttggaggggcaagaagttggcctctcggttgacattccagagaaatggccagacttgcccctacccttttgcccctggtgtagctgcctcacatgaggttattgcaagagttccccttgcaataccctttgtgccctcaagaattaaaagcctctatgatccagagttgctatgcaccaaattttgatgccttctaaataccttgatgcctgtagcactagaaatgctttcctatttaaaataaacattaaattttaaaatagagctttgtatactatgtaagcagttttatatcagctttgtaaaagctttggtgttaagagtcaatattttttggctttgtagataaagacttaaatttttgtgcaacatagtggtgttaaagcacacatccattggactatgcaaatcaatttctactagcagcactgagcaactgggcacgtgctagtacgcaccccctcctactctaactgtgctagctcttgggttgaggaatggaatgggtagccttctgcttactggagatgcacagagaaacatggctgaaaacagctttaaaaagaacatgtctttgggttcatgtgtggtgctgctgcccgggtgtaaactatccccacccagggccagccattatcaccagacctcttctgggcctggctgtgaagccctgtttttggtattcagaatggatctttaaggctcagatgggctcaaattgaaaccttgtgttttataaaatggatgtttagtaaaggaactggttctcagttatgtttacagcacttggaattgtgtgttcttgtacattttgtattttaaaaccttttatgggagtgcagtgctccttacacaaatacaaagggaagaagagccagcagttgaggctcctcagttttagtgctgaaataataaacagtgacaggtcaacagta

SEQ ID NO: 2869 - DNA, 6129 bp, Homo sapiens
  source 1..6129: mol_type = genomic DNA
gctgcagcaccctgggccacgccgatgactactgcaaactgtggcgcccacgacgagctcgacttcaaactcgtctttggcgaggacggggcgccggcgccgccgcccccgggctcgcggcctgcagatcttgagccagatgattgtgcatccatttacatctttaatgtagatccacctccatctactttaaccacaccactttgcttaccacatcatggattaccgtctcactcttctgttttgtcaccatcgtttcagctccaaagtcacaaaaactatgaaggaacttgtgagattcctgaatctaaatatagcccattaggtggtcccaaaccctttgagtgcccaagtattcaaattacatctatctctcctaactgtcatcaagaattagatgcacatgaagatgacctacagataaatgacccagaacgggaatttttggaaaggccttctagagatcatctctatcttcctcttgagccatcctaccgggagtcttctcttagtcctagtcctgccagcagcatctcttctaggagttggttctctgatgcatcttcttgtgaatcgctttcacatatttatgatgatgtggactcagagttgaatgaagctgcagcccgatttacccttggatcccctctgacttctcctggtggctctccagggggctgccctggagaagaaacttggcatcaacagtatggacttggacactcattatcacccaggcaatctccttgccactctcctagatccagtgtcactgatgagaattggctgagccccaggccagcctcaggaccctcatcaaggcccacatccccctgtgggaaacggaggcactccagtgctgaagtttgttatgctgggtccctttcaccccatcactcacctgttccttcacctggtcactcccccaggggaagtgtgacagaagatacgtggctcaatgcttctgtccatggtgggtcaggccttggccctgcagtttttccatttcagtactgtgtagagactgacatccctctcaaaacaaggaaaacttctgaagatcaagctgccatactaccaggaaaattagagctgtgttcagatgaccaagggagtttatcaccagcccgggagacttcaatagatgatggccttggatctcagtatcctttaaagaaagattcatgtggtgatcagtttctttcagttccttcaccctttacctggagcaaaccaaagcctggccacacccctatatttcgcacatcttcattacctccactagactggcctttaccagctcattttggacaatgtgaactgaaaatagaagtgcaacctaaaactcatcatcgagcccattatgaaactgaaggtagccgaggggcagtaaaagcatctactgggggacatcctgttgtgaagctcctgggctataacgaaaagccaataaatctacaaatgtttattgggacagcagatgatcgatatttacgacctcatgcattttaccaggtgcatcgaatcactgggaagacagtcgctactgcaagccaagagataataattgccagtacaaaagttctggaaattccacttcttcctgaaaataatatgtcagccagtattgattgtgcaggtattttgaaactccgcaattcagatatagaacttcgaaaaggagaaactgatattggcagaaagaatactagagtacgacttgtgtttcgtgtacacatcccacagcccagtggaaaagtcctttctctgcagatagcctctatacccgttgagtgctcccagcggtctgctcaagaacttcctcatattgagaagtacagtatcaacagttgttctgtaaatggaggtcatgaaatggttgtgactggatctaattttcttccagaatccaaaatcatttttcttgaaaaaggacaagatggacgacctcagtgggaggtagaagggaagataatcagggaaaaatgtcaaggggctcacattgtccttgaagttcctccatatcataacccagcagttacagctgcagtgcaggtgcacttttatctttgcaatggcaagaggaaaaaaagccagtctcaacgttttacttatacaccagttttgatgaagcaagaacacagagaagagattgatttgtcttcagttccatctttgcctgtgcctcatcctgctcagacccagaggccttcctctgattcagggtgttcacatgacagtgtactgtcaggacagagaagtttgatttgctccatcccacaaacatatgcatccatggtgacctcatcccatctgccacagttgcagtgtagagatgagagtgttagtaaagaacagcatatgattccttctccaattgtacaccagccttttcaagtcacaccaacacctcctgtggggtcttcctatcagcctatgcaaactaatgttgtgtacaatggaccaacttgtcttcctattaatgctgcctctagtcaagaatttgattcagttttgtttcagcaggatgcaactctttctggtttagtgaatcttggctgtcaaccactgtcatccataccatttcattcttcaaattcaggctcaacaggacatctcttagcccatacacctcattctgtgcataccctgcctcatctgcaatcaatgggatatcattgttcaaatacaggacaaagatctctttcttctccagtggctgaccagattacaggtcagccttcgtctcagttacaacctattacatatggtccttcacattcagggtctgctacaacagcttccccagcagcttctcatcccttggctagttcaccgctttctgggccaccatctcctcagcttcagcctatgccttaccaatctcctagctcaggaactgcctcatcaccgtctccagccaccagaatgcattctggacagcactcaactcaagcacaaagtacgggccaggggggtctttctgcaccttcatccttaatatgtcacagtttgtgtgatccagcgtcatttccacctgatggggcaactgtgagcattaaacctgaaccagaagatcgagagcctaactttgcaaccattggtctgcaggacatcactttagatgatgatttgtttaccagtaataattttgacttgcttcagttgagacctacgttttggccagtcccagcaggaagatatctgaggaatctagagtgaacgagataattgggagagacatgtcccagatttctgtttcccaaggagcaggggtgagcaggcaggctcccctcccgagtcctgagtccctggatttaggaagatctgatgggctctaacagtgcttactgcagccttgtgtccaccaccaacttctcagcatgtttctctccttggaccttgggtttccaactctgcagccttcaggtctggggccaggagtgggacccaccatttgtggggaaagtagcattcctccacctcaggccttgggtagatttggcaaaagaacaggagcagcataggctgtttgagctttggggaaatgaactttgctttttatatttaactaggatacttttatatgatgggtgctttgagtgtgaatgcagcaggctctcttgtttccgaggtgctgcttttgcaggtgacctggttacttagctaggattggtgatttgtactgctttatggtcatttgaagggccctttagtttttatgataatttttaaaataggaacttttgataagaccttctagaagcaaaaaaaaaaaaaaaaaaaaaaaaaagaaaaaaaaagaaaagaaaaaaagaaaaagaaaaaaatatcccaagcccacacctatgcctcagaaagtcagcatgtgtcctgaagacgttcatagatttataggaaataaagccaaatgtagctcatacctctttataaaactaaactgttgttagataaaatgagaagagaccattccatcattgaagtgttggaatataaaaagacattccagagcatagccttttggtaactttctaggtaatcttgcaatctctccatactggctccatgttgaaattgctttttccctcaggaccctgggtaagatggctacatttaaggtgactctgaatggtggggttctagcttggtcactttcatttcttgccatcataaaaactagtaggctgtggagtgcgcttcctgtttgtgtcatctggtcgtagaaccttttccaaacagaagcatctgcctttggctgttctgtgacctttgaagccagtctcagtggtttaggcagctttgcagttctaactctagctagaggccaggctgtgtgcagagctaaagcacaaatgagcagtacatcagcatgggcagagaaaatacaggactccagatgggaaggttttaagagtcacactggcatggaaggcttatctgccattctatttatagcctgaaatgattctggcctaccctgtcctgtctgtatgatctaaaaaccagccttttccccagaaggctctgagcacatccagaagtgataacctgaccctccacaccaaagacaccctggtgctgctgctggtgagactggtgtccaaggcagggcccagcagaaactgcagcctgctgtctaccaaaggaggtacccgagttgggtactttaaaaaaaaaaaaaacctgcccttacccctctccctaatgggattttttttacctgttcctgggcccattacagagcctctgaagtttgcagtatgctttcaaatgaaataatatacttccattgattcaggaagcagattttttgagtgcctatatgtgagacagtgtgctggttgaaggcctgatgctgttattccaggagactgcaggcccttgatgccaggactctctctactaaggccagttcaggtctgggaaagggagctggcctattgcccaccacctgttgtcagtaggttaggagctgttgactcaggatgaggaagtatggtctttaaaaaaaacaaaatatattttagatttctcccctaaagttagttagagaaaaaggtctattcttcagcagatcactgtggcccctcttggagctgggtgttttcaaattttcttgaaaagtgagttgtgtcacagaatgtggatagtgagatttgcttctgggcctgtggttggacgcccacagcttcctttggaggggcaagaagttggcctctcggttgacattccagagaaatggccagacttgcccctacccttttgcccctggtgtagctgcctcacatgaggttattgcaagagttccccttgcaataccctttgtgccctcaagaattaaaagcctctatgatccagagttgctatgcaccaaattttgatgccttctaaataccttgatgcctgtagcactagaaatgctttcctatttaaaataaacattaaattttaaaatagagctttgtatactatgtaagcagttttatatcagctttgtaaaagctttggtgttaagagtcaatattttttggctttgtagataaagacttaaatttttgtgcaacatagtggtgttaaagcacacatccattggactatgcaaatcaatttctactagcagcactgagcaactgggcacgtgctagtacgcaccccctcctactctaactgtgctagctcttgggttgaggaatggaatgggtagccttctgcttactggagatgcacagagaaacatggctgaaaacagctttaaaaagaacatgtctttgggttcatgtgtggtgctgctgcccgggtgtaaactatccccacccagggccagccattatcaccagacctcttctgggcctggctgtgaagccctgtttttggtattcagaatggatctttaaggctcagatgggctcaaattgaaaccttgtgttttataaaatggatgtttagtaaaggaactggttctcagttatgtttacagcacttggaattgtgtgttcttgtacattttgtattttaaaaccttttatgggagtgcagtgctccttacacaaatacaaagggaagaagagccagcagttgaggctcctcagttttagtgctgaaataataaacagtgacaggtcaacagta

SEQ ID NO: 2870 - DNA, 4157 bp, Homo sapiens
  source 1..4157: mol_type = genomic DNA
gttttgtgtttttagtagagacagagtttcaccatgttggccaggctggtctggaactcctgacctcaagggatcctcctgcctcagcctcccaaagtggtgggattacaggcatgggccactgcaccctgcccaatatatatatttttaaatagagatggaagtctcactatgttgcccaggctagtctggaactcctgggctctcctgttctggcttcccaaaatgctgggattacaggtgtgagccactgcacatagcccctatattttgttaaataagtgaataaataacacctaagttttgaatcattgctcactgctctttcgtggtagaggaaattgacgagaattgtttcagttctttggcttttattgatgagttccataaattagatcttggtaatttggggctgcagtggttttacatctctgaaggtttgggagtacttgtatcacaactaaatttccatacagtgagaagatttttgaaaaatagtgagatcttgagccagatgattgtgcatccatttacatctttaatgtagatccacctccatctactttaaccacaccactttgcttaccacatcatggattaccgtctcactcttctgttttgtcaccatcgtttcagctccaaagtcacaaaaactatgaaggaacttgtgagattcctgaatctaaatatagcccattaggtggtcccaaaccctttgagtgcccaagtattcaaattacatctatctctcctaactgtcatcaagaattagatgcacatgaagatgacctacagataaatgacccagaacgggaatttttggaaaggccttctagagatcatctctatcttcctcttgagccatcctaccgggagtcttctcttagtcctagtcctgccagcagcatctcttctaggagttggttctctgatgcatcttcttgtgaatcgctttcacatatttatgatgatgtggactcagagttgaatgaagctgcagcccgatttacccttggatcccctctgacttctcctggtggctctccagggggctgccctggagaagaaacttggcatcaacagtatggacttggacactcattatcacccaggcaatctccttgccactctcctagatccagtgtcactgatgagaattggctgagccccaggccagcctcaggaccctcatcaaggcccacatccccctgtgggaaacggaggcactccagtgctgaagtttgttatgctgggtccctttcaccccatcactcacctgttccttcacctggtcactcccccaggggaagtgtgacagaagatacgtggctcaatgcttctgtccatggtgggtcaggccttggccctgcagtttttccatttcagtactgtgtagagactgacatccctctcaaaacaaggaaaacttctgaagatcaagctgccatactaccaggaaaattagagctgtgttcagatgaccaagggagtttatcaccagcccgggagacttcaatagatgatggccttggatctcagtatcctttaaagaaagattcatgtggtgatcagtttctttcagttccttcaccctttacctggagcaaaccaaagcctggccacacccctatatttcgcacatcttcattacctccactagactggcctttaccagctcattttggacaatgtgaactgaaaatagaagtgcaacctaaaactcatcatcgagcccattatgaaactgaaggtagccgaggggcagtaaaagcatctactgggggacatcctgttgtgaagctcctgggctataacgaaaagccaataaatctacaaatgtttattgggacagcagatgatcgatatttacgacctcatgcattttaccaggtgcatcgaatcactgggaagacagtcgctactgcaagccaagagataataattgccagtacaaaagttctggaaattccacttcttcctgaaaataatatgtcagccagtattgattgtgcaggtattttgaaactccgcaattcagatatagaacttcgaaaaggagaaactgatattggcagaaagaatactagagtacgacttgtgtttcgtgtacacatcccacagcccagtggaaaagtcctttctctgcagatagcctctatacccgttgagtgctcccagcggtctgctcaagaacttcctcatattgagaagtacagtatcaacagttgttctgtaaatggaggtcatgaaatggttgtgactggatctaattttcttccagaatccaaaatcatttttcttgaaaaaggacaagatggacgacctcagtgggaggtagaagggaagataatcagggaaaaatgtcaaggggctcacattgtccttgaagttcctccatatcataacccagcagttacagctgcagtgcaggtgcacttttatctttgcaatggcaagaggaaaaaaagccagtctcaacgttttacttatacaccagttttgatgaagcaagaacacagagaagagattgatttgtcttcagttccatctttgcctgtgcctcatcctgctcagacccagaggccttcctctgattcagggtgttcacatgacagtgtactgtcaggacagagaagtttgatttgctccatcccacaaacatatgcatccatggtgacctcatcccatctgccacagttgcagtgtagagatgagagtgttagtaaagaacagcatatgattccttctccaattgtacaccagccttttcaagtcacaccaacacctcctgtggggtcttcctatcagcctatgcaaactaatgttgtgtacaatggaccaacttgtcttcctattaatgctgcctctagtcaagaatttgattcagttttgtttcagcaggatgcaactctttctggtttagtgaatcttggctgtcaaccactgtcatccataccatttcattcttcaaattcaggctcaacaggacatctcttagcccatacacctcattctgtgcataccctgcctcatctgcaatcaatgggatatcattgttcaaatacaggacaaagatctctttcttctccagtggctgaccagattacaggtcagccttcgtctcagttacaacctattacatatggtccttcacattcagggtctgctacaacagcttccccagcagcttctcatcccttggctagttcaccgctttctgggccaccatctcctcagcttcagcctatgccttaccaatctcctagctcaggaactgcctcatcaccgtctccagccaccagaatgcattctggacagcactcaactcaagcacaaagtacgggccaggggggtctttctgcaccttcatccttaatatgtcacagtttgtgtgatccagcgtcatttccacctgatggggcaactgtgagcattaaacctgaaccagaagatcgagagcctaactttgcaaccattggtctgcaggacatcactttagatgatgaccaatttatatctgacttggaacaccagccatcaggttcagcagagaaatggcctaaccacagtgtgctctcatgtccagctcctttctggagaatctagaggtgaacgagataattgggagagacatgtcccagatttctgtttcccaaggagcaggggtgagcaggcaggctcccctcccgagtcctgagtccctggatttaggaagatctgatgggctctaacagtgcttactgcagccttgtgtccaccaccaacttctcagcatgtttctctccttggaccttgggtttccaactctgcagccttcaggtctggggccaggagtgggacccaccatttgtggggaaagtagcattcctccacctcaggccttgggtagatttggcaaaagaacaggagcagcataggctgtttgagctttggggaaatgaactttgctttttatatttaactaggatacttttatatgatgggtgctttgagtgtgaatgcagcaggctctcttgtttccgaggtgctgcttttgcaggtgacctggttacttagctaggattggtgatttgtactgctttatggtcatttgaagggccctttagtttttatgataatttttaaaataggaacttttgataagaccttctagaagc

SEQ ID NO: 2871 - DNA, 4749 bp, Homo sapiens
  source 1..4749: mol_type = genomic DNA
gcttctggagggaggcggcagcgacggaggagggggcttctcagagaaagggagggagggagccacccgggtgaagatacagcagcctcctgaactcccccctcccacccaggccgggacctgggggctcctgccggatccatgggggcggccagctgcgaggatgaggagctggaatttaagctggtgttcggggaggaaaaggaggcccccccgctgggcgcggggggattgggggaagaactggactcagaggatgccccgccatgctgccgtctggccttgggagagccccctccctatggcgctgcacctatcggtattccccgacctccaccccctcggcctggcatgcattcgccaccgccgcgaccagccccctcacctggcacctgggagagccagcccgccaggtcggtgaggctgggaggaccaggagggggtgctgggggtgctgggggtggccgtgttctcgagtgtcccagcatccgcatcacctccatctctcccacgccggagccgccagcagcgctggaggacaaccctgatgcctggggggacggctctcctagagattaccccccaccagaaggctttgggggctacagagaagcagggggccagggtgggggggccttcttcagcccaagccctggcagcagcagcctgtcctcgtggagcttcttctccgatgcctctgacgaggcagccctgtatgcagcctgcgacgaggtggagtctgagctaaatgaggcggcctcccgctttggcctgggctccccgctgccctcgccccgggcctcccctcggccatggacccccgaagatccctggagcctgtatggtccaagccccggaggccgagggccagaggatagctggctactcctcagtgctcctgggcccaccccagcctccccgcggcctgcctctccatgtggcaagcggcgctattccagctcgggaaccccatcttcagcctccccagctctgtcccgccgtggcagcctgggggaagaggggtctgagccacctccaccacccccattgcctctggcccgggacccgggctcccctggtccctttgactatgtgggggccccaccagctgagagcatccctcagaagacacggcggacttccagcgagcaggcagtggctctgcctcggtctgaggagcctgcctcatgcaatgggaagctgcccttgggagcagaggagtctgtggctcctccaggaggttcccggaaggaggtggctggcatggactacctggcagtgccctccccactcgcttggtccaaggcccggattgggggacacagccctatcttcaggacctctgccctacccccactggactggcctctgcccagccaatatgagcagctggagctgaggatcgaggtacagcctagagcccaccaccgggcccactatgagacagaaggcagccgtggagctgtcaaagctgcccctggcggtcaccccgtagtcaagctcctaggctacagtgagaagccactgaccctacagatgttcatcggcactgcagatgaaaggaacctgcggcctcatgccttctatcaggtgcaccgtatcacaggcaagatggtggccacggccagctatgaagccgtagtcagtggcaccaaggtgttggagatgactctgctgcctgagaacaacatggcggccaacattgactgcgcgggaatcctgaagcttcggaattcagacattgagcttcggaagggtgagacggacatcgggcgcaaaaacacacgtgtacggctggtgttccgggtacacgtgccccagggcggcgggaaggtcgtctcagtacaggcagcatcggtgcccatcgagtgctcccagcgctcagcccaggagctgccccaggtggaggcctacagccccagtgcctgctctgtgagaggaggcgaggaactggtactgactggctccaacttcctgccagactccaaggtggtgttcattgagaggggtcctgatgggaagctgcaatgggaggaggaggccacagtgaaccgactgcagagcaacgaggtgacgctgaccctgactgtccccgagtacagcaacaagagggtttcccggccagtccaggtctacttttatgtctccaatgggcggaggaaacgcagtcctacccagagtttcaggtttctgcctgtgatctgcaaagaggagcccctaccggactcatctctgcggggtttcccttcagcatcggcaaccccctttggcactgacatggacttctcaccacccaggcccccctacccctcctatccccatgaagaccctgcttgcgaaactccttacctatcagaaggcttcggctatggcatgccccctctgtacccccagacggggcccccaccatcctacagaccgggcctgcggatgttccctgagactaggggtaccacaggttgtgcccaaccacctgcagtttccttccttccccgccccttccctagtgacccgtatggagggcggggctcctctttctccctggggctgccattctctccgccagccccctttcggccgcctcctcttcctgcatccccaccgcttgaaggccccttcccttcccagagtgatgtgcatcccctacctgctgagggatacaataaggtagggccaggctatggccctggggagggggctccggagcaggagaaatccaggggtggctacagcagcggcttccgagacagtgtccctatccagggtatcacgctggaggaagtgagtgagatcattggccgagacctgagtggcttccctgcacctcctggagaagagcctcctgcctgaaccacgtgaactgtcatcacctggcaaccccagccccagcctcagccctgccccctttccctccttcctggagtggtggctacagaagcttggggccaaccctggctcctctttccccagcttctgtctgtctcactgtcttccctcccctcccccagctgaggtgtggccctcaggcctggtgctgccttggagggctgggggaaggagtgtgtggaggagggaggagggtgaagactgaggctaggtgccagaatggactggagtgaaggcgtgtctagagtgtgggctggctgttgtgctggaaagctggggacaggttgatggtaataaactgctcaatgaccagtgcttcaggctccagagctctttggagagatgggttggggcagcttactccagccctggcccaaggaggcccagaagttggaaagagatggaatgtggctgggaacattgcatcccaaagagcttctcagtggaggaggctggggaaggcatgagggggctcagaggctccttgactgggaccaggattgggggccagggcttgagtaggcctctccactctcctccttgggggtccagattccttaggagctttgggatgaggcccaggaggctgcatttttccaggtccttagtcttgccaccacacagatgattctgattcatagccaagatgaggacacactgatgtagctgatctctcatttacagaggaggattctaaagttcagagagggaaaggggcttgcctgaggtcacgtagataatcagcagcacattgaacgctgcactcctgggctcctgtccccagcccccattcagacacgctgactcaggaggtccaggcctctaaggcttctctccctggagtgagggtggaggtgagggagagctggcacaagccctccctctggatcctccactcctggggattatgaagatattctggaaagatttgtgcttcagaggtagactgcagaaagcaaacagtctacccagcagctctgaatgtcacctgccctggggcttacagcactatatgagttcctggcctatcctgcaaatatgcccatgctggccttctaaatagctggtacatccatcaccactgacgggcctggcctggaaacctggtttgtcccctgtcttgatggcctacgagaggccaagttccactgggctgggaaaagtcactttgtctgtcttgttcacctggagcctgacacaccgtaggtactgagtacaaatagcttgatttggctaggcttggctgcagggggacgtgcctaaaagacattccgggcatttgcacttgggaaacttgcctcaccttcaggcttgtggggcctctctatgcccaatgagtccaggcagtcctagcaagtactcaggagagcaggggtgggtgtgacagaggctggctctggattgggggacaacagaaccagagtaactcctcgcctgttgctgctttgcaatgaatttcctttacctttctggaacacaagctgctgtgaaccaaactgatatcaagtgattagctcaccgggccttggttgcttttcaaagatccccttcagccccctgccagagtcactgccccataatcaccatgtcagaagggaccctagggcattcgtgtcctatttatcaatcttcagcaccacctctaagatctctgagagagggtggatcagcctctgtgtaaacaaaaagctgttaggacttgttgcctctcaaggtggactattctgttttctgccaggacactgccattcatgcattgtcagatatttattaaacagcagcaaagtgccagccaatttgtcctggaggaattcatagcctcatggggcaaaagtaaataaacagcttattacaattcaacaa

SEQ ID NO: 2872 - DNA, 5700 bp, Homo sapiens
  source 1..5700: mol_type = genomic DNA
gtaaacgtctgacctggggccgtcgcttaaccgtttagttgctgggatggggcggcgttgggggtgcggccctgaaccggagggatttagagactggagacgcggcctctaagagaggttgaaactgtgtgtgtgtgggagaaaatgataaccaccctcccatctctcctacccgccagcctcgccagtatctcccaccgagtcacgaatctcccatctaactccctctcacacaacccaggcctctccaagcctgactttcccggaaactccagtccaggtcttccttcctcctccagcccaggccgggacctgggggctcctgccggatccatgggggcggccagctgcgaggatgaggagctggaatttaagctggtgttcggggaggaaaaggaggcccccccgctgggcgcggggggattgggggaagaactggactcagaggatgccccgccatgctgccgtctggccttgggagagccccctccctatggcgctgcacctatcggtattccccgacctccaccccctcggcctggcatgcattcgccaccgccgcgaccagccccctcacctggcacctgggagagccagcccgccaggtcggtgaggctgggaggaccaggagggggtgctgggggtgctgggggtggccgtgttctcgagtgtcccagcatccgcatcacctccatctctcccacgccggagccgccagcagcgctggaggacaaccctgatgcctggggggacggctctcctagagattaccccccaccagaaggctttgggggctacagagaagcagggggccagggtgggggggccttcttcagcccaagccctggcagcagcagcctgtcctcgtggagcttcttctccgatgcctctgacgaggcagccctgtatgcagcctgcgacgaggtggagtctgagctaaatgaggcggcctcccgctttggcctgggctccccgctgccctcgccccgggcctcccctcggccatggacccccgaagatccctggagcctgtatggtccaagccccggaggccgagggccagaggatagctggctactcctcagtgctcctgggcccaccccagcctccccgcggcctgcctctccatgtggcaagcggcgctattccagctcgggaaccccatcttcagcctccccagctctgtcccgccgtggcagcctgggggaagaggggtctgagccacctccaccacccccattgcctctggcccgggacccgggctcccctggtccctttgactatgtgggggccccaccagctgagagcatccctcagaagacacggcggacttccagcgagcaggcagtggctctgcctcggtctgaggagcctgcctcatgcaatgggaagctgcccttgggagcagaggagtctgtggctcctccaggaggttcccggaaggaggtggctggcatggactacctggcagtgccctccccactcgcttggtccaaggcccggattgggggacacagccctatcttcaggacctctgccctacccccactggactggcctctgcccagccaatatgagcagctggagctgaggatcgaggtacagcctagagcccaccaccgggcccactatgagacagaaggcagccgtggagctgtcaaagctgcccctggcggtcaccccgtagtcaagctcctaggctacagtgagaagccactgaccctacagatgttcatcggcactgcagatgaaaggaacctgcggcctcatgccttctatcaggtgcaccgtatcacaggcaagatggtggccacggccagctatgaagccgtagtcagtggcaccaaggtgttggagatgactctgctgcctgagaacaacatggcggccaacattgactgcgcgggaatcctgaagcttcggaattcagacattgagcttcggaagggtgagacggacatcgggcgcaaaaacacacgtgtacggctggtgttccgggtacacgtgccccagggcggcgggaaggtcgtctcagtacaggcagcatcggtgcccatcgagtgctcccagcgctcagcccaggagctgccccaggtggaggcctacagccccagtgcctgctctgtgagaggaggcgaggaactggtactgactggctccaacttcctgccagactccaaggtggtgttcattgagaggggtcctgatgggaagctgcaatgggaggaggaggccacagtgaaccgactgcagagcaacgaggtgacgctgaccctgactgtccccgagtacagcaacaagagggtttcccggccagtccaggtctacttttatgtctccaatgggcggaggaaacgcagtcctacccagagtttcaggtttctgcctgtgatctgcaaagaggagcccctaccggactcatctctgcggggtttcccttcagcatcggcaaccccctttggcactgacatggacttctcaccacccaggcccccctacccctcctatccccatgaagaccctgcttgcgaaactccttacctatcagaaggcttcggctatggcatgccccctctgtacccccagacggggcccccaccatcctacagaccgggcctgcggatgttccctgagactaggggtaccacaggttgtgcccaaccacctgcagtttccttccttccccgccccttccctagtgacccgtatggagggcggggctcctctttctccctggggctgccattctctccgccagccccctttcggccgcctcctcttcctgcatccccaccgcttgaaggccccttcccttcccagagtgatgtgcatcccctacctgctgagggatacaataaggtagggccaggctatggccctggggagggggctccggagcaggagaaatccaggggtggctacagcagcggcttccgagacagtgtccctatccagggtatcacgctggaggaaggtgggtgtgggactgggggctgtgagtgtgagtgtgtgcaagagattgctctgcatgtttgctgagggctggagctgggcttttcagagatcgggcatccctggtctctcagggccagttggaggttcccaggaggcatgttcttgatgcctgtggctgcctgaatccaattaactgaattctgaagagtgcatggggtaactgtctcagcctttctcctgtctctgcctctgtcctctgctccaaatcataaaatctcagagctagaagcactttcaagatcattccatccagcgcattcaatttgcaagtttaggcgttgagttccagagagggatggtagcttgctgaggtcccagtcaagcacacttgccattgcctcagctttcccctaaacacggtgtctgtggtcagggttggtgaggaggagctttcctgttttgcctctccttcttcccattggctacacccatctctggccctgctgataccgattcccctgacatttcaggctaagccagcaggaaagggctaggacgggtgcctgggagcccacatggagggagttgggcaagatttgattcggagcaggtgtcaagacgtgttggggaaactgaggcccagtggaatagaagccagtagaggaggaatctagaggcctcctagattaagacctgcctggaatggattgggggtgggtctttggaaaaggaggggacccacctctagcccagtctctcaactgcccctcctttacagtgagtgagatcattggccgagacctgagtggcttccctgcacctcctggagaagagcctcctgcctgaaccacgtgaactgtcatcacctggcaaccccagccccagcctcagccctgccccctttccctccttcctggagtggtggctacagaagcttggggccaaccctggctcctctttccccagcttctgtctgtctcactgtcttccctcccctcccccagctgaggtgtggccctcaggcctggtgctgccttggagggctgggggaaggagtgtgtggaggagggaggagggtgaagactgaggctaggtgccagaatggactggagtgaaggcgtgtctagagtgtgggctggctgttgtgctggaaagctggggacaggttgatggtaataaactgctcaatgaccagtgcttcaggctccagagctctttggagagatgggttggggcagcttactccagccctggcccaaggaggcccagaagttggaaagagatggaatgtggctgggaacattgcatcccaaagagcttctcagtggaggaggctggggaaggcatgagggggctcagaggctccttgactgggaccaggattgggggccagggcttgagtaggcctctccactctcctccttgggggtccagattccttaggagctttgggatgaggcccaggaggctgcatttttccaggtccttagtcttgccaccacacagatgattctgattcatagccaagatgaggacacactgatgtagctgatctctcatttacagaggaggattctaaagttcagagagggaaaggggcttgcctgaggtcacgtagataatcagcagcacattgaacgctgcactcctgggctcctgtccccagcccccattcagacacgctgactcaggaggtccaggcctctaaggcttctctccctggagtgagggtggaggtgagggagagctggcacaagccctccctctggatcctccactcctggggattatgaagatattctggaaagatttgtgcttcagaggtagactgcagaaagcaaacagtctacccagcagctctgaatgtcacctgccctggggcttacagcactatatgagttcctggcctatcctgcaaatatgcccatgctggccttctaaatagctggtacatccatcaccactgacgggcctggcctggaaacctggtttgtcccctgtcttgatggcctacgagaggccaagttccactgggctgggaaaagtcactttgtctgtcttgttcacctggagcctgacacaccgtaggtactgagtacaaatagcttgatttggctaggcttggctgcagggggacgtgcctaaaagacattccgggcatttgcacttgggaaacttgcctcaccttcaggcttgtggggcctctctatgcccaatgagtccaggcagtcctagcaagtactcaggagagcaggggtgggtgtgacagaggctggctctggattgggggacaacagaaccagagtaactcctcgcctgttgctgctttgcaatgaatttcctttacctttctggaacacaagctgctgtgaaccaaactgatatcaagtgattagctcaccgggccttggttgcttttcaaagatccccttcagccccctgccagagtcactgccccataatcaccatgtcagaagggaccctagggcattcgtgtcctatttatcaatcttcagcaccacctctaagatctctgagagagggtggatcagcctctgtgtaaacaaaaagctgttaggacttgttgcctctcaaggtggactattctgttttctgccaggacactgccattcatgcattgtcagatatttattaaacagcagcaaagtgccagccaatttgtcctggaggaattcatagcctcatggggcaaaagtaaataaacagcttattacaattcaacaa

SEQ ID NO: 2873 - DNA, 5491 bp, Homo sapiens
  source 1..5491: mol_type = genomic DNA
atgtgtgagtcgcccccagtccagcccagtgcctcaagaaacacgcctccaggcccagccccagctccagcccctctggacccacctctctcaccttaagacccactggatcgggtaccctcggtcctaggatccaggggccagtgggcaaaggcctggcatgcctgcttcaatctcctccatcttcccaggtccaactctgcttttgtcttgtggctcagaagaactggactcagaggatgccccgccatgctgccgtctggccttgggagagccccctccctatggcgctgcacctatcggtattccccgacctccaccccctcggcctggcatgcattcgccaccgccgcgaccagccccctcacctggcacctgggagagccagcccgccaggtcggtgaggctgggaggaccaggagggggtgctgggggtgctgggggtggccgtgttctcgagtgtcccagcatccgcatcacctccatctctcccacgccggagccgccagcagcgctggaggacaaccctgatgcctggggggacggctctcctagagattaccccccaccagaaggctttgggggctacagagaagcagggggccagggtgggggggccttcttcagcccaagccctggcagcagcagcctgtcctcgtggagcttcttctccgatgcctctgacgaggcagccctgtatgcagcctgcgacgaggtggagtctgagctaaatgaggcggcctcccgctttggcctgggctccccgctgccctcgccccgggcctcccctcggccatggacccccgaagatccctggagcctgtatggtccaagccccggaggccgagggccagaggatagctggctactcctcagtgctcctgggcccaccccagcctccccgcggcctgcctctccatgtggcaagcggcgctattccagctcgggaaccccatcttcagcctccccagctctgtcccgccgtggcagcctgggggaagaggggtctgagccacctccaccacccccattgcctctggcccgggacccgggctcccctggtccctttgactatgtgggggccccaccagctgagagcatccctcagaagacacggcggacttccagcgagcaggcagtggctctgcctcggtctgaggagcctgcctcatgcaatgggaagctgcccttgggagcagaggagtctgtggctcctccaggaggttcccggaaggaggtggctggcatggactacctggcagtgccctccccactcgcttggtccaaggcccggattgggggacacagccctatcttcaggacctctgccctacccccactggactggcctctgcccagccaatatgagcagctggagctgaggatcgaggtacagcctagagcccaccaccgggcccactatgagacagaaggcagccgtggagctgtcaaagctgcccctggcggtcaccccgtagtcaagctcctaggctacagtgagaagccactgaccctacagatgttcatcggcactgcagatgaaaggaacctgcggcctcatgccttctatcaggtgcaccgtatcacaggcaagatggtggccacggccagctatgaagccgtagtcagtggcaccaaggtgttggagatgactctgctgcctgagaacaacatggcggccaacattgactgcgcgggaatcctgaagcttcggaattcagacattgagcttcggaagggtgagacggacatcgggcgcaaaaacacacgtgtacggctggtgttccgggtacacgtgccccagggcggcgggaaggtcgtctcagtacaggcagcatcggtgcccatcgagtgctcccagcgctcagcccaggagctgccccaggtggaggcctacagccccagtgcctgctctgtgagaggaggcgaggaactggtactgactggctccaacttcctgccagactccaaggtggtgttcattgagaggggtcctgatgggaagctgcaatgggaggaggaggccacagtgaaccgactgcagagcaacgaggtgacgctgaccctgactgtccccgagtacagcaacaagagggtttcccggccagtccaggtctacttttatgtctccaatgggcggaggaaacgcagtcctacccagagtttcaggtttctgcctgtgatctgcaaagaggagcccctaccggactcatctctgcggggtttcccttcagcatcggcaaccccctttggcactgacatggacttctcaccacccaggcccccctacccctcctatccccatgaagaccctgcttgcgaaactccttacctatcagaaggcttcggctatggcatgccccctctgtacccccagacggggcccccaccatcctacagaccgggcctgcggatgttccctgagactaggggtaccacaggttgtgcccaaccacctgcagtttccttccttccccgccccttccctagtgacccgtatggagggcggggctcctctttctccctggggctgccattctctccgccagccccctttcggccgcctcctcttcctgcatccccaccgcttgaaggccccttcccttcccagagtgatgtgcatcccctacctgctgagggatacaataaggtagggccaggctatggccctggggagggggctccggagcaggagaaatccaggggtggctacagcagcggcttccgagacagtgtccctatccagggtatcacgctggaggaaggtgggtgtgggactgggggctgtgagtgtgagtgtgtgcaagagattgctctgcatgtttgctgagggctggagctgggcttttcagagatcgggcatccctggtctctcagggccagttggaggttcccaggaggcatgttcttgatgcctgtggctgcctgaatccaattaactgaattctgaagagtgcatggggtaactgtctcagcctttctcctgtctctgcctctgtcctctgctccaaatcataaaatctcagagctagaagcactttcaagatcattccatccagcgcattcaatttgcaagtttaggcgttgagttccagagagggatggtagcttgctgaggtcccagtcaagcacacttgccattgcctcagctttcccctaaacacggtgtctgtggtcagggttggtgaggaggagctttcctgttttgcctctccttcttcccattggctacacccatctctggccctgctgataccgattcccctgacatttcaggctaagccagcaggaaagggctaggacgggtgcctgggagcccacatggagggagttgggcaagatttgattcggagcaggtgtcaagacgtgttggggaaactgaggcccagtggaatagaagccagtagaggaggaatctagaggcctcctagattaagacctgcctggaatggattgggggtgggtctttggaaaaggaggggacccacctctagcccagtctctcaactgcccctcctttacagtgagtgagatcattggccgagacctgagtggcttccctgcacctcctggagaagagcctcctgcctgaaccacgtgaactgtcatcacctggcaaccccagccccagcctcagccctgccccctttccctccttcctggagtggtggctacagaagcttggggccaaccctggctcctctttccccagcttctgtctgtctcactgtcttccctcccctcccccagctgaggtgtggccctcaggcctggtgctgccttggagggctgggggaaggagtgtgtggaggagggaggagggtgaagactgaggctaggtgccagaatggactggagtgaaggcgtgtctagagtgtgggctggctgttgtgctggaaagctggggacaggttgatggtaataaactgctcaatgaccagtgcttcaggctccagagctctttggagagatgggttggggcagcttactccagccctggcccaaggaggcccagaagttggaaagagatggaatgtggctgggaacattgcatcccaaagagcttctcagtggaggaggctggggaaggcatgagggggctcagaggctccttgactgggaccaggattgggggccagggcttgagtaggcctctccactctcctccttgggggtccagattccttaggagctttgggatgaggcccaggaggctgcatttttccaggtccttagtcttgccaccacacagatgattctgattcatagccaagatgaggacacactgatgtagctgatctctcatttacagaggaggattctaaagttcagagagggaaaggggcttgcctgaggtcacgtagataatcagcagcacattgaacgctgcactcctgggctcctgtccccagcccccattcagacacgctgactcaggaggtccaggcctctaaggcttctctccctggagtgagggtggaggtgagggagagctggcacaagccctccctctggatcctccactcctggggattatgaagatattctggaaagatttgtgcttcagaggtagactgcagaaagcaaacagtctacccagcagctctgaatgtcacctgccctggggcttacagcactatatgagttcctggcctatcctgcaaatatgcccatgctggccttctaaatagctggtacatccatcaccactgacgggcctggcctggaaacctggtttgtcccctgtcttgatggcctacgagaggccaagttccactgggctgggaaaagtcactttgtctgtcttgttcacctggagcctgacacaccgtaggtactgagtacaaatagcttgatttggctaggcttggctgcagggggacgtgcctaaaagacattccgggcatttgcacttgggaaacttgcctcaccttcaggcttgtggggcctctctatgcccaatgagtccaggcagtcctagcaagtactcaggagagcaggggtgggtgtgacagaggctggctctggattgggggacaacagaaccagagtaactcctcgcctgttgctgctttgcaatgaatttcctttacctttctggaacacaagctgctgtgaaccaaactgatatcaagtgattagctcaccgggccttggttgcttttcaaagatccccttcagccccctgccagagtcactgccccataatcaccatgtcagaagggaccctagggcattcgtgtcctatttatcaatcttcagcaccacctctaagatctctgagagagggtggatcagcctctgtgtaaacaaaaagctgttaggacttgttgcctctcaaggtggactattctgttttctgccaggacactgccattcatgcattgtcagatatttattaaacagcagcaaagtgccagccaatttgtcctggaggaattcatagcctcatggggcaaaagtaaataaacagcttattacaattcaacaa

SEQ ID NO: 2874 - DNA, 5488 bp, Homo sapiens
  source 1..5488: mol_type = genomic DNA
gaagaggaggggaacccacagggtccggaggtttcaggcccctagtaaacctggcaaggatttttagaagagccggagtgggatgctatcgggccgggacctgggggctcctgccggatccatgggggcggccagctgcgaggatgaggagctggaatttaagctggtgttcggggaggaaaaggaggcccccccgctgggcgcggggggattgggggaagaactggactcagaggatgccccgccatgctgccgtctggccttgggagagccccctccctatggcgctgcacctatcggtattccccgacctccaccccctcggcctggcatgcattcgccaccgccgcgaccagccccctcacctggcacctgggagagccagcccgccaggtcggtgaggctgggaggaccaggagggggtgctgggggtgctgggggtggccgtgttctcgagtgtcccagcatccgcatcacctccatctctcccacgccggagccgccagcagcgctggaggacaaccctgatgcctggggggacggctctcctagagattaccccccaccagaaggctttgggggctacagagaagcagggggccagggtgggggggccttcttcagcccaagccctggcagcagcagcctgtcctcgtggagcttcttctccgatgcctctgacgaggcagccctgtatgcagcctgcgacgaggtggagtctgagctaaatgaggcggcctcccgctttggcctgggctccccgctgccctcgccccgggcctcccctcggccatggacccccgaagatccctggagcctgtatggtccaagccccggaggccgagggccagaggatagctggctactcctcagtgctcctgggcccaccccagcctccccgcggcctgcctctccatgtggcaagcggcgctattccagctcgggaaccccatcttcagcctccccagctctgtcccgccgtggcagcctgggggaagaggggtctgagccacctccaccacccccattgcctctggcccgggacccgggctcccctggtccctttgactatgtgggggccccaccagctgagagcatccctcagaagacacggcggacttccagcgagcaggcagtggctctgcctcggtctgaggagcctgcctcatgcaatgggaagctgcccttgggagcagaggagtctgtggctcctccaggaggttcccggaaggaggtggctggcatggactacctggcagtgccctccccactcgcttggtccaaggcccggattgggggacacagccctatcttcaggacctctgccctacccccactggactggcctctgcccagccaatatgagcagctggagctgaggatcgaggtacagcctagagcccaccaccgggcccactatgagacagaaggcagccgtggagctgtcaaagctgcccctggcggtcaccccgtagtcaagctcctaggctacagtgagaagccactgaccctacagatgttcatcggcactgcagatgaaaggaacctgcggcctcatgccttctatcaggtgcaccgtatcacaggcaagatggtggccacggccagctatgaagccgtagtcagtggcaccaaggtgttggagatgactctgctgcctgagaacaacatggcggccaacattgactgcgcgggaatcctgaagcttcggaattcagacattgagcttcggaagggtgagacggacatcgggcgcaaaaacacacgtgtacggctggtgttccgggtacacgtgccccagggcggcgggaaggtcgtctcagtacaggcagcatcggtgcccatcgagtgctcccagcgctcagcccaggagctgccccaggtggaggcctacagccccagtgcctgctctgtgagaggaggcgaggaactggtactgactggctccaacttcctgccagactccaaggtggtgttcattgagaggggtcctgatgggaagctgcaatgggaggaggaggccacagtgaaccgactgcagagcaacgaggtgacgctgaccctgactgtccccgagtacagcaacaagagggtttcccggccagtccaggtctacttttatgtctccaatgggcggaggaaacgcagtcctacccagagtttcaggtttctgcctgtgatctgcaaagaggagcccctaccggactcatctctgcggggtttcccttcagcatcggcaaccccctttggcactgacatggacttctcaccacccaggcccccctacccctcctatccccatgaagaccctgcttgcgaaactccttacctatcagaaggcttcggctatggcatgccccctctgtacccccagacggggcccccaccatcctacagaccgggcctgcggatgttccctgagactaggggtaccacaggttgtgcccaaccacctgcagtttccttccttccccgccccttccctagtgacccgtatggagggcggggctcctctttctccctggggctgccattctctccgccagccccctttcggccgcctcctcttcctgcatccccaccgcttgaaggccccttcccttcccagagtgatgtgcatcccctacctgctgagggatacaataaggtagggccaggctatggccctggggagggggctccggagcaggagaaatccaggggtggctacagcagcggcttccgagacagtgtccctatccagggtatcacgctggaggaaggtgggtgtgggactgggggctgtgagtgtgagtgtgtgcaagagattgctctgcatgtttgctgagggctggagctgggcttttcagagatcgggcatccctggtctctcagggccagttggaggttcccaggaggcatgttcttgatgcctgtggctgcctgaatccaattaactgaattctgaagagtgcatggggtaactgtctcagcctttctcctgtctctgcctctgtcctctgctccaaatcataaaatctcagagctagaagcactttcaagatcattccatccagcgcattcaatttgcaagtttaggcgttgagttccagagagggatggtagcttgctgaggtcccagtcaagcacacttgccattgcctcagctttcccctaaacacggtgtctgtggtcagggttggtgaggaggagctttcctgttttgcctctccttcttcccattggctacacccatctctggccctgctgataccgattcccctgacatttcaggctaagccagcaggaaagggctaggacgggtgcctgggagcccacatggagggagttgggcaagatttgattcggagcaggtgtcaagacgtgttggggaaactgaggcccagtggaatagaagccagtagaggaggaatctagaggcctcctagattaagacctgcctggaatggattgggggtgggtctttggaaaaggaggggacccacctctagcccagtctctcaactgcccctcctttacagtgagtgagatcattggccgagacctgagtggcttccctgcacctcctggagaagagcctcctgcctgaaccacgtgaactgtcatcacctggcaaccccagccccagcctcagccctgccccctttccctccttcctggagtggtggctacagaagcttggggccaaccctggctcctctttccccagcttctgtctgtctcactgtcttccctcccctcccccagctgaggtgtggccctcaggcctggtgctgccttggagggctgggggaaggagtgtgtggaggagggaggagggtgaagactgaggctaggtgccagaatggactggagtgaaggcgtgtctagagtgtgggctggctgttgtgctggaaagctggggacaggttgatggtaataaactgctcaatgaccagtgcttcaggctccagagctctttggagagatgggttggggcagcttactccagccctggcccaaggaggcccagaagttggaaagagatggaatgtggctgggaacattgcatcccaaagagcttctcagtggaggaggctggggaaggcatgagggggctcagaggctccttgactgggaccaggattgggggccagggcttgagtaggcctctccactctcctccttgggggtccagattccttaggagctttgggatgaggcccaggaggctgcatttttccaggtccttagtcttgccaccacacagatgattctgattcatagccaagatgaggacacactgatgtagctgatctctcatttacagaggaggattctaaagttcagagagggaaaggggcttgcctgaggtcacgtagataatcagcagcacattgaacgctgcactcctgggctcctgtccccagcccccattcagacacgctgactcaggaggtccaggcctctaaggcttctctccctggagtgagggtggaggtgagggagagctggcacaagccctccctctggatcctccactcctggggattatgaagatattctggaaagatttgtgcttcagaggtagactgcagaaagcaaacagtctacccagcagctctgaatgtcacctgccctggggcttacagcactatatgagttcctggcctatcctgcaaatatgcccatgctggccttctaaatagctggtacatccatcaccactgacgggcctggcctggaaacctggtttgtcccctgtcttgatggcctacgagaggccaagttccactgggctgggaaaagtcactttgtctgtcttgttcacctggagcctgacacaccgtaggtactgagtacaaatagcttgatttggctaggcttggctgcagggggacgtgcctaaaagacattccgggcatttgcacttgggaaacttgcctcaccttcaggcttgtggggcctctctatgcccaatgagtccaggcagtcctagcaagtactcaggagagcaggggtgggtgtgacagaggctggctctggattgggggacaacagaaccagagtaactcctcgcctgttgctgctttgcaatgaatttcctttacctttctggaacacaagctgctgtgaaccaaactgatatcaagtgattagctcaccgggccttggttgcttttcaaagatccccttcagccccctgccagagtcactgccccataatcaccatgtcagaagggaccctagggcattcgtgtcctatttatcaatcttcagcaccacctctaagatctctgagagagggtggatcagcctctgtgtaaacaaaaagctgttaggacttgttgcctctcaaggtggactattctgttttctgccaggacactgccattcatgcattgtcagatatttattaaacagcagcaaagtgccagccaatttgtcctggaggaattcatagcctcatggggcaaaagtaaataaacagcttattacaattcaacaa

SEQ ID NO: 2875 - DNA, 5686 bp, Homo sapiens
  source 1..5686: mol_type = genomic DNA
ttccagactacagttctagggaggaggctgccaacttcccgtggaggctaattcacggcccctctgggtggctgggacaagggcagcggcaaagcctggcctggatctacgcccatcaagggctgtgggcctagggacagttctcaaagcctctttggctcggactgctcccagaggcatccaggctggctaagcgttcttcatctttgggggtcctggaggaatggctgatggaggcgctgattcggcagcgcaaagacttccagaaggcccgggcagagtagccccaggccgggacctgggggctcctgccggatccatgggggcggccagctgcgaggatgaggagctggaatttaagctggtgttcggggaggaaaaggaggcccccccgctgggcgcggggggattgggggaagaactggactcagaggatgccccgccatgctgccgtctggccttgggagagccccctccctatggcgctgcacctatcggtattccccgacctccaccccctcggcctggcatgcattcgccaccgccgcgaccagccccctcacctggcacctgggagagccagcccgccaggtcggtgaggctgggaggaccaggagggggtgctgggggtgctgggggtggccgtgttctcgagtgtcccagcatccgcatcacctccatctctcccacgccggagccgccagcagcgctggaggacaaccctgatgcctggggggacggctctcctagagattaccccccaccagaaggctttgggggctacagagaagcagggggccagggtgggggggccttcttcagcccaagccctggcagcagcagcctgtcctcgtggagcttcttctccgatgcctctgacgaggcagccctgtatgcagcctgcgacgaggtggagtctgagctaaatgaggcggcctcccgctttggcctgggctccccgctgccctcgccccgggcctcccctcggccatggacccccgaagatccctggagcctgtatggtccaagccccggaggccgagggccagaggatagctggctactcctcagtgctcctgggcccaccccagcctccccgcggcctgcctctccatgtggcaagcggcgctattccagctcgggaaccccatcttcagcctccccagctctgtcccgccgtggcagcctgggggaagaggggtctgagccacctccaccacccccattgcctctggcccgggacccgggctcccctggtccctttgactatgtgggggccccaccagctgagagcatccctcagaagacacggcggacttccagcgagcaggcagtggctctgcctcggtctgaggagcctgcctcatgcaatgggaagctgcccttgggagcagaggagtctgtggctcctccaggaggttcccggaaggaggtggctggcatggactacctggcagtgccctccccactcgcttggtccaaggcccggattgggggacacagccctatcttcaggacctctgccctacccccactggactggcctctgcccagccaatatgagcagctggagctgaggatcgaggtacagcctagagcccaccaccgggcccactatgagacagaaggcagccgtggagctgtcaaagctgcccctggcggtcaccccgtagtcaagctcctaggctacagtgagaagccactgaccctacagatgttcatcggcactgcagatgaaaggaacctgcggcctcatgccttctatcaggtgcaccgtatcacaggcaagatggtggccacggccagctatgaagccgtagtcagtggcaccaaggtgttggagatgactctgctgcctgagaacaacatggcggccaacattgactgcgcgggaatcctgaagcttcggaattcagacattgagcttcggaagggtgagacggacatcgggcgcaaaaacacacgtgtacggctggtgttccgggtacacgtgccccagggcggcgggaaggtcgtctcagtacaggcagcatcggtgcccatcgagtgctcccagcgctcagcccaggagctgccccaggtggaggcctacagccccagtgcctgctctgtgagaggaggcgaggaactggtactgactggctccaacttcctgccagactccaaggtggtgttcattgagaggggtcctgatgggaagctgcaatgggaggaggaggccacagtgaaccgactgcagagcaacgaggtgacgctgaccctgactgtccccgagtacagcaacaagagggtttcccggccagtccaggtctacttttatgtctccaatgggcggaggaaacgcagtcctacccagagtttcaggtttctgcctgtgatctgcaaagaggagcccctaccggactcatctctgcggggtttcccttcagcatcggcaaccccctttggcactgacatggacttctcaccacccaggcccccctacccctcctatccccatgaagaccctgcttgcgaaactccttacctatcagaaggcttcggctatggcatgccccctctgtacccccagacggggcccccaccatcctacagaccgggcctgcggatgttccctgagactaggggtaccacaggttgtgcccaaccacctgcagtttccttccttccccgccccttccctagtgacccgtatggagggcggggctcctctttctccctggggctgccattctctccgccagccccctttcggccgcctcctcttcctgcatccccaccgcttgaaggccccttcccttcccagagtgatgtgcatcccctacctgctgagggatacaataaggtagggccaggctatggccctggggagggggctccggagcaggagaaatccaggggtggctacagcagcggcttccgagacagtgtccctatccagggtatcacgctggaggaaggtgggtgtgggactgggggctgtgagtgtgagtgtgtgcaagagattgctctgcatgtttgctgagggctggagctgggcttttcagagatcgggcatccctggtctctcagggccagttggaggttcccaggaggcatgttcttgatgcctgtggctgcctgaatccaattaactgaattctgaagagtgcatggggtaactgtctcagcctttctcctgtctctgcctctgtcctctgctccaaatcataaaatctcagagctagaagcactttcaagatcattccatccagcgcattcaatttgcaagtttaggcgttgagttccagagagggatggtagcttgctgaggtcccagtcaagcacacttgccattgcctcagctttcccctaaacacggtgtctgtggtcagggttggtgaggaggagctttcctgttttgcctctccttcttcccattggctacacccatctctggccctgctgataccgattcccctgacatttcaggctaagccagcaggaaagggctaggacgggtgcctgggagcccacatggagggagttgggcaagatttgattcggagcaggtgtcaagacgtgttggggaaactgaggcccagtggaatagaagccagtagaggaggaatctagaggcctcctagattaagacctgcctggaatggattgggggtgggtctttggaaaaggaggggacccacctctagcccagtctctcaactgcccctcctttacagtgagtgagatcattggccgagacctgagtggcttccctgcacctcctggagaagagcctcctgcctgaaccacgtgaactgtcatcacctggcaaccccagccccagcctcagccctgccccctttccctccttcctggagtggtggctacagaagcttggggccaaccctggctcctctttccccagcttctgtctgtctcactgtcttccctcccctcccccagctgaggtgtggccctcaggcctggtgctgccttggagggctgggggaaggagtgtgtggaggagggaggagggtgaagactgaggctaggtgccagaatggactggagtgaaggcgtgtctagagtgtgggctggctgttgtgctggaaagctggggacaggttgatggtaataaactgctcaatgaccagtgcttcaggctccagagctctttggagagatgggttggggcagcttactccagccctggcccaaggaggcccagaagttggaaagagatggaatgtggctgggaacattgcatcccaaagagcttctcagtggaggaggctggggaaggcatgagggggctcagaggctccttgactgggaccaggattgggggccagggcttgagtaggcctctccactctcctccttgggggtccagattccttaggagctttgggatgaggcccaggaggctgcatttttccaggtccttagtcttgccaccacacagatgattctgattcatagccaagatgaggacacactgatgtagctgatctctcatttacagaggaggattctaaagttcagagagggaaaggggcttgcctgaggtcacgtagataatcagcagcacattgaacgctgcactcctgggctcctgtccccagcccccattcagacacgctgactcaggaggtccaggcctctaaggcttctctccctggagtgagggtggaggtgagggagagctggcacaagccctccctctggatcctccactcctggggattatgaagatattctggaaagatttgtgcttcagaggtagactgcagaaagcaaacagtctacccagcagctctgaatgtcacctgccctggggcttacagcactatatgagttcctggcctatcctgcaaatatgcccatgctggccttctaaatagctggtacatccatcaccactgacgggcctggcctggaaacctggtttgtcccctgtcttgatggcctacgagaggccaagttccactgggctgggaaaagtcactttgtctgtcttgttcacctggagcctgacacaccgtaggtactgagtacaaatagcttgatttggctaggcttggctgcagggggacgtgcctaaaagacattccgggcatttgcacttgggaaacttgcctcaccttcaggcttgtggggcctctctatgcccaatgagtccaggcagtcctagcaagtactcaggagagcaggggtgggtgtgacagaggctggctctggattgggggacaacagaaccagagtaactcctcgcctgttgctgctttgcaatgaatttcctttacctttctggaacacaagctgctgtgaaccaaactgatatcaagtgattagctcaccgggccttggttgcttttcaaagatccccttcagccccctgccagagtcactgccccataatcaccatgtcagaagggaccctagggcattcgtgtcctatttatcaatcttcagcaccacctctaagatctctgagagagggtggatcagcctctgtgtaaacaaaaagctgttaggacttgttgcctctcaaggtggactattctgttttctgccaggacactgccattcatgcattgtcagatatttattaaacagcagcaaagtgccagccaatttgtcctggaggaattcatagcctcatggggcaaaagtaaataaacagcttattacaattcaacaa

SEQ ID NO: 2876 - DNA, 2566 bp, Homo sapiens
  source 1..2566: mol_type = genomic DNA
agttctcaaagcctctttggctcggactgctcccagaggcatccaggctggctaagcgttcttcatctttgggggtcctggaggaatggctgatggaggcgctgattcggcagcgcaaagacttccagaaggcccgggcagagtagccccaggccgggacctgggggctcctgccggatccatgggggcggccagctgcgaggatgaggagctggaatttaagctggtgttcggggaggaaaaggaggcccccccgctgggcgcggggggattgggggaagaactggactcagaggatgccccgccatgctgccgtctggccttgggagagccccctccctatggcgctgcacctatcggtattccccgacctccaccccctcggcctggcatgcattcgccaccgccgcgaccagccccctcacctggcacctgggagagccagcccgccaggtcggtgaggctgggaggaccaggagggggtgctgggggtgctgggggtggccgtgttctcgagtgtcccagcatccgcatcacctccatctctcccacgccggagccgccagcagcgctggaggacaaccctgatgcctggggggacggctctcctagagattaccccccaccagaaggctttgggggctacagagaagcagggggccagggtgggggggccttcttcagcccaagccctggcagcagcagcctgtcctcgtggagcttcttctccgatgcctctgacgaggcagccctgtatgcagcctgcgacgaggtggagtctgagctaaatgaggcggcctcccgctttggcctgggctccccgctgccctcgccccgggcctcccctcggccatggacccccgaagatccctggagcctgtatggtccaagccccggaggccgagggccagaggatagctggctactcctcagtgctcctgggcccaccccagcctccccgcggcctgcctctccatgtggcaagcggcgctattccagctcgggaaccccatcttcagcctccccagctctgtcccgccgtggcagcctgggggaagaggggtctgagccacctccaccacccccattgcctctggcccgggacccgggctcccctggtccctttgactatgtgggggccccaccagctgagagcatccctcagaagacacggcggacttccagcgagcaggcagtggctctgcctcggtctgaggagcctgcctcatgcaatgggaagctgcccttgggagcagaggagtctgtggctcctccaggaggttcccggaaggaggtggctggcatggactacctggcagtgccctccccactcgcttggtccaaggcccggattgggggacacagccctatcttcaggacctctgccctacccccactggactggcctctgcccagccaatatgagcagctggagctgaggatcgaggtacagcctagagcccaccaccgggcccactatgagacagaaggcagccgtggagctgtcaaagctgcccctggcggtcaccccgtagtcaagctcctaggctacagtgagaagccactgaccctacagatgttcatcggcactgcagatgaaaggaacctgcggcctcatgccttctatcaggtgcaccgtatcacaggcaagatggtggccacggccagctatgaagccgtagtcagtggcaccaaggtgttggagatgactctgctgcctgagaacaacatggcggccaacattgactgcgcgggaatcctgaagcttcggaattcagacattgagcttcggaagggtgagacggacatcgggcgcaaaaacacacgtgtacggctggtgttccgggtacacgtgccccagggcggcgggaaggtcgtctcagtacaggcagcatcggtgcccatcgagtgctcccagcgctcagcccaggagctgccccaggtggaggcctacagccccagtgcctgctctgtgagaggaggcgaggaactggtactgactggctccaacttcctgccagactccaaggtggtgttcattgagaggggtcctgatgggaagctgcaatgggaggaggaggccacagtgaaccgactgcagagcaacgaggtgacgctgaccctgactgtccccgagtacagcaacaagagggtttcccggccagtccaggtctacttttatgtctccaatgggcggaggaaacgcagtcctacccagagtttcaggtttctgcctgtgatctgcaaagaggagcccctaccggactcatctctgcggggtttcccttcagcatcggcaaccccctttggcactgacatggacttctcaccacccaggcccccctacccctcctatccccatgaagaccctgcttgcgaaactccttacctatcagaaggcttcggctatggcatgccccctctgtacccccagacggggcccccaccatcctacagaccgggcctgcggatgttccctgagactaggggtaccacagtgagtgagatcattggccgagacctgagtggcttccctgcacctcctggagaagagcctcctgcctga

SEQ ID NO: 2877 - DNA, 5367 bp, Homo sapiens
  source 1..5367: mol_type = genomic DNA
atgggggcggccagctgcgaggatgaggagctggaatttaagctggtgttcggggaggaaaaggaggcccccccgctgggcgcggggggattgggggaagaactggactcagaggatgccccgccatgctgccgtctggccttgggagagccccctccctatggcgctgcacctatcggtattccccgacctccaccccctcggcctggcatgcattcgccaccgccgcgaccagccccctcacctggcacctgggagagccagcccgccaggtcggtgaggctgggaggaccaggagggggtgctgggggtgctgggggtggccgtgttctcgagtgtcccagcatccgcatcacctccatctctcccacgccggagccgccagcagcgctggaggacaaccctgatgcctggggggacggctctcctagagattaccccccaccagaaggctttgggggctacagagaagcagggggccagggtgggggggccttcttcagcccaagccctggcagcagcagcctgtcctcgtggagcttcttctccgatgcctctgacgaggcagccctgtatgcagcctgcgacgaggtggagtctgagctaaatgaggcggcctcccgctttggcctgggctccccgctgccctcgccccgggcctcccctcggccatggacccccgaagatccctggagcctgtatggtccaagccccggaggccgagggccagaggatagctggctactcctcagtgctcctgggcccaccccagcctccccgcggcctgcctctccatgtggcaagcggcgctattccagctcgggaaccccatcttcagcctccccagctctgtcccgccgtggcagcctgggggaagaggggtctgagccacctccaccacccccattgcctctggcccgggacccgggctcccctggtccctttgactatgtgggggccccaccagctgagagcatccctcagaagacacggcggacttccagcgagcaggcagtggctctgcctcggtctgaggagcctgcctcatgcaatgggaagctgcccttgggagcagaggagtctgtggctcctccaggaggttcccggaaggaggtggctggcatggactacctggcagtgccctccccactcgcttggtccaaggcccggattgggggacacagccctatcttcaggacctctgccctacccccactggactggcctctgcccagccaatatgagcagctggagctgaggatcgaggtacagcctagagcccaccaccgggcccactatgagacagaaggcagccgtggagctgtcaaagctgcccctggcggtcaccccgtagtcaagctcctaggctacagtgagaagccactgaccctacagatgttcatcggcactgcagatgaaaggaacctgcggcctcatgccttctatcaggtgcaccgtatcacaggcaagatggtggccacggccagctatgaagccgtagtcagtggcaccaaggtgttggagatgactctgctgcctgagaacaacatggcggccaacattgactgcgcgggaatcctgaagcttcggaattcagacattgagcttcggaagggtgagacggacatcgggcgcaaaaacacacgtgtacggctggtgttccgggtacacgtgccccagggcggcgggaaggtcgtctcagtacaggcagcatcggtgcccatcgagtgctcccagcgctcagcccaggagctgccccaggtggaggcctacagccccagtgcctgctctgtgagaggaggcgaggaactggtactgactggctccaacttcctgccagactccaaggtggtgttcattgagaggggtcctgatgggaagctgcaatgggaggaggaggccacagtgaaccgactgcagagcaacgaggtgacgctgaccctgactgtccccgagtacagcaacaagagggtttcccggccagtccaggtctacttttatgtctccaatgggcggaggaaacgcagtcctacccagagtttcaggtttctgcctgtgatctgcaaagaggagcccctaccggactcatctctgcggggtttcccttcagcatcggcaaccccctttggcactgacatggacttctcaccacccaggcccccctacccctcctatccccatgaagaccctgcttgcgaaactccttacctatcagaaggcttcggctatggcatgccccctctgtacccccagacggggcccccaccatcctacagaccgggcctgcggatgttccctgagactaggggtaccacaggttgtgcccaaccacctgcagtttccttccttccccgccccttccctagtgacccgtatggagggcggggctcctctttctccctggggctgccattctctccgccagccccctttcggccgcctcctcttcctgcatccccaccgcttgaaggccccttcccttcccagagtgatgtgcatcccctacctgctgagggatacaataaggtagggccaggctatggccctggggagggggctccggagcaggagaaatccaggggtggctacagcagcggcttccgagacagtgtccctatccagggtatcacgctggaggaaggtgggtgtgggactgggggctgtgagtgtgagtgtgtgcaagagattgctctgcatgtttgctgagggctggagctgggcttttcagagatcgggcatccctggtctctcagggccagttggaggttcccaggaggcatgttcttgatgcctgtggctgcctgaatccaattaactgaattctgaagagtgcatggggtaactgtctcagcctttctcctgtctctgcctctgtcctctgctccaaatcataaaatctcagagctagaagcactttcaagatcattccatccagcgcattcaatttgcaagtttaggcgttgagttccagagagggatggtagcttgctgaggtcccagtcaagcacacttgccattgcctcagctttcccctaaacacggtgtctgtggtcagggttggtgaggaggagctttcctgttttgcctctccttcttcccattggctacacccatctctggccctgctgataccgattcccctgacatttcaggctaagccagcaggaaagggctaggacgggtgcctgggagcccacatggagggagttgggcaagatttgattcggagcaggtgtcaagacgtgttggggaaactgaggcccagtggaatagaagccagtagaggaggaatctagaggcctcctagattaagacctgcctggaatggattgggggtgggtctttggaaaaggaggggacccacctctagcccagtctctcaactgcccctcctttacagtgagtgagatcattggccgagacctgagtggcttccctgcacctcctggagaagagcctcctgcctgaaccacgtgaactgtcatcacctggcaaccccagccccagcctcagccctgccccctttccctccttcctggagtggtggctacagaagcttggggccaaccctggctcctctttccccagcttctgtctgtctcactgtcttccctcccctcccccagctgaggtgtggccctcaggcctggtgctgccttggagggctgggggaaggagtgtgtggaggagggaggagggtgaagactgaggctaggtgccagaatggactggagtgaaggcgtgtctagagtgtgggctggctgttgtgctggaaagctggggacaggttgatggtaataaactgctcaatgaccagtgcttcaggctccagagctctttggagagatgggttggggcagcttactccagccctggcccaaggaggcccagaagttggaaagagatggaatgtggctgggaacattgcatcccaaagagcttctcagtggaggaggctggggaaggcatgagggggctcagaggctccttgactgggaccaggattgggggccagggcttgagtaggcctctccactctcctccttgggggtccagattccttaggagctttgggatgaggcccaggaggctgcatttttccaggtccttagtcttgccaccacacagatgattctgattcatagccaagatgaggacacactgatgtagctgatctctcatttacagaggaggattctaaagttcagagagggaaaggggcttgcctgaggtcacgtagataatcagcagcacattgaacgctgcactcctgggctcctgtccccagcccccattcagacacgctgactcaggaggtccaggcctctaaggcttctctccctggagtgagggtggaggtgagggagagctggcacaagccctccctctggatcctccactcctggggattatgaagatattctggaaagatttgtgcttcagaggtagactgcagaaagcaaacagtctacccagcagctctgaatgtcacctgccctggggcttacagcactatatgagttcctggcctatcctgcaaatatgcccatgctggccttctaaatagctggtacatccatcaccactgacgggcctggcctggaaacctggtttgtcccctgtcttgatggcctacgagaggccaagttccactgggctgggaaaagtcactttgtctgtcttgttcacctggagcctgacacaccgtaggtactgagtacaaatagcttgatttggctaggcttggctgcagggggacgtgcctaaaagacattccgggcatttgcacttgggaaacttgcctcaccttcaggcttgtggggcctctctatgcccaatgagtccaggcagtcctagcaagtactcaggagagcaggggtgggtgtgacagaggctggctctggattgggggacaacagaaccagagtaactcctcgcctgttgctgctttgcaatgaatttcctttacctttctggaacacaagctgctgtgaaccaaactgatatcaagtgattagctcaccgggccttggttgcttttcaaagatccccttcagccccctgccagagtcactgccccataatcaccatgtcagaagggaccctagggcattcgtgtcctatttatcaatcttcagcaccacctctaagatctctgagagagggtggatcagcctctgtgtaaacaaaaagctgttaggacttgttgcctctcaaggtggactattctgttttctgccaggacactgccattcatgcattgtcagatatttattaaacagcagcaaagtgccagccaatttgtcctggaggaattcatagcctcatggggcaaaagtaaataaacagcttattacaattcaacaa

SEQ ID NO: 2878 - DNA, 2707 bp, Homo sapiens
  source 1..2707: mol_type = genomic DNA
acggttgcgatggcaactggggctcctgccagcgccgtttgggggtttgggaaccgctgctaattgggttcatgtaactggactcagaggatgccccgccatgctgccgtctggccttgggagagccccctccctatggcgctgcacctatcggtattccccgacctccaccccctcggcctggcatgcattcgccaccgccgcgaccagccccctcacctggcacctgggagagccagcccgccaggtcggtgaggctgggaggaccaggagggggtgctgggggtgctgggggtggccgtgttctcgagtgtcccagcatccgcatcacctccatctctcccacgccggagccgccagcagcgctggaggacaaccctgatgcctggggggacggctctcctagagattaccccccaccagaaggctttgggggctacagagaagcagggggccagggtgggggggccttcttcagcccaagccctggcagcagcagcctgtcctcgtggagcttcttctccgatgcctctgacgaggcagccctgtatgcagcctgcgacgaggtggagtctgagctaaatgaggcggcctcccgctttggcctgggctccccgctgccctcgccccgggcctcccctcggccatggacccccgaagatccctggagcctgtatggtccaagccccggaggccgagggccagaggatagctggctactcctcagtgctcctgggcccaccccagcctccccgcggcctgcctctccatgtggcaagcggcgctattccagctcgggaaccccatcttcagcctccccagctctgtcccgccgtggcagcctgggggaagaggggtctgagccacctccaccacccccattgcctctggcccgggacccgggctcccctggtccctttgactatgtgggggccccaccagctgagagcatccctcagaagacacggcggacttccagcgagcaggcagtggctctgcctcggtctgaggagcctgcctcatgcaatgggaagctgcccttgggagcagaggagtctgtggctcctccaggaggttcccggaaggaggtggctggcatggactacctggcagtgccctccccactcgcttggtccaaggcccggattgggggacacagccctatcttcaggacctctgccctacccccactggactggcctctgcccagccaatatgagcagctggagctgaggatcgaggtacagcctagagcccaccaccgggcccactatgagacagaaggcagccgtggagctgtcaaagctgcccctggcggtcaccccgtagtcaagctcctaggctacagtgagaagccactgaccctacagatgttcatcggcactgcagatgaaaggaacctgcggcctcatgccttctatcaggtgcaccgtatcacaggcaagatggtggccacggccagctatgaagccgtagtcagtggcaccaaggtgttggagatgactctgctgcctgagaacaacatggcggccaacattgactgcgcgggaatcctgaagcttcggaattcagacattgagcttcggaagggtgagacggacatcgggcgcaaaaacacacgtgtacggctggtgttccgggtacacgtgccccagggcggcgggaaggtcgtctcagtacaggcagcatcggtgcccatcgagtgctcccagcgctcagcccaggagctgccccaggtggaggcctacagccccagtgcctgctctgtgagaggaggcgaggaactggtactgactggctccaacttcctgccagactccaaggtggtgttcattgagaggggtcctgatgggaagctgcaatgggaggaggaggccacagtgaaccgactgcagagcaacgaggtgacgctgaccctgactgtccccgagtacagcaacaagagggtttcccggccagtccaggtctacttttatgtctccaatgggcggaggaaacgcagtcctacccagagtttcaggtttctgcctgtgatctgcaaagaggagcccctaccggactcatctctgcggggtttcccttcagcatcggcaaccccctttggcactgacatggacttctcaccacccaggcccccctacccctcctatccccatgaagaccctgcttgcgaaactccttacctatcagaaggcttcggctatggcatgccccctctgtacccccagacggggcccccaccatcctacagaccgggcctgcggatgttccctgagactaggggtaccacaggttgtgcccaaccacctgcagtttccttccttccccgccccttccctagtgacccgtatggagggcggggctcctctttctccctggggctgccattctctccgccagccccctttcggccgcctcctcttcctgcatccccaccgcttgaaggccccttcccttcccagagtgatgtgcatcccctacctgctgagggatacaataaggtagggccaggctatggccctggggagggggctccggagcaggagaaatccaggggtggctacagcagcggcttccgagacagtgtccctatccagggtatcacgctggaggaagtgagtgagatcattggccgagacctgagtggcttccctgcacctcctggagaagagcctcctgcctgaaccacgtgaactgtcatcacctg

SEQ ID NO: 2879 - DNA, 3057 bp, Homo sapiens
  source 1..3057: mol_type = genomic DNA
gaagagaggacagagggagggagggtgggggaggacgaggggcgcgtggttttcccatctcatccctggaggaggggctggagcatccccggcagccaatcagggacaggctgggggggggaccgctttgaagaagtttgggggaaaaaagtttggaaaagtttctataataacgagggggcttctggagggaggcggcagcgacggaggagggggcttctcagagaaagggagggagggagccacccgggtgaagatacagcagcctcctgaactcccccctcccacccaggccgggacctgggggctcctgccggatccatgggggcggccagctgcgaggatgaggagctggaatttaagctggtgttcggggaggaaaaggaggcccccccgctgggcgcggggggattgggggaagaactggactcagaggatgccccgccatgctgccgtctggccttgggagagccccctccctatggcgctgcacctatcggtattccccgacctccaccccctcggcctggcatgcattcgccaccgccgcgaccagccccctcacctggcacctgggagagccagcccgccaggtcggtgaggctgggaggaccaggagggggtgctgggggtgctgggggtggccgtgttctcgagtgtcccagcatccgcatcacctccatctctcccacgccggagccgccagcagcgctggaggacaaccctgatgcctggggggacggctctcctagagattaccccccaccagaaggctttgggggctacagagaagcagggggccagggtgggggggccttcttcagcccaagccctggcagcagcagcctgtcctcgtggagcttcttctccgatgcctctgacgaggcagccctgtatgcagcctgcgacgaggtggagtctgagctaaatgaggcggcctcccgctttggcctgggctccccgctgccctcgccccgggcctcccctcggccatggacccccgaagatccctggagcctgtatggtccaagccccggaggccgagggccagaggatagctggctactcctcagtgctcctgggcccaccccagcctccccgcggcctgcctctccatgtggcaagcggcgctattccagctcgggaaccccatcttcagcctccccagctctgtcccgccgtggcagcctgggggaagaggggtctgagccacctccaccacccccattgcctctggcccgggacccgggctcccctggtccctttgactatgtgggggccccaccagctgagagcatccctcagaagacacggcggacttccagcgagcaggcagtggctctgcctcggtctgaggagcctgcctcatgcaatgggaagctgcccttgggagcagaggagtctgtggctcctccaggaggttcccggaaggaggtggctggcatggactacctggcagtgccctccccactcgcttggtccaaggcccggattgggggacacagccctatcttcaggacctctgccctacccccactggactggcctctgcccagccaatatgagcagctggagctgaggatcgaggtacagcctagagcccaccaccgggcccactatgagacagaaggcagccgtggagctgtcaaagctgcccctggcggtcaccccgtagtcaagctcctaggctacagtgagaagccactgaccctacagatgttcatcggcactgcagatgaaaggaacctgcggcctcatgccttctatcaggtgcaccgtatcacaggcaagatggtggccacggccagctatgaagccgtagtcagtggcaccaaggtgttggagatgactctgctgcctgagaacaacatggcggccaacattgactgcgcgggaatcctgaagcttcggaattcagacattgagcttcggaagggtgagacggacatcgggcgcaaaaacacacgtgtacggctggtgttccgggtacacgtgccccagggcggcgggaaggtcgtctcagtacaggcagcatcggtgcccatcgagtgctcccagcgctcagcccaggagctgccccaggtggaggcctacagccccagtgcctgctctgtgagaggaggcgaggaactggtactgactggctccaacttcctgccagactccaaggtggtgttcattgagaggggtcctgatgggaagctgcaatgggaggaggaggccacagtgaaccgactgcagagcaacgaggtgacgctgaccctgactgtccccgagtacagcaacaagagggtttcccggccagtccaggtctacttttatgtctccaatgggcggaggaaacgcagtcctacccagagtttcaggtttctgcctgtgatctgcaaagaggagcccctaccggactcatctctgcggggtttcccttcagcatcggcaaccccctttggcactgacatggacttctcaccacccaggcccccctacccctcctatccccatgaagaccctgcttgcgaaactccttacctatcagaaggcttcggctatggcatgccccctctgtacccccagacggggcccccaccatcctacagaccgggcctgcggatgttccctgagactaggggtaccacagtgagtgagatcattggccgagacctgagtggcttccctgcacctcctggagaagagcctcctgcctgaaccacgtgaactgtcatcacctggcaaccccagccccagcctcagccctgccccctttccctccttcctggagtggtggctacagaagcttggggccaaccctggctcctctttccccagcttctgtctgtctcactgtcttccctcccctcccccagctgaggtgtggccctcaggcctggtgctgccttggagggctgggggaaggagtgtgtggaggagggaggagggtgaagactgaggctaggtgccagaatggactggagtgaaggcgtgtctagagtgtgggctggctgttgtgctggaaagctggggacaggttgatggtaataaactgctcaatgaccagtg

SEQ ID NO: 2880 - DNA, 2955 bp, Homo sapiens
  source 1..2955: mol_type = genomic DNA
atgtgtgagtcgcccccagtccagcccagtgcctcaagaaacacgcctccaggcccagccccagctccagcccctctggacccacctctctcaccttaagacccactggatcgggtaccctcggtcctaggatccaggggccagtgggcaaaggcctggcatgcctgcttcaatctcctccatcttcccaggtccaactctgcttttgtcttgtggctcagaaggtctctttgctgaggggcagggagcatagaaggacttgcggcctggccactcaaggaacatagccatctcacctgcttctctctttccccctctccctctgctcctcttcccattttgacagaactggactcagaggatgccccgccatgctgccgtctggccttgggagagccccctccctatggcgctgcacctatcggtattccccgacctccaccccctcggcctggcatgcattcgccaccgccgcgaccagccccctcacctggcacctgggagagccagcccgccaggtcggtgaggctgggaggaccaggagggggtgctgggggtgctgggggtggccgtgttctcgagtgtcccagcatccgcatcacctccatctctcccacgccggagccgccagcagcgctggaggacaaccctgatgcctggggggacggctctcctagagattaccccccaccagaaggctttgggggctacagagaagcagggggccagggtgggggggccttcttcagcccaagccctggcagcagcagcctgtcctcgtggagcttcttctccgatgcctctgacgaggcagccctgtatgcagcctgcgacgaggtggagtctgagctaaatgaggcggcctcccgctttggcctgggctccccgctgccctcgccccgggcctcccctcggccatggacccccgaagatccctggagcctgtatggtccaagccccggaggccgagggccagaggatagctggctactcctcagtgctcctgggcccaccccagcctccccgcggcctgcctctccatgtggcaagcggcgctattccagctcgggaaccccatcttcagcctccccagctctgtcccgccgtggcagcctgggggaagaggggtctgagccacctccaccacccccattgcctctggcccgggacccgggctcccctggtccctttgactatgtgggggccccaccagctgagagcatccctcagaagacacggcggacttccagcgagcaggcagtggctctgcctcggtctgaggagcctgcctcatgcaatgggaagctgcccttgggagcagaggagtctgtggctcctccaggaggttcccggaaggaggtggctggcatggactacctggcagtgccctccccactcgcttggtccaaggcccggattgggggacacagccctatcttcaggacctctgccctacccccactggactggcctctgcccagccaatatgagcagctggagctgaggatcgaggtacagcctagagcccaccaccgggcccactatgagacagaaggcagccgtggagctgtcaaagctgcccctggcggtcaccccgtagtcaagctcctaggctacagtgagaagccactgaccctacagatgttcatcggcactgcagatgaaaggaacctgcggcctcatgccttctatcaggtgcaccgtatcacaggcaagatggtggccacggccagctatgaagccgtagtcagtggcaccaaggtgttggagatgactctgctgcctgagaacaacatggcggccaacattgactgcgcgggaatcctgaagcttcggaattcagacattgagcttcggaagggtgagacggacatcgggcgcaaaaacacacgtgtacggctggtgttccgggtacacgtgccccagggcggcgggaaggtcgtctcagtacaggcagcatcggtgcccatcgagtgctcccagcgctcagcccaggagctgccccaggtggaggcctacagccccagtgcctgctctgtgagaggaggcgaggaactggtactgactggctccaacttcctgccagactccaaggtggtgttcattgagaggggtcctgatgggaagctgcaatgggaggaggaggccacagtgaaccgactgcagagcaacgaggtgacgctgaccctgactgtccccgagtacagcaacaagagggtttcccggccagtccaggtctacttttatgtctccaatgggcggaggaaacgcagtcctacccagagtttcaggtttctgcctgtgatctgcaaagaggagcccctaccggactcatctctgcggggtttcccttcagcatcggcaaccccctttggcactgacatggacttctcaccacccaggcccccctacccctcctatccccatgaagaccctgcttgcgaaactccttacctatcagaaggcttcggctatggcatgccccctctgtacccccagacggggcccccaccatcctacagaccgggcctgcggatgttccctgagactaggggtaccacaggttgtgcccaaccacctgcagtttccttccttccccgccccttccctagtgacccgtatggagggcggggctcctctttctccctggggctgccattctctccgccagccccctttcggccgcctcctcttcctgcatccccaccgcttgaaggccccttcccttcccagagtgatgtgcatcccctacctgctgagggatacaataaggtagggccaggctatggccctggggagggggctccggagcaggagaaatccaggggtggctacagcagcggcttccgagacagtgtccctatccagggtatcacgctggaggaagtgagtgagatcattggccgagacctgagtggcttccctgcacctcctggagaagagcctcctgcctga

SEQ ID NO: 2881 - DNA, 1382 bp, Homo sapiens
  source 1..1382: mol_type = genomic DNA
gggacaccagcctcatgtctactctggaaaatggtggcccgccagatatgggggagggtttaggctgaggacaaaagtcactgggagttaagttttctctgtattgagttgggccagtctctttggaggctcttctgcctttgcccagcccactttgggctttattccaagaaaaacactgtgaactccaggccatgttttctccacaacgggtgcccagttccccaagggattcccttgcaggatatcctttatctttcaccattcccatcccatggtagactgaaaatctagggatgaataaaggatgagacggtggggatttcaatgaggtggccgctctctccctctgccagctcctaggctacagtgagaagccactgaccctacagatgttcatcggcactgcagatgaaaggaacctgcggcctcatgccttctatcaggtgcaccgtatcacaggcaagatggtggccacggccagctatgaagccgtagtcagtggcaccaaggtgttggagatgactctgctgcctgagaacaacatggcggccaacattgactgcgcgggaatcctgaagcttcggaattcagacattgagcttcggaagggtgagacggacatcgggcgcaaaaacacacgtgtacggctggtgttccgggtacacgtgccccagggcggcgggaaggtcgtctcagtacaggcagcatcggtgcccatcgagtgctcccagcgctcagcccaggagctgccccaggtggaggcctacagccccagtgcctgctctgtgagaggaggcgaggaactggtactgactggctccaacttcctgccagactccaaggtggtgttcattgagaggggtcctgatgggaagctgcaatgggaggaggaggccacagtgaaccgactgcagagcaacgaggtgacgctgaccctgactgtccccgagtacagcaacaagagggtttcccggccagtccaggtctacttttatgtctccaatgggcggaggaaacgcagtcctacccagagtttcaggtttctgcctgtgatctgcaaagaggagcccctaccggactcatctctgcggggtttcccttcagcatcggcaaccccctttggcactgacatggacttctcaccacccaggcccccctacccctcctatccccatgaagaccctgcttgcgaaactccttacctatcagaaggcttcggctatggcatgccccctctgtacccccagacggggcccccaccatcctacagaccgggcctgcggatgttccctgagactaggggtaccacagtgagtgagatcattggccgagacctgagtggcttccctgcacctcctggagaagagcctcctgcctga

SEQ ID NO: 2882 - DNA, 2893 bp, Homo sapiens
  source 1..2893: mol_type = genomic DNA
aaccgtttagttgctgggatggggcggcgttgggggtgcggccctgaaccggagggatttagagactggagacgcggcctctaagagaggttgaaactgtgtgtgtgtgggagaaaatgataaccaccctcccatctctcctacccgccagcctcgccagtatctcccaccgagtcacgaatctcccatctaactccctctcacacaacccaggcctctccaagcctgactttcccggaaactccagtccaggtcttccttcctcctccagcccaggccgggacctgggggctcctgccggatccatgggggcggccagctgcgaggatgaggagctggaatttaagctggtgttcggggaggaaaaggaggcccccccgctgggcgcggggggattgggggaagaactggactcagaggatgccccgccatgctgccgtctggccttgggagagccccctccctatggcgctgcacctatcggtattccccgacctccaccccctcggcctggcatgcattcgccaccgccgcgaccagccccctcacctggcacctgggagagccagcccgccaggtcggtgaggctgggaggaccaggagggggtgctgggggtgctgggggtggccgtgttctcgagtgtcccagcatccgcatcacctccatctctcccacgccggagccgccagcagcgctggaggacaaccctgatgcctggggggacggctctcctagagattaccccccaccagaaggctttgggggctacagagaagcagggggccagggtgggggggccttcttcagcccaagccctggcagcagcagcctgtcctcgtggagcttcttctccgatgcctctgacgaggcagccctgtatgcagcctgcgacgaggtggagtctgagctaaatgaggcggcctcccgctttggcctgggctccccgctgccctcgccccgggcctcccctcggccatggacccccgaagatccctggagcctgtatggtccaagccccggaggccgagggccagaggatagctggctactcctcagtgctcctgggcccaccccagcctccccgcggcctgcctctccatgtggcaagcggcgctattccagctcgggaaccccatcttcagcctccccagctctgtcccgccgtggcagcctgggggaagaggggtctgagccacctccaccacccccattgcctctggcccgggacccgggctcccctggtccctttgactatgtgggggccccaccagctgagagcatccctcagaagacacggcggacttccagcgagcaggcagtggctctgcctcggtctgaggagcctgcctcatgcaatgggaagctgcccttgggagcagaggagtctgtggctcctccaggaggttcccggaaggaggtggctggcatggactacctggcagtgccctccccactcgcttggtccaaggcccggattgggggacacagccctatcttcaggacctctgccctacccccactggactggcctctgcccagccaatatgagcagctggagctgaggatcgaggtacagcctagagcccaccaccgggcccactatgagacagaaggcagccgtggagctgtcaaagctgcccctggcggtcaccccgtagtcaagctcctaggctacagtgagaagccactgaccctacagatgttcatcggcactgcagatgaaaggaacctgcggcctcatgccttctatcaggtgcaccgtatcacaggcaagatggtggccacggccagctatgaagccgtagtcagtggcaccaaggtgttggagatgactctgctgcctgagaacaacatggcggccaacattgactgcgcgggaatcctgaagcttcggaattcagacattgagcttcggaagggtgagacggacatcgggcgcaaaaacacacgtgtacggctggtgttccgggtacacgtgccccagggcggcgggaaggtcgtctcagtacaggcagcatcggtgcccatcgagtgctcccagcgctcagcccaggagctgccccaggtggaggcctacagccccagtgcctgctctgtgagaggaggcgaggaactggtactgactggctccaacttcctgccagactccaaggtggtgttcattgagaggggtcctgatgggaagctgcaatgggaggaggaggccacagtgaaccgactgcagagcaacgaggtgacgctgaccctgactgtccccgagtacagcaacaagagggtttcccggccagtccaggtctacttttatgtctccaatgggcggaggaaacgcagtcctacccagagtttcaggtttctgcctgtgatctgcaaagaggagcccctaccggactcatctctgcggggtttcccttcagcatcggcaaccccctttggcactgacatggacttctcaccacccaggcccccctacccctcctatccccatgaagaccctgcttgcgaaactccttacctatcagaaggcttcggctatggcatgccccctctgtacccccagacggggcccccaccatcctacagaccgggcctgcggatgttccctgagactaggggtaccacagtgagtgagatcattggccgagacctgagtggcttccctgcacctcctggagaagagcctcctgcctgaaccacgtgaactgtcatcacctggcaaccccagccccagcctcagccctgccccctttccctccttcctggagtggtggctacagaagcttggggccaaccctggctcctctttccccagcttctgtctgtctcactgtcttccctcccctcccccagctgaggtgtggccctcaggcctggtgctgccttggagggctgggg

SEQ ID NO: 2883 - DNA, 2631 bp, Homo sapiens
  source 1..2631: mol_type = genomic DNA
atgtgtgagtcgcccccagtccagcccagtgcctcaagaaacacgcctccaggcccagccccagctccagcccctctggacccacctctctcaccttaagacccactggatcgggtaccctcggtcctaggatccaggggccagtgggcaaaggcctggcatgcctgcttcaatctcctccatcttcccaggtccaactctgcttttgtcttgtggctcagaaggtctctttgctgaggggcagggagcatagaaggacttgcggcctggccactcaaggaacatagccatctcacctgcttctctctttccccctctccctctgctcctcttcccattttgacagaactggactcagaggatgccccgccatgctgccgtctggccttgggagagccccctccctatggcgctgcacctatcggtattccccgacctccaccccctcggcctggcatgcattcgccaccgccgcgaccagccccctcacctggcacctgggagagccagcccgccaggtcggtgaggctgggaggaccaggagggggtgctgggggtgctgggggtggccgtgttctcgagtgtcccagcatccgcatcacctccatctctcccacgccggagccgccagcagcgctggaggacaaccctgatgcctggggggacggctctcctagagattaccccccaccagaaggctttgggggctacagagaagcagggggccagggtgggggggccttcttcagcccaagccctggcagcagcagcctgtcctcgtggagcttcttctccgatgcctctgacgaggcagccctgtatgcagcctgcgacgaggtggagtctgagctaaatgaggcggcctcccgctttggcctgggctccccgctgccctcgccccgggcctcccctcggccatggacccccgaagatccctggagcctgtatggtccaagccccggaggccgagggccagaggatagctggctactcctcagtgctcctgggcccaccccagcctccccgcggcctgcctctccatgtggcaagcggcgctattccagctcgggaaccccatcttcagcctccccagctctgtcccgccgtggcagcctgggggaagaggggtctgagccacctccaccacccccattgcctctggcccgggacccgggctcccctggtccctttgactatgtgggggccccaccagctgagagcatccctcagaagacacggcggacttccagcgagcaggcagtggctctgcctcggtctgaggagcctgcctcatgcaatgggaagctgcccttgggagcagaggagtctgtggctcctccaggaggttcccggaaggaggtggctggcatggactacctggcagtgccctccccactcgcttggtccaaggcccggattgggggacacagccctatcttcaggacctctgccctacccccactggactggcctctgcccagccaatatgagcagctggagctgaggatcgaggtacagcctagagcccaccaccgggcccactatgagacagaaggcagccgtggagctgtcaaagctgcccctggcggtcaccccgtagtcaagctcctaggctacagtgagaagccactgaccctacagatgttcatcggcactgcagatgaaaggaacctgcggcctcatgccttctatcaggtgcaccgtatcacaggcaagatggtggccacggccagctatgaagccgtagtcagtggcaccaaggtgttggagatgactctgctgcctgagaacaacatggcggccaacattgactgcgcgggaatcctgaagcttcggaattcagacattgagcttcggaagggtgagacggacatcgggcgcaaaaacacacgtgtacggctggtgttccgggtacacgtgccccagggcggcgggaaggtcgtctcagtacaggcagcatcggtgcccatcgagtgctcccagcgctcagcccaggagctgccccaggtggaggcctacagccccagtgcctgctctgtgagaggaggcgaggaactggtactgactggctccaacttcctgccagactccaaggtggtgttcattgagaggggtcctgatgggaagctgcaatgggaggaggaggccacagtgaaccgactgcagagcaacgaggtgacgctgaccctgactgtccccgagtacagcaacaagagggtttcccggccagtccaggtctacttttatgtctccaatgggcggaggaaacgcagtcctacccagagtttcaggtttctgcctgtgatctgcaaagaggagcccctaccggactcatctctgcggggtttcccttcagcatcggcaaccccctttggcactgacatggacttctcaccacccaggcccccctacccctcctatccccatgaagaccctgcttgcgaaactccttacctatcagaaggcttcggctatggcatgccccctctgtacccccagacggggcccccaccatcctacagaccgggcctgcggatgttccctgagactaggggtaccacagtgagtgagatcattggccgagacctgagtggcttccctgcacctcctggagaagagcctcctgcctga

SEQ ID NO: 2884 - DNA, 559 bp, Homo sapiens
  source 1..559: mol_type = genomic DNA
tttcccatctcatccctggaggaggggctggagcatccccggcagccaatcagggacaggctgggggggggaccgctttgaagaagtttgggggaaaaaagccgggacctgggggctcctgccggatccatgggggcggccagctgcgaggatgaggagctggaatttaagctggtgttcggggaggaaaaggaggcccccccgctgggcgcggggggattgggggaagaactggactcagaggatgccccgccatgctgccgtctggccttgggagagccccctccctatggcgctgcacctatcggtattccccgacctccaccccctcggcctggcatgcattcgccaccgccgcgaccagccccctcacctggcacctgggagagccagcccgccaggtcggtgaggctgggaggaccaggagggggtgctgggggtgctgggggtggccgtgttctcgagtgtcccagcatccgcatcacctccatctctcccacgccggagccgccagcagcgctggaggacaaccctgatgcctggggggacggctctccta

SEQ ID NO: 2885 - DNA, 2506 bp, Homo sapiens
  source 1..2506: mol_type = genomic DNA
gaagaggaggggaacccacagggtccggaggtttcaggcccctagtaaacctggcaaggatttttagaagagccggagtgggatgctatcgggccgggacctgggggctcctgccggatccatgggggcggccagctgcgaggatgaggagctggaatttaagctggtgttcggggaggaaaaggaggcccccccgctgggcgcggggggattgggggaagaactggactcagaggatgccccgccatgctgccgtctggccttgggagagccccctccctatggcgctgcacctatcggtattccccgacctccaccccctcggcctggcatgcattcgccaccgccgcgaccagccccctcacctggcacctgggagagccagcccgccaggtcggtgaggctgggaggaccaggagggggtgctgggggtgctgggggtggccgtgttctcgagtgtcccagcatccgcatcacctccatctctcccacgccggagccgccagcagcgctggaggacaaccctgatgcctggggggacggctctcctagagattaccccccaccagaaggctttgggggctacagagaagcagggggccagggtgggggggccttcttcagcccaagccctggcagcagcagcctgtcctcgtggagcttcttctccgatgcctctgacgaggcagccctgtatgcagcctgcgacgaggtggagtctgagctaaatgaggcggcctcccgctttggcctgggctccccgctgccctcgccccgggcctcccctcggccatggacccccgaagatccctggagcctgtatggtccaagccccggaggccgagggccagaggatagctggctactcctcagtgctcctgggcccaccccagcctccccgcggcctgcctctccatgtggcaagcggcgctattccagctcgggaaccccatcttcagcctccccagctctgtcccgccgtggcagcctgggggaagaggggtctgagccacctccaccacccccattgcctctggcccgggacccgggctcccctggtccctttgactatgtgggggccccaccagctgagagcatccctcagaagacacggcggacttccagcgagcaggcagtggctctgcctcggtctgaggagcctgcctcatgcaatgggaagctgcccttgggagcagaggagtctgtggctcctccaggaggttcccggaaggaggtggctggcatggactacctggcagtgccctccccactcgcttggtccaaggcccggattgggggacacagccctatcttcaggacctctgccctacccccactggactggcctctgcccagccaatatgagcagctggagctgaggatcgaggtacagcctagagcccaccaccgggcccactatgagacagaaggcagccgtggagctgtcaaagctgcccctggcggtcaccccgtagtcaagctcctaggctacagtgagaagccactgaccctacagatgttcatcggcactgcagatgaaaggaacctgcggcctcatgccttctatcaggtgcaccgtatcacaggcaagatggtggccacggccagctatgaagccgtagtcagtggcaccaaggtgttggagatgactctgctgcctgagaacaacatggcggccaacattgactgcgcgggaatcctgaagcttcggaattcagacattgagcttcggaagggtgagacggacatcgggcgcaaaaacacacgtgtacggctggtgttccgggtacacgtgccccagggcggcgggaaggtcgtctcagtacaggcagcatcggtgcccatcgagtgctcccagcgctcagcccaggagctgccccaggtggaggcctacagccccagtgcctgctctgtgagaggaggcgaggaactggtactgactggctccaacttcctgccagactccaaggtggtgttcattgagaggggtcctgatgggaagctgcaatgggaggaggaggccacagtgaaccgactgcagagcaacgaggtgacgctgaccctgactgtccccgagtacagcaacaagagggtttcccggccagtccaggtctacttttatgtctccaatgggcggaggaaacgcagtcctacccagagtttcaggtttctgcctgtgatctgcaaagaggagcccctaccggactcatctctgcggggtttcccttcagcatcggcaaccccctttggcactgacatggacttctcaccacccaggcccccctacccctcctatccccatgaagaccctgcttgcgaaactccttacctatcagaaggcttcggctatggcatgccccctctgtacccccagacggggcccccaccatcctacagaccgggcctgcggatgttccctgagactaggggtaccacagtgagtgagatcattggccgagacctgagtggcttccctgcacctcctggagaagagcctcctgcctga

SEQ ID NO: 2886 - DNA, 4364 bp, Homo sapiens
  source 1..4364: mol_type = genomic DNA
gggacaccagcctcatgtctactctggaaaatggtggcccgccagatatgggggagggtttaggctgaggacaaaagtcactgggagttaagttttctctgtattgagttgggccagtctctttggaggctcttctgcctttgcccagcccactttgggctttattccaagaaaaacactgtgaactccaggccatgttttctccacaacgggtgcccagttccccaagggattcccttgcaggatatcctttatctttcaccattcccatcccatggtagactgaaaatctagggatgaataaaggatgagacggtggggatttcaatgaggtggccgctctctccctctgccagctcctaggctacagtgagaagccactgaccctacagatgttcatcggcactgcagatgaaaggaacctgcggcctcatgccttctatcaggtgcaccgtatcacaggcaagatggtggccacggccagctatgaagccgtagtcagtggcaccaaggtgttggagatgactctgctgcctgagaacaacatggcggccaacattgactgcgcgggaatcctgaagcttcggaattcagacattgagcttcggaagggtgagacggacatcgggcgcaaaaacacacgtgtacggctggtgttccgggtacacgtgccccagggcggcgggaaggtcgtctcagtacaggcagcatcggtgcccatcgagtgctcccagcgctcagcccaggagctgccccaggtggaggcctacagccccagtgcctgctctgtgagaggaggcgaggaactggtactgactggctccaacttcctgccagactccaaggtggtgttcattgagaggggtcctgatgggaagctgcaatgggaggaggaggccacagtgaaccgactgcagagcaacgaggtgacgctgaccctgactgtccccgagtacagcaacaagagggtttcccggccagtccaggtctacttttatgtctccaatgggcggaggaaacgcagtcctacccagagtttcaggtttctgcctgtgatctgcaaagaggagcccctaccggactcatctctgcggggtttcccttcagcatcggcaaccccctttggcactgacatggacttctcaccacccaggcccccctacccctcctatccccatgaagaccctgcttgcgaaactccttacctatcagaaggcttcggctatggcatgccccctctgtacccccagacggggcccccaccatcctacagaccgggcctgcggatgttccctgagactaggggtaccacaggttgtgcccaaccacctgcagtttccttccttccccgccccttccctagtgacccgtatggagggcggggctcctctttctccctggggctgccattctctccgccagccccctttcggccgcctcctcttcctgcatccccaccgcttgaaggccccttcccttcccagagtgatgtgcatcccctacctgctgagggatacaataaggtagggccaggctatggccctggggagggggctccggagcaggagaaatccaggggtggctacagcagcggcttccgagacagtgtccctatccagggtatcacgctggaggaaggtgggtgtgggactgggggctgtgagtgtgagtgtgtgcaagagattgctctgcatgtttgctgagggctggagctgggcttttcagagatcgggcatccctggtctctcagggccagttggaggttcccaggaggcatgttcttgatgcctgtggctgcctgaatccaattaactgaattctgaagagtgcatggggtaactgtctcagcctttctcctgtctctgcctctgtcctctgctccaaatcataaaatctcagagctagaagcactttcaagatcattccatccagcgcattcaatttgcaagtttaggcgttgagttccagagagggatggtagcttgctgaggtcccagtcaagcacacttgccattgcctcagctttcccctaaacacggtgtctgtggtcagggttggtgaggaggagctttcctgttttgcctctccttcttcccattggctacacccatctctggccctgctgataccgattcccctgacatttcaggctaagccagcaggaaagggctaggacgggtgcctgggagcccacatggagggagttgggcaagatttgattcggagcaggtgtcaagacgtgttggggaaactgaggcccagtggaatagaagccagtagaggaggaatctagaggcctcctagattaagacctgcctggaatggattgggggtgggtctttggaaaaggaggggacccacctctagcccagtctctcaactgcccctcctttacagtgagtgagatcattggccgagacctgagtggcttccctgcacctcctggagaagagcctcctgcctgaaccacgtgaactgtcatcacctggcaaccccagccccagcctcagccctgccccctttccctccttcctggagtggtggctacagaagcttggggccaaccctggctcctctttccccagcttctgtctgtctcactgtcttccctcccctcccccagctgaggtgtggccctcaggcctggtgctgccttggagggctgggggaaggagtgtgtggaggagggaggagggtgaagactgaggctaggtgccagaatggactggagtgaaggcgtgtctagagtgtgggctggctgttgtgctggaaagctggggacaggttgatggtaataaactgctcaatgaccagtgcttcaggctccagagctctttggagagatgggttggggcagcttactccagccctggcccaaggaggcccagaagttggaaagagatggaatgtggctgggaacattgcatcccaaagagcttctcagtggaggaggctggggaaggcatgagggggctcagaggctccttgactgggaccaggattgggggccagggcttgagtaggcctctccactctcctccttgggggtccagattccttaggagctttgggatgaggcccaggaggctgcatttttccaggtccttagtcttgccaccacacagatgattctgattcatagccaagatgaggacacactgatgtagctgatctctcatttacagaggaggattctaaagttcagagagggaaaggggcttgcctgaggtcacgtagataatcagcagcacattgaacgctgcactcctgggctcctgtccccagcccccattcagacacgctgactcaggaggtccaggcctctaaggcttctctccctggagtgagggtggaggtgagggagagctggcacaagccctccctctggatcctccactcctggggattatgaagatattctggaaagatttgtgcttcagaggtagactgcagaaagcaaacagtctacccagcagctctgaatgtcacctgccctggggcttacagcactatatgagttcctggcctatcctgcaaatatgcccatgctggccttctaaatagctggtacatccatcaccactgacgggcctggcctggaaacctggtttgtcccctgtcttgatggcctacgagaggccaagttccactgggctgggaaaagtcactttgtctgtcttgttcacctggagcctgacacaccgtaggtactgagtacaaatagcttgatttggctaggcttggctgcagggggacgtgcctaaaagacattccgggcatttgcacttgggaaacttgcctcaccttcaggcttgtggggcctctctatgcccaatgagtccaggcagtcctagcaagtactcaggagagcaggggtgggtgtgacagaggctggctctggattgggggacaacagaaccagagtaactcctcgcctgttgctgctttgcaatgaatttcctttacctttctggaacacaagctgctgtgaaccaaactgatatcaagtgattagctcaccgggccttggttgcttttcaaagatccccttcagccccctgccagagtcactgccccataatcaccatgtcagaagggaccctagggcattcgtgtcctatttatcaatcttcagcaccacctctaagatctctgagagagggtggatcagcctctgtgtaaacaaaaagctgttaggacttgttgcctctcaaggtggactattctgttttctgccaggacactgccattcatgcattgtcagatatttattaaacagcagcaaagtgccagccaatttgtcctggaggaattcatagcctcatggggcaaaagtaaataaacagcttattacaattcaacaa

SEQ ID NO: 2887 - DNA, 2235 bp, Homo sapiens
  source 1..2235: mol_type = genomic DNA
ctgtttaaccctctctctgctctgggagcggccccttacatggtgtatgtgactccatggatattactggtttatttgtgtgtctactgctgaggagggctccctcagagccctgtggcagttttcccaaagagggtggggacagaggaggccacccctccatgcccagcccagccagtcctcttccttgcactgctctgcagcccagcgctcagcccaggagctgccccaggtggaggcctacagccccagtgcctgctctgtgagaggaggcgaggaactggtactgactggctccaacttcctgccagactccaaggtggtgttcattgagaggggtcctgatgggaagctgcaatgggaggaggaggccacagtgaaccgactgcagagcaacgaggtgacgctgaccctgactgtccccgagtacagcaacaagagggtttcccggccagtccaggtctacttttatgtctccaatgggcggaggaaacgcagtcctacccagagtttcaggtttctgcctgtgatctgcaaagaggagcccctaccggactcatctctgcggggtttcccttcagcatcggcaaccccctttggcactgacatggacttctcaccacccaggcccccctacccctcctatccccatgaagaccctgcttgcgaaactccttacctatcagaaggcttcggctatggcatgccccctctgtacccccagacggggcccccaccatcctacagaccgggcctgcggatgttccctgagactaggggtaccacaggttgtgcccaaccacctgcagtttccttccttccccgccccttccctagtgacccgtatggagggcggggctcctctttctccctggggctgccattctctccgccagccccctttcggccgcctcctcttcctgcatccccaccgcttgaaggccccttcccttcccagagtgatgtgcatcccctacctgctgagggatacaataaggtagggccaggctatggccctggggagggggctccggagcaggagaaatccaggggtggctacagcagcggcttccgagacagtgtccctatccagggtatcacgctggaggaaggtgggtgtgggactgggggctgtgagtgtgagtgtgtgcaagagattgctctgcatgtttgctgagggctggagctgggcttttcagagatcgggcatccctggtctctcagggccagttggaggttcccaggaggcatgttcttgatgcctgtggctgcctgaatccaattaactgaattctgaagagtgcatggggtaactgtctcagcctttctcctgtctctgcctctgtcctctgctccaaatcataaaatctcagagctagaagcactttcaagatcattccatccagcgcattcaatttgcaagtttaggcgttgagttccagagagggatggtagcttgctgaggtcccagtcaagcacacttgccattgcctcagctttcccctaaacacggtgtctgtggtcagggttggtgaggaggagctttcctgttttgcctctccttcttcccattggctacacccatctctggccctgctgataccgattcccctgacatttcaggctaagccagcaggaaagggctaggacgggtgcctgggagcccacatggagggagttgggcaagatttgattcggagcaggtgtcaagacgtgttggggaaactgaggcccagtggaatagaagccagtagaggaggaatctagaggcctcctagattaagacctgcctggaatggattgggggtgggtctttggaaaaggaggggacccacctctagcccagtctctcaactgcccctcctttacagtgagtgagatcattggccgagacctgagtggcttccctgcacctcctggagaagagcctcctgcctgaaccacgtgaactgtcatcacctggcaaccccagccccagcctcagccctgccccctttccctccttcctggagtggtggctacagaagcttggggccaaccctggctcctctttccccagcttctgtctgtctcactgtcttccctcccctcccccagctgaggtgtggccctcaggcctggtgctgccttggagggctgggggaaggagtgtgtggaggagggaggagggtgaagactgaggctaggtgccagaatggactggagtgaaggcgtgtctagagtgtgggctggctg

SEQ ID NO: 2888 - DNA, 3169 bp, Homo sapiens
  source 1..3169: mol_type = genomic DNA
cccagtccagcccagtgcctcaagaaacacgcctccaggcccagccccagctccagcccctctggacccacctctctcaccttaagacccactggatcgggtaccctcggtcctaggatccaggggccagtgggcaaaggcctggcatgcctgcttcaatctcctccatcttcccaggtccaactctgcttttgtcttgtggctcagaagaactggactcagaggatgccccgccatgctgccgtctggccttgggagagccccctccctatggcgctgcacctatcggtattccccgacctccaccccctcggcctggcatgcattcgccaccgccgcgaccagccccctcacctggcacctgggagagccagcccgccaggtcggtgaggctgggaggaccaggagggggtgctgggggtgctgggggtggccgtgttctcgagtgtcccagcatccgcatcacctccatctctcccacgccggagccgccagcagcgctggaggacaaccctgatgcctggggggacggctctcctagagattaccccccaccagaaggctttgggggctacagagaagcagggggccagggtgggggggccttcttcagcccaagccctggcagcagcagcctgtcctcgtggagcttcttctccgatgcctctgacgaggcagccctgtatgcagcctgcgacgaggtggagtctgagctaaatgaggcggcctcccgctttggcctgggctccccgctgccctcgccccgggcctcccctcggccatggacccccgaagatccctggagcctgtatggtccaagccccggaggccgagggccagaggatagctggctactcctcagtgctcctgggcccaccccagcctccccgcggcctgcctctccatgtggcaagcggcgctattccagctcgggaaccccatcttcagcctccccagctctgtcccgccgtggcagcctgggggaagaggggtctgagccacctccaccacccccattgcctctggcccgggacccgggctcccctggtccctttgactatgtgggggccccaccagctgagagcatccctcagaagacacggcggacttccagcgagcaggcagtggctctgcctcggtctgaggagcctgcctcatgcaatgggaagctgcccttgggagcagaggagtctgtggctcctccaggaggttcccggaaggaggtggctggcatggactacctggcagtgccctccccactcgcttggtccaaggcccggattgggggacacagccctatcttcaggacctctgccctacccccactggactggcctctgcccagccaatatgagcagctggagctgaggatcgaggtacagcctagagcccaccaccgggcccactatgagacagaaggcagccgtggagctgtcaaagctgcccctggcggtcaccccgtagtcaagctcctaggctacagtgagaagccactgaccctacagatgttcatcggcactgcagatgaaaggaacctgcggcctcatgccttctatcaggtgcaccgtatcacaggcaagatggtggccacggccagctatgaagccgtagtcagtggcaccaaggtgttggagatgactctgctgcctgagaacaacatggcggccaacattgactgcgcgggaatcctgaagcttcggaattcagacattgagcttcggaagggtgagacggacatcgggcgcaaaaacacacgtgtacggctggtgttccgggtacacgtgccccagggcggcgggaaggtcgtctcagtacaggcagcatcggtgcccatcgagtgctcccagcgctcagcccaggagctgccccaggtggaggcctacagccccagtgcctgctctgtgagaggaggcgaggaactggtactgactggctccaacttcctgccagactccaaggtggtgttcattgagaggggtcctgatgggaagctgcaatgggaggaggaggccacagtgaaccgactgcagagcaacgaggtgacgctgaccctgactgtccccgagtacagcaacaagagggtttcccggccagtccaggtctacttttatgtctccaatgggcggaggaaacgcagtcctacccagagtttcaggtttctgcctgtgatctgcaaagaggagcccctaccggactcatctctgcggggtttcccttcagcatcggcaaccccctttggcactgacatggacttctcaccacccaggcccccctacccctcctatccccatgaagaccctgcttgcgaaactccttacctatcagaaggcttcggctatggcatgccccctctgtacccccagacggggcccccaccatcctacagaccgggcctgcggatgttccctgagactaggggtaccacaggttgtgcccaaccacctgcagtttccttccttccccgccccttccctagtgacccgtatggagggcggggctcctctttctccctggggctgccattctctccgccagccccctttcggccgcctcctcttcctgcatccccaccgcttgaaggccccttcccttcccagagtgatgtgcatcccctacctgctgagggatacaataaggtagggccaggctatggccctggggagggggctccggagcaggagaaatccaggggtggctacagcagcggcttccgagacagtgtccctatccagggtatcacgctggaggaagtgagtgagatcattggccgagacctgagtggcttccctgcacctcctggagaagagcctcctgcctgaaccacgtgaactgtcatcacctggcaaccccagccccagcctcagccctgccccctttccctccttcctggagtggtggctacagaagcttggggccaaccctggctcctctttccccagcttctgtctgtctcactgtcttccctcccctcccccagctgaggtgtggccctcaggcctggtgctgccttggagggctgggggaaggagtgtgtggaggagggaggagggtgaagactgaggctaggtgccagaatggactggagtgaaggcgtgtctagagtgtgggctggctgttgtgctggaaagctggggacaggttgatggtaataaactgctcaatgaccagt

SEQ ID NO: 2889 - DNA, 2830 bp, Homo sapiens
  source 1..2830: mol_type = genomic DNA
gaagaggaggggaacccacagggtccggaggtttcaggcccctagtaaacctggcaaggatttttagaagagccggagtgggatgctatcgggccgggacctgggggctcctgccggatccatgggggcggccagctgcgaggatgaggagctggaatttaagctggtgttcggggaggaaaaggaggcccccccgctgggcgcggggggattgggggaagaactggactcagaggatgccccgccatgctgccgtctggccttgggagagccccctccctatggcgctgcacctatcggtattccccgacctccaccccctcggcctggcatgcattcgccaccgccgcgaccagccccctcacctggcacctgggagagccagcccgccaggtcggtgaggctgggaggaccaggagggggtgctgggggtgctgggggtggccgtgttctcgagtgtcccagcatccgcatcacctccatctctcccacgccggagccgccagcagcgctggaggacaaccctgatgcctggggggacggctctcctagagattaccccccaccagaaggctttgggggctacagagaagcagggggccagggtgggggggccttcttcagcccaagccctggcagcagcagcctgtcctcgtggagcttcttctccgatgcctctgacgaggcagccctgtatgcagcctgcgacgaggtggagtctgagctaaatgaggcggcctcccgctttggcctgggctccccgctgccctcgccccgggcctcccctcggccatggacccccgaagatccctggagcctgtatggtccaagccccggaggccgagggccagaggatagctggctactcctcagtgctcctgggcccaccccagcctccccgcggcctgcctctccatgtggcaagcggcgctattccagctcgggaaccccatcttcagcctccccagctctgtcccgccgtggcagcctgggggaagaggggtctgagccacctccaccacccccattgcctctggcccgggacccgggctcccctggtccctttgactatgtgggggccccaccagctgagagcatccctcagaagacacggcggacttccagcgagcaggcagtggctctgcctcggtctgaggagcctgcctcatgcaatgggaagctgcccttgggagcagaggagtctgtggctcctccaggaggttcccggaaggaggtggctggcatggactacctggcagtgccctccccactcgcttggtccaaggcccggattgggggacacagccctatcttcaggacctctgccctacccccactggactggcctctgcccagccaatatgagcagctggagctgaggatcgaggtacagcctagagcccaccaccgggcccactatgagacagaaggcagccgtggagctgtcaaagctgcccctggcggtcaccccgtagtcaagctcctaggctacagtgagaagccactgaccctacagatgttcatcggcactgcagatgaaaggaacctgcggcctcatgccttctatcaggtgcaccgtatcacaggcaagatggtggccacggccagctatgaagccgtagtcagtggcaccaaggtgttggagatgactctgctgcctgagaacaacatggcggccaacattgactgcgcgggaatcctgaagcttcggaattcagacattgagcttcggaagggtgagacggacatcgggcgcaaaaacacacgtgtacggctggtgttccgggtacacgtgccccagggcggcgggaaggtcgtctcagtacaggcagcatcggtgcccatcgagtgctcccagcgctcagcccaggagctgccccaggtggaggcctacagccccagtgcctgctctgtgagaggaggcgaggaactggtactgactggctccaacttcctgccagactccaaggtggtgttcattgagaggggtcctgatgggaagctgcaatgggaggaggaggccacagtgaaccgactgcagagcaacgaggtgacgctgaccctgactgtccccgagtacagcaacaagagggtttcccggccagtccaggtctacttttatgtctccaatgggcggaggaaacgcagtcctacccagagtttcaggtttctgcctgtgatctgcaaagaggagcccctaccggactcatctctgcggggtttcccttcagcatcggcaaccccctttggcactgacatggacttctcaccacccaggcccccctacccctcctatccccatgaagaccctgcttgcgaaactccttacctatcagaaggcttcggctatggcatgccccctctgtacccccagacggggcccccaccatcctacagaccgggcctgcggatgttccctgagactaggggtaccacaggttgtgcccaaccacctgcagtttccttccttccccgccccttccctagtgacccgtatggagggcggggctcctctttctccctggggctgccattctctccgccagccccctttcggccgcctcctcttcctgcatccccaccgcttgaaggccccttcccttcccagagtgatgtgcatcccctacctgctgagggatacaataaggtagggccaggctatggccctggggagggggctccggagcaggagaaatccaggggtggctacagcagcggcttccgagacagtgtccctatccagggtatcacgctggaggaagtgagtgagatcattggccgagacctgagtggcttccctgcacctcctggagaagagcctcctgcctga

SEQ ID NO: 2890 - DNA, 1476 bp, Homo sapiens
  source 1..1476: mol_type = genomic DNA
ctgtttaaccctctctctgctctgggagcggccccttacatggtgtatgtgactccatggatattactggtttatttgtgtgtctactgctgaggagggctccctcagagccctgtggcagttttcccaaagagggtggggacagaggaggccacccctccatgcccagcccagccagtcctcttccttgcactgctctgcagcccagcgctcagcccaggagctgccccaggtggaggcctacagccccagtgcctgctctgtgagaggaggcgaggaactggtactgactggctccaacttcctgccagactccaaggtggtgttcattgagaggggtcctgatgggaagctgcaatgggaggaggaggccacagtgaaccgactgcagagcaacgaggtgacgctgaccctgactgtccccgagtacagcaacaagagggtttcccggccagtccaggtctacttttatgtctccaatgggcggaggaaacgcagtcctacccagagtttcaggtttctgcctgtgatctgcaaagaggagcccctaccggactcatctctgcggggtttcccttcagcatcggcaaccccctttggcactgacatggacttctcaccacccaggcccccctacccctcctatccccatgaagaccctgcttgcgaaactccttacctatcagaaggcttcggctatggcatgccccctctgtacccccagacggggcccccaccatcctacagaccgggcctgcggatgttccctgagactaggggtaccacaggttgtgcccaaccacctgcagtttccttccttccccgccccttccctagtgacccgtatggagggcggggctcctctttctccctggggctgccattctctccgccagccccctttcggccgcctcctcttcctgcatccccaccgcttgaaggccccttcccttcccagagtgatgtgcatcccctacctgctgagggatacaataaggtagggccaggctatggccctggggagggggctccggagcaggagaaatccaggggtggctacagcagcggcttccgagacagtgtccctatccagggtatcacgctggaggaagtgagtgagatcattggccgagacctgagtggcttccctgcacctcctggagaagagcctcctgcctgaaccacgtgaactgtcatcacctggcaaccccagccccagcctcagccctgccccctttccctccttcctggagtggtggctacagaagcttggggccaaccctggctcctctttccccagcttctgtctgtctcactgtcttccctcccctcccccagctgaggtgtggccctcaggcctggtgctgccttggagggctgggggaaggagtgtgtggaggagggaggagggtgaagactgaggctaggtgccagaatggactggagtgaaggcgtgtctagagtgtgggctggctg

SEQ ID NO: 2891 - DNA, 2509 bp, Homo sapiens
  source 1..2509: mol_type = genomic DNA
atgtgtgagtcgcccccagtccagcccagtgcctcaagaaacacgcctccaggcccagccccagctccagcccctctggacccacctctctcaccttaagacccactggatcgggtaccctcggtcctaggatccaggggccagtgggcaaaggcctggcatgcctgcttcaatctcctccatcttcccaggtccaactctgcttttgtcttgtggctcagaagaactggactcagaggatgccccgccatgctgccgtctggccttgggagagccccctccctatggcgctgcacctatcggtattccccgacctccaccccctcggcctggcatgcattcgccaccgccgcgaccagccccctcacctggcacctgggagagccagcccgccaggtcggtgaggctgggaggaccaggagggggtgctgggggtgctgggggtggccgtgttctcgagtgtcccagcatccgcatcacctccatctctcccacgccggagccgccagcagcgctggaggacaaccctgatgcctggggggacggctctcctagagattaccccccaccagaaggctttgggggctacagagaagcagggggccagggtgggggggccttcttcagcccaagccctggcagcagcagcctgtcctcgtggagcttcttctccgatgcctctgacgaggcagccctgtatgcagcctgcgacgaggtggagtctgagctaaatgaggcggcctcccgctttggcctgggctccccgctgccctcgccccgggcctcccctcggccatggacccccgaagatccctggagcctgtatggtccaagccccggaggccgagggccagaggatagctggctactcctcagtgctcctgggcccaccccagcctccccgcggcctgcctctccatgtggcaagcggcgctattccagctcgggaaccccatcttcagcctccccagctctgtcccgccgtggcagcctgggggaagaggggtctgagccacctccaccacccccattgcctctggcccgggacccgggctcccctggtccctttgactatgtgggggccccaccagctgagagcatccctcagaagacacggcggacttccagcgagcaggcagtggctctgcctcggtctgaggagcctgcctcatgcaatgggaagctgcccttgggagcagaggagtctgtggctcctccaggaggttcccggaaggaggtggctggcatggactacctggcagtgccctccccactcgcttggtccaaggcccggattgggggacacagccctatcttcaggacctctgccctacccccactggactggcctctgcccagccaatatgagcagctggagctgaggatcgaggtacagcctagagcccaccaccgggcccactatgagacagaaggcagccgtggagctgtcaaagctgcccctggcggtcaccccgtagtcaagctcctaggctacagtgagaagccactgaccctacagatgttcatcggcactgcagatgaaaggaacctgcggcctcatgccttctatcaggtgcaccgtatcacaggcaagatggtggccacggccagctatgaagccgtagtcagtggcaccaaggtgttggagatgactctgctgcctgagaacaacatggcggccaacattgactgcgcgggaatcctgaagcttcggaattcagacattgagcttcggaagggtgagacggacatcgggcgcaaaaacacacgtgtacggctggtgttccgggtacacgtgccccagggcggcgggaaggtcgtctcagtacaggcagcatcggtgcccatcgagtgctcccagcgctcagcccaggagctgccccaggtggaggcctacagccccagtgcctgctctgtgagaggaggcgaggaactggtactgactggctccaacttcctgccagactccaaggtggtgttcattgagaggggtcctgatgggaagctgcaatgggaggaggaggccacagtgaaccgactgcagagcaacgaggtgacgctgaccctgactgtccccgagtacagcaacaagagggtttcccggccagtccaggtctacttttatgtctccaatgggcggaggaaacgcagtcctacccagagtttcaggtttctgcctgtgatctgcaaagaggagcccctaccggactcatctctgcggggtttcccttcagcatcggcaaccccctttggcactgacatggacttctcaccacccaggcccccctacccctcctatccccatgaagaccctgcttgcgaaactccttacctatcagaaggcttcggctatggcatgccccctctgtacccccagacggggcccccaccatcctacagaccgggcctgcggatgttccctgagactaggggtaccacagtgagtgagatcattggccgagacctgagtggcttccctgcacctcctggagaagagcctcctgcctga

SEQ ID NO: 2892 - DNA, 2924 bp, Homo sapiens
  source 1..2924: mol_type = genomic DNA
atctacgcccatcaagggctgtgggcctagggacagttctcaaagcctctttggctcggactgctcccagaggcatccaggctggctaagcgttcttcatctttgggggtcctggaggaatggctgatggaggcgctgattcggcagcgcaaagacttccagaaggcccgggcagagtagccccaggccgggacctgggggctcctgccggatccatgggggcggccagctgcgaggatgaggagctggaatttaagctggtgttcggggaggaaaaggaggcccccccgctgggcgcggggggattgggggaagaactggactcagaggatgccccgccatgctgccgtctggccttgggagagccccctccctatggcgctgcacctatcggtattccccgacctccaccccctcggcctggcatgcattcgccaccgccgcgaccagccccctcacctggcacctgggagagccagcccgccaggtcggtgaggctgggaggaccaggagggggtgctgggggtgctgggggtggccgtgttctcgagtgtcccagcatccgcatcacctccatctctcccacgccggagccgccagcagcgctggaggacaaccctgatgcctggggggacggctctcctagagattaccccccaccagaaggctttgggggctacagagaagcagggggccagggtgggggggccttcttcagcccaagccctggcagcagcagcctgtcctcgtggagcttcttctccgatgcctctgacgaggcagccctgtatgcagcctgcgacgaggtggagtctgagctaaatgaggcggcctcccgctttggcctgggctccccgctgccctcgccccgggcctcccctcggccatggacccccgaagatccctggagcctgtatggtccaagccccggaggccgagggccagaggatagctggctactcctcagtgctcctgggcccaccccagcctccccgcggcctgcctctccatgtggcaagcggcgctattccagctcgggaaccccatcttcagcctccccagctctgtcccgccgtggcagcctgggggaagaggggtctgagccacctccaccacccccattgcctctggcccgggacccgggctcccctggtccctttgactatgtgggggccccaccagctgagagcatccctcagaagacacggcggacttccagcgagcaggcagtggctctgcctcggtctgaggagcctgcctcatgcaatgggaagctgcccttgggagcagaggagtctgtggctcctccaggaggttcccggaaggaggtggctggcatggactacctggcagtgccctccccactcgcttggtccaaggcccggattgggggacacagccctatcttcaggacctctgccctacccccactggactggcctctgcccagccaatatgagcagctggagctgaggatcgaggtacagcctagagcccaccaccgggcccactatgagacagaaggcagccgtggagctgtcaaagctgcccctggcggtcaccccgtagtcaagctcctaggctacagtgagaagccactgaccctacagatgttcatcggcactgcagatgaaaggaacctgcggcctcatgccttctatcaggtgcaccgtatcacaggcaagatggtggccacggccagctatgaagccgtagtcagtggcaccaaggtgttggagatgactctgctgcctgagaacaacatggcggccaacattgactgcgcgggaatcctgaagcttcggaattcagacattgagcttcggaagggtgagacggacatcgggcgcaaaaacacacgtgtacggctggtgttccgggtacacgtgccccagggcggcgggaaggtcgtctcagtacaggcagcatcggtgcccatcgagtgctcccagcgctcagcccaggagctgccccaggtggaggcctacagccccagtgcctgctctgtgagaggaggcgaggaactggtactgactggctccaacttcctgccagactccaaggtggtgttcattgagaggggtcctgatgggaagctgcaatgggaggaggaggccacagtgaaccgactgcagagcaacgaggtgacgctgaccctgactgtccccgagtacagcaacaagagggtttcccggccagtccaggtctacttttatgtctccaatgggcggaggaaacgcagtcctacccagagtttcaggtttctgcctgtgatctgcaaagaggagcccctaccggactcatctctgcggggtttcccttcagcatcggcaaccccctttggcactgacatggacttctcaccacccaggcccccctacccctcctatccccatgaagaccctgcttgcgaaactccttacctatcagaaggcttcggctatggcatgccccctctgtacccccagacggggcccccaccatcctacagaccgggcctgcggatgttccctgagactaggggtaccacaggttgtgcccaaccacctgcagtttccttccttccccgccccttccctagtgacccgtatggagggcggggctcctctttctccctggggctgccattctctccgccagccccctttcggccgcctcctcttcctgcatccccaccgcttgaaggccccttcccttcccagagtgatgtgcatcccctacctgctgagggatacaataaggtagggccaggctatggccctggggagggggctccggagcaggagaaatccaggggtggctacagcagcggcttccgagacagtgtccctatccagggtatcacgctggaggaagtgagtgagatcattggccgagacctgagtggcttccctgcacctcctggagaagagcctcctgcctga

SEQ ID NO: 2893 - DNA, 2025 bp, Homo sapiens
  source 1..2025: mol_type = genomic DNA
gggacaccagcctcatgtctactctggaaaatggtggcccgccagatatgggggagggtttaggctgaggacaaaagtcactgggagttaagttttctctgtattgagttgggccagtctctttggaggctcttctgcctttgcccagcccactttgggctttattccaagaaaaacactgtgaactccaggccatgttttctccacaacgggtgcccagttccccaagggattcccttgcaggatatcctttatctttcaccattcccatcccatggtagactgaaaatctagggatgaataaaggatgagacggtggggatttcaatgaggtggccgctctctccctctgccagctcctaggctacagtgagaagccactgaccctacagatgttcatcggcactgcagatgaaaggaacctgcggcctcatgccttctatcaggtgcaccgtatcacaggcaagatggtggccacggccagctatgaagccgtagtcagtggcaccaaggtgttggagatgactctgctgcctgagaacaacatggcggccaacattgactgcgcgggaatcctgaagcttcggaattcagacattgagcttcggaagggtgagacggacatcgggcgcaaaaacacacgtgtacggctggtgttccgggtacacgtgccccagggcggcgggaaggtcgtctcagtacaggcagcatcggtgcccatcgagtgctcccagcgctcagcccaggagctgccccaggtggaggcctacagccccagtgcctgctctgtgagaggaggcgaggaactggtactgactggctccaacttcctgccagactccaaggtggtgttcattgagaggggtcctgatgggaagctgcaatgggaggaggaggccacagtgaaccgactgcagagcaacgaggtgacgctgaccctgactgtccccgagtacagcaacaagagggtttcccggccagtccaggtctacttttatgtctccaatgggcggaggaaacgcagtcctacccagagtttcaggtttctgcctgtgatctgcaaagaggagcccctaccggactcatctctgcggggtttcccttcagcatcggcaaccccctttggcactgacatggacttctcaccacccaggcccccctacccctcctatccccatgaagaccctgcttgcgaaactccttacctatcagaaggcttcggctatggcatgccccctctgtacccccagacggggcccccaccatcctacagaccgggcctgcggatgttccctgagactaggggtaccacaggttgtgcccaaccacctgcagtttccttccttccccgccccttccctagtgacccgtatggagggcggggctcctctttctccctggggctgccattctctccgccagccccctttcggccgcctcctcttcctgcatccccaccgcttgaaggccccttcccttcccagagtgatgtgcatcccctacctgctgagggatacaataaggtagggccaggctatggccctggggagggggctccggagcaggagaaatccaggggtggctacagcagcggcttccgagacagtgtccctatccagggtatcacgctggaggaagtgagtgagatcattggccgagacctgagtggcttccctgcacctcctggagaagagcctcctgcctgaaccacgtgaactgtcatcacctggcaaccccagccccagcctcagccctgccccctttccctccttcctggagtggtggctacagaagcttggggccaaccctggctcctctttccccagcttctgtctgtctcactgtcttccctcccctcccccagctgaggtgtggccctcaggcctggtgctgccttggagggctgggggaaggagtgtgtggaggagggaggagggtgaagactgaggctaggtgccagaatggactggagtgaaggcgtgtctagagtgtgggctggctgttgtgctggaaagctggggacag

SEQ ID NO: 2894 - DNA, 5613 bp, Homo sapiens
  source 1..5613: mol_type = genomic DNA
atgtgtgagtcgcccccagtccagcccagtgcctcaagaaacacgcctccaggcccagccccagctccagcccctctggacccacctctctcaccttaagacccactggatcgggtaccctcggtcctaggatccaggggccagtgggcaaaggcctggcatgcctgcttcaatctcctccatcttcccaggtccaactctgcttttgtcttgtggctcagaaggtctctttgctgaggggcagggagcatagaaggacttgcggcctggccactcaaggaacatagccatctcacctgcttctctctttccccctctccctctgctcctcttcccattttgacagaactggactcagaggatgccccgccatgctgccgtctggccttgggagagccccctccctatggcgctgcacctatcggtattccccgacctccaccccctcggcctggcatgcattcgccaccgccgcgaccagccccctcacctggcacctgggagagccagcccgccaggtcggtgaggctgggaggaccaggagggggtgctgggggtgctgggggtggccgtgttctcgagtgtcccagcatccgcatcacctccatctctcccacgccggagccgccagcagcgctggaggacaaccctgatgcctggggggacggctctcctagagattaccccccaccagaaggctttgggggctacagagaagcagggggccagggtgggggggccttcttcagcccaagccctggcagcagcagcctgtcctcgtggagcttcttctccgatgcctctgacgaggcagccctgtatgcagcctgcgacgaggtggagtctgagctaaatgaggcggcctcccgctttggcctgggctccccgctgccctcgccccgggcctcccctcggccatggacccccgaagatccctggagcctgtatggtccaagccccggaggccgagggccagaggatagctggctactcctcagtgctcctgggcccaccccagcctccccgcggcctgcctctccatgtggcaagcggcgctattccagctcgggaaccccatcttcagcctccccagctctgtcccgccgtggcagcctgggggaagaggggtctgagccacctccaccacccccattgcctctggcccgggacccgggctcccctggtccctttgactatgtgggggccccaccagctgagagcatccctcagaagacacggcggacttccagcgagcaggcagtggctctgcctcggtctgaggagcctgcctcatgcaatgggaagctgcccttgggagcagaggagtctgtggctcctccaggaggttcccggaaggaggtggctggcatggactacctggcagtgccctccccactcgcttggtccaaggcccggattgggggacacagccctatcttcaggacctctgccctacccccactggactggcctctgcccagccaatatgagcagctggagctgaggatcgaggtacagcctagagcccaccaccgggcccactatgagacagaaggcagccgtggagctgtcaaagctgcccctggcggtcaccccgtagtcaagctcctaggctacagtgagaagccactgaccctacagatgttcatcggcactgcagatgaaaggaacctgcggcctcatgccttctatcaggtgcaccgtatcacaggcaagatggtggccacggccagctatgaagccgtagtcagtggcaccaaggtgttggagatgactctgctgcctgagaacaacatggcggccaacattgactgcgcgggaatcctgaagcttcggaattcagacattgagcttcggaagggtgagacggacatcgggcgcaaaaacacacgtgtacggctggtgttccgggtacacgtgccccagggcggcgggaaggtcgtctcagtacaggcagcatcggtgcccatcgagtgctcccagcgctcagcccaggagctgccccaggtggaggcctacagccccagtgcctgctctgtgagaggaggcgaggaactggtactgactggctccaacttcctgccagactccaaggtggtgttcattgagaggggtcctgatgggaagctgcaatgggaggaggaggccacagtgaaccgactgcagagcaacgaggtgacgctgaccctgactgtccccgagtacagcaacaagagggtttcccggccagtccaggtctacttttatgtctccaatgggcggaggaaacgcagtcctacccagagtttcaggtttctgcctgtgatctgcaaagaggagcccctaccggactcatctctgcggggtttcccttcagcatcggcaaccccctttggcactgacatggacttctcaccacccaggcccccctacccctcctatccccatgaagaccctgcttgcgaaactccttacctatcagaaggcttcggctatggcatgccccctctgtacccccagacggggcccccaccatcctacagaccgggcctgcggatgttccctgagactaggggtaccacaggttgtgcccaaccacctgcagtttccttccttccccgccccttccctagtgacccgtatggagggcggggctcctctttctccctggggctgccattctctccgccagccccctttcggccgcctcctcttcctgcatccccaccgcttgaaggccccttcccttcccagagtgatgtgcatcccctacctgctgagggatacaataaggtagggccaggctatggccctggggagggggctccggagcaggagaaatccaggggtggctacagcagcggcttccgagacagtgtccctatccagggtatcacgctggaggaaggtgggtgtgggactgggggctgtgagtgtgagtgtgtgcaagagattgctctgcatgtttgctgagggctggagctgggcttttcagagatcgggcatccctggtctctcagggccagttggaggttcccaggaggcatgttcttgatgcctgtggctgcctgaatccaattaactgaattctgaagagtgcatggggtaactgtctcagcctttctcctgtctctgcctctgtcctctgctccaaatcataaaatctcagagctagaagcactttcaagatcattccatccagcgcattcaatttgcaagtttaggcgttgagttccagagagggatggtagcttgctgaggtcccagtcaagcacacttgccattgcctcagctttcccctaaacacggtgtctgtggtcagggttggtgaggaggagctttcctgttttgcctctccttcttcccattggctacacccatctctggccctgctgataccgattcccctgacatttcaggctaagccagcaggaaagggctaggacgggtgcctgggagcccacatggagggagttgggcaagatttgattcggagcaggtgtcaagacgtgttggggaaactgaggcccagtggaatagaagccagtagaggaggaatctagaggcctcctagattaagacctgcctggaatggattgggggtgggtctttggaaaaggaggggacccacctctagcccagtctctcaactgcccctcctttacagtgagtgagatcattggccgagacctgagtggcttccctgcacctcctggagaagagcctcctgcctgaaccacgtgaactgtcatcacctggcaaccccagccccagcctcagccctgccccctttccctccttcctggagtggtggctacagaagcttggggccaaccctggctcctctttccccagcttctgtctgtctcactgtcttccctcccctcccccagctgaggtgtggccctcaggcctggtgctgccttggagggctgggggaaggagtgtgtggaggagggaggagggtgaagactgaggctaggtgccagaatggactggagtgaaggcgtgtctagagtgtgggctggctgttgtgctggaaagctggggacaggttgatggtaataaactgctcaatgaccagtgcttcaggctccagagctctttggagagatgggttggggcagcttactccagccctggcccaaggaggcccagaagttggaaagagatggaatgtggctgggaacattgcatcccaaagagcttctcagtggaggaggctggggaaggcatgagggggctcagaggctccttgactgggaccaggattgggggccagggcttgagtaggcctctccactctcctccttgggggtccagattccttaggagctttgggatgaggcccaggaggctgcatttttccaggtccttagtcttgccaccacacagatgattctgattcatagccaagatgaggacacactgatgtagctgatctctcatttacagaggaggattctaaagttcagagagggaaaggggcttgcctgaggtcacgtagataatcagcagcacattgaacgctgcactcctgggctcctgtccccagcccccattcagacacgctgactcaggaggtccaggcctctaaggcttctctccctggagtgagggtggaggtgagggagagctggcacaagccctccctctggatcctccactcctggggattatgaagatattctggaaagatttgtgcttcagaggtagactgcagaaagcaaacagtctacccagcagctctgaatgtcacctgccctggggcttacagcactatatgagttcctggcctatcctgcaaatatgcccatgctggccttctaaatagctggtacatccatcaccactgacgggcctggcctggaaacctggtttgtcccctgtcttgatggcctacgagaggccaagttccactgggctgggaaaagtcactttgtctgtcttgttcacctggagcctgacacaccgtaggtactgagtacaaatagcttgatttggctaggcttggctgcagggggacgtgcctaaaagacattccgggcatttgcacttgggaaacttgcctcaccttcaggcttgtggggcctctctatgcccaatgagtccaggcagtcctagcaagtactcaggagagcaggggtgggtgtgacagaggctggctctggattgggggacaacagaaccagagtaactcctcgcctgttgctgctttgcaatgaatttcctttacctttctggaacacaagctgctgtgaaccaaactgatatcaagtgattagctcaccgggccttggttgcttttcaaagatccccttcagccccctgccagagtcactgccccataatcaccatgtcagaagggaccctagggcattcgtgtcctatttatcaatcttcagcaccacctctaagatctctgagagagggtggatcagcctctgtgtaaacaaaaagctgttaggacttgttgcctctcaaggtggactattctgttttctgccaggacactgccattcatgcattgtcagatatttattaaacagcagcaaagtgccagccaatttgtcctggaggaattcatagcctcatggggcaaaagtaaataaacagcttattacaattcaacaa

SEQ ID NO: 2895 - DNA, 856 bp, Homo sapiens
  source 1..856: mol_type = genomic DNA
ctgtttaaccctctctctgctctgggagcggccccttacatggtgtatgtgactccatggatattactggtttatttgtgtgtctactgctgaggagggctccctcagagccctgtggcagttttcccaaagagggtggggacagaggaggccacccctccatgcccagcccagccagtcctcttccttgcactgctctgcagcccagcgctcagcccaggagctgccccaggtggaggcctacagccccagtgcctgctctgtgagaggaggcgaggaactggtactgactggctccaacttcctgccagactccaaggtggtgttcattgagaggggtcctgatgggaagctgcaatgggaggaggaggccacagtgaaccgactgcagagcaacgaggtgacgctgaccctgactgtccccgagtacagcaacaagagggtttcccggccagtccaggtctacttttatgtctccaatgggcggaggaaacgcagtcctacccagagtttcaggtttctgcctgtgatctgcaaagaggagcccctaccggactcatctctgcggggtttcccttcagcatcggcaaccccctttggcactgacatggacttctcaccacccaggcccccctacccctcctatccccatgaagaccctgcttgcgaaactccttacctatcagaaggcttcggctatggcatgccccctctgtacccccagacggggcccccaccatcctacagaccgggcctgcggatgttccctgagactaggggtaccacagtgagtgagatcattggccgagacctgagtggcttccctgcacctcctggagaagagcctcctgcctga

SEQ ID NO: 2896 - DNA, 4085 bp, Homo sapiens
  source 1..4085: mol_type = genomic DNA
gtgagagagtgagcgagacagaaagagagagaagtgcaccagcgagccggggcaggaagaggaggtttcgccaccggagcggcccggcgacgcgctgacagcttcccctgcccttcccgtcggtcgggccgccagccgccgcagccctcggcctgcacgcagccaccggccccgctcccggagcccagcgccgccgaggccgcagccgcccggccagtaaggcggcgccgccgcccggccaccgcgcgccctgcgcttccctccgcccgcgctgcggccatggcgcggcgctgactggcctggcccggccccgccgcgctcccgctcgccccgacccgcactcgggcccgcccgggctccggcctgccgccgcctcttccttctccagccggcaggcccgcgccgcttaggagggagagcccacccgcgccaggaggccgaacgcggactcgccacccggcttcagaatggcagaagatgatccatatttgggaaggcctgaacaaatgtttcatttggatccttctttgactcatacaatatttaatccagaagtatttcaaccacagatggcactgccaacagcagatggcccataccttcaaatattagagcaacctaaacagagaggatttcgtttccgttatgtatgtgaaggcccatcccatggtggactacctggtgcctctagtgaaaagaacaagaagtcttaccctcaggtcaaaatctgcaactatgtgggaccagcaaaggttattgttcagttggtcacaaatggaaaaaatatccacctgcatgcccacagcctggtgggaaaacactgtgaggatgggatctgcactgtaactgctggacccaaggacatggtggtcggcttcgcaaacctgggtatacttcatgtgacaaagaaaaaagtatttgaaacactggaagcacgaatgacagaggcgtgtataaggggctataatcctggactcttggtgcaccctgaccttgcctatttgcaagcagaaggtggaggggaccggcagctgggagatcgggaaaaagagctaatccgccaagcagctctgcagcagaccaaggagatggacctcagcgtggtgcggctcatgtttacagcttttcttccggatagcactggcagcttcacaaggcgcctggaacccgtggtatcagacgccatctatgacagtaaagcccccaatgcatccaacttgaaaattgtaagaatggacaggacagctggatgtgtgactggaggggaggaaatttatcttctttgtgacaaagttcagaaagatgacatccagattcgattttatgaagaggaagaaaatggtggagtctgggaaggatttggagatttttcccccacagatgttcatagacaatttgccattgtcttcaaaactccaaagtataaagatattaatattacaaaaccagcctctgtgtttgtccagcttcggaggaaatctgacttggaaactagtgaaccaaaacctttcctctactatcctgaaatcaaagataaagaagaagtgcagaggaaacgtcagaagctcatgcccaatttttcggatagtttcggcggtggtagtggtgctggagctggaggcggaggcatgtttggtagtggcggtggaggagggggcactggaagtacaggtccagggtatagcttcccacactatggatttcctacttatggtgggattactttccatcctggaactactaaatctaatgctgggatgaagcatggaaccatggacactgaatctaaaaaggaccctgaaggttgtgacaaaagtgatgacaaaaacactgtaaacctctttgggaaagttattgaaaccacagagcaagatcaggagcccagcgaggccaccgttgggaatggtgaggtcactctaacgtatgcaacaggaacaaaagaagagagtgctggagttcaggataacctctttctagagaaggctatgcagcttgcaaagaggcatgccaatgcccttttcgactacgcggtgacaggagacgtgaagatgctgctggccgtccagcgccatctcactgctgtgcaggatgagaatggggacagtgtcttacacttagcaatcatccaccttcattctcaacttgtgagggatctactagaagtcacatctggtttgatttctgatgacattatcaacatgagaaatgatctgtaccagacgcccttgcacttggcagtgatcactaagcaggaagatgtggtggaggatttgctgagggctggggccgacctgagccttctggaccgcttgggtaactctgttttgcacctagctgccaaagaaggacatgataaagttctcagtatcttactcaagcacaaaaaggcagcactacttcttgaccaccccaacggggacggtctgaatgccattcatctagccatgatgagcaatagcctgccatgtttgctgctgctggtggccgctggggctgacgtcaatgctcaggagcagaagtccgggcgcacagcactgcacctggctgtggagcacgacaacatctcattggcaggctgcctgctcctggagggtgatgcccatgtggacagtactacctacgatggaaccacacccctgcatatagcagctgggagagggtccaccaggctggcagctcttctcaaagcagcaggagcagatcccctggtggagaactttgagcctctctatgacctggatgactcttgggaaaatgcaggagaggatgaaggagttgtgcctggaaccacgcctctagatatggccaccagctggcaggtatttgacatattaaatgggaaaccatatgagccagagtttacatctgatgatttactagcacaaggagacatgaaacagctggctgaagatgtgaagctgcagctgtataagttactagaaattcctgatccagacaaaaactgggctactctggcgcagaaattaggtctggggatacttaataatgccttccggctgagtcctgctccttccaaaacacttatggacaactatgaggtctctgggggtacagtcagagagctggtggaggccctgagacaaatgggctacaccgaagcaattgaagtgatccaggcagcctccagcccagtgaagaccacctctcaggcccactcgctgcctctctcgcctgcctccacaaggcagcaaatagacgagctccgagacagtgacagtgtctgcgacagcggcgtggagacatccttccgcaaactcagctttaccgagtctctgaccagtggtgcctcactgctaactctcaacaaaatgccccatgattatgggcaggaaggacctctagaaggcaaaatttagcctgctgacaatttcccacaccgtgtaaaccaaagccctaaaattccactgcgttgtccacaagacagaagctgaagtgcatccaaaggtgctcagagagccggcccgcctgaatcattctcgatttaactcgagaccttttcaacttggcttcctttcttggttcataaatgaattttagtttggttcacttacagatagtatctagcaatcacaacactggctgagcggatgcatctggggatgaggttgcttactaagctttgccagctgctgctggatcacagctgctttctgttgtcattgctgttgtccctctgctacgttcctattgtcattaaaggtatcacggtcgccacctggcattccttctgaccacagcatcattttgcattcaaattaagggttaagaaaagagatattttaaaatgagagtcacttgatgtgccattttaaaaaaaaaggcatattgctttttctaatgtggttatttctctgatttgcaaaaaaaaaaaaaaaaaaaatacttgtcaatatttaaacatggttacaatcattgctgaaaatggtattttcccccttttctgcattttgctattgtaaatatgttttttagatcaaatactttaaaggaaaaaatgttggatttataaatgctattttttattttacttttataataaaaggaaaagcaaattgatgacctca

SEQ ID NO: 2897 - DNA, 3693 bp, Homo sapiens
  source 1..3693: mol_type = genomic DNA
gagagagtgagcgagacagaaagagagagaagtgcaccagcgagccggggcaggaagaggaggtttcgccaccggagcggcccggcgacgcgctgacagcttcccctgcccttcccgtcggtcgggccgccagccgccgcagccctcggcctgcacgcagccaccggccccgctcccggagcccagcgccgccgaggccgcagccgcccggccagtaaggcggcgccgccgcccggccaccgcgcgccctgcgcttccctccgcccgcgctgcggccatggcgcggcgctgactggcctggcccggccccgccgcgctcccgctcgccccgacccgcactcgggcccgcccgggctccggcctgccgccgcctcttccttctccagccggcaggcccgcgccgcttaggagggagagcccacccgcgccaggaggccgaacgcggactcgccacccggcttcagaatggcagaagatgatccatatttgggaaggcctgaacaaatgtttcatttggatccttctttgactcatacaatatttaatccagaagtatttcaaccacagatggcactgccaacagatggcccataccttcaaatattagagcaacctaaacagagaggatttcgtttccgttatgtatgtgaaggcccatcccatggtggactacctggtgcctctagtgaaaagaacaagaagtcttaccctcaggtcaaaatctgcaactatgtgggaccagcaaaggttattgttcagttggtcacaaatggaaaaaatatccacctgcatgcccacagcctggtgggaaaacactgtgaggatgggatctgcactgtaactgctggacccaaggacatggtggtcggcttcgcaaacctgggtatacttcatgtgacaaagaaaaaagtatttgaaacactggaagcacgaatgacagaggcgtgtataaggggctataatcctggactcttggtgcaccctgaccttgcctatttgcaagcagaaggtggaggggaccggcagctgggagatcgggaaaaagagctaatccgccaagcagctctgcagcagaccaaggagatggacctcagcgtggtgcggctcatgtttacagcttttcttccggatagcactggcagcttcacaaggcgcctggaacccgtggtatcagacgccatctatgacagtaaagcccccaatgcatccaacttgaaaattgtaagaatggacaggacagctggatgtgtgactggaggggaggaaatttatcttctttgtgacaaagttcagaaagatgacatccagattcgattttatgaagaggaagaaaatggtggagtctgggaaggatttggagatttttcccccacagatgttcatagacaatttgccattgtcttcaaaactccaaagtataaagatattaatattacaaaaccagcctctgtgtttgtccagcttcggaggaaatctgacttggaaactagtgaaccaaaacctttcctctactatcctgaaatcaaagataaagaagaagtgcagaggaaacgtcagaagctcatgcccaatttttcggatagtttcggcggtggtagtggtgctggagctggaggcggaggcatgtttggtagtggcggtggaggagggggcactggaagtacaggtccagggtatagcttcccacactatggatttcctacttatggtgggattactttccatcctggaactactaaatctaatgctgggatgaagcatggaaccatggacactgaatctaaaaaggaccctgaaggttgtgacaaaagtgatgacaaaaacactgtaaacctctttgggaaagttattgaaaccacagagcaagatcaggagcccagcgaggccaccgttgggaatggtgaggtcactctaacgtatgcaacaggaacaaaagaagagagtgctggagttcaggataacctctttctagagaaggctatgcagcttgcaaagaggcatgccaatgcccttttcgactacgcggtgacaggagacgtgaagatgctgctggccgtccagcgccatctcactgctgtgcaggatgagaatggggacagtgtcttacacttagcaatcatccaccttcattctcaacttgtgagggatctactagaagtcacatctggtttgatttctgatgacattatcaacatgagaaatgatctgtaccagacgcccttgcacttggcagtgatcactaagcaggaagatgtggtggaggatttgctgagggctggggccgacctgagccttctggaccgcttgggtaactctgttttgcacctagctgccaaagaaggacatgataaagttctcagtatcttactcaagcacaaaaaggcagcactacttcttgaccaccccaacggggacggtctgaatgccattcatctagccatgatgagcaatagcctgccatgtttgctgctgctggtggccgctggggctgacgtcaatgctcaggagcagaagtccgggcgcacagcactgcacctggctgtggagcacgacaacatctcattggcaggctgcctgctcctggagggtgatgcccatgtggacagtactacctacgatggaaccacacccctgcatatagcagctgggagagggtccaccaggctggcagctcttctcaaagcagcaggagcagatcccctggtggagaactttgagcctctctatgacctggatgactcttgggaaaatgcaggagaggatgaaggagttgtgcctggaaccacgcctctagatatggccaccagctggcaggtatttgacatattaaatgggaaaccatatgagccagagtttacatctgatgatttactagcacaaggagacatgaaacagctggctgaagatgtgaagctgcagctgtataagttactagaaattcctgatccagacaaaaactgggctactctggcgcagaaattaggtctggggatacttaataatgccttccggctgagtcctgctccttccaaaacacttatggacaactatgaggtctctgggggtacagtcagagagctggtggaggccctgagacaaatgggctacaccgaagcaattgaagtgatccaggcagcctccagcccagtgaagaccacctctcaggcccactcgctgcctctctcgcctgcctccacaaggcagcaaatagacgagctccgagacagtgacagtgtctgcgacagcggcgtggagacatccttccgcaaactcagctttaccgagtctctgaccagtggtgcctcactgctaactctcaacaaaatgccccatgattatgggcaggaaggacctctagaaggcaaaatttagcctgctgacaatttcccacaccgtgtaaaccaaagccctaaaattccactgcgttgtccacaagacagaagctgaagtgcatccaaaggtgctcagagagccggcccgcctgaatcattctcgatttaactcgagaccttttcaacttggcttcctttcttggttcataaatgaattttagtttggttcacttacagatagtatctagcaatcacaacactggctgagcggatgcatctggggatgaggttgcttactaagctttgccagctgctgctggatcacagctgctttctgttgtcattgctgttgtccctctgc

SEQ ID NO: 2898 - DNA, 3707 bp, Homo sapiens
  source 1..3707: mol_type = genomic DNA
gctaaccgctgggctagaccgtgggaggaggttgacagtagctgagaggcacatgggattagcgacagcggggaaagacacatccggacctcgcaggggctagtcggccgaagggccgcggccgcccggcggtcatttctcttcacgtccctccgcggggcgggaacgcgaaccggaggggaactcttacaaacttttaaaatccccaaccccagccccacctgggggatggtgagaaggttggagtgcgctgcggcgcggaggagagagcttcagaatggcagaagatgatccatatttgggaaggcctgaacaaatgtttcatttggatccttctttgactcatacaatatttaatccagaagtatttcaaccacagatggcactgccaacagatggcccataccttcaaatattagagcaacctaaacagagaggatttcgtttccgttatgtatgtgaaggcccatcccatggtggactacctggtgcctctagtgaaaagaacaagaagtcttaccctcaggtcaaaatctgcaactatgtgggaccagcaaaggttattgttcagttggtcacaaatggaaaaaatatccacctgcatgcccacagcctggtgggaaaacactgtgaggatgggatctgcactgtaactgctggacccaaggacatggtggtcggcttcgcaaacctgggtatacttcatgtgacaaagaaaaaagtatttgaaacactggaagcacgaatgacagaggcgtgtataaggggctataatcctggactcttggtgcaccctgaccttgcctatttgcaagcagaaggtggaggggaccggcagctgggagatcgggaaaaagagctaatccgccaagcagctctgcagcagaccaaggagatggacctcagcgtggtgcggctcatgtttacagcttttcttccggatagcactggcagcttcacaaggcgcctggaacccgtggtatcagacgccatctatgacagtaaagcccccaatgcatccaacttgaaaattgtaagaatggacaggacagctggatgtgtgactggaggggaggaaatttatcttctttgtgacaaagttcagaaagatgacatccagattcgattttatgaagaggaagaaaatggtggagtctgggaaggatttggagatttttcccccacagatgttcatagacaatttgccattgtcttcaaaactccaaagtataaagatattaatattacaaaaccagcctctgtgtttgtccagcttcggaggaaatctgacttggaaactagtgaaccaaaacctttcctctactatcctgaaatcaaagataaagaagaagtgcagaggaaacgtcagaagctcatgcccaatttttcggatagtttcggcggtggtagtggtgctggagctggaggcggaggcatgtttggtagtggcggtggaggagggggcactggaagtacaggtccagggtatagcttcccacactatggatttcctacttatggtgggattactttccatcctggaactactaaatctaatgctgggatgaagcatggaaccatggacactgaatctaaaaaggaccctgaaggttgtgacaaaagtgatgacaaaaacactgtaaacctctttgggaaagttattgaaaccacagagcaagatcaggagcccagcgaggccaccgttgggaatggtgaggtcactctaacgtatgcaacaggaacaaaagaagagagtgctggagttcaggataacctctttctagagaaggctatgcagcttgcaaagaggcatgccaatgcccttttcgactacgcggtgacaggagacgtgaagatgctgctggccgtccagcgccatctcactgctgtgcaggatgagaatggggacagtgtcttacacttagcaatcatccaccttcattctcaacttgtgagggatctactagaagtcacatctggtttgatttctgatgacattatcaacatgagaaatgatctgtaccagacgcccttgcacttggcagtgatcactaagcaggaagatgtggtggaggatttgctgagggctggggccgacctgagccttctggaccgcttgggtaactctgttttgcacctagctgccaaagaaggacatgataaagttctcagtatcttactcaagcacaaaaaggcagcactacttcttgaccaccccaacggggacggtctgaatgccattcatctagccatgatgagcaatagcctgccatgtttgctgctgctggtggccgctggggctgacgtcaatgctcaggagcagaagtccgggcgcacagcactgcacctggctgtggagcacgacaacatctcattggcaggctgcctgctcctggagggtgatgcccatgtggacagtactacctacgatggaaccacacccctgcatatagcagctgggagagggtccaccaggctggcagctcttctcaaagcagcaggagcagatcccctggtggagaactttgagcctctctatgacctggatgactcttgggaaaatgcaggagaggatgaaggagttgtgcctggaaccacgcctctagatatggccaccagctggcaggtatttgacatattaaatgggaaaccatatgagccagagtttacatctgatgatttactagcacaaggagacatgaaacagctggctgaagatgtgaagctgcagctgtataagttactagaaattcctgatccagacaaaaactgggctactctggcgcagaaattaggtctggggatacttaataatgccttccggctgagtcctgctccttccaaaacacttatggacaactatgaggtctctgggggtacagtcagagagctggtggaggccctgagacaaatgggctacaccgaagcaattgaagtgatccaggcagcctccagcccagtgaagaccacctctcaggcccactcgctgcctctctcgcctgcctccacaaggcagcaaatagacgagctccgagacagtgacagtgtctgcgacagcggcgtggagacatccttccgcaaactcagctttaccgagtctctgaccagtggtgcctcactgctaactctcaacaaaatgccccatgattatgggcaggaaggacctctagaaggcaaaatttagcctgctgacaatttcccacaccgtgtaaaccaaagccctaaaattccactgcgttgtccacaagacagaagctgaagtgcatccaaaggtgctcagagagccggcccgcctgaatcattctcgatttaactcgagaccttttcaacttggcttcctttcttggttcataaatgaattttagtttggttcacttacagatagtatctagcaatcacaacactggctgagcggatgcatctggggatgaggttgcttactaagctttgccagctgctgctggatcacagctgctttctgttgtcattgctgttgtccctctgctacgttcctattgtcattaaaggtatcacggtcgccacctggcattccttctgaccacagcatcattttgcattcaaattaagggttaagaaaagagatattttaaaatgagagtcacttgatgtgccattttaaaaaaaaaggcatattgctttttctaatgtggttatttctctgatttgcaaaaaaaaaaaaaaaaaaa

SEQ ID NO: 2899 - DNA, 557 bp, Homo sapiens
  source 1..557: mol_type = genomic DNA
ggacaaacttgaacacaaaggaacacacgttatatgtacatttaatactggaaccgaaaagctgcttgcagtgaaaagcaaaccacttctaaactctttgagactttttaaagaagcttcagaatggcagaagatgatccatatttgggaaggcctgaacaaatgtttcatttggatccttctttgactcatacaatatttaatccagaagtatttcaaccacagatggcactgccaacagcagatggcccataccttcaaatattagagcaacctaaacagagaggatttcgtttccgttatgtatgtgaaggcccatcccatggtggactacctggtgcctctagtgaaaagaacaagaagtcttaccctcaggtcaaaatctgcaactatgtgggaccagcaaaggttattgttcagttggtcacaaatggaaaaaatatccacctgcatgcccacagcctggtgggaaaacactgtgaggatgggatctgcactgtaactgctggacccaaggacatggtggtcggcttcgcaaacctgggtatacttcatgt

SEQ ID NO: 2900 - DNA, 609 bp, Homo sapiens
  source 1..609: mol_type = genomic DNA
ggccgccagccgccgcagccctcggcctgcacgcagccaccggccccgctcccggagcccagcgccgccgaggccgcagccgcccggccagtaaggcggcgccgccgcccggccaccgcgcgccctgcgcttccctccgcccgcgctgcggccatggcgcggcgctgactggcctggcccggccccgccgcgctcccgctcgccccgacccgcactcgggcccgcccgggctccggcctgccgccgcctcttccttctccagccggcaggcccgcgccgcttaggagggagagcccacccgcgccaggaggccgaacgcggactcgccacccggaaggaacacaacgtcctacatcaagaaaaaagacagaagcatatcttggagatatgaaaagaaccaccagcttcagaatggcagaagatgatccatatttgggaaggcctgaacaaatgtttcatttggatccttctttgactcatacaatatttaatccagaagtatttcaaccacagatggcactgccaacagatggcccataccttcaaatattagagcaacctaaacagagaggatttcgtttccgttatgtatgtgaaggcccatcccat

SEQ ID NO: 2901 - DNA, 1558 bp, Homo sapiens
  source 1..1558: mol_type = genomic DNA
gcagtccgtgccgccgtcccgcccgccagcgccccagcgaggaagcagcgcgcagcccgcggcccagcgcacccgcagcagcgcccgcagctcgtccgcgccatgttccaggcggccgagcgcccccaggagtgggccatggagggcccccgcgacgggctgaagaaggagcggctactggacgaccgccacgacagcggcctggactccatgaaagacgaggagtacgagcagatggtcaaggagctgcaggagatccgcctcgagccgcaggaggtgccgcgcggctcggagccctggaagcagcagctcaccgaggacggggactcgttcctgcacttggccatcatccatgaagaaaaggcactgaccatggaagtgatccgccaggtgaagggagacctggccttcctcaacttccagaacaacctgcagcagactccactccacttggctgtgatcaccaaccagccagaaattgctgaggcacttctgggagctggctgtgatcctgagctccgagactttcgaggaaatacccccctacaccttgcctgtgagcagggctgcctggccagcgtgggagtcctgactcagtcctgcaccaccccgcacctccactccatcctgaaggctaccaactacaatggccacacgtgtctacacttagcctctatccatggctacctgggcatcgtggagcttttggtgtccttgggtgctgatgtcaatgctcaggagccctgtaatggccggactgcccttcacctcgcagtggacctgcaaaatcctgacctggtgtcactcctgttgaagtgtggggctgatgtcaacagagttacctaccagggctattctccctaccagctcacctggggccgcccaagcacccggatacagcagcagctgggccagctgacactagaaaaccttcagatgctgccagagagtgaggatgaggagagctatgacacagagtcagagttcacggagttcacagaggacgagctgccctatgatgactgtgtgtttggaggccagcgtctgacgttatgagcgcaaaggggctgaaagaacatggacttgtatatttgtacaaaaaaaaagttttatttttctaaaaaaagaaaaaagaagaaaaaatttaaagggtgtacttatatccacactgcacactgcctggcccaaaacgtcttattgtggtaggatcagccctcattttgttgcttttgtgaactttttgtaggggacgagaaagatcattgaaattctgagaaaacttcttttaaacctcacctttgtggggtttttggagaaggttatcaaaaatttcatggaaggaccacattttatatttattgtgcttcgagtgactgaccccagtggtatcctgtgacatgtaacagccaggagtgttaagcgttcagtgatgtggggtgaaaagttactacctgtcaaggtttgtgttaccctcctgtaaatggtgtacataatgtattgttggtaattattttggtacttttatgatgtatatttattaaacagatttttacaaatg

SEQ ID NO: 2902 - DNA, 7556 bp, Homo sapiens
  source 1..7556: mol_type = genomic DNA
gcaggcgccttcgcggaccgagcctgacggagccggaggctgggagccgcggcggcctggggaagtgtttggattgtgagctatttcagaactgttctcaggactcattattttaacatttgggagaaacacagccagaagatgcacacttgactgaaggaggacagggaatctgaagactccggatgacatcagagctacttttcaacagccttctcaattttctttctcagaaagcagaggctcagagcttggagacagacgaacactgatatttgcatttaatggggaacaaaagatgaagaaggaaaaggaatatattcactaaggattctatctgcttactgctacagacctatgtgttaaggaattcttctcctcctccttgcgtagaagttgatcagcactgtggtcagactgcatttatcttgtcattgccagaagaaatcttggacagaatgtaacagtacgtctctctctgattgcgatggaaggtgataaactgatactcctttattaaagttacatcgcactcaccacagaaaaccattctttaaagtgaatagaaaccaagcccttgtgaacacttctattgaacatgactcatggagaagagcttggctctgatgtgcaccaggattctattgttttaacttacctagaaggattactaatgcatcaggcagcagggggatcaggtactgccgttgacaaaaagtctgctgggcataatgaagaggatcagaactttaacatttctggcagtgcatttcccacctgtcaaagtaatggtccagttctcaatacacatacatatcaggggtctggcatgctgcacctcaaaaaagccagactgttgcagtcttctgaggactggaatgcagcaaagcggaagaggctgtctgattctatcatgaatttaaacgtaaagaaggaagctttgctagctggcatggttgacagtgtgcctaaaggcaaacaggatagcacattactggcctctttgcttcagtcattcagctctaggctgcagactgttgctctgtcacaacaaatcaggcagagcctcaaggagcaaggatatgccctcagtcatgattctttaaaagtggagaaggatttaaggtgctatggtgttgcatcaagtcacttaaaaactttgttgaagaaaagtaaagttaaagatcaaaagcctgatacgaatcttcctgatgtgactaaaaacctcatcagagataggtttgcagagtctcctcatcatgttggacaaagtggaacaaaggtcatgagtgaaccgttgtcatgtgctgcaagattacaggctgttgcaagcatggtggaaaaaagggctagtcctgccacctcacctaaacctagtgttgcttgtagccagttagcattacttctgtcaagcgaagcccatttgcagcagtattctcgagaacacgctttaaaaacgcaaaatgcaaatcaagcagcaagtgaaagacttgctgctatggccagattgcaagaaaatggccagaaggatgttggcagttaccagctcccaaaaggaatgtcaagccatcttaatggtcaggcaagaacatcatcaagcaaactgatggctagcaaaagtagtgctacagtgtttcaaaatccaatgggtatcattccttcttcccctaaaaatgcaggttataagaactcactggaaagaaacaatataaaacaagctgctaacaatagtttgcttttacatcttcttaaaagccagactatacctaagccaatgaatggacacagtcacagtgagagaggaagcatttttgaggaaagtagtacacctacaactattgatgaatattcagataacaatcctagttttacagatgacagcagtggtgatgaaagttcttattccaactgtgttcccatagacttgtcttgcaaacaccgaactgaaaaatcagaatctgaccaacctgtttccctggataacttcactcaatccttgctaaacacttgggatccaaaagtcccagatgtagatatcaaagaagatcaagatacctcaaagaattctaagctaaactcacaccagaaagtaacacttcttcaattgctacttggccataagaatgaagaaaatgtagaaaaaaacaccagccctcagggagtacacaatgatgtgagcaagttcaatacacaaaattatgcaaggacttctgtgatagaaagccccagtacaaatcggactactccagtgagcactccacctttacttacatcaagcaaagcagggtctcccatcaatctctctcaacactctctggtcatcaaatggaattccccaccatatgtctgcagtactcagtctgaaaagctaacaaatactgcatctaaccactcaatggaccttacaaaaagcaaagacccaccaggagagaaaccagcccaaaatgaaggtgcacagaactctgcaacgtttagtgccagtaagctgttacaaaatttagcacaatgtggaatgcagtcatccatgtcagtggaagagcagagacccagcaaacagctgttaactggaaacacagataaaccgataggtatgattgatagattaaatagccctttgctctcaaataaaacaaatgcagttgaagaaaataaagcatttagtagtcaaccaacaggtcctgaaccagggctttctggttctgaaatagaaaatctgcttgaaagacgtactgtcctccagttgctcctggggaaccccaacaaagggaagagtgaaaaaaaagagaaaactcccttaagagatgaaagtactcaggaacactcagagagagctttaagtgaacaaatactgatggtgaaaataaaatctgagccttgtgatgacttacaaattcctaacacaaatgtgcacttgagccatgatgctaagagtgccccattcttgggtatggctcctgctgtgcagagaagcgcacctgccttaccagtgtccgaagactttaaatcggagcctgtttcacctcaggatttttctttctccaagaatggtctgctaagtcgattgctaagacaaaatcaagatagttacctggcagatgattcagacaggagtcacagaaataatgaaatggcacttctagaatcaaagaatctttgcatggtccctaagaaaaggaagctttatactgagccattagaaaatccatttaaaaagatgaaaaacaacattgttgatgctgcaaacaatcacagtgccccagaagtactgtatgggtccttgcttaaccaggaagagctgaaatttagcagaaatgatcttgaatttaaatatcctgctggtcatggctcagccagcgaaagtgaacacaggagttgggccagagagagcaaaagctttaatgttctgaaacagctgcttctctcagaaaactgtgtgcgagatttgtccccgcacagaagtaactctgtggctgacagtaaaaagaaaggacacaaaaataatgtgaccaacagcaaacctgaatttagcatttcttctttaaatggactgatgtacagttccactcagcccagcagttgcatggataacaggacattttcatacccaggtgtagtaaaaactcctgtgagtcctactttccctgagcacttgggctgtgcagggtctagaccagaatctgggcttttgaatgggtgttccatgcccagtgagaaaggacccattaagtgggttatcactgatgcggagaagaatgagtatgaaaaagactctccaagattgaccaaaaccaacccaatactatattacatgcttcaaaaaggaggcaattctgttaccagtcgagaaacacaagacaaggacatttggagggaggcttcatctgctgaaagtgtctcacaggtcacagccaaagaagagttacttcctactgcagaaacgaaagcttctttctttaatttaagaagcccttacaatagccatatgggaaataatgcttctcgcccacacagcgcaaatggagaagtttatggacttctgggaagcgtgctaacgataaagaaagaatcagaataaaatgtacctgccatccagttttggatctttttaaaactaatgagtatgaacttgagatctgtataaataagagcatgatttgaaaaaaagcatggtataattgaaacttttttcattttgaaaagtattggttactggtgatgttgaaatatgcatactaatttttgcttaacattagatgtcatgaggaaactactgaactagcaattggttgtttaacacttctgtatgcatcagataacaactgtgagtagcctatgaatgaaattcttttataaatattaggcataaattaaaatgtaaaactccattcatagtggattaatgcattttgctgcctttattagggtactttattttgcttttcagaagtcagcctacataacacatttttaaagtctaaactgttaaacaactctttaaaggataattatccaataaaaaaaaacctagtgctgattcacagcttattatccaattcaaaaataaattagaaaaatatatgcttacatttttcacttttgctaaaaagaaaaaaaaaaggtgtttatttttaactcttggaagaggttttgtggttcccaatgtgtctgtcccaccctgatccttttcaatatatatttctttaaaccttgtgctacttagtaaaaattgattacaattgagggaagtttgatagatcctttaaaaaaaaggcagatttccattttttgtattttaactactttactaaattaatactcctccttttacagaattagaaaagttaacatttatctttaggtggtttcctgaaaagttgaatatttaagaaattgtttttaacagaagcaaaatggcttttctttggacagttttcaccatctcttgtaaaagttaattctcaccattcctgtggtacctgcgagtgttatgaccaggattccttaaacctgaactcagaccacttgcattagaaccatctggagcacttgttttaaaatgcagattcataggcagcatctcagatctacagaacaagaatctctgctaagtggacctggaatcttccatctgcatcttaacatgctctctaggtgtttcttgtgtttgagaaccatgacttatgactttcctcagaacatgagactgtaaaacaaaaacaaaaaactatgtgatgcctctattttccccaatacagtcacacatcagctcaaaatttgcaatattgtagttcatatattaccgttatgtctttggaaatcgggttcagaacactttttatgacaaaaattgggtggaggggataactttcatatctggctcaacatctcaggaaaatctgtgattatttgtgtgttctaatgagtaacatctacttagttagccttagggatggaaaaacagggccacttaccaaactcaggtgattccaggatggtttggaaacttctcctgaatgcatccttaacctttattaaaaccattgtcctaagaacaatgccaacaaagcttacaacatttagtttaaacccaagaagggcactaaactcagattgactaaataaaaagtacaaagggcacatatacgtgacagaattgtacacaatcactccattggatcttttactttaaagtagtgatgaaaagtacatgttgatactgtcttagaagaaattaatatattagtgaagccacatggggtttcagttgcgaaacaggtctgtttttatgttcagtttgtacaatccacaattcattcaccagatattttgttcttaattgtgaaccaggttagcaaatgacctatcaaaaattattctataatcactactagttaggatattgatttaaaattgttctacttgaagtggtttctaagatttttatattaaaaataggtgtgatttcctaatatgatctaaaaccctaaatggttatttttcctcagaatgatttgtaaatagctactggaaatattatacagtaataggagtgggtattatgcaacatcatggagaagtgaaggcataggcttattctgacataaaattccactggccagttgaatatattctattccatgtccatactatgacaatcttattgtcaacactatataaataagcttttaaacaagtcatttttcttgatcgttgtggaaggtttggagccttagaggtatgtcagaaaaaatatgttggtattctcccttgggtagggggaaatgacctttttacaagagagtgaaatttaggtcagggaaaagaccaagggccagcattgctacttttgtgtgtgtgtgtgtgggttttgttttgtttttttggttggctggttgttttcgttgttgttaacaaaggaatgagaatatgtaatacttaaataaacatgaccacgaagaatgctgttctgatttactagagaatgttcccaatttgaatttagggtgattttaaagaacagtgagaaagggcatacatccacagattcactttgtttatgcatatgtagatacaaggatgcacatatacacattttcaaggactattttagatatctagacaatttcttctaataaagtcatttgtgaaagggtactacagcttattgacatcagtaaggtagcattcattacctgtttattctctgctgcatcttacagaagagtaaactggtgagagtatatattttatatatatatatatatatatatatataatatgtatatatatatatattgacttgttacatgaagatgttaaaatcggtttttaaaggtgatgtaaatagtgatttccttaatgaaaaatacatattttgtattgttctaatgcaacagaaaagccttttaatctctttggttcctgtatattccatgtataagtgtaaatataatcagacaggtttaaaagttgtgcatgtatgtatacagttgcaagtctggacaaatgtatagaataaaccttttatttaagttgtgattacctgctgcatgaaaagtgcatgggggaccctgtgcatctgtgcatttggcaaaatgtcttaacaaatcagatcagatgttcatcctaacatgacagtattccatttctggacatgacgtctgtggtttaagctttgtgaaagaatgtgctttgattcgaagggtcttaaagaatttttttaatcgtcaaccacttttaaacataaagaattcacacaactactttcatgaattttttaatcccattgcaaacattattccaagagtatcccagtattagcaatactggaatataggcacattaccattcatagtaagaattctggtgtttacacaaccaaatttgatgcgatctgctcagtaatataatttgccatttttattagaaatttaatttcttcatgtgatgtcatgaaactgtacatactgcagtgtgaatttttttgttttgttttttaatcttttagtgtttacttcctgcagtgaatttgaataaatgagaaaaaatgcattgtc

SEQ ID NO: 2903 - DNA, 7562 bp, Homo sapiens
  source 1..7562: mol_type = genomic DNA
cgacccggccccacgcccgcccgccacccgcgcgcgcccgtccgcccgtggcctcgcgtccgccgctgcgccgtgagcgccgctggtcggagggaagagctcgccggggcgccgggccaggacggggcggcaggcgccttcgcggaccgagcctgacggagccggaggctgggagccgcggcggcctggggaagtgtttggattgtgagctatttcagaactgttctcaggactcattattttaacatttgggagaaacacagccagaagaacactgatatttgcatttaatggggaacaaaagatgaagaaggaaaaggaatatattcactaaggattctatctgcttactgctacagacctatgtgttaaggaattcttctcctcctccttgcgtagaagttgatcagcactgtggtcagactgcatttatcttgtcattgccagaagaaatcttggacagaatgtaacagtacgtctctctctgattgcgatggaaggtgataaactgatactcctttattaaagttacatcgcactcaccacagaaaaccattctttaaagtgaatagaaaccaagcccttgtgaacacttctattgaacatgactcatggagaagagcttggctctgatgtgcaccaggattctattgttttaacttacctagaaggattactaatgcatcaggcagcagggggatcaggtactgccgttgacaaaaagtctgctgggcataatgaagaggatcagaactttaacatttctggcagtgcatttcccacctgtcaaagtaatggtccagttctcaatacacatacatatcaggggtctggcatgctgcacctcaaaaaagccagactgttgcagtcttctgaggactggaatgcagcaaagcggaagaggctgtctgattctatcatgaatttaaacgtaaagaaggaagctttgctagctggcatggttgacagtgtgcctaaaggcaaacaggatagcacattactggcctctttgcttcagtcattcagctctaggctgcagactgttgctctgtcacaacaaatcaggcagagcctcaaggagcaaggatatgccctcagtcatgattctttaaaagtggagaaggatttaaggtgctatggtgttgcatcaagtcacttaaaaactttgttgaagaaaagtaaagttaaagatcaaaagcctgatacgaatcttcctgatgtgactaaaaacctcatcagagataggtttgcagagtctcctcatcatgttggacaaagtggaacaaaggtcatgagtgaaccgttgtcatgtgctgcaagattacaggctgttgcaagcatggtggaaaaaagggctagtcctgccacctcacctaaacctagtgttgcttgtagccagttagcattacttctgtcaagcgaagcccatttgcagcagtattctcgagaacacgctttaaaaacgcaaaatgcaaatcaagcagcaagtgaaagacttgctgctatggccagattgcaagaaaatggccagaaggatgttggcagttaccagctcccaaaaggaatgtcaagccatcttaatggtcaggcaagaacatcatcaagcaaactgatggctagcaaaagtagtgctacagtgtttcaaaatccaatgggtatcattccttcttcccctaaaaatgcaggttataagaactcactggaaagaaacaatataaaacaagctgctaacaatagtttgcttttacatcttcttaaaagccagactatacctaagccaatgaatggacacagtcacagtgagagaggaagcatttttgaggaaagtagtacacctacaactattgatgaatattcagataacaatcctagttttacagatgacagcagtggtgatgaaagttcttattccaactgtgttcccatagacttgtcttgcaaacaccgaactgaaaaatcagaatctgaccaacctgtttccctggataacttcactcaatccttgctaaacacttgggatccaaaagtcccagatgtagatatcaaagaagatcaagatacctcaaagaattctaagctaaactcacaccagaaagtaacacttcttcaattgctacttggccataagaatgaagaaaatgtagaaaaaaacaccagccctcagggagtacacaatgatgtgagcaagttcaatacacaaaattatgcaaggacttctgtgatagaaagccccagtacaaatcggactactccagtgagcactccacctttacttacatcaagcaaagcagggtctcccatcaatctctctcaacactctctggtcatcaaatggaattccccaccatatgtctgcagtactcagtctgaaaagctaacaaatactgcatctaaccactcaatggaccttacaaaaagcaaagacccaccaggagagaaaccagcccaaaatgaaggtgcacagaactctgcaacgtttagtgccagtaagctgttacaaaatttagcacaatgtggaatgcagtcatccatgtcagtggaagagcagagacccagcaaacagctgttaactggaaacacagataaaccgataggtatgattgatagattaaatagccctttgctctcaaataaaacaaatgcagttgaagaaaataaagcatttagtagtcaaccaacaggtcctgaaccagggctttctggttctgaaatagaaaatctgcttgaaagacgtactgtcctccagttgctcctggggaaccccaacaaagggaagagtgaaaaaaaagagaaaactcccttaagagatgaaagtactcaggaacactcagagagagctttaagtgaacaaatactgatggtgaaaataaaatctgagccttgtgatgacttacaaattcctaacacaaatgtgcacttgagccatgatgctaagagtgccccattcttgggtatggctcctgctgtgcagagaagcgcacctgccttaccagtgtccgaagactttaaatcggagcctgtttcacctcaggatttttctttctccaagaatggtctgctaagtcgattgctaagacaaaatcaagatagttacctggcagatgattcagacaggagtcacagaaataatgaaatggcacttctagaatcaaagaatctttgcatggtccctaagaaaaggaagctttatactgagccattagaaaatccatttaaaaagatgaaaaacaacattgttgatgctgcaaacaatcacagtgccccagaagtactgtatgggtccttgcttaaccaggaagagctgaaatttagcagaaatgatcttgaatttaaatatcctgctggtcatggctcagccagcgaaagtgaacacaggagttgggccagagagagcaaaagctttaatgttctgaaacagctgcttctctcagaaaactgtgtgcgagatttgtccccgcacagaagtaactctgtggctgacagtaaaaagaaaggacacaaaaataatgtgaccaacagcaaacctgaatttagcatttcttctttaaatggactgatgtacagttccactcagcccagcagttgcatggataacaggacattttcatacccaggtgtagtaaaaactcctgtgagtcctactttccctgagcacttgggctgtgcagggtctagaccagaatctgggcttttgaatgggtgttccatgcccagtgagaaaggacccattaagtgggttatcactgatgcggagaagaatgagtatgaaaaagactctccaagattgaccaaaaccaacccaatactatattacatgcttcaaaaaggaggcaattctgttaccagtcgagaaacacaagacaaggacatttggagggaggcttcatctgctgaaagtgtctcacaggtcacagccaaagaagagttacttcctactgcagaaacgaaagcttctttctttaatttaagaagcccttacaatagccatatgggaaataatgcttctcgcccacacagcgcaaatggagaagtttatggacttctgggaagcgtgctaacgataaagaaagaatcagaataaaatgtacctgccatccagttttggatctttttaaaactaatgagtatgaacttgagatctgtataaataagagcatgatttgaaaaaaagcatggtataattgaaacttttttcattttgaaaagtattggttactggtgatgttgaaatatgcatactaatttttgcttaacattagatgtcatgaggaaactactgaactagcaattggttgtttaacacttctgtatgcatcagataacaactgtgagtagcctatgaatgaaattcttttataaatattaggcataaattaaaatgtaaaactccattcatagtggattaatgcattttgctgcctttattagggtactttattttgcttttcagaagtcagcctacataacacatttttaaagtctaaactgttaaacaactctttaaaggataattatccaataaaaaaaaacctagtgctgattcacagcttattatccaattcaaaaataaattagaaaaatatatgcttacatttttcacttttgctaaaaagaaaaaaaaaaggtgtttatttttaactcttggaagaggttttgtggttcccaatgtgtctgtcccaccctgatccttttcaatatatatttctttaaaccttgtgctacttagtaaaaattgattacaattgagggaagtttgatagatcctttaaaaaaaaggcagatttccattttttgtattttaactactttactaaattaatactcctccttttacagaattagaaaagttaacatttatctttaggtggtttcctgaaaagttgaatatttaagaaattgtttttaacagaagcaaaatggcttttctttggacagttttcaccatctcttgtaaaagttaattctcaccattcctgtggtacctgcgagtgttatgaccaggattccttaaacctgaactcagaccacttgcattagaaccatctggagcacttgttttaaaatgcagattcataggcagcatctcagatctacagaacaagaatctctgctaagtggacctggaatcttccatctgcatcttaacatgctctctaggtgtttcttgtgtttgagaaccatgacttatgactttcctcagaacatgagactgtaaaacaaaaacaaaaaactatgtgatgcctctattttccccaatacagtcacacatcagctcaaaatttgcaatattgtagttcatatattaccgttatgtctttggaaatcgggttcagaacactttttatgacaaaaattgggtggaggggataactttcatatctggctcaacatctcaggaaaatctgtgattatttgtgtgttctaatgagtaacatctacttagttagccttagggatggaaaaacagggccacttaccaaactcaggtgattccaggatggtttggaaacttctcctgaatgcatccttaacctttattaaaaccattgtcctaagaacaatgccaacaaagcttacaacatttagtttaaacccaagaagggcactaaactcagattgactaaataaaaagtacaaagggcacatatacgtgacagaattgtacacaatcactccattggatcttttactttaaagtagtgatgaaaagtacatgttgatactgtcttagaagaaattaatatattagtgaagccacatggggtttcagttgcgaaacaggtctgtttttatgttcagtttgtacaatccacaattcattcaccagatattttgttcttaattgtgaaccaggttagcaaatgacctatcaaaaattattctataatcactactagttaggatattgatttaaaattgttctacttgaagtggtttctaagatttttatattaaaaataggtgtgatttcctaatatgatctaaaaccctaaatggttatttttcctcagaatgatttgtaaatagctactggaaatattatacagtaataggagtgggtattatgcaacatcatggagaagtgaaggcataggcttattctgacataaaattccactggccagttgaatatattctattccatgtccatactatgacaatcttattgtcaacactatataaataagcttttaaacaagtcatttttcttgatcgttgtggaaggtttggagccttagaggtatgtcagaaaaaatatgttggtattctcccttgggtagggggaaatgacctttttacaagagagtgaaatttaggtcagggaaaagaccaagggccagcattgctacttttgtgtgtgtgtgtgtgggttttgttttgtttttttggttggctggttgttttcgttgttgttaacaaaggaatgagaatatgtaatacttaaataaacatgaccacgaagaatgctgttctgatttactagagaatgttcccaatttgaatttagggtgattttaaagaacagtgagaaagggcatacatccacagattcactttgtttatgcatatgtagatacaaggatgcacatatacacattttcaaggactattttagatatctagacaatttcttctaataaagtcatttgtgaaagggtactacagcttattgacatcagtaaggtagcattcattacctgtttattctctgctgcatcttacagaagagtaaactggtgagagtatatattttatatatatatatatatatatatatataatatgtatatatatatatattgacttgttacatgaagatgttaaaatcggtttttaaaggtgatgtaaatagtgatttccttaatgaaaaatacatattttgtattgttctaatgcaacagaaaagccttttaatctctttggttcctgtatattccatgtataagtgtaaatataatcagacaggtttaaaagttgtgcatgtatgtatacagttgcaagtctggacaaatgtatagaataaaccttttatttaagttgtgattacctgctgcatgaaaagtgcatgggggaccctgtgcatctgtgcatttggcaaaatgtcttaacaaatcagatcagatgttcatcctaacatgacagtattccatttctggacatgacgtctgtggtttaagctttgtgaaagaatgtgctttgattcgaagggtcttaaagaatttttttaatcgtcaaccacttttaaacataaagaattcacacaactactttcatgaattttttaatcccattgcaaacattattccaagagtatcccagtattagcaatactggaatataggcacattaccattcatagtaagaattctggtgtttacacaaccaaatttgatgcgatctgctcagtaatataatttgccatttttattagaaatttaatttcttcatgtgatgtcatgaaactgtacatactgcagtgtgaatttttttgttttgttttttaatcttttagtgtttacttcctgcagtgaatttgaataaatgagaaaaaatgcattgtc

SEQ ID NO: 2904 - DNA, 7671 bp, Homo sapiens
  source 1..7671: mol_type = genomic DNA
agacattgcagcagagccccgaactcgggaggcggcggcggaggaggcggcggcgaggcgcagggacgacccggccccacgcccgcccgccacccgcgcgcgcccgtccgcccgtggcctcgcgtccgccgctgcgccgtgagcgccgctggtcggagggaagagctcgccggggcgccgggccaggacggggcggcaggcgccttcgcggaccgagcctgacggagccggaggctgggagccgcggcggcctgggatgcacacttgactgaaggaggacagggaatctgaagactccggatgacatcagagctacttttcaacagccttctcaattttctttctcagaaagcagaggctcagagcttggagacagacgaacactgatatttgcatttaatggggaacaaaagatgaagaaggaaaaggaatatattcactaaggattctatctgcttactgctacagacctatgtgttaaggaattcttctcctcctccttgcgtagaagttgatcagcactgtggtcagactgcatttatcttgtcattgccagaagaaatcttggacagaatgtaacagtacgtctctctctgattgcgatggaaggtgataaactgatactcctttattaaagttacatcgcactcaccacagaaaaccattctttaaagtgaatagaaaccaagcccttgtgaacacttctattgaacatgactcatggagaagagcttggctctgatgtgcaccaggattctattgttttaacttacctagaaggattactaatgcatcaggcagcagggggatcaggtactgccgttgacaaaaagtctgctgggcataatgaagaggatcagaactttaacatttctggcagtgcatttcccacctgtcaaagtaatggtccagttctcaatacacatacatatcaggggtctggcatgctgcacctcaaaaaagccagactgttgcagtcttctgaggactggaatgcagcaaagcggaagaggctgtctgattctatcatgaatttaaacgtaaagaaggaagctttgctagctggcatggttgacagtgtgcctaaaggcaaacaggatagcacattactggcctctttgcttcagtcattcagctctaggctgcagactgttgctctgtcacaacaaatcaggcagagcctcaaggagcaaggatatgccctcagtcatgattctttaaaagtggagaaggatttaaggtgctatggtgttgcatcaagtcacttaaaaactttgttgaagaaaagtaaagttaaagatcaaaagcctgatacgaatcttcctgatgtgactaaaaacctcatcagagataggtttgcagagtctcctcatcatgttggacaaagtggaacaaaggtcatgagtgaaccgttgtcatgtgctgcaagattacaggctgttgcaagcatggtggaaaaaagggctagtcctgccacctcacctaaacctagtgttgcttgtagccagttagcattacttctgtcaagcgaagcccatttgcagcagtattctcgagaacacgctttaaaaacgcaaaatgcaaatcaagcagcaagtgaaagacttgctgctatggccagattgcaagaaaatggccagaaggatgttggcagttaccagctcccaaaaggaatgtcaagccatcttaatggtcaggcaagaacatcatcaagcaaactgatggctagcaaaagtagtgctacagtgtttcaaaatccaatgggtatcattccttcttcccctaaaaatgcaggttataagaactcactggaaagaaacaatataaaacaagctgctaacaatagtttgcttttacatcttcttaaaagccagactatacctaagccaatgaatggacacagtcacagtgagagaggaagcatttttgaggaaagtagtacacctacaactattgatgaatattcagataacaatcctagttttacagatgacagcagtggtgatgaaagttcttattccaactgtgttcccatagacttgtcttgcaaacaccgaactgaaaaatcagaatctgaccaacctgtttccctggataacttcactcaatccttgctaaacacttgggatccaaaagtcccagatgtagatatcaaagaagatcaagatacctcaaagaattctaagctaaactcacaccagaaagtaacacttcttcaattgctacttggccataagaatgaagaaaatgtagaaaaaaacaccagccctcagggagtacacaatgatgtgagcaagttcaatacacaaaattatgcaaggacttctgtgatagaaagccccagtacaaatcggactactccagtgagcactccacctttacttacatcaagcaaagcagggtctcccatcaatctctctcaacactctctggtcatcaaatggaattccccaccatatgtctgcagtactcagtctgaaaagctaacaaatactgcatctaaccactcaatggaccttacaaaaagcaaagacccaccaggagagaaaccagcccaaaatgaaggtgcacagaactctgcaacgtttagtgccagtaagctgttacaaaatttagcacaatgtggaatgcagtcatccatgtcagtggaagagcagagacccagcaaacagctgttaactggaaacacagataaaccgataggtatgattgatagattaaatagccctttgctctcaaataaaacaaatgcagttgaagaaaataaagcatttagtagtcaaccaacaggtcctgaaccagggctttctggttctgaaatagaaaatctgcttgaaagacgtactgtcctccagttgctcctggggaaccccaacaaagggaagagtgaaaaaaaagagaaaactcccttaagagatgaaagtactcaggaacactcagagagagctttaagtgaacaaatactgatggtgaaaataaaatctgagccttgtgatgacttacaaattcctaacacaaatgtgcacttgagccatgatgctaagagtgccccattcttgggtatggctcctgctgtgcagagaagcgcacctgccttaccagtgtccgaagactttaaatcggagcctgtttcacctcaggatttttctttctccaagaatggtctgctaagtcgattgctaagacaaaatcaagatagttacctggcagatgattcagacaggagtcacagaaataatgaaatggcacttctagaatcaaagaatctttgcatggtccctaagaaaaggaagctttatactgagccattagaaaatccatttaaaaagatgaaaaacaacattgttgatgctgcaaacaatcacagtgccccagaagtactgtatgggtccttgcttaaccaggaagagctgaaatttagcagaaatgatcttgaatttaaatatcctgctggtcatggctcagccagcgaaagtgaacacaggagttgggccagagagagcaaaagctttaatgttctgaaacagctgcttctctcagaaaactgtgtgcgagatttgtccccgcacagaagtaactctgtggctgacagtaaaaagaaaggacacaaaaataatgtgaccaacagcaaacctgaatttagcatttcttctttaaatggactgatgtacagttccactcagcccagcagttgcatggataacaggacattttcatacccaggtgtagtaaaaactcctgtgagtcctactttccctgagcacttgggctgtgcagggtctagaccagaatctgggcttttgaatgggtgttccatgcccagtgagaaaggacccattaagtgggttatcactgatgcggagaagaatgagtatgaaaaagactctccaagattgaccaaaaccaacccaatactatattacatgcttcaaaaaggaggcaattctgttaccagtcgagaaacacaagacaaggacatttggagggaggcttcatctgctgaaagtgtctcacaggtcacagccaaagaagagttacttcctactgcagaaacgaaagcttctttctttaatttaagaagcccttacaatagccatatgggaaataatgcttctcgcccacacagcgcaaatggagaagtttatggacttctgggaagcgtgctaacgataaagaaagaatcagaataaaatgtacctgccatccagttttggatctttttaaaactaatgagtatgaacttgagatctgtataaataagagcatgatttgaaaaaaagcatggtataattgaaacttttttcattttgaaaagtattggttactggtgatgttgaaatatgcatactaatttttgcttaacattagatgtcatgaggaaactactgaactagcaattggttgtttaacacttctgtatgcatcagataacaactgtgagtagcctatgaatgaaattcttttataaatattaggcataaattaaaatgtaaaactccattcatagtggattaatgcattttgctgcctttattagggtactttattttgcttttcagaagtcagcctacataacacatttttaaagtctaaactgttaaacaactctttaaaggataattatccaataaaaaaaaacctagtgctgattcacagcttattatccaattcaaaaataaattagaaaaatatatgcttacatttttcacttttgctaaaaagaaaaaaaaaaggtgtttatttttaactcttggaagaggttttgtggttcccaatgtgtctgtcccaccctgatccttttcaatatatatttctttaaaccttgtgctacttagtaaaaattgattacaattgagggaagtttgatagatcctttaaaaaaaaggcagatttccattttttgtattttaactactttactaaattaatactcctccttttacagaattagaaaagttaacatttatctttaggtggtttcctgaaaagttgaatatttaagaaattgtttttaacagaagcaaaatggcttttctttggacagttttcaccatctcttgtaaaagttaattctcaccattcctgtggtacctgcgagtgttatgaccaggattccttaaacctgaactcagaccacttgcattagaaccatctggagcacttgttttaaaatgcagattcataggcagcatctcagatctacagaacaagaatctctgctaagtggacctggaatcttccatctgcatcttaacatgctctctaggtgtttcttgtgtttgagaaccatgacttatgactttcctcagaacatgagactgtaaaacaaaaacaaaaaactatgtgatgcctctattttccccaatacagtcacacatcagctcaaaatttgcaatattgtagttcatatattaccgttatgtctttggaaatcgggttcagaacactttttatgacaaaaattgggtggaggggataactttcatatctggctcaacatctcaggaaaatctgtgattatttgtgtgttctaatgagtaacatctacttagttagccttagggatggaaaaacagggccacttaccaaactcaggtgattccaggatggtttggaaacttctcctgaatgcatccttaacctttattaaaaccattgtcctaagaacaatgccaacaaagcttacaacatttagtttaaacccaagaagggcactaaactcagattgactaaataaaaagtacaaagggcacatatacgtgacagaattgtacacaatcactccattggatcttttactttaaagtagtgatgaaaagtacatgttgatactgtcttagaagaaattaatatattagtgaagccacatggggtttcagttgcgaaacaggtctgtttttatgttcagtttgtacaatccacaattcattcaccagatattttgttcttaattgtgaaccaggttagcaaatgacctatcaaaaattattctataatcactactagttaggatattgatttaaaattgttctacttgaagtggtttctaagatttttatattaaaaataggtgtgatttcctaatatgatctaaaaccctaaatggttatttttcctcagaatgatttgtaaatagctactggaaatattatacagtaataggagtgggtattatgcaacatcatggagaagtgaaggcataggcttattctgacataaaattccactggccagttgaatatattctattccatgtccatactatgacaatcttattgtcaacactatataaataagcttttaaacaagtcatttttcttgatcgttgtggaaggtttggagccttagaggtatgtcagaaaaaatatgttggtattctcccttgggtagggggaaatgacctttttacaagagagtgaaatttaggtcagggaaaagaccaagggccagcattgctacttttgtgtgtgtgtgtgtgggttttgttttgtttttttggttggctggttgttttcgttgttgttaacaaaggaatgagaatatgtaatacttaaataaacatgaccacgaagaatgctgttctgatttactagagaatgttcccaatttgaatttagggtgattttaaagaacagtgagaaagggcatacatccacagattcactttgtttatgcatatgtagatacaaggatgcacatatacacattttcaaggactattttagatatctagacaatttcttctaataaagtcatttgtgaaagggtactacagcttattgacatcagtaaggtagcattcattacctgtttattctctgctgcatcttacagaagagtaaactggtgagagtatatattttatatatatatatatatatatatatataatatgtatatatatatatattgacttgttacatgaagatgttaaaatcggtttttaaaggtgatgtaaatagtgatttccttaatgaaaaatacatattttgtattgttctaatgcaacagaaaagccttttaatctctttggttcctgtatattccatgtataagtgtaaatataatcagacaggtttaaaagttgtgcatgtatgtatacagttgcaagtctggacaaatgtatagaataaaccttttatttaagttgtgattacctgctgcatgaaaagtgcatgggggaccctgtgcatctgtgcatttggcaaaatgtcttaacaaatcagatcagatgttcatcctaacatgacagtattccatttctggacatgacgtctgtggtttaagctttgtgaaagaatgtgctttgattcgaagggtcttaaagaatttttttaatcgtcaaccacttttaaacataaagaattcacacaactactttcatgaattttttaatcccattgcaaacattattccaagagtatcccagtattagcaatactggaatataggcacattaccattcatagtaagaattctggtgtttacacaaccaaatttgatgcgatctgctcagtaatataatttgccatttttattagaaatttaatttcttcatgtgatgtcatgaaactgtacatactgcagtgtgaatttttttgttttgttttttaatcttttagtgtttacttcctgcagtgaatttgaataaatgagaaaaaatgcattgtc

SEQ ID NO: 2905 - DNA, 720 bp, Homo sapiens
  source 1..720: mol_type = genomic DNA
ttgtggttatctcagcagaagacataccgccctcctccttgtattggtcgggacctgggcattagggagtcaaggcaaaggagaaagaaaagagattttacattagtattctatgaaagccttacggtctgcagaacaaattgattactccggtgtacctgtgcttggcaccactgctgtgagagaaagaacactgatatttgcatttaatggggaacaaaagatgaagaaggaaaaggaatatattcactaaggattctatctgcttactgctacagacctatgtgttaaggaattcttctcctcctccttgcgtagaagttgatcagcactgtggtcagactgcatttatcttgtcattgccagaagaaatcttggacagaatgtaacagtacgtctctctctgattgcgatggaaggtgataaactgatactcctttattaaagttacatcgcactcaccacagaaaaccattctttaaagtgaatagaaaccaagcccttgtgaacacttctattgaacatgactcatggagaagagcttggctctgatgtgcaccaggattctattgttttaacttacctagaaggattactaatgcatcaggcagcagggggatcaggtactgccgttgacaaaaagtctgctgggcataatgaagaggatcagaactttaacatttctggcagtgcatttcccacctgtcaaagtaatggtcc

SEQ ID NO: 2906 - DNA, 3556 bp, Homo sapiens
  source 1..3556: mol_type = genomic DNA
ggcgccgcctccacccgctccccgctcggtcccgctcgctcgcccaggccgggctgccctttcgcgtgtccgcgctctcttccctccgccgccgcctcctccattttgcgagctcgtgtctgtgacgggagcccgagtcaccgcctgcccgtcggggacggattctgtgggtggaaggagacgccgcagccggagcggccgaagcagctgggaccgggacggggcacgcgcgcccggaacctcgacccgcggagcccggcgcggggcggagggctggcttgtcagctgggcaatgggagactttcttaaataggggctctccccccacccatggagaaaggggcggctgtttacttcctttttttagaaaaaaaaaatatatttccctcctgctccttctgcgttcacaagctaagttgtttatctcggctgcggcgggaactgcggacggtggcgggcgagcggctcctctgccagagttgatattcactgatggactccaaagaatcattaactcctggtagagaagaaaaccccagcagtgtgcttgctcaggagaggggagatgtgatggacttctataaaaccctaagaggaggagctactgtgaaggtttctgcgtcttcaccctcactggctgtcgcttctcaatcagactccaagcagcgaagacttttggttgattttccaaaaggctcagtaagcaatgcgcagcagccagatctgtccaaagcagtttcactctcaatgggactgtatatgggagagacagaaacaaaagtgatgggaaatgacctgggattcccacagcagggccaaatcagcctttcctcgggggaaacagacttaaagcttttggaagaaagcattgcaaacctcaataggtcgaccagtgttccagagaaccccaagagttcagcatccactgctgtgtctgctgcccccacagagaaggagtttccaaaaactcactctgatgtatcttcagaacagcaacatttgaagggccagactggcaccaacggtggcaatgtgaaattgtataccacagaccaaagcacctttgacattttgcaggatttggagttttcttctgggtccccaggtaaagagacgaatgagagtccttggagatcagacctgttgatagatgaaaactgtttgctttctcctctggcgggagaagacgattcattccttttggaaggaaactcgaatgaggactgcaagcctctcattttaccggacactaaacccaaaattaaggataatggagatctggttttgtcaagccccagtaatgtaacactgccccaagtgaaaacagaaaaagaagatttcatcgaactctgcacccctggggtaattaagcaagagaaactgggcacagtttactgtcaggcaagctttcctggagcaaatataattggtaataaaatgtctgccatttctgttcatggtgtgagtacctctggaggacagatgtaccactatgacatgaatacagcatccctttctcaacagcaggatcagaagcctatttttaatgtcattccaccaattcccgttggttccgaaaattggaataggtgccaaggatctggagatgacaacttgacttctctggggactctgaacttccctggtcgaacagttttttctaatggctattcaagccccagcatgagaccagatgtaagctctcctccatccagctcctcaacagcaacaacaggaccacctcccaaactctgcctggtgtgctctgatgaagcttcaggatgtcattatggagtcttaacttgtggaagctgtaaagttttcttcaaaagagcagtggaaggtagacagcacaattacctatgtgctggaaggaatgattgcatcatcgataaaattcgaagaaaaaactgcccagcatgccgctatcgaaaatgtcttcaggctggaatgaacctggaagctcgaaaaacaaagaaaaaaataaaaggaattcagcaggccactacaggagtctcacaagaaacctctgaaaatcctggtaacaaaacaatagttcctgcaacgttaccacaactcacccctaccctggtgtcactgttggaggttattgaacctgaagtgttatatgcaggatatgatagctctgttccagactcaacttggaggatcatgactacgctcaacatgttaggagggcggcaagtgattgcagcagtgaaatgggcaaaggcaataccaggtttcaggaacttacacctggatgaccaaatgaccctactgcagtactcctggatgtttcttatggcatttgctctggggtggagatcatatagacaatcaagtgcaaacctgctgtgttttgctcctgatctgattattaatgagcagagaatgactctaccctgcatgtacgaccaatgtaaacacatgctgtatgtttcctctgagttacacaggcttcaggtatcttatgaagagtatctctgtatgaaaaccttactgcttctctcttcagttcctaaggacggtctgaagagccaagagctatttgatgaaattagaatgacctacatcaaagagctaggaaaagccattgtcaagagggaaggaaactccagccagaactggcagcggttttatcaactgacaaaactcttggattctatgcatgaagtggttgaaaatctccttaactattgcttccaaacatttttggataagaccatgagtattgaattccccgagatgttagctgaaatcatcaccaatcagataccaaaatattcaaatggaaatatcaaaaaacttctgtttcatcaaaagtgactgccttaataagaatggttgccttaaagaaagtcgaattaatagcttttattgtataaactatcagtttgtcctgtagaggttttgttgttttattttttattgttttcatctgttgttttgttttaaatacgcactacatgtggtttatagagggccaagacttggcaacagaagcagttgagtcgtcatcacttttcagtgatgggagagtagatggtgaaatttattagttaatatatcccagaaattagaaaccttaatatgtggacgtaatctccacagtcaaagaaggatggcacctaaaccaccagtgcccaaagtctgtgtgatgaactttctcttcatactttttttcacagttggctggatgaaattttctagactttctgttggtgtatcccccccctgtatagttaggatagcatttttgatttatgcatggaaacctgaaaaaaagtttacaagtgtatatcagaaaagggaagttgtgccttttatagctattactgtctggttttaacaatttcctttatatttagtgaactacgcttgctcattttttcttacataattttttattcaagttattgtacagctgtttaagatgggcagctagttcgtagctttcccaaataaactctaaacattaatcaatcatctgtgtgaaaatgggttggtgcttctaacctgatggcacttagctatcagaagaccacaaaaattg

SEQ ID NO: 2907 - DNA, 7286 bp, Homo sapiens
  source 1..7286: mol_type = genomic DNA
aggttatgtaagggtttgctttcaccccattcaaaaggtacctcttcctcttctcttgctccctctcgccctcattcttgtgcctatgcagacatttgagtagaggcgaatcactttcacttctgctggggaaattgcaacacgcttctttaaatggcagagagaaggagaaaacttagatcttctgataccaaatcactggaccttagaaggtcagaaatctttcaagccctgcaggaccgtaaaatgcgcatgtgtccaacggaagcactggggcatgagtggggaaggaatagaaacagaaagagggtaagagaagaaaaaagggaaagtggtgaaggcagggaggaaaattgcttagtgtgaatatgcacgcattcatttagttttcaaatccttgttgagcatgataaaattcccagcatcagacctcacatgttggtttccattaggatctgcctgggggaatatctgctgaatcagtggctctgagctgaactaggaaattcaccataattaggagagtcactgtatttctctccaaaaaaaaaaaagttatacccgagagacaggatcttctgatctgaaattttcttcacttctgaaattctctggtttgtgctcatcgttggtagctatttgttcatcaagagttgtgtagctggcttcttctgaaaaaaggaatctgcgtcatatctaagtcagatttcattctggtgctctcagagcagttagcccaggaaaggggccagcttctgtgacgactgctgcagaggcaggtgcagtttgtgtgccacagatattaactttgataagcacttaatgagtgccttctctgtgcgagaatggggaggaacaaaatgcagctcctaccctcctcgggctttagttgtaccttaataacaggaattttcatctgcctggctcctttcctcaaagaacaaagaagactttgcttcattaaagtgtctgagaaggaagttgatattcactgatggactccaaagaatcattaactcctggtagagaagaaaaccccagcagtgtgcttgctcaggagaggggagatgtgatggacttctataaaaccctaagaggaggagctactgtgaaggtttctgcgtcttcaccctcactggctgtcgcttctcaatcagactccaagcagcgaagacttttggttgattttccaaaaggctcagtaagcaatgcgcagcagccagatctgtccaaagcagtttcactctcaatgggactgtatatgggagagacagaaacaaaagtgatgggaaatgacctgggattcccacagcagggccaaatcagcctttcctcgggggaaacagacttaaagcttttggaagaaagcattgcaaacctcaataggtcgaccagtgttccagagaaccccaagagttcagcatccactgctgtgtctgctgcccccacagagaaggagtttccaaaaactcactctgatgtatcttcagaacagcaacatttgaagggccagactggcaccaacggtggcaatgtgaaattgtataccacagaccaaagcacctttgacattttgcaggatttggagttttcttctgggtccccaggtaaagagacgaatgagagtccttggagatcagacctgttgatagatgaaaactgtttgctttctcctctggcgggagaagacgattcattccttttggaaggaaactcgaatgaggactgcaagcctctcattttaccggacactaaacccaaaattaaggataatggagatctggttttgtcaagccccagtaatgtaacactgccccaagtgaaaacagaaaaagaagatttcatcgaactctgcacccctggggtaattaagcaagagaaactgggcacagtttactgtcaggcaagctttcctggagcaaatataattggtaataaaatgtctgccatttctgttcatggtgtgagtacctctggaggacagatgtaccactatgacatgaatacagcatccctttctcaacagcaggatcagaagcctatttttaatgtcattccaccaattcccgttggttccgaaaattggaataggtgccaaggatctggagatgacaacttgacttctctggggactctgaacttccctggtcgaacagttttttctaatggctattcaagccccagcatgagaccagatgtaagctctcctccatccagctcctcaacagcaacaacaggaccacctcccaaactctgcctggtgtgctctgatgaagcttcaggatgtcattatggagtcttaacttgtggaagctgtaaagttttcttcaaaagagcagtggaaggacagcacaattacctatgtgctggaaggaatgattgcatcatcgataaaattcgaagaaaaaactgcccagcatgccgctatcgaaaatgtcttcaggctggaatgaacctggaagctcgaaaaacaaagaaaaaaataaaaggaattcagcaggccactacaggagtctcacaagaaacctctgaaaatcctggtaacaaaacaatagttcctgcaacgttaccacaactcacccctaccctggtgtcactgttggaggttattgaacctgaagtgttatatgcaggatatgatagctctgttccagactcaacttggaggatcatgactacgctcaacatgttaggagggcggcaagtgattgcagcagtgaaatgggcaaaggcaataccaggtttcaggaacttacacctggatgaccaaatgaccctactgcagtactcctggatgtttcttatggcatttgctctggggtggagatcatatagacaatcaagtgcaaacctgctgtgttttgctcctgatctgattattaatgagcagagaatgactctaccctgcatgtacgaccaatgtaaacacatgctgtatgtttcctctgagttacacaggcttcaggtatcttatgaagagtatctctgtatgaaaaccttactgcttctctcttcagttcctaaggacggtctgaagagccaagagctatttgatgaaattagaatgacctacatcaaagagctaggaaaagccattgtcaagagggaaggaaactccagccagaactggcagcggttttatcaactgacaaaactcttggattctatgcatgaagtggttgaaaatctccttaactattgcttccaaacatttttggataagaccatgagtattgaattccccgagatgttagctgaaatcatcaccaatcagataccaaaatattcaaatggaaatatcaaaaaacttctgtttcatcaaaagtgactgccttaataagaatggttgccttaaagaaagtcgaattaatagcttttattgtataaactatcagtttgtcctgtagaggttttgttgttttattttttattgttttcatctgttgttttgttttaaatacgcactacatgtggtttatagagggccaagacttggcaacagaagcagttgagtcgtcatcacttttcagtgatgggagagtagatggtgaaatttattagttaatatatcccagaaattagaaaccttaatatgtggacgtaatctccacagtcaaagaaggatggcacctaaaccaccagtgcccaaagtctgtgtgatgaactttctcttcatactttttttcacagttggctggatgaaattttctagactttctgttggtgtatcccccccctgtatagttaggatagcatttttgatttatgcatggaaacctgaaaaaaagtttacaagtgtatatcagaaaagggaagttgtgccttttatagctattactgtctggttttaacaatttcctttatatttagtgaactacgcttgctcattttttcttacataattttttattcaagttattgtacagctgtttaagatgggcagctagttcgtagctttcccaaataaactctaaacattaatcaatcatctgtgtgaaaatgggttggtgcttctaacctgatggcacttagctatcagaagaccacaaaaattgactcaaatctccagtattcttgtcaaaaaaaaaaaaaaaaaagctcatattttgtatatatctgcttcagtggagaattatataggttgtgcaaattaacagtcctaactggtatagagcacctagtccagtgacctgctgggtaaactgtggatgatggttgcaaaagactaatttaaaaaataactaccaagaggccctgtctgtacctaacgccctatttttgcaatggctatatggcaagaaagctggtaaactatttgtctttcaggaccttttgaagtagtttgtataacttcttaaaagttgtgattccagataaccagctgtaacacagctgagagacttttaatcagacaaagtaattcctctcactaaactttacccaaaaactaaatctctaatatggcaaaaatggctagacacccattttcacattcccatctgtcaccaattggttaatctttcctgatggtacaggaaagctcagctactgatttttgtgatttagaactgtatgtcagacatccatgtttgtaaaactacacatccctaatgtgtgccatagagtttaacacaagtcctgtgaatttcttcactgttgaaaattattttaaacaaaatagaagctgtagtagccctttctgtgtgcaccttaccaactttctgtaaactcaaaacttaacatatttactaagccacaagaaatttgatttctattcaaggtggccaaattatttgtgtaatagaaaactgaaaatctaatattaaaaatatggaacttctaatatatttttatatttagttatagtttcagatatatatcatattggtattcactaatctgggaagggaagggctactgcagctttacatgcaatttattaaaatgattgtaaaatagcttgtatagtgtaaaataagaatgatttttagatgagattgttttatcatgacatgttatatattttttgtaggggtcaaagaaatgctgatggataacctatatgatttatagtttgtacatgcattcatacaggcagcgatggtctcagaaaccaaacagtttgctctaggggaagagggagatggagactggtcctgtgtgcagtgaaggttgctgaggctctgacccagtgagattacagaggaagttatcctctgcctcccattctgaccacccttctcattccaacagtgagtctgtcagcgcaggtttagtttactcaatctccccttgcactaaagtatgtaaagtatgtaaacaggagacaggaaggtggtgcttacatccttaaaggcaccatctaatagcgggttactttcacatacagccctcccccagcagttgaatgacaacagaagcttcagaagtttggcaatagtttgcatagaggtaccagcaatatgtaaatagtgcagaatctcataggttgccaataatacactaattcctttctatcctacaacaagagtttatttccaaataaaatgaggacatgtttttgttttctttgaatgctttttgaatgttatttgttattttcagtattttggagaaattatttaataaaaaaacaatcatttgctttttgaatgctctctaaaagggaatgtaatattttaagatggtgtgtaacccggctggataaatttttggtgcctaagaaaactgcttgaatattcttatcaatgacagtgttaagtttcaaaaagagcttctaaaacgtagattatcattcctttatagaatgttatgtggttaaaaccagaaagcacatctcacacattaatctgattttcatcccaacaatcttggcgctcaaaaaatagaactcaatgagaaaaagaagattatgtgcacttcgttgtcaataataagtcaactgatgctcatcgacaactataggaggcttttcattaaatgggaaaagaagctgtgcccttttaggatacgtgggggaaaagaaagtcatcttaattatgtttaattgtggatttaagtgctatatggtggtgctgtttgaaagcagatttatttcctatgtatgtgttatctggccatcccaacccaaactgttgaagtttgtagtaacttcagtgagagttggttactcacaacaaatcctgaaaagtatttttagtgtttgtaggtattctgtgggatactatacaagcagaactgaggcacttaggacataacacttttggggtatatatatccaaatgcctaaaactatgggaggaaaccttggccaccccaaaaggaaaactaacatgatttgtgtctatgaagtgctggataattagcatgggatgagctctgggcatgccatgaaggaaagccacgctcccttcagaattcagaggcagggagcaattccagtttcacctaagtctcataattttagttcccttttaaaaaccctgaaaactacatcaccatggaatgaaaaatattgttatacaatacattgatctgtcaaacttccagaaccatggtagccttcagtgagatttccatcttggctggtcactccctgactgtagctgtaggtgaatgtgtttttgtgtgtgtgtgtctggttttagtgtcagaagggaaataaaagtgtaaggaggacactttaaaccctttgggtggagtttcgtaatttcccagactattttcaagcaacctggtccacccaggattagtgaccaggttttcaggaaaggatttgcttctctctagaaaatgtctgaaaggattttattttctgatgaaaggctgtatgaaaataccctcctcaaataacttgcttaactacatatagattcaagtgtgtcaatattctattttgtatattaaatgctatataatggggacaaatctatattatactgtgtatggcattattaagaagctttttcattattttttatcacagtaattttaaaatgtgtaaaaattaaaaccagtgactcctgtttaaaaataaaagttgtagttttttattcatgctgaataataatctgtagttaaaaaaaaagtgtctttttacctacgcagtgaaatgtcagactgtaaaaccttgtgtggaaatgtttaacttttattttttcatttaaatttgctgttctggtattaccaaaccacacatttgtaccgaattggcagtaaatgttagccatttacagcaatgccaaatatggagaaacatcataataaaaaaatctgctttttcatta

SEQ ID NO: 2908 - DNA, 6232 bp, Homo sapiens
  source 1..6232: mol_type = genomic DNA
ggcgccgcctccacccgctccccgctcggtcccgctcgctcgcccaggccgggctgccctttcgcgtgtccgcgctctcttccctccgccgccgcctcctccattttgcgagctcgtgtctgtgacgggagcccgagtcaccgcctgcccgtcggggacggattctgtgggtggaaggagacgccgcagccggagcggccgaagcagctgggaccgggacggggcacgcgcgcccggaacctcgacccgcggagcccggcgcggggcggagggctggcttgtcagctgggcaatgggagactttcttaaataggggctctccccccacccatggagaaaggggcggctgtttacttcctttttttagaaaaaaaaaatatatttccctcctgctccttctgcgttcacaagctaagttgtttatctcggctgcggcgggaactgcggacggtggcgggcgagcggctcctctgccagagttgatattcactgatggactccaaagaatcattaactcctggtagagaagaaaaccccagcagtgtgcttgctcaggagaggggagatgtgatggacttctataaaaccctaagaggaggagctactgtgaaggtttctgcgtcttcaccctcactggctgtcgcttctcaatcagactccaagcagcgaagacttttggttgattttccaaaaggctcagtaagcaatgcgcagcagccagatctgtccaaagcagtttcactctcaatgggactgtatatgggagagacagaaacaaaagtgatgggaaatgacctgggattcccacagcagggccaaatcagcctttcctcgggggaaacagacttaaagcttttggaagaaagcattgcaaacctcaataggtcgaccagtgttccagagaaccccaagagttcagcatccactgctgtgtctgctgcccccacagagaaggagtttccaaaaactcactctgatgtatcttcagaacagcaacatttgaagggccagactggcaccaacggtggcaatgtgaaattgtataccacagaccaaagcacctttgacattttgcaggatttggagttttcttctgggtccccaggtaaagagacgaatgagagtccttggagatcagacctgttgatagatgaaaactgtttgctttctcctctggcgggagaagacgattcattccttttggaaggaaactcgaatgaggactgcaagcctctcattttaccggacactaaacccaaaattaaggataatggagatctggttttgtcaagccccagtaatgtaacactgccccaagtgaaaacagaaaaagaagatttcatcgaactctgcacccctggggtaattaagcaagagaaactgggcacagtttactgtcaggcaagctttcctggagcaaatataattggtaataaaatgtctgccatttctgttcatggtgtgagtacctctggaggacagatgtaccactatgacatgaatacagcatccctttctcaacagcaggatcagaagcctatttttaatgtcattccaccaattcccgttggttccgaaaattggaataggtgccaaggatctggagatgacaacttgacttctctggggactctgaacttccctggtcgaacagttttttctaatggctattcaagccccagcatgagaccagatgtaagctctcctccatccagctcctcaacagcaacaacaggaccacctcccaaactctgcctggtgtgctctgatgaagcttcaggatgtcattatggagtcttaacttgtggaagctgtaaagttttcttcaaaagagcagtggaaggacagcacaattacctatgtgctggaaggaatgattgcatcatcgataaaattcgaagaaaaaactgcccagcatgccgctatcgaaaatgtcttcaggctggaatgaacctggaagtagttcctaaggacggtctgaagagccaagagctatttgatgaaattagaatgacctacatcaaagagctaggaaaagccattgtcaagagggaaggaaactccagccagaactggcagcggttttatcaactgacaaaactcttggattctatgcatgaagtggttgaaaatctccttaactattgcttccaaacatttttggataagaccatgagtattgaattccccgagatgttagctgaaatcatcaccaatcagataccaaaatattcaaatggaaatatcaaaaaacttctgtttcatcaaaagtgactgccttaataagaatggttgccttaaagaaagtcgaattaatagcttttattgtataaactatcagtttgtcctgtagaggttttgttgttttattttttattgttttcatctgttgttttgttttaaatacgcactacatgtggtttatagagggccaagacttggcaacagaagcagttgagtcgtcatcacttttcagtgatgggagagtagatggtgaaatttattagttaatatatcccagaaattagaaaccttaatatgtggacgtaatctccacagtcaaagaaggatggcacctaaaccaccagtgcccaaagtctgtgtgatgaactttctcttcatactttttttcacagttggctggatgaaattttctagactttctgttggtgtatcccccccctgtatagttaggatagcatttttgatttatgcatggaaacctgaaaaaaagtttacaagtgtatatcagaaaagggaagttgtgccttttatagctattactgtctggttttaacaatttcctttatatttagtgaactacgcttgctcattttttcttacataattttttattcaagttattgtacagctgtttaagatgggcagctagttcgtagctttcccaaataaactctaaacattaatcaatcatctgtgtgaaaatgggttggtgcttctaacctgatggcacttagctatcagaagaccacaaaaattgactcaaatctccagtattcttgtcaaaaaaaaaaaaaaaaaagctcatattttgtatatatctgcttcagtggagaattatataggttgtgcaaattaacagtcctaactggtatagagcacctagtccagtgacctgctgggtaaactgtggatgatggttgcaaaagactaatttaaaaaataactaccaagaggccctgtctgtacctaacgccctatttttgcaatggctatatggcaagaaagctggtaaactatttgtctttcaggaccttttgaagtagtttgtataacttcttaaaagttgtgattccagataaccagctgtaacacagctgagagacttttaatcagacaaagtaattcctctcactaaactttacccaaaaactaaatctctaatatggcaaaaatggctagacacccattttcacattcccatctgtcaccaattggttaatctttcctgatggtacaggaaagctcagctactgatttttgtgatttagaactgtatgtcagacatccatgtttgtaaaactacacatccctaatgtgtgccatagagtttaacacaagtcctgtgaatttcttcactgttgaaaattattttaaacaaaatagaagctgtagtagccctttctgtgtgcaccttaccaactttctgtaaactcaaaacttaacatatttactaagccacaagaaatttgatttctattcaaggtggccaaattatttgtgtaatagaaaactgaaaatctaatattaaaaatatggaacttctaatatatttttatatttagttatagtttcagatatatatcatattggtattcactaatctgggaagggaagggctactgcagctttacatgcaatttattaaaatgattgtaaaatagcttgtatagtgtaaaataagaatgatttttagatgagattgttttatcatgacatgttatatattttttgtaggggtcaaagaaatgctgatggataacctatatgatttatagtttgtacatgcattcatacaggcagcgatggtctcagaaaccaaacagtttgctctaggggaagagggagatggagactggtcctgtgtgcagtgaaggttgctgaggctctgacccagtgagattacagaggaagttatcctctgcctcccattctgaccacccttctcattccaacagtgagtctgtcagcgcaggtttagtttactcaatctccccttgcactaaagtatgtaaagtatgtaaacaggagacaggaaggtggtgcttacatccttaaaggcaccatctaatagcgggttactttcacatacagccctcccccagcagttgaatgacaacagaagcttcagaagtttggcaatagtttgcatagaggtaccagcaatatgtaaatagtgcagaatctcataggttgccaataatacactaattcctttctatcctacaacaagagtttatttccaaataaaatgaggacatgtttttgttttctttgaatgctttttgaatgttatttgttattttcagtattttggagaaattatttaataaaaaaacaatcatttgctttttgaatgctctctaaaagggaatgtaatattttaagatggtgtgtaacccggctggataaatttttggtgcctaagaaaactgcttgaatattcttatcaatgacagtgttaagtttcaaaaagagcttctaaaacgtagattatcattcctttatagaatgttatgtggttaaaaccagaaagcacatctcacacattaatctgattttcatcccaacaatcttggcgctcaaaaaatagaactcaatgagaaaaagaagattatgtgcacttcgttgtcaataataagtcaactgatgctcatcgacaactataggaggcttttcattaaatgggaaaagaagctgtgcccttttaggatacgtgggggaaaagaaagtcatcttaattatgtttaattgtggatttaagtgctatatggtggtgctgtttgaaagcagatttatttcctatgtatgtgttatctggccatcccaacccaaactgttgaagtttgtagtaacttcagtgagagttggttactcacaacaaatcctgaaaagtatttttagtgtttgtaggtattctgtgggatactatacaagcagaactgaggcacttaggacataacacttttggggtatatatatccaaatgcctaaaactatgggaggaaaccttggccaccccaaaaggaaaactaacatgatttgtgtctatgaagtgctggataattagcatgggatgagctctgggcatgccatgaaggaaagccacgctcccttcagaattcagaggcagggagcaattccagtttcacctaagtctcataattttagttcccttttaaaaaccctgaaaactacatcaccatggaatgaaaaatattgttatacaatacattgatctgtcaaacttccagaaccatggtagccttcagtgagatttccatcttggctggtcactccctgactgtagctgtaggtgaatgtgtttttgtgtgtgtgtgtctggttttagtgtcagaagggaaataaaagtgtaaggaggacactttaaaccctttgggtggagtttcgtaatttcccagactattttcaagcaacctggtccacccaggattagtgaccaggttttcaggaaaggatttgcttctctctagaaaatgtctgaaaggattttattttctgatgaaaggctgtatgaaaataccctcctcaaataacttgcttaactacatatagattcaagtgtgtcaatattctattttgtatattaaatgctatataatggggacaaatctatattatactgtgtatggcattattaagaagctttttcattattttttatcacagtaattttaaaatgtgtaaaaattaaaaccagtgactcctgtttaaaaataaaagttgtagttttttattcatgctgaataataatctgtagttaaaaaaaaagtgtctttttacctacgcagtgaaatgtcagactgtaaaaccttgtgtggaaatgtttaacttttattttttcatttaaatttgctgttctggtattaccaaaccacacatttgtaccgaattggcagtaaatgttagccatttacagcaatgccaaatatggagaaacatcataataaaaaaatctgctttttcatta

SEQ ID NO: 2909 - DNA, 6795 bp, Homo sapiens
  source 1..6795: mol_type = genomic DNA
gtgcgcgccgtggcgccgcctccacccgctccccgctcggtcccgctcgctcgcccaggccgggctgccctttcgcgtgtccgcgctctcttccctccgccgccgcctcctccattttgcgagctcgtgtctgtgacgggagcccgagtcaccgcctgcccgtcggggacggattctgtgggtggaaggagacgccgcagccggagcggccgaagcagctgggaccgggacggggcacgcgcgcccggaacctcgacccgcggagcccggcgcggggcggagggctggcttgtcagctgggcaatgggagactttcttaaataggggctctccccccacccatggagaaaggggcggctgtttacttcctttttttagaaaaaaaaaatatatttccctcctgctccttctgcgttcacaagctaagttgtttatctcggctgcggcgggaactgcggacggtggcgggcgagcggctcctctgccagagttgatattcactgatggactccaaagaatcattaactcctggtagagaagaaaaccccagcagtgtgcttgctcaggagaggggagatgtgatggacttctataaaaccctaagaggaggagctactgtgaaggtttctgcgtcttcaccctcactggctgtcgcttctcaatcagactccaagcagcgaagacttttggttgattttccaaaaggctcagtaagcaatgcgcagcagccagatctgtccaaagcagtttcactctcaatgggactgtatatgggagagacagaaacaaaagtgatgggaaatgacctgggattcccacagcagggccaaatcagcctttcctcgggggaaacagacttaaagcttttggaagaaagcattgcaaacctcaataggtcgaccagtgttccagagaaccccaagagttcagcatccactgctgtgtctgctgcccccacagagaaggagtttccaaaaactcactctgatgtatcttcagaacagcaacatttgaagggccagactggcaccaacggtggcaatgtgaaattgtataccacagaccaaagcacctttgacattttgcaggatttggagttttcttctgggtccccaggtaaagagacgaatgagagtccttggagatcagacctgttgatagatgaaaactgtttgctttctcctctggcgggagaagacgattcattccttttggaaggaaactcgaatgaggactgcaagcctctcattttaccggacactaaacccaaaattaaggataatggagatctggttttgtcaagccccagtaatgtaacactgccccaagtgaaaacagaaaaagaagatttcatcgaactctgcacccctggggtaattaagcaagagaaactgggcacagtttactgtcaggcaagctttcctggagcaaatataattggtaataaaatgtctgccatttctgttcatggtgtgagtacctctggaggacagatgtaccactatgacatgaatacagcatccctttctcaacagcaggatcagaagcctatttttaatgtcattccaccaattcccgttggttccgaaaattggaataggtgccaaggatctggagatgacaacttgacttctctggggactctgaacttccctggtcgaacagttttttctaatggctattcaagccccagcatgagaccagatgtaagctctcctccatccagctcctcaacagcaacaacaggaccacctcccaaactctgcctggtgtgctctgatgaagcttcaggatgtcattatggagtcttaacttgtggaagctgtaaagttttcttcaaaagagcagtggaaggacagcacaattacctatgtgctggaaggaatgattgcatcatcgataaaattcgaagaaaaaactgcccagcatgccgctatcgaaaatgtcttcaggctggaatgaacctggaagctcgaaaaacaaagaaaaaaataaaaggaattcagcaggccactacaggagtctcacaagaaacctctgaaaatcctggtaacaaaacaatagttcctgcaacgttaccacaactcacccctaccctggtgtcactgttggaggttattgaacctgaagtgttatatgcaggatatgatagctctgttccagactcaacttggaggatcatgactacgctcaacatgttaggagggcggcaagtgattgcagcagtgaaatgggcaaaggcaataccaggtttcaggaacttacacctggatgaccaaatgaccctactgcagtactcctggatgtttcttatggcatttgctctggggtggagatcatatagacaatcaagtgcaaacctgctgtgttttgctcctgatctgattattaatgagcagagaatgactctaccctgcatgtacgaccaatgtaaacacatgctgtatgtttcctctgagttacacaggcttcaggtatcttatgaagagtatctctgtatgaaaaccttactgcttctctcttcagttcctaaggacggtctgaagagccaagagctatttgatgaaattagaatgacctacatcaaagagctaggaaaagccattgtcaagagggaaggaaactccagccagaactggcagcggttttatcaactgacaaaactcttggattctatgcatgaagtggttgaaaatctccttaactattgcttccaaacatttttggataagaccatgagtattgaattccccgagatgttagctgaaatcatcaccaatcagataccaaaatattcaaatggaaatatcaaaaaacttctgtttcatcaaaagtgactgccttaataagaatggttgccttaaagaaagtcgaattaatagcttttattgtataaactatcagtttgtcctgtagaggttttgttgttttattttttattgttttcatctgttgttttgttttaaatacgcactacatgtggtttatagagggccaagacttggcaacagaagcagttgagtcgtcatcacttttcagtgatgggagagtagatggtgaaatttattagttaatatatcccagaaattagaaaccttaatatgtggacgtaatctccacagtcaaagaaggatggcacctaaaccaccagtgcccaaagtctgtgtgatgaactttctcttcatactttttttcacagttggctggatgaaattttctagactttctgttggtgtatcccccccctgtatagttaggatagcatttttgatttatgcatggaaacctgaaaaaaagtttacaagtgtatatcagaaaagggaagttgtgccttttatagctattactgtctggttttaacaatttcctttatatttagtgaactacgcttgctcattttttcttacataattttttattcaagttattgtacagctgtttaagatgggcagctagttcgtagctttcccaaataaactctaaacattaatcaatcatctgtgtgaaaatgggttggtgcttctaacctgatggcacttagctatcagaagaccacaaaaattgactcaaatctccagtattcttgtcaaaaaaaaaaaaaaaaaagctcatattttgtatatatctgcttcagtggagaattatataggttgtgcaaattaacagtcctaactggtatagagcacctagtccagtgacctgctgggtaaactgtggatgatggttgcaaaagactaatttaaaaaataactaccaagaggccctgtctgtacctaacgccctatttttgcaatggctatatggcaagaaagctggtaaactatttgtctttcaggaccttttgaagtagtttgtataacttcttaaaagttgtgattccagataaccagctgtaacacagctgagagacttttaatcagacaaagtaattcctctcactaaactttacccaaaaactaaatctctaatatggcaaaaatggctagacacccattttcacattcccatctgtcaccaattggttaatctttcctgatggtacaggaaagctcagctactgatttttgtgatttagaactgtatgtcagacatccatgtttgtaaaactacacatccctaatgtgtgccatagagtttaacacaagtcctgtgaatttcttcactgttgaaaattattttaaacaaaatagaagctgtagtagccctttctgtgtgcaccttaccaactttctgtaaactcaaaacttaacatatttactaagccacaagaaatttgatttctattcaaggtggccaaattatttgtgtaatagaaaactgaaaatctaatattaaaaatatggaacttctaatatatttttatatttagttatagtttcagatatatatcatattggtattcactaatctgggaagggaagggctactgcagctttacatgcaatttattaaaatgattgtaaaatagcttgtatagtgtaaaataagaatgatttttagatgagattgttttatcatgacatgttatatattttttgtaggggtcaaagaaatgctgatggataacctatatgatttatagtttgtacatgcattcatacaggcagcgatggtctcagaaaccaaacagtttgctctaggggaagagggagatggagactggtcctgtgtgcagtgaaggttgctgaggctctgacccagtgagattacagaggaagttatcctctgcctcccattctgaccacccttctcattccaacagtgagtctgtcagcgcaggtttagtttactcaatctccccttgcactaaagtatgtaaagtatgtaaacaggagacaggaaggtggtgcttacatccttaaaggcaccatctaatagcgggttactttcacatacagccctcccccagcagttgaatgacaacagaagcttcagaagtttggcaatagtttgcatagaggtaccagcaatatgtaaatagtgcagaatctcataggttgccaataatacactaattcctttctatcctacaacaagagtttatttccaaataaaatgaggacatgtttttgttttctttgaatgctttttgaatgttatttgttattttcagtattttggagaaattatttaataaaaaaacaatcatttgctttttgaatgctctctaaaagggaatgtaatattttaagatggtgtgtaacccggctggataaatttttggtgcctaagaaaactgcttgaatattcttatcaatgacagtgttaagtttcaaaaagagcttctaaaacgtagattatcattcctttatagaatgttatgtggttaaaaccagaaagcacatctcacacattaatctgattttcatcccaacaatcttggcgctcaaaaaatagaactcaatgagaaaaagaagattatgtgcacttcgttgtcaataataagtcaactgatgctcatcgacaactataggaggcttttcattaaatgggaaaagaagctgtgcccttttaggatacgtgggggaaaagaaagtcatcttaattatgtttaattgtggatttaagtgctatatggtggtgctgtttgaaagcagatttatttcctatgtatgtgttatctggccatcccaacccaaactgttgaagtttgtagtaacttcagtgagagttggttactcacaacaaatcctgaaaagtatttttagtgtttgtaggtattctgtgggatactatacaagcagaactgaggcacttaggacataacacttttggggtatatatatccaaatgcctaaaactatgggaggaaaccttggccaccccaaaaggaaaactaacatgatttgtgtctatgaagtgctggataattagcatgggatgagctctgggcatgccatgaaggaaagccacgctcccttcagaattcagaggcagggagcaattccagtttcacctaagtctcataattttagttcccttttaaaaaccctgaaaactacatcaccatggaatgaaaaatattgttatacaatacattgatctgtcaaacttccagaaccatggtagccttcagtgagatttccatcttggctggtcactccctgactgtagctgtaggtgaatgtgtttttgtgtgtgtgtgtctggttttagtgtcagaagggaaataaaagtgtaaggaggacactttaaaccctttgggtggagtttcgtaatttcccagactattttcaagcaacctggtccacccaggattagtgaccaggttttcaggaaaggatttgcttctctctagaaaatgtctgaaaggattttattttctgatgaaaggctgtatgaaaataccctcctcaaataacttgcttaactacatatagattcaagtgtgtcaatattctattttgtatattaaatgctatataatggggacaaatctatattatactgtgtatggcattattaagaagctttttcattattttttatcacagtaattttaaaatgtgtaaaaattaaaaccagtgactcctgtttaaaaataaaagttgtagttttttattcatgctgaataataatctgtagttaaaaaaaaagtgtctttttacctacgcagtgaaatgtcagactgtaaaaccttgtgtggaaatgtttaacttttattttttcatttaaatttgctgttctggtattaccaaaccacacatttgtaccgaattggcagtaaatgttagccatttacagcaatgccaaatatggagaaacatcataataaaaaaatctgctttttcatta

SEQ ID NO: 2910 - DNA, 3245 bp, Homo sapiens
  source 1..3245: mol_type = genomic DNA
actggcggcgcttgccgccaaggggcagagcgagctcccgagtgggtctggagccgcggagctgggcgggggcgggaaggaggtagcgagaaaagaaactggagaaactcggtggccctcttaacgccgccccagagagaccagttgatattcactgatggactccaaagaatcattaactcctggtagagaagaaaaccccagcagtgtgcttgctcaggagaggggagatgtgatggacttctataaaaccctaagaggaggagctactgtgaaggtttctgcgtcttcaccctcactggctgtcgcttctcaatcagactccaagcagcgaagacttttggttgattttccaaaaggctcagtaagcaatgcgcagcagccagatctgtccaaagcagtttcactctcaatgggactgtatatgggagagacagaaacaaaagtgatgggaaatgacctgggattcccacagcagggccaaatcagcctttcctcgggggaaacagacttaaagcttttggaagaaagcattgcaaacctcaataggtcgaccagtgttccagagaaccccaagagttcagcatccactgctgtgtctgctgcccccacagagaaggagtttccaaaaactcactctgatgtatcttcagaacagcaacatttgaagggccagactggcaccaacggtggcaatgtgaaattgtataccacagaccaaagcacctttgacattttgcaggatttggagttttcttctgggtccccaggtaaagagacgaatgagagtccttggagatcagacctgttgatagatgaaaactgtttgctttctcctctggcgggagaagacgattcattccttttggaaggaaactcgaatgaggactgcaagcctctcattttaccggacactaaacccaaaattaaggataatggagatctggttttgtcaagccccagtaatgtaacactgccccaagtgaaaacagaaaaagaagatttcatcgaactctgcacccctggggtaattaagcaagagaaactgggcacagtttactgtcaggcaagctttcctggagcaaatataattggtaataaaatgtctgccatttctgttcatggtgtgagtacctctggaggacagatgtaccactatgacatgaatacagcatccctttctcaacagcaggatcagaagcctatttttaatgtcattccaccaattcccgttggttccgaaaattggaataggtgccaaggatctggagatgacaacttgacttctctggggactctgaacttccctggtcgaacagttttttctaatggctattcaagccccagcatgagaccagatgtaagctctcctccatccagctcctcaacagcaacaacaggaccacctcccaaactctgcctggtgtgctctgatgaagcttcaggatgtcattatggagtcttaacttgtggaagctgtaaagttttcttcaaaagagcagtggaaggtagacagcacaattacctatgtgctggaaggaatgattgcatcatcgataaaattcgaagaaaaaactgcccagcatgccgctatcgaaaatgtcttcaggctggaatgaacctggaagctcgaaaaacaaagaaaaaaataaaaggaattcagcaggccactacaggagtctcacaagaaacctctgaaaatcctggtaacaaaacaatagttcctgcaacgttaccacaactcacccctaccctggtgtcactgttggaggttattgaacctgaagtgttatatgcaggatatgatagctctgttccagactcaacttggaggatcatgactacgctcaacatgttaggagggcggcaagtgattgcagcagtgaaatgggcaaaggcaataccaggtttcaggaacttacacctggatgaccaaatgaccctactgcagtactcctggatgtttcttatggcatttgctctggggtggagatcatatagacaatcaagtgcaaacctgctgtgttttgctcctgatctgattattaatgagcagagaatgactctaccctgcatgtacgaccaatgtaaacacatgctgtatgtttcctctgagttacacaggcttcaggtatcttatgaagagtatctctgtatgaaaaccttactgcttctctcttcagttcctaaggacggtctgaagagccaagagctatttgatgaaattagaatgacctacatcaaagagctaggaaaagccattgtcaagagggaaggaaactccagccagaactggcagcggttttatcaactgacaaaactcttggattctatgcatgaagtggttgaaaatctccttaactattgcttccaaacatttttggataagaccatgagtattgaattccccgagatgttagctgaaatcatcaccaatcagataccaaaatattcaaatggaaatatcaaaaaacttctgtttcatcaaaagtgactgccttaataagaatggttgccttaaagaaagtcgaattaatagcttttattgtataaactatcagtttgtcctgtagaggttttgttgttttattttttattgttttcatctgttgttttgttttaaatacgcactacatgtggtttatagagggccaagacttggcaacagaagcagttgagtcgtcatcacttttcagtgatgggagagtagatggtgaaatttattagttaatatatcccagaaattagaaaccttaatatgtggacgtaatctccacagtcaaagaaggatggcacctaaaccaccagtgcccaaagtctgtgtgatgaactttctcttcatactttttttcacagttggctggatgaaattttctagactttctgttggtgtatcccccccctgtatagttaggatagcatttttgatttatgcatggaaacctgaaaaaaagtttacaagtgtatatcagaaaagggaagttgtgccttttatagctattactgtctggttttaacaatttcctttatatttagtgaactacgcttgctcattttttcttacataattttttattcaagttattgtacagctgtttaagatgggcagctagttcgtagctttcccaaataaactctaaacattaatcaatcatctgtgtgaaaatgggttggtgcttctaacctgatggcacttagctatcagaagaccacaaaaattgactcaaatctccagtattcttgtc

SEQ ID NO: 2911 - DNA, 3789 bp, Homo sapiens
  source 1..3789: mol_type = genomic DNA
tttttagaaaaaaaaaatatatttccctcctgctccttctgcgttcacaagctaagttgtttatctcggctgcggcgggaactgcggacggtggcgggcgagcggctcctctgccagagttgatattcactgatggactccaaagaatcattaactcctggtagagaagaaaaccccagcagtgtgcttgctcaggagaggggagatgtgatggacttctataaaaccctaagaggaggagctactgtgaaggtttctgcgtcttcaccctcactggctgtcgcttctcaatcagactccaagcagcgaagacttttggttgattttccaaaaggctcagtaagcaatgcgcagcagccagatctgtccaaagcagtttcactctcaatgggactgtatatgggagagacagaaacaaaagtgatgggaaatgacctgggattcccacagcagggccaaatcagcctttcctcgggggaaacagacttaaagcttttggaagaaagcattgcaaacctcaataggtcgaccagtgttccagagaaccccaagagttcagcatccactgctgtgtctgctgcccccacagagaaggagtttccaaaaactcactctgatgtatcttcagaacagcaacatttgaagggccagactggcaccaacggtggcaatgtgaaattgtataccacagaccaaagcacctttgacattttgcaggatttggagttttcttctgggtccccaggtaaagagacgaatgagagtccttggagatcagacctgttgatagatgaaaactgtttgctttctcctctggcgggagaagacgattcattccttttggaaggaaactcgaatgaggactgcaagcctctcattttaccggacactaaacccaaaattaaggataatggagatctggttttgtcaagccccagtaatgtaacactgccccaagtgaaaacagaaaaagaagatttcatcgaactctgcacccctggggtaattaagcaagagaaactgggcacagtttactgtcaggcaagctttcctggagcaaatataattggtaataaaatgtctgccatttctgttcatggtgtgagtacctctggaggacagatgtaccactatgacatgaatacagcatccctttctcaacagcaggatcagaagcctatttttaatgtcattccaccaattcccgttggttccgaaaattggaataggtgccaaggatctggagatgacaacttgacttctctggggactctgaacttccctggtcgaacagttttttctaatggctattcaagccccagcatgagaccagatgtaagctctcctccatccagctcctcaacagcaacaacaggaccacctcccaaactctgcctggtgtgctctgatgaagcttcaggatgtcattatggagtcttaacttgtggaagctgtaaagttttcttcaaaagagcagtggaaggacagcacaattacctatgtgctggaaggaatgattgcatcatcgataaaattcgaagaaaaaactgcccagcatgccgctatcgaaaatgtcttcaggctggaatgaacctggaagctcgaaaaacaaagaaaaaaataaaaggaattcagcaggccactacaggagtctcacaagaaacctctgaaaatcctggtaacaaaacaatagttcctgcaacgttaccacaactcacccctaccctggtgtcactgttggaggttattgaacctgaagtgttatatgcaggatatgatagctctgttccagactcaacttggaggatcatgactacgctcaacatgttaggagggcggcaagtgattgcagcagtgaaatgggcaaaggcaataccaggtttcaggaacttacacctggatgaccaaatgaccctactgcagtactcctggatgtttcttatggcatttgctctggggtggagatcatatagacaatcaagtgcaaacctgctgtgttttgctcctgatctgattattaatgagcagagaatgactctaccctgcatgtacgaccaatgtaaacacatgctgtatgtttcctctgagttacacaggcttcaggtatcttatgaagagtatctctgtatgaaaaccttactgcttctctcttcagttcctaaggacggtctgaagagccaagagctatttgatgaaattagaatgacctacatcaaagagctaggaaaagccattgtcaagagggaaggaaactccagccagaactggcagcggttttatcaactgacaaaactcttggattctatgcatgaaaatgttatgtggttaaaaccagaaagcacatctcacacattaatctgattttcatcccaacaatcttggcgctcaaaaaatagaactcaatgagaaaaagaagattatgtgcacttcgttgtcaataataagtcaactgatgctcatcgacaactataggaggcttttcattaaatgggaaaagaagctgtgcccttttaggatacgtgggggaaaagaaagtcatcttaattatgtttaattgtggatttaagtgctatatggtggtgctgtttgaaagcagatttatttcctatgtatgtgttatctggccatcccaacccaaactgttgaagtttgtagtaacttcagtgagagttggttactcacaacaaatcctgaaaagtatttttagtgtttgtaggtattctgtgggatactatacaagcagaactgaggcacttaggacataacacttttggggtatatatatccaaatgcctaaaactatgggaggaaaccttggccaccccaaaaggaaaactaacatgatttgtgtctatgaagtgctggataattagcatgggatgagctctgggcatgccatgaaggaaagccacgctcccttcagaattcagaggcagggagcaattccagtttcacctaagtctcataattttagttcccttttaaaaaccctgaaaactacatcaccatggaatgaaaaatattgttatacaatacattgatctgtcaaacttccagaaccatggtagccttcagtgagatttccatcttggctggtcactccctgactgtagctgtaggtgaatgtgtttttgtgtgtgtgtgtctggttttagtgtcagaagggaaataaaagtgtaaggaggacactttaaaccctttgggtggagtttcgtaatttcccagactattttcaagcaacctggtccacccaggattagtgaccaggttttcaggaaaggatttgcttctctctagaaaatgtctgaaaggattttattttctgatgaaaggctgtatgaaaataccctcctcaaataacttgcttaactacatatagattcaagtgtgtcaatattctattttgtatattaaatgctatataatggggacaaatctatattatactgtgtatggcattattaagaagctttttcattattttttatcacagtaattttaaaatgtgtaaaaattaaaaccagtgactcctgtttaaaaataaaagttgtagttttttattcatgctgaataataatctgtagttaaaaaaaaagtgtctttttacctacgcagtgaaatgtcagactgtaaaaccttgtgtggaaatgtttaacttttattttttcatttaaatttgctgttctggtattaccaaaccacacatttgtaccgaattggcagtaaatgttagccatttacagcaatgccaaatatggagaaacatcataataaaaaaatctgcttttt

SEQ ID NO: 2912 - DNA, 1430 bp, Homo sapiens
  source 1..1430: mol_type = genomic DNA
agtgcgagagcgcggcggcggcagctgaagacccggccgcccagatgatgcggtggtgggggacctgccggcacgcgactccccccgggcccaaaccccagcatgagaccagatgtaagctctcctccatccagctcctcaacagcaacaacaggaccacctcccaaactctgcctggtgtgctctgatgaagcttcaggatgtcattatggagtcttaacttgtggaagctgtaaagttttcttcaaaagagcagtggaaggacagcacaattacctatgtgctggaaggaatgattgcatcatcgataaaattcgaagaaaaaactgcccagcatgccgctatcgaaaatgtcttcaggctggaatgaacctggaagctcgaaaaacaaagaaaaaaataaaaggaattcagcaggccactacaggagtctcacaagaaacctctgaaaatcctggtaacaaaacaatagttcctgcaacgttaccacaactcacccctaccctggtgtcactgttggaggttattgaacctgaagtgttatatgcaggatatgatagctctgttccagactcaacttggaggatcatgactacgctcaacatgttaggagggcggcaagtgattgcagcagtgaaatgggcaaaggcaataccaggtttcaggaacttacacctggatgaccaaatgaccctactgcagtactcctggatgtttcttatggcatttgctctggggtggagatcatatagacaatcaagtgcaaacctgctgtgttttgctcctgatctgattattaatgagcagagaatgactctaccctgcatgtacgaccaatgtaaacacatgctgtatgtttcctctgagttacacaggcttcaggtatcttatgaagagtatctctgtatgaaaaccttactgcttctctcttcagttcctaaggacggtctgaagagccaagagctatttgatgaaattagaatgacctacatcaaagagctaggaaaagccattgtcaagagggaaggaaactccagccagaactggcagcggttttatcaactgacaaaactcttggattctatgcatgaagtggttgaaaatctccttaactattgcttccaaacatttttggataagaccatgagtattgaattccccgagatgttagctgaaatcatcaccaatcagataccaaaatattcaaatggaaatatcaaaaaacttctgtttcatcaaaagtgactgccttaataagaatggttgccttaaagaaagtcgaattaatagcttttattgtataaactatcagtttgtcctgtagaggttttgttgttttattttttattgttttcatctgttgttttgttttaaatacgcactacatgtggtttatagagggccaagacttggcaacagaagcagttgag

SEQ ID NO: 2913 - DNA, 4591 bp, Homo sapiens
  source 1..4591: mol_type = genomic DNA
ttgatattcactgatggactccaaagaatcattaactcctggtagagaagaaaaccccagcagtgtgcttgctcaggagaggggagatgtgatggacttctataaaaccctaagaggaggagctactgtgaaggtttctgcgtcttcaccctcactggctgtcgcttctcaatcagactccaagcagcgaagacttttggttgattttccaaaaggctcagtaagcaatgcgcagcagccagatctgtccaaagcagtttcactctcaatgggactgtatatgggagagacagaaacaaaagtgatgggaaatgacctgggattcccacagcagggccaaatcagcctttcctcgggggaaacagacttaaagcttttggaagaaagcattgcaaacctcaataggtcgaccagtgttccagagaaccccaagagttcagcatccactgctgtgtctgctgcccccacagagaaggagtttccaaaaactcactctgatgtatcttcagaacagcaacatttgaagggccagactggcaccaacggtggcaatgtgaaattgtataccacagaccaaagcacctttgacattttgcaggatttggagttttcttctgggtccccaggtaaagagacgaatgagagtccttggagatcagacctgttgatagatgaaaactgtttgctttctcctctggcgggagaagacgattcattccttttggaaggaaactcgaatgaggactgcaagcctctcattttaccggacactaaacccaaaattaaggataatggagatctggttttgtcaagccccagtaatgtaacactgccccaagtgaaaacagaaaaagaagatttcatcgaactctgcacccctggggtaattaagcaagagaaactgggcacagtttactgtcaggcaagctttcctggagcaaatataattgcatccctttctcaacagcaggatcagaagcctatttttaatgtcattccaccaattcccgttggttccgaaaattggaataggtgccaaggatctggagatgacaacttgacttctctggggactctgaacttccctggtcgaacagttttttctaatggctattcaagccccagcatgagaccagatgtaagctctcctccatccagctcctcaacagcaacaacaggaccacctcccaaactctgcctggtgtgctctgatgaagcttcaggatgtcattatggagtcttaacttgtggaagctgtaaagttttcttcaaaagagcagtggaaggacagcacaattacctatgtgctggaaggaatgattgcatcatcgataaaattcgaagaaaaaactgcccagcatgccgctatcgaaaatgtcttcaggctggaatgaacctggaagctcgaaaaacaaagaaaaaaataaaaggaattcagcaggccactacaggagtctcacaagaaacctctgaaaatcctggtaacaaaacaatagttcctgcaacgttaccacaactcacccctaccctggtgtcactgttggaggttattgaacctgaagtgttatatgcaggatatgatagctctgttccagactcaacttggaggatcatgactacgctcaacatgttaggagggcggcaagtgattgcagcagtgaaatgggcaaaggcaataccaggtttcaggaacttacacctggatgaccaaatgaccctactgcagtactcctggatgtttcttatggcatttgctctggggtggagatcatatagacaatcaagtgcaaacctgctgtgttttgctcctgatctgattattaatgagcagagaatgactctaccctgcatgtacgaccaatgtaaacacatgctgtatgtttcctctgagttacacaggcttcaggtatcttatgaagagtatctctgtatgaaaaccttactgcttctctcttcagttcctaaggacggtctgaagagccaagagctatttgatgaaattagaatgacctacatcaaagagctaggaaaagccattgtcaagagggaaggaaactccagccagaactggcagcggttttatcaactgacaaaactcttggattctatgcatgaagtggttgaaaatctccttaactattgcttccaaacatttttggataagaccatgagtattgaattccccgagatgttagctgaaatcatcaccaatcagataccaaaatattcaaatggaaatatcaaaaaacttctgtttcatcaaaagtgactgccttaataagaatggttgccttaaagaaagtcgaattaatagcttttattgtataaactatcagtttgtcctgtagaggttttgttgttttattttttattgttttcatctgttgttttgttttaaatacgcactacatgtggtttatagagggccaagacttggcaacagaagcagttgagtcgtcatcacttttcagtgatgggagagtagatggtgaaatttattagttaatatatcccagaaattagaaaccttaatatgtggacgtaatctccacagtcaaagaaggatggcacctaaaccaccagtgcccaaagtctgtgtgatgaactttctcttcatactttttttcacagttggctggatgaaattttctagactttctgttggtgtatcccccccctgtatagttaggatagcatttttgatttatgcatggaaacctgaaaaaaagtttacaagtgtatatcagaaaagggaagttgtgccttttatagctattactgtctggttttaacaatttcctttatatttagtgaactacgcttgctcattttttcttacataattttttattcaagttattgtacagctgtttaagatgggcagctagttcgtagctttcccaaataaactctaaacattaatcaatcatctgtgtgaaaatgggttggtgcttctaacctgatggcacttagctatcagaagaccacaaaaattgactcaaatctccagtattcttgtcaaaaaaaaaaaaaaaaaagctcatattttgtatatatctgcttcagtggagaattatataggttgtgcaaattaacagtcctaactggtatagagcacctagtccagtgacctgctgggtaaactgtggatgatggttgcaaaagactaatttaaaaaataactaccaagaggccctgtctgtacctaacgccctatttttgcaatggctatatggcaagaaagctggtaaactatttgtctttcaggaccttttgaagtagtttgtataacttcttaaaagttgtgattccagataaccagctgtaacacagctgagagacttttaatcagacaaagtaattcctctcactaaactttacccaaaaactaaatctctaatatggcaaaaatggctagacacccattttcacattcccatctgtcaccaattggttaatctttcctgatggtacaggaaagctcagctactgatttttgtgatttagaactgtatgtcagacatccatgtttgtaaaactacacatccctaatgtgtgccatagagtttaacacaagtcctgtgaatttcttcactgttgaaaattattttaaacaaaatagaagctgtagtagccctttctgtgtgcaccttaccaactttctgtaaactcaaaacttaacatatttactaagccacaagaaatttgatttctattcaaggtggccaaattatttgtgtaatagaaaactgaaaatctaatattaaaaatatggaacttctaatatatttttatatttagttatagtttcagatatatatcatattggtattcactaatctgggaagggaagggctactgcagctttacatgcaatttattaaaatgattgtaaaatagcttgtatagtgtaaaataagaatgatttttagatgagattgttttatcatgacatgttatatattttttgtaggggtcaaagaaatgctgatggataacctatatgatttatagtttgtacatgcattcatacaggcagcgatggtctcagaaaccaaacagtttgctctaggggaagagggagatggagactggtcctgtgtgcagtgaaggttgctgaggctctgacccagtgagattacagaggaagttatcctctgcctcccattctgaccacccttctcattccaacagtgagtctgtcagcgcaggtttagtttactcaatctccccttgcactaaagtatgtaaagtatgtaaacaggagacaggaaggtggtgcttacatccttaaaggcaccatctaatagcgggttactttcacatacagccctcccccagcagttgaatgacaacagaagcttcagaagtttggcaatagtttgcatagaggtaccagcaatatgtaaatagtgcagaatctcataggttgccaataatacactaattcctttctatcctacaacaagagtttatttccaaataaaatgaggacatgtttttgttttctttgaatgctttttgaatgttatttgttattttcagtattttggagaaattatttaataaaaaaacaatcatttgctttttg

SEQ ID NO: 2914 - DNA, 585 bp, Homo sapiens
  source 1..585: mol_type = genomic DNA
gtactcaaaggtttggatgtgtgactagctggtaggagggaaatttggaagtaattagggattgagaattctagcatagtatttatcaaatgttatatgtattggttctcagaaaagcaaacagccgtgattgaaaagagttgatattcactgatggactccaaagaatcattaactcctggtagagaagaaaaccccagcagtgtgcttgctcaggagaggggagatgtgatggacttctataaaaccctaagaggaggagctactgtgaaggtttctgcgtcttcaccctcactggctgtcgcttctcaatcagactccaagcagcgaagacttttggttgattttccaaaaggctcagtaagcaatgcgcagcagccagatctgtccaaagcagtttcactctcaatgggactgtatatgggagagacagaaacaaaagtgatgggaaatgacctgggattcccacagcagggccaaatcagcctttcctcgggggaaacagacttaaagcttttggaagaaagcattgcaaacctcaataggtcgaccagtgttccagagaaccccaagagttcagcatcc

SEQ ID NO: 2915 - DNA, 498 bp, Homo sapiens
  source 1..498: mol_type = genomic DNA
aatccagctcgctggaggttttgcatttggcgtgcaacttccttcgagtttgatattcactgatggactccaaagaatcattaactcctggtagagaagaaaaccccagcagtgtgcttgctcaggagaggggagatgtgatggacttctataaaaccctaagaggaggagctactgtgaaggtttctgcgtcttcaccctcactggctgtcgcttctcaatcagactccaagcagcgaagacttttggttgattttccaaaaggctcagtaagcaatgcgcagcagccagatctgtccaaagcagtttcactctcaatgggactgtatatgggagagacagaaacaaaagtgatgggaaatgacctgggattcccacagcagggccaaatcagcctttcctcgggggaaacagacttaaagcttttggaagaaagcattgcaaacctcaataggtcgaccagtgttccagagaaccccaagagttcagcatccactg

SEQ ID NO: 2916 - DNA, 2594 bp, Homo sapiens
  source 1..2594: mol_type = genomic DNA
gcagactcggggaagagggtgggggacggtcggggcgcgggggagggtgggttctgctttgcaacttctctcccagtgcgagagcgcggcggcggcagctgaagacccggccgcccagatgatgcggtggtgggggacctgccggcacgcgactccccccgggcccaaattgatattcactgatggactccaaagaatcattaactcctggtagagaagaaaaccccagcagtgtgcttgctcaggagaggggagatgtgatggacttctataaaaccctaagaggaggagctactgtgaaggtttctgcgtcttcaccctcactggctgtcgcttctcaatcagactccaagcagcgaagacttttggttgattttccaaaaggctcagtaagcaatgcgcagcagccagatctgtccaaagcagtttcactctcaatgggactgtatatgggagagacagaaacaaaagtgatgggaaatgacctgggattcccacagcagggccaaatcagcctttcctcgggggaaacagacttaaagcttttggaagaaagcattgcaaacctcaataggtcgaccagtgttccagagaaccccaagagttcagcatccactgctgtgtctgctgcccccacagagaaggagtttccaaaaactcactctgatgtatcttcagaacagcaacatttgaagggccagactggcaccaacggtggcaatgtgaaattgtataccacagaccaaagcacctttgacattttgcaggatttggagttttcttctgggtccccaggtaaagagacgaatgagagtccttggagatcagacctgttgatagatgaaaactgtttgctttctcctctggcgggagaagacgattcattccttttggaaggaaactcgaatgaggactgcaagcctctcattttaccggacactaaacccaaaattaaggataatggagatctggttttgtcaagccccagtaatgtaacactgccccaagtgaaaacagaaaaagaagatttcatcgaactctgcacccctggggtaattaagcaagagaaactgggcacagtttactgtcaggcaagctttcctggagcaaatataattggtaataaaatgtctgccatttctgttcatggtgtgagtacctctggaggacagatgtaccactatgacatgaatacagcatccctttctcaacagcaggatcagaagcctatttttaatgtcattccaccaattcccgttggttccgaaaattggaataggtgccaaggatctggagatgacaacttgacttctctggggactctgaacttccctggtcgaacagttttttctaatggctattcaagccccagcatgagaccagatgtaagctctcctccatccagctcctcaacagcaacaacaggaccacctcccaaactctgcctggtgtgctctgatgaagcttcaggatgtcattatggagtcttaacttgtggaagctgtaaagttttcttcaaaagagcagtggaaggacagcacaattacctatgtgctggaaggaatgattgcatcatcgataaaattcgaagaaaaaactgcccagcatgccgctatcgaaaatgtcttcaggctggaatgaacctggaagctcgaaaaacaaagaaaaaaataaaaggaattcagcaggccactacaggagtctcacaagaaacctctgaaaatcctggtaacaaaacaatagttcctgcaacgttaccacaactcacccctaccctggtgtcactgttggaggttattgaacctgaagtgttatatgcaggatatgatagctctgttccagactcaacttggaggatcatgactacgctcaacatgttaggagggcggcaagtgattgcagcagtgaaatgggcaaaggcaataccaggtttcaggaacttacacctggatgaccaaatgaccctactgcagtactcctggatgtttcttatggcatttgctctggggtggagatcatatagacaatcaagtgcaaacctgctgtgttttgctcctgatctgattattaatgagcagagaatgactctaccctgcatgtacgaccaatgtaaacacatgctgtatgtttcctctgagttacacaggcttcaggtatcttatgaagagtatctctgtatgaaaaccttactgcttctctcttcagttcctaaggacggtctgaagagccaagagctatttgatgaaattagaatgacctacatcaaagagctaggaaaagccattgtcaagagggaaggaaactccagccagaactggcagcggttttatcaactgacaaaactcttggattctatgcatgaagtggttgaaaatctccttaactattgcttccaaacatttttggataagaccatgagtattgaattccccgagatgttagctgaaatcatcaccaatcagataccaaaatattcaaatggaaatatcaaaaaacttctgtttcatcaaaagtgactgccttaataagaatggttgccttaaagaaagtcgaattaatagcttttattgtataaactatcagtttgtcctgta

SEQ ID NO: 2917 - DNA, 3389 bp, Homo sapiens
  source 1..3389: mol_type = genomic DNA
gataagcacttaatgagtgccttctctgtgcgagaatggggaggaacaaaatgcagctcctaccctcctcgggctttagttgtaccttaataacaggaattttcatctgcctggctcctttcctcaaagaacaaagaagactttgcttcattaaagtgtctgagaaggaaggatccctctggctggtgtgtgaagaattaactgtagatgggcaagtgtggaaggaaggagagcagtcaggaagctgccataaccatctacatgagagagttgatattcactgatggactccaaagaatcattaactcctggtagagaagaaaaccccagcagtgtgcttgctcaggagaggggagatgtgatggacttctataaaaccctaagaggaggagctactgtgaaggtttctgcgtcttcaccctcactggctgtcgcttctcaatcagactccaagcagcgaagacttttggttgattttccaaaaggctcagtaagcaatgcgcagcagccagatctgtccaaagcagtttcactctcaatgggactgtatatgggagagacagaaacaaaagtgatgggaaatgacctgggattcccacagcagggccaaatcagcctttcctcgggggaaacagacttaaagcttttggaagaaagcattgcaaacctcaataggtcgaccagtgttccagagaaccccaagagttcagcatccactgctgtgtctgctgcccccacagagaaggagtttccaaaaactcactctgatgtatcttcagaacagcaacatttgaagggccagactggcaccaacggtggcaatgtgaaattgtataccacagaccaaagcacctttgacattttgcaggatttggagttttcttctgggtccccaggtaaagagacgaatgagagtccttggagatcagacctgttgatagatgaaaactgtttgctttctcctctggcgggagaagacgattcattccttttggaaggaaactcgaatgaggactgcaagcctctcattttaccggacactaaacccaaaattaaggataatggagatctggttttgtcaagccccagtaatgtaacactgccccaagtgaaaacagaaaaagaagatttcatcgaactctgcacccctggggtaattaagcaagagaaactgggcacagtttactgtcaggcaagctttcctggagcaaatataattggtaataaaatgtctgccatttctgttcatggtgtgagtacctctggaggacagatgtaccactatgacatgaatacagcatccctttctcaacagcaggatcagaagcctatttttaatgtcattccaccaattcccgttggttccgaaaattggaataggtgccaaggatctggagatgacaacttgacttctctggggactctgaacttccctggtcgaacagttttttctaatggctattcaagccccagcatgagaccagatgtaagctctcctccatccagctcctcaacagcaacaacaggaccacctcccaaactctgcctggtgtgctctgatgaagcttcaggatgtcattatggagtcttaacttgtggaagctgtaaagttttcttcaaaagagcagtggaaggtagacagcacaattacctatgtgctggaaggaatgattgcatcatcgataaaattcgaagaaaaaactgcccagcatgccgctatcgaaaatgtcttcaggctggaatgaacctggaagctcgaaaaacaaagaaaaaaataaaaggaattcagcaggccactacaggagtctcacaagaaacctctgaaaatcctggtaacaaaacaatagttcctgcaacgttaccacaactcacccctaccctggtgtcactgttggaggttattgaacctgaagtgttatatgcaggatatgatagctctgttccagactcaacttggaggatcatgactacgctcaacatgttaggagggcggcaagtgattgcagcagtgaaatgggcaaaggcaataccaggtttcaggaacttacacctggatgaccaaatgaccctactgcagtactcctggatgtttcttatggcatttgctctggggtggagatcatatagacaatcaagtgcaaacctgctgtgttttgctcctgatctgattattaatgagcagagaatgactctaccctgcatgtacgaccaatgtaaacacatgctgtatgtttcctctgagttacacaggcttcaggtatcttatgaagagtatctctgtatgaaaaccttactgcttctctcttcagttcctaaggacggtctgaagagccaagagctatttgatgaaattagaatgacctacatcaaagagctaggaaaagccattgtcaagagggaaggaaactccagccagaactggcagcggttttatcaactgacaaaactcttggattctatgcatgaagtggttgaaaatctccttaactattgcttccaaacatttttggataagaccatgagtattgaattccccgagatgttagctgaaatcatcaccaatcagataccaaaatattcaaatggaaatatcaaaaaacttctgtttcatcaaaagtgactgccttaataagaatggttgccttaaagaaagtcgaattaatagcttttattgtataaactatcagtttgtcctgtagaggttttgttgttttattttttattgttttcatctgttgttttgttttaaatacgcactacatgtggtttatagagggccaagacttggcaacagaagcagttgagtcgtcatcacttttcagtgatgggagagtagatggtgaaatttattagttaatatatcccagaaattagaaaccttaatatgtggacgtaatctccacagtcaaagaaggatggcacctaaaccaccagtgcccaaagtctgtgtgatgaactttctcttcatactttttttcacagttggctggatgaaattttctagactttctgttggtgtatcccccccctgtatagttaggatagcatttttgatttatgcatggaaacctgaaaaaaagtttacaagtgtatatcagaaaagggaagttgtgccttttatagctattactgtctggttttaacaatttcctttatatttagtgaactacgcttgctcattttttcttacataattttttattcaagttattgtacagctgtttaagatgggcagctagttcgtagctttcccaaataaactctaaacattaatcaatcatctgtgtgaaaatgggttggtgcttctaacctgatggcacttagctatcagaagaccacaaaaattgactcaaatctccagtattcttgtcaaaaaaaaaaaaaaaaaa

SEQ ID NO: 2918 - DNA, 547 bp, Homo sapiens
  source 1..547: mol_type = genomic DNA
cgtgcaggcgccgtcggggccggggtggcggggcccgcgcggagggcgtgggggcagggaccgcgggcgcccctgcagttgccaagcgtcaccaacagttgatattcactgatggactccaaagaatcattaactcctggtagagaagaaaaccccagcagtgtgcttgctcaggagaggggagatgtgatggacttctataaaaccctaagaggaggagctactgtgaaggtttctgcgtcttcaccctcactggctgtcgcttctcaatcagactccaagcagcgaagacttttggttgattttccaaaaggctcagtaagcaatgcgcagcagccagatctgtccaaagcagtttcactctcaatgggactgtatatgggagagacagaaacaaaagtgatgggaaatgacctgggattcccacagcagggccaaatcagcctttcctcgggggaaacagacttaaagcttttggaagaaagcattgcaaacctcaataggtcgaccagtgttccagagaaccccaagagttcagcatccactg

SEQ ID NO: 2919 - DNA, 585 bp, Homo sapiens
  source 1..585: mol_type = genomic DNA
ggcgcctggcttgaggagggcgtgcggggcgcgtgagggtgcacacgcggggggctgacagcccgcaacttggagactgcggccggggccggcgttatctgttagaagtgggcgtgtcggagagagaactcaacagttgatattcactgatggactccaaagaatcattaactcctggtagagaagaaaaccccagcagtgtgcttgctcaggagaggggagatgtgatggacttctataaaaccctaagaggaggagctactgtgaaggtttctgcgtcttcaccctcactggctgtcgcttctcaatcagactccaagcagcgaagacttttggttgattttccaaaaggctcagtaagcaatgcgcagcagccagatctgtccaaagcagtttcactctcaatgggactgtatatgggagagacagaaacaaaagtgatgggaaatgacctgggattcccacagcagggccaaatcagcctttcctcgggggaaacagacttaaagcttttggaagaaagcattgcaaacctcaataggtcgaccagtgttccagagaaccccaagagttcagcatccactg

SEQ ID NO: 2920 - DNA, 623 bp, Homo sapiens
  source 1..623: mol_type = genomic DNA
ggctgtggccgagcgcccgagcaggattaggtggagctgcggcagcccccgcccgtgtcaggagctggcaagcgatgtcacctgtgggggcgcaaaagttacctccccaaaccctaaacccacacagcacaacctttcccagagtcacaaaaatcataatctgtgccgcacaagttgatattcactgatggactccaaagaatcattaactcctggtagagaagaaaaccccagcagtgtgcttgctcaggagaggggagatgtgatggacttctataaaaccctaagaggaggagctactgtgaaggtttctgcgtcttcaccctcactggctgtcgcttctcaatcagactccaagcagcgaagacttttggttgattttccaaaaggctcagtaagcaatgcgcagcagccagatctgtccaaagcagtttcactctcaatgggactgtatatgggagagacagaaacaaaagtgatgggaaatgacctgggattcccacagcagggccaaatcagcctttcctcgggggaaacagacttaaagcttttggaagaaagcattgcaaacctcaataggtcgaccagtgttccagagaaccccaagagttcagcatccactg

SEQ ID NO: 2921 - DNA, 4982 bp, Homo sapiens
  source 1..4982: mol_type = genomic DNA
caggccctcatcaccttttttcaagtcaagatttcatcccatacatgcatgactcaatcagatttggaaatgtggatatgccctgcgtccaagcccaatatagcccttcccctccaggttccagttatgcggcgcagacatacagctcggaatacaccacggagatcatgaaccccgactacaccaagctgaccatggaccttggcagcactgagatcacggctacagccaccacgtccctgcccagcatcagtaccttcgtggagggctactcgagcaactacgaactcaagccttcctgcgtgtaccaaatgcagcggcccttgatcaaagtggaggaggggcgggcgcccagctaccatcaccatcaccaccaccaccaccaccaccaccaccatcaccagcagcagcatcagcagccatccattcctccagcctccagcccggaggacgaggtgctgcccagcacctccatgtacttcaagcagtccccaccgtccacccccaccacgccggccttccccccgcaggcgggggcgttatgggacgaggcactgccctcggcgcccggctgcatcgcacccggcccgctgctggacccgccgatgaaggcggtccccacggtggccggcgcgcgcttcccgctcttccacttcaagccctcgccgccgcatccccccgcgcccagcccggccggcggccaccacctcggctacgacccgacggccgctgccgcgctcagcctgccgctgggagccgcagccgccgcgggcagccaggccgccgcgcttgagagccacccgtacgggctgccgctggccaagagggcggccccgctggccttcccgcctctcggcctcacgccctcccctaccgcgtccagcctgctgggcgagagtcccagcctgccgtcgccgcccagcaggagctcgtcgtctggcgagggcacgtgtgccgtgtgcggggacaacgccgcctgccagcactacggcgtgcgaacctgcgagggctgcaagggctttttcaagagaacagtgcagaaaaatgcaaaatatgtttgcctggcaaataaaaactgcccagtagacaagagacgtcgaaaccgatgtcagtactgtcgatttcagaagtgtctcagtgttggaatggtaaaagaagttgtccgtacagatagtctgaaagggaggagaggtcgtctgccttccaaaccaaagagcccattacaacaggaaccttctcagccctctccaccttctcctccaatctgcatgatgaatgcccttgtccgagctttaacagactcaacacccagagatcttgattattccagatactgtcccactgaccaggctgctgcaggcacagatgctgagcatgtgcaacaattctacaacctcctgacagcctccattgatgtatccagaagctgggcagaaaagattccgggatttactgatctccccaaagaagatcagacattacttattgaatcagcctttttggagctgtttgtcctcagactttccatcaggtcaaacactgctgaagataagtttgtgttctgcaatggacttgtcctgcatcgacttcagtgccttcgtggatttggggagtggctcgactctattaaagacttttccttaaatttgcagagcctgaaccttgatatccaagccttagcctgcctgtcagcactgagcatgatcacagaaagacatgggttaaaagaaccaaagagagtcgaagagctatgcaacaagatcacaagcagtttaaaagaccaccagagtaagggacaggctctggagcccaccgagtccaaggtcctgggtgccctggtagaactgaggaagatctgcaccctgggcctccagcgcatcttctacctgaagctggaagacttggtgtctccaccttccatcattgacaagctcttcctggacaccctacctttctaatcaggagcagtggagcagtgagctgcctcctctcctagcacctgcttgctacgcagcaaagggataggtttggaaacctatcatttcctgtccttccttaagaggaaaagcagctcctgtagaaagcaaagactttcttttttttctggctcttttccttacaacctaaagccagaaaacttgcagagtattgtgttggggttgtgttttatatttaggcattgggggatggggtgggagggggttatagttcatgagggttttctaagaaattgctaacaaagcacttttggacaatgctatcccagcaggaaaaaaaaggataatataactgttttaaaactctttctggggaatccaattatagttgctttgtatttaaaaacaagaacagccaagggttgttcgccagggtaggatgtgtcttaaagattggtcccttgaaaatatgcttcctgtatcaaaggtacgtatgtggtgcaaacaaggcagaaacttccttttaatttccttcttcctttattttaacaaatggtgaaagatggaggattacctacaaatcagacatggcaaaacaataatggctgtttgcttccataaacaagtgcaattttttaaagtgctgtcttactaagtcttgtttattaactctcctttattctatatggaaataaaaaggaggcagtcatgttagcaaatgacacgttaatatccctagcagaggctgtgttcaccttccctgtcgatcccttctgaggtatggcccatccaagacttttaggccattcttgatggaaccagatccctgccctgactgtccagctatcctgaaagtggatcagattataaactggattacatgtaactgttttggttgtgttctatcaaccccaccagagttccctaaacttgcttcagttatagtaactgactggtatattcattcagaagcgccataagtcagttgagtatttgatccctagataagaacatgcaaatcagcaggaactggtcatacagggtaagcaccagggacaataaggatttttatagatataatttaatttttgttattggttaaggagacaattttggagagcaagcaaatctttttaaaaaatagtatgaatgtgaatactagaaaagatttaaaaaatagtatgagtgtgagtactaggaaggattagtgggctgcgtttcaacattccgtgttcgtactcccttttgtatgtttctactgttaatgccatattactatgagataatttgttgcatagtgtccttatttgtataaacatttgtatgcacgttatattgtaatagctttgcctgtatttattgcaagaccaccagctcctggaagctgagttacagagtaattaaatggggtgttcacagtgacttggatacaccaattagaaattaaataagcaaatatatatatatatataaatatagcaggttacatatatatatttataatgtgtctttttattaaccatttgtacaataaatgtcacttcccatgccgttattttatggttcatttgcagtgacttttaaggcagtactgtttagcactttgatattaaaattttgcttatgttttgctaaattcgaataatgtttgaagatttttaggtctaaaagtctttatattatatactctgtatcaagtcaaaatatctttggccattttgctaagaaacaaactttgaatgtcaaactgatgtcacagtagtttttgttagctttaaatcatttttgctttagtctttttaaaggaaaataacaaaactatgctgtttatattgtcattaaattatacaatcaaacaaatgccaaatgaattgcctaattgctgcaaagtataacccagataggaaatcatatgtttttttccaagagtcattctaatatttgattatgttatgtgtgcttttatgaaagattgttatttttatatatcaagatgatagaacctggaatgttaggattttgaaatgttagacttggaaggggcctggtctgtcaactagtccaaccccttaaaattcatagaggagcaaactggggcccattgaagggtgaagagttactcaaggtcaaacagctggtaacagaatcaagactaagacctaatttacctttccatactctttttttttctcaacttcatctatataaaatcaggcttttaaacataaccactaatatttacctgaagataaccatgagtaaagtatacttttgcattaattttttgagcttatatgcaaacataataaatattattaaatatcaggaaagctaacatttcatacaagatagcttcagaccaaattcaaattgaatttgaataaattagaaatactgtgcatacataaccttcttgtgcaccatgagtatttggaaagttaatccttgtttttgtcgtgtctataaaggaagaacaaaacaaaataaaaacagagccctagagaaatgctgttactttttatttttacacccatcagatttaaggaaaagactttttagccattataatctagtggttggaaggaatgaagaagcttttttagtaataggtccagatatgagtgctaaaaataaagatgatagcatgttcttctgtcttccatagttattacaactatgagagcctcccaagtcatcttatcaactcaactcccttttttttgtcttaatgttgcacataagtttatacagagtggatgaccacactagcacagaagagaacaacatgtattaaagcaggtgattcctccccttggcgggagagctctctcagtgtgaacatgccttctgtgggcggaaatcaggaagccaccagctgttaatggagagtgccttgcttttatttcagacagcagagttttccaaagtttctctgctcctctaacagcattgctctttagtgtgtgttaacctgtggtttgaaagaaatgctcttgtacattaacaatgtaaatttaaatgattaaattacattttatcaatggc

SEQ ID NO: 2922 - DNA, 2588 bp, Homo sapiens
  source 1..2588: mol_type = genomic DNA
ataaatgacgtgccgagagagcgagcgaacgcgcagccgggagagcggagtctcctgcctcccgccccccacccctccagctcctgctcctcctccgctccccatacacagacgcgctcacacccgctccctcactcgcacacacagacacaagcgcgcacacaggctccgcacacacacttcgctctcccgcgcgctcacacccctcttgccctgagcccttgccggtgcagcgcggcgccgcagctggacgcccctcccgggctcactttgcaacgctgacggtgccggcagtggccgtggaggtgggaacagcggcggcatcctcccccctggtcacagcccaagccaggacgcccgcggaacctctcggctgtgctctcccatgagtcgggatcgcagcatcccccaccagccgctcaccgcctccgggagccgctgggcttgtacaccgcagcccttccgggacagcagctgtgactcccccccagtgcagatttcgggacagctctctagaaactcgctctaaagacggaaccgccacagcactcaaagcccactgcggaagagggcagcccggcaagcccgggccctgagcctggacccttagcggtgccgggcagcactgccggcgcttcgcctcgccggacgtccgctcctcctacactctcagcctccgctggagagacccccagccccaccattcagcgcgcaagataccctccagatatgccctgcgtccaagcccaatatagcccttcccctccaggttccagttatgcggcgcagacatacagctcggaatacaccacggagatcatgaaccccgactacaccaagctgaccatggaccttggcagcactgagatcacggctacagccaccacgtccctgcccagcatcagtaccttcgtggagggctactcgagcaactacgaactcaagccttcctgcgtgtaccaaatgcagcggcccttgatcaaagtggaggaggggcgggcgcccagctaccatcaccatcaccaccaccaccaccaccaccaccaccatcaccagcagcagcatcagcagccatccattcctccagcctccagcccggaggacgaggtgctgcccagcacctccatgtacttcaagcagtccccaccgtccacccccaccacgccggccttccccccgcaggcgggggcgttatgggacgaggcactgccctcggcgcccggctgcatcgcacccggcccgctgctggacccgccgatgaaggcggtccccacggtggccggcgcgcgcttcccgctcttccacttcaagccctcgccgccgcatccccccgcgcccagcccggccggcggccaccacctcggctacgacccgacggccgctgccgcgctcagcctgccgctgggagccgcagccgccgcgggcagccaggccgccgcgcttgagagccacccgtacgggctgccgctggccaagagggcggccccgctggccttcccgcctctcggcctcacgccctcccctaccgcgtccagcctgctgggcgagagtcccagcctgccgtcgccgcccagcaggagctcgtcgtctggcgagggcacgtgtgccgtgtgcggggacaacgccgcctgccagcactacggcgtgcgaacctgcgagggctgcaagggctttttcaagagaacagtgcagaaaaatgcaaaatatgtttgcctggcaaataaaaactgcccagtagacaagagacgtcgaaaccgatgtcagtactgtcgatttcagaagtgtctcagtgttggaatggtaaaagaagttgtccgtacagatagtctgaaagggaggagaggtcgtctgccttccaaaccaaagagcccattacaacaggaaccttctcagccctctccaccttctcctccaatctgcatgatgaatgcccttgtccgagctttaacagactcaacacccagagatcttgattattccagagtaagttttatgatttcctgctttcaaatgaatgatcagggtctctatttatggctactagtaataagagttgattgaatgattttgtgtctggcaccatgttagacagttttcatactttttctatatttctcgcttcatttagcaattcagtgcatccattgcagcaaataatttttgccttattgaatctctaaatgccttaacaagtgaccctgacagtgctgcacctgtcatacacattgttgcaggattcctggtggttgtgccaatgaaaatctgcacagacaaactacaatttgtagatttatctcgtgatctagacaaagtgactactgttttttttcatattgtgttcaaaccatctgggtgagcctcaagttattactaagcagtttatccaattgcatcagcattgattgacctgctgcttattcagagggattagaccattggtggagagaagcgagctctggctgtgacatcagttgtcaggagaactgggatggaacgccacctctgctacttcctgcctgtgtcacctggttcctgcttttggctctctcctgcctacagtggaaatggctacaatatttaacctcaga

SEQ ID NO: 2923 - DNA, 2133 bp, Homo sapiens
  source 1..2133: mol_type = genomic DNA
gagcgagcgaacgcgcagccgggagagcggagtctcctgcctcccgccccccacccctccagctcctgctcctcctccgctccccatacacagacgcgctcacacccgctccctcactcgcacacacagacacaagcgcgcacacaggctccgcacacacacttcgctctcccgcgcgctcacacccctcttgccctgagcccttgccggtgcagcgcggcgccgcagctggacgcccctcccgggctcactttgcaacgctgacggtgccggcagtggccgtggaggtgggaacagcggcggcatcctcccccctggtcacagcccaagccaggacgcccgcggaacctctcggctgtgctctcccatgagtcgggatcgcagcatcccccaccagccgctcaccgcctccgggagccgctgggcttgtacaccgcagcccttccgggacagcagctgtgactcccccccagtgcagatttcgggacagctctctagaaactcgctctaaagacggaaccgccacagcactcaaagcccactgcggaagagggcagcccggcaagcccgggccctgagcctggacccttagcggtgccgggcagcactgccggcgcttcgcctcgccggacgtccgctcctcctacactctcagcctccgctggagagacccccagccccaccattcagcgcgcaagataccctccagatatgccctgcgtccaagcccaatatagcccttcccctccaggttccagttatgcggcgcagacatacagctcggaatacaccacggagatcatgaaccccgactacaccaagctgaccatggaccttggcagcactgagatcacggctacagccaccacgtccctgcccagcatcagtaccttcgtggagggctactcgagcaactacgaactcaagccttcctgcgtgtaccaaatgcagcggcccttgatcaaagtggaggaggggcgggcgcccagctaccatcaccatcaccaccaccaccaccaccaccaccaccatcaccagcagcagcatcagcagccatccattcctccagcctccagcccggaggacgaggtgctgcccagcacctccatgtacttcaagcagtccccaccgtccacccccaccacgccggccttccccccgcaggcgggggcgttatgggacgaggcactgccctcggcgcccggctgcatcgcacccggcccgctgctggacccgccgatgaaggcggtccccacggtggccggcgcgcgcttcccgctcttccacttcaagccctcgccgccgcatccccccgcgcccagcccggccggcggccaccacctcggctacgacccgacggccgctgccgcgctcagcctgccgctgggagccgcagccgccgcgggcagccaggccgccgcgcttgagagccacccgtacgggctgccgctggccaagagggcggccccgctggccttcccgcctctcggcctcacgccctcccctaccgcgtccagcctgctgggcgagagtcccagcctgccgtcgccgcccagcaggagctcgtcgtctggcgagggcacgtgtgccgtgtgcggggacaacgccgcctgccagcactacggcgtgcgaacctgcgagggctgcaagggctttttcaagagaacagtgcagaaaaatgcaaaatatgtttgcctggcaaataaaaactgcccagtagacaagagacgtcgaaaccgatgtcagtactgtcgatttcagaagtgtctcagtgttggaatggtaaaagaagttgtccgtacagatagtctgaaagggaggagaggtcgtctgccttccaaaccaaagagcccattacaacaggaaccttctcagccctctccaccttctcctccaatctgcatgatgaatgcccttgtccgagctttaacagactcaacacccagagatcttgattattccagagtaagttttatgatttcctgctttcaaatgaatgatcagggtctctatttatggctactagtaataagagtgttagacagttttcatactttttctatatttctcgcttcatttagcaattcagtgcatccattgcagcaaataatttttgccttattgaatctctaa

SEQ ID NO: 2924 - DNA, 3794 bp, Homo sapiens
  source 1..3794: mol_type = genomic DNA
ataaatgacgtgccgagagagcgagcgaacgcgcagccgggagagcggagtctcctgcctcccgccccccacccctccagctcctgctcctcctccgctccccatacacagacgcgctcacacccgctccctcactcgcacacacagacacaagcgcgcacacaggctccgcacacacacttcgctctcccgcgcgctcacacccctcttgccctgagcccttgccggtgcagcgcggcgccgcagctggacgcccctcccgggctcactttgcaacgctgacggtgccggcagtggccgtggaggtgggaacagcggcggcatcctcccccctggtcacagcccaagccaggacgcccgcggaacctctcggctgtgctctcccatgagtcgggatcgcagcatcccccaccagccgctcaccgcctccgggagccgctgggcttgtacaccgcagcccttccgggacagcagctgtgactcccccccagtgcagatttcgggacagctctctagaaactcgctctaaagacggaaccgccacagcactcaaagcccactgcggaagagggcagcccggcaagcccgggccctgagcctggacccttagcggtgccgggcagcactgccggcgcttcgcctcgccggacgtccgctcctcctacactctcagcctccgctggagagacccccagccccaccattcagcgcgcaagataccctccagatatgccctgcgtccaagcccaatatagcccttcccctccaggttccagttatgcggcgcagacatacagctcggaatacaccacggagatcatgaaccccgactacaccaagctgaccatggaccttggcagcactgagatcacggctacagccaccacgtccctgcccagcatcagtaccttcgtggagggctactcgagcaactacgaactcaagccttcctgcgtgtaccaaatgcagcggcccttgatcaaagtggaggaggggcgggcgcccagctaccatcaccatcaccaccaccaccaccaccaccaccaccatcaccagcagcagcatcagcagccatccattcctccagcctccagcccggaggacgaggtgctgcccagcacctccatgtacttcaagcagtccccaccgtccacccccaccacgccggccttccccccgcaggcgggggcgttatgggacgaggcactgccctcggcgcccggctgcatcgcacccggcccgctgctggacccgccgatgaaggcggtccccacggtggccggcgcgcgcttcccgctcttccacttcaagccctcgccgccgcatccccccgcgcccagcccggccggcggccaccacctcggctacgacccgacggccgctgccgcgctcagcctgccgctgggagccgcagccgccgcgggcagccaggccgccgcgcttgagagccacccgtacgggctgccgctggccaagagggcggccccgctggccttcccgcctctcggcctcacgccctcccctaccgcgtccagcctgctgggcgagagtcccagcctgccgtcgccgcccagcaggagctcgtcgtctggcgagggcacgtgtgccgtgtgcggggacaacgccgcctgccagcactacggcgtgcgaacctgcgagggctgcaagggctttttcaagagaacagtgcagaaaaatgcaaaatatgtttgcctggcaaataaaaactgcccagtagacaagagacgtcgaaaccgatgtcagtactgtcgatttcagaagtgtctcagtgttggaatggtaaaagaagttgtccgtacagatagtctgaaagggaggagaggtcgtctgccttccaaaccaaagagcccattacaacaggaaccttctcagccctctccaccttctcctccaatctgcatgatgaatgcccttgtccgagctttaacagactcaacacccagagatcttgattattccagatactgtcccactgaccaggctgctgcaggcacagatgctgagcatgtgcaacaattctacaacctcctgacagcctccattgatgtatccagaagctgggcagaaaagattccgggatttactgatctccccaaagaagatcagacattacttattgaatcagcctttttggagctgtttgtcctcagactttccatcaggtcaaacactgctgaagataagtttgtgttctgcaatggacttgtcctgcatcgacttcagtgccttcgtggatttggggagtggctcgactctattaaagacttttccttaaatttgcagagcctgaaccttgatatccaagccttagcctgcctgtcagcactgagcatgatcacagaaagacatgggttaaaagaaccaaagagagtcgaagagctatgcaacaagatcacaagcagtttaaaagaccaccagagtaagggacaggctctggagcccaccgagtccaaggtcctgggtgccctggtagaactgaggaagatctgcaccctgggcctccagcgcatcttctacctgaagctggaagacttggtgtctccaccttccatcattgacaagctcttcctggacaccctacctttctaatcaggagcagtggagcagtgagctgcctcctctcctagcacctgcttgctacgcagcaaagggataggtttggaaacctatcatttcctgtccttccttaagaggaaaagcagctcctgtagaaagcaaagactttcttttttttctggctcttttccttacaacctaaagccagaaaacttgcagagtattgtgttggggttgtgttttatatttaggcattgggggatggggtgggagggggttatagttcatgagggttttctaagaaattgctaacaaagcacttttggacaatgctatcccagcaggaaaaaaaaggataatataactgttttaaaactctttctggggaatccaattatagttgctttgtatttaaaaacaagaacagccaagggttgttcgccagggtaggatgtgtcttaaagattggtcccttgaaaatatgcttcctgtatcaaaggtacgtatgtggtgcaaacaaggcagaaacttccttttaatttccttcttcctttattttaacaaatggtgaaagatggaggattacctacaaatcagacatggcaaaacaataatggctgtttgcttccataaacaagtgcaattttttaaagtgctgtcttactaagtcttgtttattaactctcctttattctatatggaaataaaaaggaggcagtcatgttagcaaatgacacgttaatatccctagcagaggctgtgttcaccttccctgtcgatcccttctgaggtatggcccatccaagacttttaggccattcttgatggaaccagatccctgccctgactgtccagctatcctgaaagtggatcagattataaactggattacatgtaactgttttggttgtgttctatcaaccccaccagagttccctaaacttgcttcagttatagtaactgactggtatattcattcagaagcgccataagtcagttgagtatttgatccctagataagaacatgcaaatcagcaggaactggtcatacagggtaagcaccagggacaataaggatttttatagatataatttaatttttgttattggttaaggagacaattttggagagcaagcaaatctttttaaaaaatagtatgaatgtgaatactagaaaagatttaaaaaatagtatgagtgtgagtactaggaaggat

SEQ ID NO: 2925 - DNA, 1382 bp, Homo sapiens
  source 1..1382: mol_type = genomic DNA
gagaggcaggaggacaccgagttccccgtgttggcctccaggtcctgtgcttgcggagccgtccggcggctgggatcgagccccgacaatgggcaacgcgcaggagcggccgtcagagactatcgaccgcgagcggaaacgcctggtcgagacgctgcaggcggactcgggactgctgttggacgcgctgctggcgcggggcgtgctcaccgggccagagtacgaggcattggatgcactgcctgatgccgagcgcagggtgcgccgcctactgctgctggtgcagggcaagggcgaggccgcctgccaggagctgctacgctgtgcccagcgtaccgcgggcgcgccggaccccgcttgggactggcagcacgtgggtccgggctaccgggaccgcagctatgaccctccatgcccaggccactggacgccggaggcacccggctcggggaccacatgccccgggttgcccagagcttcagaccctgacgaggccgggggccctgagggctccgaggcggtgcaatccgggaccccggaggagccagagccagagctggaagctgaggcctctaaagaggctgaaccggagccggagccagagccagagctggaacccgaggctgaagcagaaccagagccggaactggagccagaaccggacccagagcccgagcccgacttcgaggaaagggacgagtccgaagattcctgaaggccagagctctgacaggcggtgccccgcccatgctggataggacctgggatgctgctggagctgaatcggatgccaccaaggctcggtccagcccagtaccgctggaagtgaataaactccggagggtcggacgggacctgggctctctccacgattctggctgtttgcccaggaacttagggtgggtacctctgagtcccagggacctgggcaggcccaagcccaccacgagcatcatccagtcctcagccctaatctgcccttaggagtccaggctgcaccctggagatcccaaacctagccccctagtgggacaaggacctgaccctcctgcccgcatacacaacccatttcccctggtgagccacttggcagcatatgtaggtaccagctcaaccccacgcaagttcctgagctgaacatggagcaaggggagggtgacttctctccacatagggagggcttagagctcacagccttgggaagtgagactagaagaggggagcagaaagggaccttgagtagacaaaggccacacacatcattgtcattactgttttaattgtctggcttctctctggactgggagctcagtgaggattctgaccagtgacttacacaaaaggcgctctatacatattataatatattcgcttactaaatg

SEQ ID NO: 2926 - DNA, 1885 bp, Homo sapiens
  source 1..1885: mol_type = genomic DNA
agctgctgcacccacccccaccctgcccggccctttctgcaccgtcatctcctgccccgccgaggcttgacccgtgctgtccccctctcccttcctttgcccaccgattggagggacactctggaaaactcagttgaagaaagcggagagtctgcgtgtacacagtgcaatgatgtcagttaatgcactagtgagggcatgtgttgttcacggtacacagaagaaggaaccaccagcccttgggacacttaggcattggtgtagacaagggaacatttgagtcctggacgatggataggtccacggagcggagggaggagaaaaggattccagtcttagcgatcagcatcagcaaaggctccgaggtgccagaggcataagagtagatgccagtcctgggaaaggcaggggaggagaggagagccacggctgacgcttggggacagaaggaggagcctgaggaggagacaggacagagcgtctggagaggcaggaggacaccgagttccccgtgttggcctccaggtcctgtgcttgcggagccgtccggcggctgggatcgagccccgacaatgggcaacgcgcaggagcggccgtcagagactatcgaccgcgagcggaaacgcctggtcgagacgctgcaggcggactcgggactgctgttggacgcgctgctggcgcggggcgtgctcaccgggccagagtacgaggcattggatgcactgcctgatgccgagcgcagggtgcgccgcctactgctgctggtgcagggcaagggcgaggccgcctgccaggagctgctacgctgtgcccagcgtaccgcgggcgcgccggaccccgcttgggactggcagcacgtgggtccgggctaccgggaccgcagctatgaccctccatgcccaggccactggacgccggaggcacccggctcggggaccacatgccccgggttgcccagagcttcagaccctgacgaggccgggggccctgagggctccgaggcggtgcaatccgggaccccggaggagccagagccagagctggaagctgaggcctctaaagaggctgaaccggagccggagccagagccagagctggaacccgaggctgaagcagaaccagagccggaactggagccagaaccggacccagagcccgagcccgacttcgaggaaagggacgagtccgaagattcctgaaggccagagctctgacaggcggtgccccgcccatgctggataggacctgggatgctgctggagctgaatcggatgccaccaaggctcggtccagcccagtaccgctggaagtgaataaactccggagggtcggacgggacctgggctctctccacgattctggctgtttgcccaggaacttagggtgggtacctctgagtcccagggacctgggcaggcccaagcccaccacgagcatcatccagtcctcagccctaatctgcccttaggagtccaggctgcaccctggagatcccaaacctagccccctagtgggacaaggacctgaccctcctgcccgcatacacaacccatttcccctggtgagccacttggcagcatatgtaggtaccagctcaaccccacgcaagttcctgagctgaacatggagcaaggggagggtgacttctctccacatagggagggcttagagctcacagccttgggaagtgagactagaagaggggagcagaaagggaccttgagtagacaaaggccacacacatcattgtcattactgttttaattgtctggcttctctctggactgggagctcagtgaggattctgaccagtgacttacacaaaaggcgctctatacatattataatatattcgcttactaaatgaataaggactttccaactg

SEQ ID NO: 2927 - DNA, 4034 bp, Homo sapiens
  source 1..4034: mol_type = genomic DNA
gattggctcatggggacggccgcgagctttggttggtcggcgcggagtcacgagggcgccgtcgtcgcctttccacaggcgattactgggcaggctcagtctttcgcctcagtctcgagctctcgctggccttcgggtgtacgtgctccgggatcttcagcacccgcggccgccatcgccgtcgcttggcttcttctggactcatctgcgccacttgtccgcttcacactccgccgccatcatggtgaagctcgcgaaggcaggtaaaaatcaaggtgaccccaagaaaatggctcctcctccaaaggaggtagaagaagatagtgaagatgaggaaatgtcagaagatgaagaagatgatagcagtggagaagaggtcgtcatacctcagaagaaaggcaagaaggctgctgcaacctcagcaaagaaggtggtcgtttccccaacaaaaaaggttgcagttgccacaccagccaagaaagcagctgtcactccaggcaaaaaggcagcagcaacacctgccaagaagacagttacaccagccaaagcagttaccacacctggcaagaagggagccacaccaggcaaagcattggtagcaactcctggtaagaagggtgctgccatcccagccaagggggcaaagaatggcaagaatgccaagaaggaagacagtgatgaagaggaggatgatgacagtgaggaggatgaggaggatgacgaggacgaggatgaggatgaagatgaaattgaaccagcagcgatgaaagcagcagctgctgcccctgcctcagaggatgaggacgatgaggatgacgaagatgatgaggatgacgatgacgatgaggaagatgactctgaagaagaagctatggagactacaccagccaaaggaaagaaagctgcaaaagttgttcctgtgaaagccaagaacgtggctgaggatgaagatgaagaagaggatgatgaggacgaggatgacgacgacgacgaagatgatgaagatgatgatgatgaagatgatgaggaggaggaagaagaggaggaggaagagcctgtcaaagaagcacctggaaaacgaaagaaggaaatggccaaacagaaagcagctcctgaagccaagaaacagaaagtggaaggcacagaaccgactacggctttcaatctctttgttggaaacctaaactttaacaaatctgctcctgaattaaaaactggtatcagcgatgtttttgctaaaaatgatcttgctgttgtggatgtcagaattggtatgactaggaaatttggttatgtggattttgaatctgctgaagacctggagaaagcgttggaactcactggtttgaaagtctttggcaatgaaattaaactagagaaaccaaaaggaaaagacagtaagaaagagcgagatgcgagaacacttttggctaaaaatctcccttacaaagtcactcaggatgaattgaaagaagtgtttgaagatgctgcggagatcagattagtcagcaaggatgggaaaagtaaagggattgcttatattgaatttaagacagaagctgatgcagagaaaacctttgaagaaaagcagggaacagagatcgatgggcgatctatttccctgtactatactggagagaaaggtcaaaatcaagactatagaggtggaaagaatagcacttggagtggtgaatcaaaaactctggttttaagcaacctctcctacagtgcaacagaagaaactcttcaggaagtatttgagaaagcaacttttatcaaagtaccccagaaccaaaatggcaaatctaaagggtatgcatttatagagtttgcttcattcgaagacgctaaagaagctttaaattcctgtaataaaagggaaattgagggcagagcaatcaggctggagttgcaaggacccaggggatcacctaatgccagaagccagccatccaaaactctgtttgtcaaaggcctgtctgaggataccactgaagagacattaaaggagtcatttgacggctccgttcgggcaaggatagttactgaccgggaaactgggtcctccaaagggtttggttttgtagacttcaacagtgaggaggatgccaaagctgccaaggaggccatggaagacggtgaaattgatggaaataaagttaccttggactgggccaaacctaagggtgaaggtggcttcgggggtcgtggtggaggcagaggcggctttggaggacgaggtggtggtagaggaggccgaggaggatttggtggcagaggccggggaggctttggagggcgaggaggcttccgaggaggcagaggaggaggaggtgaccacaagccacaaggaaagaagacgaagtttgaatagcttctgtccctctgctttcccttttccatttgaaagaaaggactctggggtttttactgttacctgatcaatgacagagccttctgaggacattccaagacagtatacagtcctgtggtctccttggaaatccgtctagttaacatttcaagggcaataccgtgttggttttgactggatattcatataaactttttaaagagttgagtgatagagctaacccttatctgtaagttttgaatttatattgtttcatcccatgtacaaaaccattttttcctacaaatagtttgggttttgttgttgtttcttttttttgttttgtttttgttttttttttttttgcgttcgtggggttgtaaaagaaaagaaagcagaatgttttatcatggtttttgcttcagcggctttaggacaaattaaaagtcaactctggtgccagacgtgttacttcctaaagagtgtttcccctggaatgtcactggagagcatggcaaagccagctctgccacttgcttcacccatcccaatggaaatggcttagtgcgtgtttccagtatcccagccctaactaacttggttgaaatgctggtgaggggacctgctcctgcagccctggtgctgacttgaaggctgctgcagcttctcctacttttagcaggtctgaggattatgtcctgaagaccactctggaaagaggtgcaggaacagattagtcaggtttcctaggacaaggaagagcttcagggaagagcagtggctaactcctgtaatcccaacacttggggaggccgaggcaggcagatcaactgaggtcaggagttgaagaccagcctggccaacatggtgaaagcccatctctactaaaaatacaaaaattagctgggcatggtggtgtactcctgtagtcccagctactcaggaggctgaagcgggagagtcacgtgaacccgggaagcagagtgagctgagcacacactactatactccaggctgggtaacaaagcgagactcccatctcccaaaaagcagttctggaatagaactcacgctagatggatagaccagtggacactttggaaccttggggctggggaggaaactgcccatccagtaaacccccaaaaagccatttgttctgcactacgtatattgcttattctttctggtcttaagtacttgcctctcaacctccctttttagtaaaagacaaggccacgtgagaggcgggactatcaacattgtgatgaatttacttgaaacccagtgcccaaaatcaatgtaggtagccaagtccaaaaacctgttctagtccaactagtgaaatcaaactgtgatacttggataagcttagaaggaaacgtgaagaatacgtagctgctttgggtttactctggttcagttgggctgttgaaatcttaacatccttgggcttatcacctactgcttgtcagccctgttccatgtccaggggatgggggtggtgacaatccagttccaagaccctcatgctctagagaggaaggtggccagccagggttgtaactacgatgaaaaagcagtgggagggtctcctatgaggcaagcctaaggacaaaaaggaaggccttgcagcctgtattctggataaggaattaaaagctcagttaattgaagccca

SEQ ID NO: 2928 - DNA, 1877 bp, Homo sapiens
  source 1..1877: mol_type = genomic DNA
ctcagtctttcgcctcagtctcgagctctcgctggccttcgggtgtacgtgctccgggatcttcagcacccgcggccgccatcgccgtcgcttggcttcttctggactcatctgcgccacttgtccgcttcacactccgccgccatcatggtgaagctcgcgaaggcaggtaaaaatcaaggtgaccccaagaaaatggctcctcctccaaaggaggtagaagaagatagtgaagatgaggaaatgtcagaagatgaagaagatgatagcagtggagaagaggtcgtcatacctcagaagaaaggcaagaaggctgctgcaacctcagcaaagaaggtggtcgtttccccaacaaaaaaggttgcagttgccacaccagccaagaaagcagctgtcactccaggcaaaaaggcagcagcaacacctgccaagaagacagttacaccagccaaagcagttaccacacctggcaagaagggagccacaccaggcaaagcattggtagcaactcctggtaagaagggtgctgccatcccagccaagggggcaaagaatggcaagaatgccaagaaggaagacagtgatgaagaggaggatgatgacagtgaggaggatgaggaggatgacgaggacgaggatgaggatgaagatgaaattgaaccagcagcgatgaaagcagcagctgctgcccctgcctcagaggatgaggacgatgaggatgacgaagatgatgaggatgggaaaagtaaagggattgcttatattgaatttaagacagaagctgatgcagagaaaacctttgaagaaaagcagggaacagagatcgatgggcgatctatttccctgtactatactggagagaaaggtcaaaatcaagactatagaggtggaaagaatagcacttggagtggtgaatcaaaaactctggttttaagcaacctctcctacagtgcaacagaagaaactcttcaggaagtatttgagaaagcaacttttatcaaagtaccccagaaccaaaatggcaaatctaaagggtatgcatttatagagtttgcttcattcgaagacgctaaagaagctttaaattcctgtaataaaagggaaattgagggcagagcaatcaggctggagttgcaaggacccaggggatcacctaatgccagaagccagccatccaaaactctgtttgtcaaaggcctgtctgaggataccactgaagagacattaaaggagtcatttgacggctccgttcgggcaaggatagttactgaccgggaaactgggtcctccaaagggtttggttttgtagacttcaacagtgaggaggatgccaaagctgccaaggaggccatggaagacggtgaaattgatggaaataaagttaccttggactgggccaaacctaagggtgaaggtggcttcgggggtcgtggtggaggcagaggcggctttggaggacgaggtggtggtagaggaggccgaggaggatttggtggcagaggccggggaggctttggagggcgaggaggcttccgaggaggcagaggaggaggaggtgaccacaagccacaaggaaagaagacgaagtttgaatagcttctgtccctctgctttcccttttccatttgaaagaaaggactctggggtttttactgttacctgatcaatgacagagccttctgaggacattccaagacagtatacagtcctgtggtctccttggaaatccgtctagttaacatttcaagggcaataccgtgttggttttgactggatattcatataaactttttaaagagttgagtgatagagctaacccttatctgtaagttttgaatttatattgtttcatcccatgtacaaaaccattttttcct

SEQ ID NO: 2929 - DNA, 2380 bp, Homo sapiens
  source 1..2380: mol_type = genomic DNA
agtctcgagctctcgctggccttcgggtgtacgtgctccgggatcttcagcacccgcggccgccatcgccgtcgcttggcttcttctggactcatctgcgccacttgtccgcttcacactccgccgccatcatggtgaagctcgcgaaggcaggtaaaaatcaaggtgaccccaagaaaatggctcctcctccaaaggaggtagaagaagatagtgaagatgaggaaatgtcagaagatgaagaagatgatagcagtggagaagagctaaatgatgacttttatcaaactaccatgcacactctttggaagaaaggcaagaaggctgctgcaacctcagccatcccagccaagggggcaaagaatggcaagaatgccaagaaggaagacagtgatgaagaggaggatgatgacagtgaggaggatgaggaggatgacgaggacgaggatgaggatgaagatgaaattgaaccagcagcgatgaaagcagcagctgctgcccctgcctcagaggatgaggacgatgaggatgacgaagatgatgaggatgacgatgacgatgaggaagatgatgatgatgatgaagatgatgaggaggaggaagaagaggaggaggaagagcctgtcaaagaagcacctggaaaacgaaagaaggaaatggccaaacagaaagcagctcctgaagccaagaaacagaaagtggaaggcacagaaccgactacggctttcaatctctttgttggaaacctaaactttaacaaatctgctcctgaattaaaaactggtatcagcgatgtttttgctaaaaatgatcttgctgttgtggatgtcagaattggtatgactaggaaatttggttatgtggattttgaatctgctgaagacctggagaaagcgttggaactcactggtttgaaagtctttggcaatgaaattaaactagagaaaccaaaaggaaaagacagtaagaaagagcgagatgcgagaacacttttggctaaaaatctcccttacaaagtcactcaggatgaattgaaagaagtgtttgaagatgctgcggagatcagattagtcagcaaggatgggaaaagtaaagggattgcttatattgaatttaagacagaagctgatgcagagaaaacctttgaagaaaagcagggaacagagatcgatgggcgatctatttccctgtactatactggagagaaaggtcaaaatcaagactatagaggtggaaagaatagcacttggagtggtgaatcaaaaactctggttttaagcaacctctcctacagtgcaacagaagaaactcttcaggaagtatttgagaaagcaacttttatcaaagtaccccagaaccaaaatggcaaatctaaagggtatgcatttatagagtttgcttcattcgaagacgctaaagaagctttaaattcctgtaataaaagggaaattgagggcagagcaatcaggctggagttgcaaggacccaggggatcacctaatgccagaagccagccatccaaaactctgtttgtcaaaggcctgtctgaggataccactgaagagacattaaaggagtcatttgacggctccgttcgggcaaggatagttactgaccgggaaactgggtcctccaaagggtttggttttgtagacttcaacagtgaggaggatgccaaagctgccaaggaggccatggaagacggtgaaattgatggaaataaagttaccttggactgggccaaacctaagggtgaaggtggcttcgggggtcgtggtggaggcagaggcggctttggaggacgaggtggtggtagaggaggccgaggaggatttggtggcagaggccggggaggctttggagggcgaggaggcttccgaggaggcagaggaggaggaggtgaccacaagccacaaggaaagaagacgaagtttgaatagcttctgtccctctgctttcccttttccatttgaaagaaaggactctggggtttttactgttacctgatcaatgacagagccttctgaggacattccaagacagtatacagtcctgtggtctccttggaaatccgtctagttaacatttcaagggcaataccgtgttggttttgactggatattcatataaactttttaaagagttgagtgatagagctaacccttatctgtaagttttgaatttatattgtttcatcccatgtacaaaaccattttttcctacaaatagtttgggttttgttgttgtttcttttttttgttttgtttttgttttttttttttttgcgttcgtggggttgtaaaagaaaagaaagcagaatgttttatcatggtttttgcttcagcggctttaggacaaattaaaagtcaactctggtgcc

SEQ ID NO: 2930 - DNA, 1758 bp, Homo sapiens
  source 1..1758: mol_type = genomic DNA
agtgcgcgtgctcggtgggagcccgcggagtacctggaaggaggtgggggcgaggtagaaaggagtggggttgaaaagcgcttgcgcaggacggctacggtacgggggtgggagggcttcggagcacgcgcgcggaggcgggacttgggaagcgctcgcgagatcttcagggtctatatataagcgcggggagcctgcgtcctttccctggtgtgattccgtcctgcgcggttgttctctggagcagcgttcttttatctccgtccgccttctctcctacctaagtgcgtgccgccacccgatggaagattcgatggacatggacatgagccccctgaggccccagaactatcttttcggttgtgaactaaaggccgacaaagattatcactttaaggtggataatgatgaaaatgagcaccagttatctttaagaacggtcagtttaggggctggtgcaaaggatgagttgcacattgttgaagcagaggcaatgaattacgaaggcagtccaattaaagtaacactggcaactttgaaaatgtctgtacagccaacggtttcccttgggggctttgaaataacaccaccagtggtcttaaggttgaagtgtggttcagggccagtgcatattagtggacagcacttagtagctgtggaggaagatgcagagtcagaagatgaagaggaggaggatgtgaaactcttaagtatatctggaaagcggtctgcccctggaggtggtagcaaggttccacagaaaaaagtaaaacttgctgctgatgaagatgatgacgatgatgatgaagaggatgatgatgaagatgatgatgatgatgattttgatgatgaggaagctgaagaaaaagcgccagtgaagaaatctatacgagatactccagccaaaaatgcacaaaagtcaaatcagaatggaaaagactcaaaaccatcatcaacaccaagatcaaaaggacaagaatccttcaagaaacaggaaaaaactcctaaaacaccaaaaggacctagttctgtagaagacattaaagcaaaaatgcaagcaagtatagaaaaaggtggttctcttcccaaagtggaagccaaattcatcaattatgtgaagaattgcttccggatgactgaccaagaggctattcaagatctctggcagtggaggaagtctctttaagaaaatagtttaaacaatttgttaaaaaattttccgtcttatttcatttctgtaacagttgatatctggctgtcctttttataatgcagagtgagaactttccctaccgtgtttgataaatgttgtccaggttctattgccaagaatgtgttgtccaaaatgcctgtttagtttttaaagatggaactccaccctttgcttggttttaagtatgtatggaatgttatgataggacatagtagtagcggtggtcagacatggaaatggtggggagacaaaaatatacatgtgaaataaaactcagtattttaataaagtagcacggtttctattgacttatttaactgctttatactttgtcaaagaaataattaatgtagttaggaatggcaaatagtcttgtaaaattctatgagaatgtccctgccctccccttcaatattctctctggagctaaccactttttcatcataaggatttagtgctgtgttcccacctcctgatgatagttaacaattattataactatgcaacatgtttccaaatgttccattagacctcctatctgccta

SEQ ID NO: 2931 - DNA, 1237 bp, Homo sapiens
  source 1..1237: mol_type = genomic DNA
aagcgcggggagcctgcgtcctttccctggtgtgattccgtcctgcgcggttgttctctggagcagcgttcttttatctccgtccgccttctctcctacctaagtgcgtgccgccacccgatggaagattcgatggacatggacatgagccccctgaggccccagaactatcttttcggttgtgaactaaaggccgacaaagattatcactttaaggtggataatgatgaaaatgagcaccagttatctttaagaacggtcagtttaggggctggtgcaaaggatgagttgcacattgttgaagcagaggcaatgaattacgaaggcagtccaattaaagtaacactggcaactttgaaaatgtctgtacagccaacggtttcccttgggggctttgaaataacaccaccagtggtcttaaggttgaagtgtggttcagggccagtgcatattagtggacagcacttagtagctgtggaggaagatgcagagtcagaagatgaagaggaggaggatgtgaaactcttaagtatatctggaaagcggtctgcccctggaggtggtagcaaggttccacagaaaaaagtaaaacttgctgctgatgaagatgatgacgatgatgatgaagaggatgatgatgaagatgatgatgatgatgattttgatgatgaggaagctgaagaaaaagcgccagtgaagaaaggacaagaatccttcaagaaacaggaaaaaactcctaaaacaccaaaaggacctagttctgtagaagacattaaagcaaaaatgcaagcaagtatagaaaaaggtggttctcttcccaaagtggaagccaaattcatcaattatgtgaagaattgcttccggatgactgaccaagaggctattcaagatctctggcagtggaggaagtctctttaagaaaatagtttaaacaatttgttaaaaaattttccgtcttatttcatttctgtaacagttgatatctggctgtcctttttataatgcagagtgagaactttccctaccgtgtttgataaatgttgtccaggttctattgccaagaatgtgttgtccaaaatgcctgtttagtttttaaagatggaactccaccctttgcttggttttaagtatgtatggaatgttatgataggacatagtagtagcggtggtcagacatggaaatggtggggagacaaaaatatacatgtgaaataaaactcagtattttaataaagta

SEQ ID NO: 2932 - DNA, 1598 bp, Homo sapiens
  source 1..1598: mol_type = genomic DNA
ttccctggtgtgattccgtcctgcgcggttgttctctggagcagcgttcttttatctccgtccgccttctctcctacctaagtgcgtgccgccacccgatggaagattcgatggacatggacatgagccccctgaggccccagaactatcttttcggttgtgaactaaaggccgacaaagattatcactttaaggtggataatgatgaaaatgagcaccagttatctttaagaacggtcagtttaggggctggtgcaaaggatgagttgcacattgttgaagcagaggcaatgaattacgaaggcagtccaattaaagtaacactggcaactttgaaaatgtctgtacagccaacggtttcccttgggggctttgaaataacaccaccagtggtcttaaggttgaagtgtggttcagggccagtgcatattagtggacagcacttagtagctgtggaggaagatgcagagtcagaagatgaagaggaggaggatgtgaaactcttaagtatatctggaaagcggtctgcccctggaggtggtagcaaggttccacagaaaaaagtaaaacttgctgctgatgaagatgatgacgatgatgatgaagaggatgatgatgaagatgatgatgatgatgattttgatgatgaggaagctgaagaaaaagcgccagtgaagaaatctatacgagatactccagccaaaaatgcacaaaagtcaaatcagaatggaaaagactcaaaaccatcatcaacaccaagatcaaaaggacaagaatccttcaagaaacaggaaaaaactcctaaaacaccaaaaggacctagttctgtagaagacattaaagcaaaaatgcaagcaagtatagaaaaagcgcattgaacagtcctgggcactacatgtaaattaagcccaaagatggggagaaaggaaaaggagagacaaatatagtccatactgagtgtcatcaacaatccagactgaagtcttctattttaatctcaatccccttttctgatttgccacccatgcctcttcaggctggaaacaatctcttggttccctaaagcactttcttctgactgctgtgattcagtgaaccttgccctttgctttctattacttgtgcatttgcctcacctgacaatgttttaaatcgcctttgtatctccttagctgctcaataaatatttgaatgcatcaattaagaatgtatgtgacaataattttgaaatggaaattgtgaggtttattttactaggttattggaggcagttaagtttcttaatgctatacctgattctgccaaagtcccttggacatttgaaaaccttttcaatcttttaaaaatgcataaaagatacttagagggaaaggtattaattaaatttagtaaaaacaaatatattcaatgctttaaattccaaagtagtgataaatacaaacatttcaagatatttgcaatagtaatgttttgaaattttggttacaaagtcacaggtcttgccaatactgttgtagtttcttgcctatatccgtaatttgaaggaaatggtgagagtgattagagaagtgtaattactgtaattttttcccctattg

SEQ ID NO: 2933 - DNA, 1338 bp, Homo sapiens
  source 1..1338: mol_type = genomic DNA
gggcgatgtccttgctaatttggagactgattcagtccccttttggcccccaagttacgtaaagataaggactttggagatgttttctcaggaaggacagagctgaaaaacaaagttcctgcgtgccgccacccgatggaagattcgatggacatggacatgagccccctgaggccccagaactatcttttcggttgtgaactaaaggccgacaaagattatcactttaaggtggataatgatgaaaatgagcaccagttatctttaagaacggtcagtttaggggctggtgcaaaggatgagttgcacattgttgaagcagaggcaatgaattacgaaggcagtccaattaaagtaacactggcaactttgaaaatgtctgtacagccaacggtttcccttgggggctttgaaataacaccaccagtggtcttaaggttgaagtgtggttcagggccagtgcatattagtggacagcacttagtagctgtggaggaagatgcagagtcagaagatgaagaggaggaggatgtgaaactcttaagtatatctggaaagcggtctgcccctggaggtggtagcaaggttccacagaaaaaagtaaaacttgctgctgatgaagatgatgacgatgatgatgaagaggatgatgatgaagatgatgatgatgatgattttgatgatgaggaagctgaagaaaaagcgccagtgaagaaatctatacgagatactccagccaaaaatgcacaaaagtcaaatcagaatggaaaagactcaaaaccatcatcaacaccaagatcaaaaggacaagaatccttcaagaaacaggaaaaaactcctaaaacaccaaaaggacctagttctgtagaagacattaaagcaaaaatgcaagcaagtatagaaaaaggtggttctcttcccaaagtggaagccaaattcatcaattatgtgaagaattgcttccggatgactgaccaagaggctattcaagatctctggcagtggaggaagtctctttaagaaaatagtttaaacaatttgttaaaaaattttccgtcttatttcatttctgtaacagttgatatctggctgtcctttttataatgcagagtgagaactttccctaccgtgtttgataaatgttgtccaggttctattgccaagaatgtgttgtccaaaatgcctgtttagtttttaaagatggaactccaccctttgcttggttttaagtatgtatggaatgttatgataggacatagtagtagcggtggtcagacatggaaatggtggggagacaaaaatatacatgtgaaataaaactcagtattttaataaagt

SEQ ID NO: 2934 - DNA, 4499 bp, Homo sapiens
  source 1..4499: mol_type = genomic DNA
cccgttccgggcccgcgaggcagccgccccggtcctgcccctccctcgcgctactgcgggagcagcgtcctcccgggccacggcgcttcccggccccggcgtccccggaccatggcgctctccgggctcttctctagctctcagcggctgcgaagtctgtaaacctggtggccaagtgattgtaagtcaggagactttccttcggtttctgcctttgatggcaagaggtggagattgtggcggcgattacagaaaacatctgggaagacaagttgctgtttttatgggaatcgcaggcttggaagagacagaagcaattccagaaataaattggaaattgaagatttaaacaatgttgttttaaaatattctaacttcaaagaatgatgccagaaacttaaaaaggggctgcgcagagtagcaggggccctggagggcgcggcctgaatcctgattgcccttctgctgagaggacacacgcagctgaagatgaatttgggaaaagtagccgcttgctactttaactatggaagagcagggccacagtgagatggaaataatcccatcagagtctcacccccacattcaattactgaaaagcaatcgggaacttctggtcactcacatccgcaatactcagtgtctggtggacaacttgctgaagaatgactacttctcggccgaagatgcggagattgtgtgtgcctgccccacccagcctgacaaggtccgcaaaattctggacctggtacagagcaagggcgaggaggtgtccgagttcttcctctacttgctccagcaactcgcagatgcctacgtggacctcaggccttggctgctggagatcggcttctccccttccctgctcactcagagcaaagtcgtggtcaacactgacccagtgagcaggtatacccagcagctgcgacaccatctgggccgtgactccaagttcgtgctgtgctatgcccagaaggaggagctgctgctggaggagatctacatggacaccatcatggagctggttggcttcagcaatgagagcctgggcagcctgaacagcctggcctgcctcctggaccacaccaccggcatcctcaatgagcagggtgagaccatcttcatcctgggtgatgctggggtgggcaagtccatgctgctacagcggctgcagagcctctgggccacgggccggctagacgcaggggtcaaattcttcttccactttcgctgccgcatgttcagctgcttcaaggaaagtgacaggctgtgtctgcaggacctgctcttcaagcactactgctacccagagcgggaccccgaggaggtgtttgccttcctgctgcgcttcccccacgtggccctcttcaccttcgatggcctggacgagctgcactcggacttggacctgagccgcgtgcctgacagctcctgcccctgggagcctgcccaccccctggtcttgctggccaacctgctcagtgggaagctgctcaagggggctagcaagctgctcacagcccgcacaggcatcgaggtcccgcgccagttcctgcggaagaaggtgcttctccggggcttctcccccagccacctgcgcgcctatgccaggaggatgttccccgagcgggccctgcaggaccgcctgctgagccagctggaggccaaccccaacctctgcagcctgtgctctgtgcccctcttctgctggatcatcttccggtgcttccagcacttccgtgctgcctttgaaggctcaccacagctgcccgactgcacgatgaccctgacagatgtcttcctcctggtcactgaggtccatctgaacaggatgcagcccagcagcctggtgcagcggaacacacgcagcccagtggagaccctccacgccggccgggacactctgtgctcgctggggcaggtggcccaccggggcatggagaagagcctctttgtcttcacccaggaggaggtgcaggcctccgggctgcaggagagagacatgcagctgggcttcctgcgggctttgccggagctgggccccgggggtgaccagcagtcctatgagtttttccacctcaccctccaggccttctttacagccttcttcctcgtgctggacgacagggtgggcactcaggagctgctcaggttcttccaggagtggatgccccctgcgggggcagcgaccacgtcctgctatcctcccttcctcccgttccagtgcctgcagggcagtggtccggcgcgggaagacctcttcaagaacaaggatcacttccagttcaccaacctcttcctgtgcgggctgttgtccaaagccaaacagaaactcctgcggcatctggtgcccgcggcagccctgaggagaaagcgcaaggccctgtgggcacacctgttttccagcctgcggggctacctgaagagcctgccccgcgttcaggtcgaaagcttcaaccaggtgcaggccatgcccacgttcatctggatgctgcgctgcatctacgagacacagagccagaaggtggggcagctggcggccaggggcatctgcgccaactacctcaagctgacctactgcaacgcctgctcggccgactgcagcgccctctccttcgtcctgcatcacttccccaagcggctggccctagacctagacaacaacaatctcaacgactacggcgtgcgggagctgcagccctgcttcagccgcctcactgttctcagactcagcgtaaaccagatcactgacggtggggtaaaggtgctaagcgaagagctgaccaaatacaaaattgtgacctatttgggtttatacaacaaccagatcaccgatgtcggagccaggtacgtcaccaaaatcctggatgaatgcaaaggcctcacgcatcttaaactgggaaaaaacaaaataacaagtgaaggagggaagtatctcgccctggctgtgaagaacagcaaatcaatctctgaggttgggatgtggggcaatcaagttggggatgaaggagcaaaagccttcgcagaggctctgcggaaccaccccagcttgaccaccctgagtcttgcgtccaacggcatctccacagaaggaggaaagagccttgcgagggccctgcagcagaacacgtctctagaaatactgtggctgacccaaaatgaactcaacgatgaagtggcagagagtttggcagaaatgttgaaagtcaaccagacgttaaagcatttatggcttatccagaatcagatcacagctaaggggactgcccagctggcagatgcgttacagagcaacactggcataacagagatttgcctaaatggaaacctgataaaaccagaggaggccaaagtctatgaagatgagaagcggattatctgtttctgagaggatgctttcctgttcatggggtttttgccctggagcctcagcagcaaatgccactctgggcagtcttttgtgtcagtgtcttaaaggggcctgcgcaggcgggactatcaggagtccactgcctccatgatgcaagccagcttcctgtgcagaaggtctggtcggcaaactccctaagtacccgctacaattctgcagaaaaagaatgtgtcttgcgagctgttgtagttacagtaaatacactgtgaagagactttattgcctattataattatttttatctgaagctagaggaataaagctgtgagcaaacagaggaggccagcctcacctcattccaacacctgccatagggaccaacgggagcgagttggtcaccgctcttttcattgaagagttgaggatgtggcacaaagttggtgccaagcttcttgaataaaacgtgtttgatggattagtattatacctgaaatattttcttccttctcagcactttcccatgtattgatactggtcccacttcacagctggagacaccggagtatgtgcagtgtgggatttgactcctccaaggttttgtggaaagttaatgtcaaggaaaggatgcaccacgggcttttaattttaatcctggagtctcactgtctgctggcaaagatagagaatgccctcagctcttagctggtctaagaatgacgatgccttcaaaatgctgcttccactcagggcttctcctctgctaggctaccctcctctagaaggctgagtaccatgggctacagtgtctggccttgggaagaagtgattctgtccctccaaagaaatagggcatggcttgcccctgtggccctggcatccaaatggctgcttttgtctcccttacctcgtgaagaggggaagtctcttcctgcctcccaagcagctgaagggtgactaaacgggcgccaagactcaggggatcggctgggaactgggccagcagagcatgttggacaccccccaccatggtgggcttgtggtggctgctccatgagggtgggggtgatactactagatcacttgtcctcttgccagctcatttgttaataaaatactgaaaacactctta

SEQ ID NO: 2935 - DNA, 794 bp, Homo sapiens
  source 1..794: mol_type = genomic DNA
actgcgggagcagcgtcctcccgggccacggcgcttcccggccccggcgtccccggaccatggcgctctccgggctcttctctagctctcagcggctgcgaagtctgtaaacctggtggccaaggacagtcagttgcatgtcacacaaggggcctcctttgatttatccaaaaggtctgacctggtttctggaaaaactctttagcgcatcaaatactcgttgagggcaagtgttgtttctaaacttgactcttgtggtgagaggtgattgtaagtcaggagactttccttcggtttctgcctttgatggcaagaggtggagattgtggcggcgattacagaaaacatctgggaagacaagttgctgtttttatgggaatcgcaggcttggaagagacagaagcaattccagaaataaattggaaattgaagatttaaacaatgttgttttaaaatattctaacttcaaagaatgatgccagaaacttaaaaaggggctgcgcagagtagcaggggccctggagggcgcggcctgaatcctgattgcccttctgctgagaggacacacgcagctgaagatgaatttgggaaaagtagccgcttgctactttaactatggaagagcagggccacagtgagatggaaataatcccatcagagtctcacccccacattcaattactgaaaagcaatcgggaacttctggtcactcacatccgcaatactcagtgtctggtggacaacttgctgaagaatgactacttctcggccgaagatgcggagattgtgtgtgc

SEQ ID NO: 2936 - DNA, 637 bp, Homo sapiens
  source 1..637: mol_type = genomic DNA
cggctgcgaagtctgtaaacctggtggccaaaagccaagtcatccagaagccagcttctgcagctccaaagagggccttagcagttacaaagaaacacaagataacggtgattgtaagtcaggagactttccttcggtttctgcctttgatggcaagaggtggagattgtggcggcgattacagaaaacatctgggaagacaagttgctgtttttatgggaatcgcaggcttggaagagacagaagcaattccagaaataaattggaaattgaagatttaaacaatgttgttttaaaatattctaacttcaaagaatgatgccagaaacttaaaaaggggctgcgcagagtagcaggggccctggagggcgcggcctgaatcctgattgcccttctgctgagaggacacacgcagctgaagatgaatttgggaaaagtagccgcttgctactttaactatggaagagcagggccacagtgagatggaaataatcccatcagagtctcacccccacattcaattactgaaaagcaatcgggaacttctggtcactcacatccgcaatactcagtgtctggtggacaacttgctgaagaatgactacttctcggccgaagatgcggagattgtgtgtgc

SEQ ID NO: 2937 - DNA, 578 bp, Homo sapiens
  source 1..578: mol_type = genomic DNA
agttcccgttccgggcccgcgaggcagccgccccggtcctgcccctccctcgcgctactgcgggagcagcgtcctcccgggccacggcgcttcccggccccggcgtccccggaccatggcgctctccgggctcttctctagctctcagcggctgcgaagtctgtaaacctggtggccaagtgattgtaagtcaggagactttccttcggtttctgcctttgatggcaagaggtggagattgtggcggcgattacagaaaacatctgggaagacaagttgctgtttttatgggaatcgcaggcttggaagagacagaagcagggctgcgcagagtagcaggggccctggagggcgcggcctgaatcctgattgcccttctgctgagaggacacacgcagctgaagatgaatttgggaaaagtagccgcttgctactttaactatggaagagcagggccacagtgagatggaaataatcccatcagagtctcacccccacattcaattactgaaaagcaatcgggaacttctggtcactcacatccgcaatactcagtgtctggtggacaacttgctgaa

SEQ ID NO: 2938 - DNA, 757 bp, Homo sapiens
  source 1..757: mol_type = genomic DNA
ccctccctcgcgctactgcgggagcagcgtcctcccgggccacggcgcttcccggccccggcgtccccggaccatggcgctctccgggctcttctctagctctcagcggctgcgaagtctgtaaacctggtggccaacatctcagttataagaaatgcacatctccgctcaaggtcccctgggacagtgcaaggaaagaaagaagcctgcggtgaaagtgacactgagtgattgtaagtcaggagactttccttcggtttctgcctttgatggcaagaggtggagattgtggcggcgattacagaaaacatctgggaagacaagttgctgtttttatgggaatcgcaggcttggaagagacagaagcaattccagaaataaattggaaattgaagatttaaacaatgttgttttaaaatattctaacttcaaagaatgatgccagaaacttaaaaaggggctgcgcagagtagcaggggccctggagggcgcggcctgaatcctgattgcccttctgctgagaggacacacgcagctgaagatgaatttgggaaaagtagccgcttgctactttaactatggaagagcagggccacagtgagatggaaataatcccatcagagtctcacccccacattcaattactgaaaagcaatcgggaacttctggtcactcacatccgcaatactcagtgtctggtggacaacttgctgaagaatgactacttctcggccgaagatgcggagattgtgtgtgc

SEQ ID NO: 2939 - DNA, 1587 bp, Homo sapiens
  source 1..1587: mol_type = genomic DNA
gcttcccggccccggcgtccccggaccatggcgctctccgggctcttctctagctctcagcggctgcgaagtctgtaaacctggtggccaagtgattgtaagtcaggagactttccttcggtttctgcctttgatggcaagaggtggagattgtggcggcgattacagaaaacatctgggaagacaagttgctgtttttatgggaatcgcaggcttggaagagacagaagcaattccagaaataaattggaaattgaagatttaaacaatgttgttttaaaatattctaacttcaaagaatgatgccagaaacttaaaaaggggctgcgcagagtagcaggggccctggagggcgcggcctgaatcctgattgcccttctgctgagaggacacacgcagctgaagatgaatttgggaaaagtagccgcttgctactttaactatggaagagcagggccacagtgagatggaaataatcccatcagagtctcacccccacattcaattactgaaaagcaatcgggaacttctggtcactcacatccgcaatactcagtgtctggtggacaacttgctgaagaatgactacttctcggccgaagatgcggagattgtgtgtgcctgccccacccagcctgacaaggtccgcaaaattctggacctggtacagagcaagggcgaggaggtgtccgagttcttcctctacttgctccagcaactcgcagatgcctacgtggacctcaggccttggctgctggagatcggcttctccccttccctgctcactcagagcaaagtcgtggtcaacactgacccagtgagcaggtatacccagcagctgcgacaccatctgggccgtgactccaagttcgtgctgtgctatgcccagaaggaggagctgctgctggaggagatctacatggacaccatcatggagctggttggcttcagcaatgagagcctgggcagcctgaacagcctggcctgcctcctggaccacaccaccggcatcctcaatgagcaggctgcttcaaggaaagtgacaggctgtgtctgcaggacctgctcttcaagcactactgctacccagagcgggaccccgaggaggtgtttgccttcctgctgcgcttcccccacgtggccctcttcaccttcgatggcctggacgagctgcactcggacttggacctgagccgcgtgcctgacagctcctgcccctgggagcctgcccaccccctggtcttgctggccaacctgctcagtgggaagctgctcaagggggctagcaagctgctcacagcccgcacaggcatcgaggtcccgcgccagttcctgcggaagaaggtgcttctccggggcttctcccccagccacctgcgcgcctatgccaggaggatgttccccgagcgggccctgcaggaccgcctgctgagccagctggaggccaaccccaacctctgcagcctgtgctctgtgcccctcttctgctggatcatcttccggtgcttccagcacttccgtgctgcctttgaaggctcaccacagctgcccgactgcacgatgaccctgacagatgtcttcctcctg

SEQ ID NO: 2940 - DNA, 4610 bp, Homo sapiens
  source 1..4610: mol_type = genomic DNA
ccctcgcgctactgcgggagcagcgtcctcccgggccacggcgcttcccggccccggcgtccccggaccatggcgctctccgggctcttctctagctctcagcggctgcgaagtctgtaaacctggtggccaagtgattgtaagtcaggagactttccttcggtttctgcctttgatggcaagaggtggagattgtggcggcgattacagaaaacatctgggaagacaagttgctgtttttatgggaatcgcaggcttggaagagacagaagcaattccagaaataaattggaaattgaagatttaaacaatgttgttttaaaatattctaacttcaaagaatgatgccagaaacttaaaaaggggctgcgcagagtagcaggggccctggagggcgcggcctgaatcctgattgcccttctgctgagaggacacacgcagctgaagatgaatttgggaaaagtagccgcttgctactttaactatggaagagcagggccacagtgagatggaaataatcccatcagagtctcacccccacattcaattactgaaaagcaatcgggaacttctggtcactcacatccgcaatactcagtgtctggtggacaacttgctgaagaatgactacttctcggccgaagatgcggagattgtgtgtgcctgccccacccagcctgacaaggtccgcaaaattctggacctggtacagagcaagggcgaggaggtgtccgagttcttcctctacttgctccagcaactcgcagatgcctacgtggacctcaggccttggctgctggagatcggcttctccccttccctgctcactcagagcaaagtcgtggtcaacactgacccagtgagcaggtatacccagcagctgcgacaccatctgggccgtgactccaagttcgtgctgtgctatgcccagaaggaggagctgctgctggaggagatctacatggacaccatcatggagctggttggcttcagcaatgagagcctgggcagcctgaacagcctggcctgcctcctggaccacaccaccggcatcctcaatgagcagggtgagaccatcttcatcctgggtgatgctggggtgggcaagtccatgctgctacagcggctgcagagcctctgggccacgggccggctagacgcaggggtcaaattcttcttccactttcgctgccgcatgttcagctgcttcaaggaaagtgacaggctgtgtctgcaggacctgctcttcaagcactactgctacccagagcgggaccccgaggaggtgtttgccttcctgctgcgcttcccccacgtggccctcttcaccttcgatggcctggacgagctgcactcggacttggacctgagccgcgtgcctgacagctcctgcccctgggagcctgcccaccccctggtcttgctggccaacctgctcagtgggaagctgctcaagggggctagcaagctgctcacagcccgcacaggcatcgaggtcccgcgccagttcctgcggaagaaggtgcttctccggggcttctcccccagccacctgcgcgcctatgccaggaggatgttccccgagcgggccctgcaggaccgcctgctgagccagctggaggccaaccccaacctctgcagcctgtgctctgtgcccctcttctgctggatcatcttccggtgcttccagcacttccgtgctgcctttgaaggctcaccacagctgcccgactgcacgatgaccctgacagatgtcttcctcctggtcactgaggtccatctgaacaggatgcagcccagcagcctggtgcagcggaacacacgcagcccagtggagaccctccacgccggccgggacactctgtgctcgctggggcaggtggcccaccggggcatggagaagagcctctttgtcttcacccaggaggaggtgcaggcctccgggctgcaggagagagacatgcagctgggcttcctgcgggctttgccggagctgggccccgggggtgaccagcagtcctatgagtttttccacctcaccctccaggccttctttacagccttcttcctcgtgctggacgacagggtgggcactcaggagctgctcaggttcttccaggagtggatgccccctgcgggggcagcgaccacgtcctgctatcctcccttcctcccgttccagtgcctgcagggcagtggtccggcgcgggaagacctcttcaagaacaaggatcacttccagttcaccaacctcttcctgtgcgggctgttgtccaaagccaaacagaaactcctgcggcatctggtgcccgcggcagccctgaggagaaagcgcaaggccctgtgggcacacctgttttccagcctgcggggctacctgaagagcctgccccgcgttcaggtcgaaagcttcaaccaggtgcaggccatgcccacgttcatctggatgctgcgctgcatctacgagacacagagccagaaggtggggcagctggcggccaggggcatctgcgccaactacctcaagctgacctactgcaacgcctgctcggccgactgcagcgccctctccttcgtcctgcatcacttccccaagcggctggccctagacctagacaacaacaatctcaacgactacggcgtgcgggagctgcagccctgcttcagccgcctcactgttctcagactcagcgtaaaccagatcactgacggtggggtaaaggtgctaagcgaagagctgaccaaatacaaaattgtgacctatttgggactttggaaatcagtagacaccatatgcttcaaaaaacaggggctattaaaatgacatcaggagccagaaagtctcatggctgtgctttctcttgaagtttatacaacaaccagatcaccgatgtcggagccagactgggaaaaaacaaaataacaagtgaaggagggaagtatctcgccctggctgtgaagaacagcaaatcaatctctgaggttgggatgtggggcaatcaagttggggatgaaggagcaaaagccttcgcagaggctctgcggaaccaccccagcttgaccaccctgagtcttgcgtccaacggcatctccacagaaggaggaaagagccttgcgagggccctgcagcagaacacgtctctagaaatactgtggctgacccaaaatgaactcaacgatgaagtggcagagagtttggcagaaatgttgaaagtcaaccagacgttaaagcatttatggcttatccagaatcagatcacagctaaggggactgcccagctggcagatgcgttacagagcaacactggcataacagagatttgaacttgtttggaacttgtcataaaatcgatcagtttggtgaattgcaaccaacaatatttaaaaagaaaacagaacagaacaaaatatcaggatgcaatgtgcatgcctaaatggaaacctgataaaaccagaggaggccaaagtctatgaagatgagaagcggattatctgtttctgagaggatgctttcctgttcatggggtttttgccctggagcctcagcagcaaatgccactctgggcagtcttttgtgtcagtgtcttaaaggggcctgcgcaggcgggactatcaggagtccactgcctccatgatgcaagccagcttcctgtgcagaaggtctggtcggcaaactccctaagtacccgctacaattctgcagaaaaagaatgtgtcttgcgagctgttgtagttacagtaaatacactgtgaagagactttattgcctattataattatttttatctgaagctagaggaataaagctgtgagcaaacagaggaggccagcctcacctcattccaacacctgccatagggaccaacgggagcgagttggtcaccgctcttttcattgaagagttgaggatgtggcacaaagttggtgccaagcttcttgaataaaacgtgtttgatggattagtattatacctgaaatattttcttccttctcagcactttcccatgtattgatactggtcccacttcacagctggagacaccggagtatgtgcagtgtgggatttgactcctccaaggttttgtggaaagttaatgtcaaggaaaggatgcaccacgggcttttaattttaatcctggagtctcactgtctgctggcaaagatagagaatgccctcagctcttagctggtctaagaatgacgatgccttcaaaatgctgcttccactcagggcttctcctctgctaggctaccctcctctagaaggctgagtaccatgggctacagtgtctggccttgggaagaagtgattctgtccctccaaagaaatagggcatggcttgcccctgtggccctggcatccaaatggctgcttttgtctcccttacctcgtgaagaggggaagtctcttcctgcctcccaagcagctgaagggtgactaaacgggcgccaagactcaggggatcggctgggaactgggccagcagagcatgttggacaccccccaccatggtgggcttgtggtggctgctccatgagggtgggggtgatactactagatcacttgtcctcttgccagctcatttgttaataaaatactgaaaacactc

SEQ ID NO: 2941 - DNA, 2385 bp, Homo sapiens
  source 1..2385: mol_type = genomic DNA
gggcagacggaggcgcctctctttccccgcccctcgcctcggccctttctcttcccagcacctcggctgttccccggcggcggcagcggcagcggcggcccacacagcagcgagaggcgagaggaggctgcctcgaggaggctgcctcgaggatgaagtgcaaacccaaccagacgcggacctacgaccccgaggggttcaagaagcgggcggcgtgcctgtgcttccggagcgaacgcgaggacgaggtcctgttagtgagtagcagccggtacccggaccgctggatcgtgccgggcgggggcatggagcccgaggaggagccgggcggtgcggcggtccgagaggtgtacgaagaagcgggagtcaaggggaagttaggccggctcctgggcgtcttcgaacagaaccaggatcgcaagcacagaacgtacgtgtatgtactgactgtcacggagctgctggaggattgggaagattcggttagcattgggaggaagcgagagtggttcaaagtcgaagatgccatcaaggttctccagtgccacaagcccgtgcacgccgaatatctggagaaactaaagctgggcggttccccaaccaatggaaactccatggccccatcctcgccagatagcgatccctaatgaacagcaaagatgttcagtattgtgctgaaagaaacattgatgtgaacccagtgatcagtggaattgtcaagtacaggtgagcacttctgtgttcccaagaagacagctcatctggtttcttcctgcatcttgggacactccttccctgtctataccactgactcttgctctggttgttgtactcttatacgtgaatagactcttaattcagcacctatagccttttgttgtgcttttttgatgtgtctgccttcattagactatgatgtctttgagagcaaagactatttttccttactctttgcatattctgcatctgagacactacttgaaatatggttggcatcactgaaggttctttgattcaattaatattttgtaatcaccgtgtggcaaaacattccccttccaatctggtgctagtagagtatatgctatctaggcaccatgtgtgtggcttttgtgtatcaggtgtttcagaaatatttcaagacagttgtaagatgtttgaggacaagaattattactcctatttctatgtcataccacacagtagctgcacagttttaagattatgccatcacctagggtaatgttttgtagaatcagtccttcgtgtaacaactctagtgtttttgtactgttgatgatttgcttaaattttattcaaaaactatcacttgctataaaggtaattgtaaaaataaatacagtggacgcaaaataatgttgtgagtttttataaaaataaattttaaaatgatatataagacatttttttgcaatgcctgccctaaccacttcttacatgtcatcttaacatctctttgaggaaacactgtttcctcattttacagatttaacatactgtattatttgatgccagagccaacaggctatatcataggcagtttccaaacttaattatgccatttagtttgtctagatttcttttgcctctctcactgatccatttggctgtagttttcatcccttttccagtacacacagctagctcctcatcctacctggtttctgcatatgagaatgcagagggctgagagagggcaaaattgttgtcatttagaaaaggcatttaggaaagaggctgctattagaggggaacacaaagtgaaggtttttttaaaaaagaggacttgcatcagctgcctccagaacaattttaagaaaataacaaagatgtttagaagaaatcttacggagtttgccatgggatgtgtgatatcagcagtcttcagctccttacaaattaccaaaagtggttctaatatgctagtttgtttgattttttcttttatattataaagcaattgcatcgataaaagcttggactccattttagtgtgacactcttcctcatgataccagtgaaatgtattgattgtgtccccagttgttacataatttgaaataaaaatataacttcttgatttattgttttttaagatgtgatatggtactgtggttatgttgttttaaaaaatgattatcttttagagaagtatactgaaaaatgtacaggtgaaatgatatgttactggtattcgcttcaaaatcatctgagtgtggggtaattgagtacatagatgaaacaagattggccataaattggtaattgctgaagctgtgtgatggatgtttgagagttcattatactattctctatacttttgtatatgtttgaaattttccataataaaaattgaaaaaagta

SEQ ID NO: 2942 - DNA, 1835 bp, Homo sapiens
  source 1..1835: mol_type = genomic DNA
gcagcaatggtccctccagggaacggaagccgttgaacgtgaacatttggagtttcctcttttgtgctgattcctgaggactaggaaggtgccccgaaaagaattcagagacctgacaatgtccctgtattgtggaatagcttgcaggagaaaatttttttggtgctataggctgctgtcaacctatgttactaagacacggtatttatttgaactgaaggaagatgatgatgcatgtaaaaaagcccagcaaacaggagcgttttacctctttcatagtctggctcctctgcttcagacttcagcacatcaatacctggccccccggcacagcctgttagagttggaaaggctcctgggtaaatttggacaggatgcacaaagaatagaagattctgtgctgattggatgctctgagcagcaggaagcatggtttgctctggatctaggtctggatagctccttttccataagtgcctccttacacaaacctgaaatggagacagagctcaaggggtctttcattgagctgagaaaggcactctttcaactcaatgcaagggatgcctccttgctgtccacggctcaagctcttctccgctggcatgatgctcatcagttctgcagcagaagtgggcagcccaccaagaagaacgtggctggcagcaagcgtgtgtgcccttccaataatataatctattatccacagatccaggtgaacttgagagaattagagacagctgcctggttcagtcatgatgaggtagccacagccctgaagagaaagggcccctatactcagcaacagaatgggactttcccattctggctgccccctaagttagccatctcccaccaactgattaaggagtgggtggaaaaacagacctgttcttccctgcctgcttagcccggatcaagtcacttagatcgctccttggtattcctgagggacaaactagagatcagttgacaaaggagaagtgacaaaagataagctgcagaaggacctcagaagggcagagcaaagggtgagcctacagtaagacacttctatcagcagtgttaatggaagaaattcctaccaatgggcaatcaaaaaagccagtgtgagaagaaaactgatgagctgtcaactgtcaaaaatcagggggaagggggaagcattagtttggatgtaggcccttgttcagtcattttctctaaggccttggaagcaaacatcttctggcatatggcttgttaatgttgtgtttacactaactgccaaaatgtgcctgttgtaagtttggttaaaacttttatcttagtattgaaaatatatagcaagttttaagtcattactgagttacttgttacccttacagaattaagaaaaatagcacagtatgacattttaaaattcatgtacaggtgcattctagttacatgaacatgctagttaaataaaagtcacaattaagtcattatgactcagagtactttataataaatcagatgccctgaggctctgttgaggaagtagaatcccaatgggactccagacagtaaatctttttcgctgttttcagctctgtcacatgctcagtttgtgacccagggaaaagactattgctttgccatgcctgttttcctaaataaaacagttgctggcatttgcacatccacaacgtgttgattaacaaagggattggtggagataaacagatgccaaacctgacctatttcttaaactttatggaataaactaaatttaggatttctcatcattcatatatgatgccataagggagaagagtttatttggggaaaataaaagaaatttccacaccttt

SEQ ID NO: 2943 - DNA, 2102 bp, Homo sapiens
  source 1..2102: mol_type = genomic DNA
gcagcaatggtccctccagggaacggaagccgttgaacgtgaacatttggagtttcctcttttgtgctgattcctgaggactaggaaggtgccccgaaaagaattcagagacctgacaatgtccctgtattgtggaatagcttgcaggagaaaatttttttggtgctataggctgctgtcaacctatgttactaagacacggtatttatttgaactgaaggaagatgatgatgcatgtaaaaaagcccagcaaacaggagcgttttacctctttcatagtctggctcctctgcttcagacttcagcacatcaatacctggccccccggcacagcctgttagagttggaaaggctcctgggtaaatttggacaggatgcacaaagaatagaagattctgtgctgattggatgctctgagcagcaggaagcatggtttgctctggatctaggtctggatagctccttttccataagtgcctccttacacaaacctgaaatggagacagagctcaaggggtctttcattgagctgagaaaggcactctttcaactcaatgcaagggatgcctccttgctgtccacggctcaagctcttctccgctggcatgatgctcatcagttctgcagcagaagtgggcagcccaccaagaagaacgtggctggcagcaagcgtgtgtgcccttccaataatataatctattatccacagatggctcctgtggcgatcacgctggtgtcagatgggacccgatgcctgcttgcccgccaaagctcctttcccaagggaatgtattctgccttggcaggtttttgtgatataggtgaaagtgtggaagagaccatccgccgagaagttgcagaagaggtgggattggaggtggaaagcctgcagtactatgcatcccagcattggcccttccctagtggctcactcatgattgcttgccatgcaactgtgaaaccagggcagacagaaatccaggtgaacttgagagaattagagacagctgcctggttcagtcatgatgaggtagccacagccctgaagagaaagggcccctatactcagcaacagaatgggactttcccattctggctgccccctaagttagccatctcccaccaactgattaaggagtgggtggaaaaacagacctgttcttccctgcctgcttagcccggatcaagtcacttagatcgctccttggtattcctgagggacaaactagagatcagttgacaaaggagaagtgacaaaagataagctgcagaaggacctcagaagggcagagcaaagggtgagcctacagtaagacacttctatcagcagtgttaatggaagaaattcctaccaatgggcaatcaaaaaagccagtgtgagaagaaaactgatgagctgtcaactgtcaaaaatcagggggaagggggaagcattagtttggatgtaggcccttgttcagtcattttctctaaggccttggaagcaaacatcttctggcatatggcttgttaatgttgtgtttacactaactgccaaaatgtgcctgttgtaagtttggttaaaacttttatcttagtattgaaaatatatagcaagttttaagtcattactgagttacttgttacccttacagaattaagaaaaatagcacagtatgacattttaaaattcatgtacaggtgcattctagttacatgaacatgctagttaaataaaagtcacaattaagtcattatgactcagagtactttataataaatcagatgccctgaggctctgttgaggaagtagaatcccaatgggactccagacagtaaatctttttcgctgttttcagctctgtcacatgctcagtttgtgacccagggaaaagactattgctttgccatgcctgttttcctaaataaaacagttgctggcatttgcacatccacaacgtgttgattaacaaagggattggtggagataaacagatgccaaacctgacctatttcttaaactttatggaataaactaaatttaggatttctcatcattcatatatgatgccataagggagaagagtttatttggggaaaataaaagaaatttccacaccttt

SEQ ID NO: 2944 - DNA, 1919 bp, Homo sapiens
  source 1..1919: mol_type = genomic DNA
tcctgaggactaggaaggtgccccgaaaagaattcagagacctgacaatgtccctgtattgtggaatagcttgcaggagaaaatttttttggtgctataggctgctgtcaacctatgttactaagacacggtatttatttgaactgaaggaagatgatgatgcatgtaaaaaagcccagcaaacaggagcgttttacctctttcatagtctggctcctctgcttcagacttcagcacatcaatacctggccccccggcacagcctgttagagttggaaaggctcctgggtaaatttggacaggatgcacaaagaatagaagattctgtgctgattggatgctctgagcagcaggaagcatggtttgctctggatctaggtctggatagctccttttccataagtgcctccttacacaaacctgaaatggagacagagctcaaggggtctttcattgagctgagaaaggcactctttcaactcaatgcaagggatgcctccttgctgtccacggctcaagctcttctccgctggcatgatgctcatcagttctgcagcagaagtgggcagcccaccaagaagaacgtggctggcagcaagcgtgtgtgcccttccaataatataatctattatccacaggtgaaagtgtggaagagaccatccgccgagaagttgcagaagaggtgggattggaggtggaaagcctgcagtactatgcatcccagcattggcccttccctagtggctcactcatgattgcttgccatgcaactgtgaaaccagggcagacagaaatccaggtgaacttgagagaattagagacagctgcctggttcagtcatgatgaggtagccacagccctgaagagaaagggcccctatactcagcaacagaatgggactttcccattctggctgccccctaagttagccatctcccaccaactgattaaggagtgggtggaaaaacagacctgttcttccctgcctgcttagcccggatcaagtcacttagatcgctccttggtattcctgagggacaaactagagatcagttgacaaaggagaagtgacaaaagataagctgcagaaggacctcagaagggcagagcaaagggtgagcctacagtaagacacttctatcagcagtgttaatggaagaaattcctaccaatgggcaatcaaaaaagccagtgtgagaagaaaactgatgagctgtcaactgtcaaaaatcagggggaagggggaagcattagtttggatgtaggcccttgttcagtcattttctctaaggccttggaagcaaacatcttctggcatatggcttgttaatgttgtgtttacactaactgccaaaatgtgcctgttgtaagtttggttaaaacttttatcttagtattgaaaatatatagcaagttttaagtcattactgagttacttgttacccttacagaattaagaaaaatagcacagtatgacattttaaaattcatgtacaggtgcattctagttacatgaacatgctagttaaataaaagtcacaattaagtcattatgactcagagtactttataataaatcagatgccctgaggctctgttgaggaagtagaatcccaatgggactccagacagtaaatctttttcgctgttttcagctctgtcacatgctcagtttgtgacccagggaaaagactattgctttgccatgcctgttttcctaaataaaacagttgctggcatttgcacatccacaacgtgttgattaacaaagggattggtggagataaacagatgccaaacctgacctatttcttaaactttatggaataaactaaatttaggatttctcatcattcatatatgatgccataagggagaagagtttatttggggaaaataaaagaaatttccacaccttt

SEQ ID NO: 2945 - DNA, 1118 bp, Homo sapiens
  source 1..1118: mol_type = genomic DNA
gtgctgattcctgaggactaggaaggtgccccgaaaagaattcagagacctgacaatgtccctgtattgtggaatagcttgcaggagaaaatttttttggtgctataggctgctgtcaacctatgttactaagacacgattgaatgagggtcactgaagatacagtgtttactctttgtctgctgtgaaaaagtctgttcccatctctaggtatttatttgaactgaaggaagatgatgatgcatgtaaaaaagcccagcaaacaggagcgttttacctctttcatagtctggctcctctgcttcagacttcagcacatcaatacctggccccccggcacagcctgttagagttggaaaggctcctgggtaaatttggacaggatgcacaaagaatagaagattctgtgctgattggatgctctgagcagcaggaagcatggtttgctctggatctaggtctggatagctccttttccataagtggctcaagctcttctccgctggcatgatgctcatcagttctgcagcagaagtgggcagcccaccaagaagaacgtggctggcagcaagcgtgtgtgcccttccaataatataatctattatccacagatggctcctgtggcgatcacgctggtgtcagatgggacccgatgcctgcttgcccgccaaagctcctttcccaagggaatgtattctgccttggcaggtttttgtgatataggtgaaagtgtggaagagaccatccgccgagaagttgcagaagaggtgggattggaggtggaaagcctgcagtactatgcatcccagcattggcccttccctagtggctcactcatgattgcttgccatgcaactgtgaaaccagggcagacagaaatccaggtgaacttgagagaattagagacagctgcctggttcagtcatgatgaggtagccacagccctgaagagaaagggcccctatactcagcaacagaatgggactttcccattctggctgccccctaagttagccatctcccaccaactgattaaggagtgggtggaaaaacagacctgttcttccctgcctgcttagcccggatcaagtcacttagatcgctccttggtattcctg

SEQ ID NO: 2946 - DNA, 1482 bp, Homo sapiens
  source 1..1482: mol_type = genomic DNA
gtgctgattcctgaggactaggaaggtgccccgaaaagaattcagagacctgacaatgtccctgtattgtggaatagcttgcaggagaaaatttttttggtgctataggctgctgtcaacctatgttactaagacacgattgaatgagggtcactgaagatacagtgtttactctttgtctgctgtgaaaaagtctgttcccatctctaggtatttatttgaactgaaggaagatgatgatgcatgtaaaaaagcccagcaaacaggagcgttttacctctttcatagtctggctcctctgcttcagacttcagcacatcaatacctggccccccggcacagcctgttagagttggaaaggctcctgggtaaatttggacaggatgcacaaagaatagaagattctgtgctgattggatgctctgagcagcaggaagcatggtttgctctggatctaggtctggatagctccttttccataagtgcctccttacacaaacctgaaatggagacagagctcaaggggtctttcattgagctgagaaaggcactctttcaactcaatgcaagggatgcctccttgctgtccacggctcaagctcttctccgctggcatgatgctcatcagttctgcagcagaagtgggcagcccaccaagaagaacgtggctggcagcaagcgtgtgtgcccttccaataatataatctattatccacagatggctcctgtggcgatcacgctggtgtcagatgggacccgatgcctgcttgcccgccaaagctcctttcccaagggaatgtattctgccttggcaggtttttgtgatataggtgaaagtgtggaagagaccatccgccgagaagttgcagaagaggtgggattggaggtggaaagcctgcagtactatgcatcccagcattggcccttccctagtggctcactcatgattgcttgccatgcaactgtgaaaccagggcagacagaaatccaggtgaacttgagagaattagagacagctgcctggttcagtcatgatgaggtagccacagccctgaagagaaagggcccctatactcagcaacagaatgggactttcccattctggctgccccctaagttagccatctcccaccaactgattaaggagtgggtggaaaaacagacctgttcttccctgcctgcttagcccggatcaagtcacttagatcgctccttggtattcctgagggacaaactagagatcagttgacaaaggagaagtgacaaaagataagctgcagaaggacctcagaagggcagagcaaagggtgagcctacagtaagacacttctatcagcagtgttaatggaagaaattcctaccaatgggcaatcaaaaaagccagtgtgagaagaaaactgatgagctgtcaactgtcaaaaatcagggggaagggggaagcattagtttggatgtaggcccttgttcagtcattttctctaa

SEQ ID NO: 2947 - DNA, 1759 bp, Homo sapiens
  source 1..1759: mol_type = genomic DNA
gtgcccctcggccccgcccccgcgccccggatatgctgggacagcccgcgcccctagaacgctttgcgtcccgacgcccgcaggtcctcgcggtgcgcaccgtttgcgacttggtacttggaaaaatggacaaggattgtgaaatgaaacgcaccacactggacagccctttggggaagctggagctgtctggttgtgagcagggtctgcacgaaataaagctcctgggcaaggggacgtctgcagctgatgccgtggaggtcccagcccccgctgcggttctcggaggtccggagcccctgatgcagtgcacagcctggctgaatgcctatttccaccagcccgaggctatcgaagagttccccgtgccggctcttcaccatcccgttttccagcaagagtcgttcaccagacaggtgttatggaagctgctgaaggttgtgaaattcggagaagtgatttcttaccagcaattagcagccctggcaggcaaccccaaagccgcgcgagcagtgggaggagcaatgagaggcaatcctgtccccatcctcatcccgtgccacagagtggtctgcagcagcggagccgtgggcaactactccggaggactggccgtgaaggaatggcttctggcccatgaaggccaccggttggggaagccaggcttgggagggagctcaggtctggcaggggcctggctcaagggagcgggagctacctcgggctccccgcctgctggccgaaactgagtatgtgcagtaggatggatgtttgagcgacacacacgtgtaacactgcatcggatgcggggcgtggaggcaccgctgtattaaaggaagtggcagtgtcctgggaacaagcgtgtctgccctttctgtttccatattttacagcaggatgagttcagacgcccgcggtcctgcacacatttgtttccttctctaacgctgcccttgctctatttttcatgtccattaaaacaggccaagtgagtgtggaaggcctggctcatgttgggccacagcccaggatggggcagtctggcaccctcaggccacagacggctgccatagccgctgtccagggccagctaaggcccatcccaggccgtccacactagaaagctggccctgccccatccccaccatgcctcccttcctggctgtgtccatggctgtgatggcattctccactcagcagttcctagcatcccacacccaggtctcactgaaagaaaggggaacaggccatggcagtcagtgcttacagaggttttctagctttgtttcctacctgccaaaaaggctaatgcaagatgcatccacttatggtctgtatcaggtgaatagaaaataaccatttgccaagatttggaaagacagagagctctctggacacgggttcgatggagcttgcacctctctgagagctgaagtcaagtctcaccctctctccatactccctggcctagtgtgctctgggcagcaggtaggaagggacagggacctctcatctcaagggctgccccaaagggccctcagggaccatgggcctgttaggaccccagcaccccagtgtcgatcctggaagtcaaaggtcacgactgtggggggccagctcatgtcactgatggcagcaggcagggtttccagcatgggcggtgcgctgctgtctgatacttcattattgtgttgtcatcctagctgtataattaactatatccaaaagccggaagggaaacctgtagctctgcatatgg

SEQ ID NO: 2948 - DNA, 6438 bp, Homo sapiens
  source 1..6438: mol_type = genomic DNA
gcctctctccatcagacaccccaaggttccatccgaagcaggcggagcaccgaacgcaccccggggtggtcagggacccccatccgtgctgccccctaggagcccgcgcctctcctctgcgccccgcctctcgggccgcaacgtcgcgcggttcctttaacagcgcgctggcagggtgtgggaagcaggaccgcgtcctcccgccccctcccatccgagtttcaggtgaattggtcaccgagggaggaggccgacacaccacacctacactcccgcgtccacctctccctccctgcttcctctggcggaggcggcaggaaccgagagccaggtccagagcgccgaggagccggtctaggacgcagcagattggtttatcttggaagctaaagggcattgctcatcctgaagatcagctgaccattgacaatcagccatgtcatccaggcctcttgaaagtccacctccttacaggcctgatgaattcaaaccgaatcattatgcaccaagcaatgacatatatggtggagagatgcatgttcgaccaatgctctctcagccagcctactctttttacccagaagatgaaattcttcacttctacaaatggacctctcctccaggagtgattcggatcctgtctatgctcattattgtgatgtgcattgccatctttgcctgtgtggcctccacgcttgcctgggacagaggctatggaacttcccttttaggaggtagtgtaggctacccttatggaggaagtggctttggtagctacggaagtggctatggctatggctatggttatggctatggctacggaggctatacagacccaagagcagcaaagggcttcatgttggccatggctgccttttgtttcattgccgcgttggtgatctttgttaccagtgttataagatctgaaatgtccagaacaagaagatactacttaagtgtgataatagtgagtgctatcctgggcatcatggtgtttattgccacaattgtctatataatgggagtgaacccaactgctcagtcttctggatctctatatggttcacaaatatatgccctctgcaaccaattttatacacctgcagctactggactctacgtggatcagtatttgtatcactactgtgttgtggatccccaggaggccattgccattgtactggggttcatgattattgtggcttttgctttaataattttctttgctgtgaaaactcgaagaaagatggacaggtatgacaagtccaatattttgtgggacaaggaacacatttatgatgagcagccccccaatgtcgaggagtgggttaaaaatgtgtctgcaggcacacaggacgtgccttcacccccatctgactatgtggaaagagttgacagtcccatggcatactcttccaatggcaaagtgaatgacaagcggttttatccagagtcttcctataaatccacgccggttcctgaagtggttcaggagcttccattaacttcgcctgtggatgacttcaggcagcctcgttacagcagcggtggtaactttgagacaccttcaaaaagagcacctgcaaagggaagagcaggaaggtcaaagagaacagagcaagatcactatgagacagactacacaactggcggcgagtcctgtgatgagctggaggaggactggatcagggaatatccacctatcacttcagatcaacaaagacaactgtacaagaggaattttgacactggcctacaggaatacaagagcttacaatcagaacttgatgagatcaataaagaactctcccgtttggataaagaattggatgactatagagaagaaagtgaagagtacatggctgctgctgatgaatacaatagactgaagcaagtgaagggatctgcagattacaaaagtaagaagaatcattgcaagcagttaaagagcaaattgtcacacatcaagaagatggttggagactatgatagacagaaaacatagaaggctgatgccaagttgtttgagaaattaagtatctgacatctctgcaatcttctcagaaggcaaatgactttggaccataaccccggaagccaaacctctgtgagcatcacaaagttttggttgctttaacatcatcagtattgaagcattttataaatcgcttttgataatcaactgggctgaacactccaattaaggattttatgctttaaacattggttcttgtattaagaatgaaatactgtttgaggtttttaagccttaaaggaaggttctggtgtgaactaaactttcacaccccagacgatgtcttcatacctacatgtatttgtttgcataggtgatctcatttaatcctctcaaccacctttcagataactgttatttataatcacttttttccacataaggaaactgggttcctgcaatgaagtctctgaagtgaaactgcttgtttcctagcacacacttttggttaagtctgttttatgacttcattaataataaattccctggcctttcatattttagctactatatatgtgatgatctaccagcctccctattttttttctgttatataaatggttaaaagaggtttttcttaaataataaagatcatgtaaaagtaacaaatgtgtgaaatttaaagattgtaaatatatatttacttttttaagatcaaagtttaaaccccgtggttagaattttgtgtgtttttaaatactttttatctttttgcatgccttttttaaaaaaccaactagaacttttcattatatcagaatatctgattacatttataattcaattgtgacttgaactgtatcttacaggaatgttcaatttctatacatattttataaggtattaaacctggtgttttctttccataataacctgtttgatgttattagtgctgttaacatacagcaatggaaaaccacactcaggagttgtatctgttgttgtttatactcctttggatgctgtgctggttagtcgtttcccattcctttggctgtaagaatgctgatatgtctgggaatagaatgctataccacgaaataccaaataatttcaaatggtgcccttaaattgtatcacttttttaaaaattcagattcttattagtaaaattagttgatagcactgtgctgaccaagttgattgtgatcatcccagcttagacttttctaaaaacttttttttagaataatctataaactgaactttagtatgcatttcagatatttaggtatataatttttttttttttttgagacagagtctcactctcacccaggctggaatgcagtggtgctatcttggctcactgcaacctccacctcccgggttcaagcaattctcctgcctcagcctctcgagtagttgagactacaggtgcccatcaccatgcgtggctaatttttgtatttttaatagagacggggttttaccatagtggccaggttggtcttgaactcctgaccttgtggtctgcctgcctcggcctcccaaagtgctgggattacaggcgtgagccaccatgcctggcctaagtgtgtgtgtgtgtgtgtgtgtgtatttttttttttttttttttgagatggagttttgctcttgttgaacaggctggagtgcaatgtcgcgatctcagctcaccacaacctccgcctcccaggttcaaacaattctcctgcctcggcctcccgagtagctgggattacaggcatgcgccaccacacctggctaattttttttttgtatttttagtagagatggggtttctccatgttggtcaggctggtctcgaactcctgacctcaggtgatccatccacctcggcctcccaaagtgctgggattagaggcgtgagccactgtgcccggcctataatttttgatagatgattttgaattattttccagagataaaattttaaatgtttccattatatcactgatttatttctgcaaattgaataaattcttaattttctgcatgcacataatacaaaaggtattttcatagttttggatttataccaaatgaaaaggattctcttgatgagcacctttaactgatttttctgttaaagttttaacaatttgttcttggaagtcagttcgtgaaggcaagtttgtcagtattttcacaaaactattcagctgaatccagaaagtgaaacagcaagaatttgcattgtaaaattgtgttataaaattggactttgaaatttcaaaaataagaaaaattttcatgtgtatttatactaaataccgttttaggaaactaggatcagggtgtttctgttggcgttggcattaactagctggatgtaaatttgaaaagccactcaagcagcttcctagtctagaaagtcagaggtttagattagatttccgacatcccttccatttctgacctgtagttcttgtctggaattctgctttgttataaactattgttctaaggagtttgttgtgatagcacatagttcattttgtaaagattccctgcgtataaagtgatgccctacatatgtgattttgtattaaaagtatataggatcattattttattttgaaaaatttaaatacagaaaagtataaaatataagtaccatccgcccagaaataacatgtgttaatgttttgtcatatgtgctttatattttttgaaataaagtgaagtcaactagtatttatagtaaataagttacatacacataagtacatatatgatatttaatcctcacaacgatcttttgacatgtgaccatttcttattcttcttttatagacaaggaactaatgatatgatagattaactggctgttgtcacactagcaagtggcaaaacaagggattaggatcttagtctcttcaactgttagattctatacttccatcctgtgttgactttgttaatggattggataatgtgagatcactctgatgtaaataaagtatcctatattaatttcgagtgcattttaagtacttgtaacataaatgcttcctgtgaaatatctgtaaagacctgaatgggtacatgtgtgtaaagaagaatcagggcagaaaagtgcttttatcatggctccggggaccttagcttcagttggtgttgtgagaattcctcacacaaggacattctccttgcttcagcatcaggatggaagtgtttctcatctggactttttcaaagactcagctggaggaatcagaattcataatttcctggcagctcatgattctgctacactacaccatgccatctcttgtgtgaaaggacagatttgatggaggactatgtcatccctcatgcgtttcttattgtctacatttattctaatgggaagaagtgagcaaaaacacctcaataatttgggtagtttttagaaaaccttgttagtaaattagaatagtgccactttggcattatgagaaagaagcatggatacataactagggttttgtgtatgactacaacgaaatgcagaatggtgtctccaaaaggtttccaattgctgccacaagaactgcttggtattgcctacatgtgttgtcctatttttgctttgcccttctgcagttacttgctgtgggaccttggagaaattaacttagcctctctgtacttcagttttttgtatttgtaaaatatatttgtaataatctcatagttaagaaggtagttaatgtgtgactcagtccttgtctaaaagtaaatatgcctagctacccccatcttccaaagccagaaggtgaaactttaacaagttttctaaaagcaaattgtgttttttaaaagtgcatgtgtcatccaatcccatatgattgatctgtgctgggtgcagccttagaatgtaaattcttttgaattctaggcagagaatgcaggattggcattctaaatatttgtacatgataaacaaatgcttctttaggttagagcaaatagtttacttatcaagatcacaattgttagatactgttgtcaattacagaggttttagatgaggctttctggaatgatttagtttccctgtaagggagcctgtctattggaatagacaggttcacttctcccagtctttcaagttgcatgctttttatatctgattccactggctgagctgattgtgaatgtcctaaccctgttgattgtgtctggccactcatgggcaaagaacagattatccattctttatagttgtcttttagttttacaagttgaaaaaacatctgagtaggttagataatttattctaccactttgtaaatgattagaatatgtcagtcataatcatgccaagagattatggatttatgcatattttgttttgctgtagtaccattcctagttgaatcttaacatccatgtctaaaatctatacagaacaaatattacagttgggaaaactg

SEQ ID NO: 2949 - DNA, 2218 bp, Homo sapiens
  source 1..2218: mol_type = genomic DNA
gtccccggctgagcgctggcggtcggtgcggcgtcaggtgcgcccgccaggtgagcgcgctccctggcaccgttggcccccggagggtcgggcccagttgcggcgagcggattggtttatcttggaagctaaagggcattgctcatcctgaagatcagctgaccattgacaatcagccatgtcatccaggcctcttgaaagtccacctccttacaggcctgatgaattcaaaccgaatcattatgcaccaagcaatgacatatatggtggagagatgcatgttcgaccaatgctctctcagccagcctactctttttacccagaagatgaaattcttcacttctacaaatggacctctcctccaggagtgattcggatcctgtctatgctcattattgtgatgtgcattgccatctttgcctgtgtggcctccacgcttgcctgggacagaggctatggaacttcccttttaggaggtagtgtaggctacccttatggaggaagtggctttggtagctacggaagtggctatggctatggctatggttatggctatggctacggaggctatacagacccaagagcagcaaagggcttcatgttggccatggctgccttttgtttcattgccgcgttggtgatctttgttaccagtgttataagatctgaaatgtccagaacaagaagatactacttaagtgtgataatagtgagtgctatcctgggcatcatggtgtttattgccacaattgtctatataatgggagtgaacccaactgctcagtcttctggatctctatatggttcacaaatatatgccctctgcaaccaattttatacacctgcagctactggactctacgtggatcagtatttgtatcactactgtgttgtggatccccaggaggttaaaaatgtgtctgcaggcacacaggacgtgccttcacccccatctgactatgtggaaagagttgacagtcccatggcatactcttccaatggcaaagtgaatgacaagcggttttatccagagtcttcctataaatccacgccggttcctgaagtggttcaggagcttccattaacttcgcctgtggatgacttcaggcagcctcgttacagcagcggtggtaactttgagacaccttcaaaaagagcacctgcaaagggaagagcaggaaggtcaaagagaacagagcaagatcactatgagacagactacacaactggcggcgagtcctgtgatgagctggaggaggactggatcagggaatatccacctatcacttcagatcaacaaagacaactgtacaagaggaattttgacactggcctacaggaatacaagagcttacaatcagaacttgatgagatcaataaagaactctcccgtttggataaagaattggatgactatagagaagaaagtgaagagtacatggctgctgctgatgaatacaatagactgaagcaagtgaagggatctgcagattacaaaagtaagaagaatcattgcaagcagttaaagagcaaattgtcacacatcaagaagatggttggagactatgatagacagaaaacatagaaggctgatgccaagttgtttgagaaattaagtatctgacatctctgcaatcttctcagaaggcaaatgactttggaccataaccccggaagccaaacctctgtgagcatcacaaagttttggttgctttaacatcatcagtattgaagcattttataaatcgcttttgataatcaactgggctgaacactccaattaaggattttatgctttaaacattggttcttgtattaagaatgaaatactgtttgaggtttttaagccttaaaggaaggttctggtgtgaactaaactttcacaccccagacgatgtcttcatacctacatgtatttgtttgcataggtgatctcatttaatcctctcaaccacctttcagataactgttatttataatcacttttttccacataaggaaactgggttcctgcaatgaagtctctgaagtgaaactgcttgtttcctagcacacacttttggttaagtctgttttatgacttcattaataataaattccctggcctttcatattttagctactatatatgtgatgatctaccagcctccctattttttttctgttatataaatggttaaaagaggtttttcttaaataataaagatcatgtaaaagt

SEQ ID NO: 2950 - DNA, 1748 bp, Homo sapiens
  source 1..1748: mol_type = genomic DNA
agtccccggctgagcgctggcggtcggtgcggcgtcaggtgcgcccgccaggtgagcgcgctccctggcaccgttggcccccggagggtcgggcccagttgcggcgagcggattggtttatcttggaagctaaagggcattgctcatcctgaagatcagctgaccattgacaatcagccatgtcatccaggcctcttgaaagtccacctccttacaggcctgatgaattcaaaccgaatcattatgcaccaagcaatgacatatatggtggagagatgcatgttcgaccaatgctctctcagccagcctactctttttacccagaagatgaaattcttcacttctacaaatggacctctcctccaggagtgattcggatcctgtctatgctcattattgtgatgtgcattgccatctttgcctgtgtggcctccacgcttgcctgggacagaggctatggaacttcccttttaggaggtagtgtaggctacccttatggaggaagtggctttggtagctacggaagtggctatggctatggctatggttatggctatggctacggaggctatacagacccaagagcagcaaagggcttcatgttggccatggctgccttttgtttcattgccgcgttggtgatctttgttaccagtgttataagatctgaaatgtccagaacaagaagatactacttaagtgtgataatagtgagtgctatcctgggcatcatggtgtttattgccacaattgtctatataatgggagtgaacccaactgctcagtcttctggatctctatatggttcacaaatatatgccctctgcaaccaattttatacacctgcagctactggactctacgtggatcagtatttgtatcactactgtgttgtggatccccaggaggccattgccattgtactggggttcatgattattgtggcttttgctttaataattttctttgctgtgaaaactcgaagaaagatggacaggtatgacaagtccaatattttgtgggacaaggaacacatttatgatgagcagccccccaatgtcgaggagtgggttaaaaatgtgtctgcaggcacacaggacgtgccttcacccccatctgactatgtggaaagagttgacagtcccatggcatactcttccaatggcaaagtgaatgacaagcggttttatccagagtcttcctataaatccacgccggttcctgaagtggttcaggagcttccattaacttcgcctgtggatgacttcaggcagcctcgttacagcagcggtggtaactttgagacaccttcaaaaagagcacctgcaaagggaagagcaggaaggtcaaagagaacagagcaagatcactatgagacagactacacaactggcggcgagtcctgtgatgagctggaggaggactggatcagggaatatccacctatcacttcagatcaacaaagacaactgtacaagaggaattttgacactggcctacaggaatacaagagcttacaatcagaacttgatgagatcaataaagaactctcccgtttggataaagaattggatgactatagagaagaaagtgaagagtacatggctgctgctgatgaatacaatagactgaagcaagtgaagggatctgcagattacaaaagtaagaagaatcattgcaagcagttaaagagcaaattgtcacacatcaagaagatggttggagactatgatagacagaaaacatag

SEQ ID NO: 2951 - DNA, 975 bp, Homo sapiens
  source 1..975: mol_type = genomic DNA
ggcattgctcatcctgaagatcagctgaccattgacaatcagccatgtcatccaggcctcttgaaagtccacctccttacaggcctgatgaattgccattgccattgtactggggttcatgattattgtggcttttgctttaataattttctttgctgtgaaaactcgaagaaagatggacaggtatgacaagtccaatattttgtgggacaaggaacacatttatgatgagcagccccccaatgtcgaggagtgggttaaaaatgtgtctgcaggcacacaggacgtgccttcacccccatctgactatgtggaaagagttgacagtcccatggcatactcttccaatggcaaagtgaatgacaagcggttttatccagagtcttcctataaatccacgccggttcctgaagtggttcaggagcttccattaacttcgcctgtggatgacttcaggcagcctcgttacagcagcggtggtaactttgagacaccttcaaaaagagcacctgcaaagggaagagcaggaaggtcaaagagaacagagcaagatcactatgagacagactacacaactggcggcgagtcctgtgatgagctggaggaggactggatcagggaatatccacctatcacttcagatcaacaaagacaactgtacaagaggaattttgacactggcctacaggaatacaagagcttacaatcagaacttgatgagatcaataaagaactctcccgtttggataaagaattggatgactatagagaagaaagtgaagagtacatggctgctgctgatgaatacaatagactgaagcaagtgaagggatctgcagattacaaaagtaagaagaatcattgcaagcagttaaagagcaaattgtcacacatcaagaagatggttggagactatgatagacagaaaacatagaaggctgatgccaagttgtttgagaaattaagtatctgaca

SEQ ID NO: 2952 - DNA, 813 bp, Homo sapiens
  source 1..813: mol_type = genomic DNA
ggcattgctcatcctgaagatcagctgaccattgacaatcagccatgtcatccaggcctcttgaaagtccacctccttacaggcctgatgaattgttaaaaatgtgtctgcaggcacacaggacgtgccttcacccccatctgactatgtggaaagagttgacagtcccatggcatactcttccaatggcaaagtgaatgacaagcggttttatccagagtcttcctataaatccacgccggttcctgaagtggttcaggagcttccattaacttcgcctgtggatgacttcaggcagcctcgttacagcagcggtggtaactttgagacaccttcaaaaagagcacctgcaaagggaagagcaggaaggtcaaagagaacagagcaagatcactatgagacagactacacaactggcggcgagtcctgtgatgagctggaggaggactggatcagggaatatccacctatcacttcagatcaacaaagacaactgtacaagaggaattttgacactggcctacaggaatacaagagcttacaatcagaacttgatgagatcaataaagaactctcccgtttggataaagaattggatgactatagagaagaaagtgaagagtacatggctgctgctgatgaatacaatagactgaagcaagtgaagggatctgcagattacaaaagtaagaagaatcattgcaagcagttaaagagcaaattgtcacacatcaagaagatggttggagactatgatagacagaaaacatagaaggctgatgccaagttgtttgagaaattaagtatctgaca

SEQ ID NO: 2953 - DNA, 1417 bp, Homo sapiens
  source 1..1417: mol_type = genomic DNA
ccaactgctcctgcgccgggcggggtcgtcgccgccagcggctccgagcgccggaagggccaggtctcagggctcctggagctgcaggcggcgggaggggctacaaatgcttgactcagtgatgcagaacctttcagagttagctggaagccacagccctgcctcttgatgcagcctggatccagccggtgtgaagaggagaccccttccctcttgtggggtttggatcctgtgtttctagcctttgcaaaactctacatcagggatatcctggacatgaaggagtcccgccaggtgccaggtgtatttttgtacaatggacatccaataaaacaggtagatgtcttgggaactgtcattggagtgagagaaagagatgctttctacagttatggagtggatgacagcactggagttataaactgcatctgctggaaaaagttgaatactgagtctgtatcagctgctccaagtgcagcaagagagctcagcttaacctcacaacttaagaagctacaagagaccattgagcagaaaacaaagatagagatcggggacacgatccgagtcagaggcagtatccgcacatacagagaagagcgagagattcatgccaccacttactataaagtggacgacccagtgtggaacattcaaattgcaaggatgcttgagctgcccactatctacaggaaagtttatgaccagccttttcacagctcagccctagagaaagaagaggcactaagcaatccaggcgccctggacctccccagtctcacgagtttgctgagtgaaaaagccaaagaattcctcatggagaacagagtgcagagcttttaccagcaggagctggaaatggtggagtctttgctgtcccttgccaatcagcctgtgattcacagtgcctcctccgaccaagtgaattttaagaaggacaccacttccaaggcaattcatagtatatttaagaatgctatacaactgctgcaggaaaaaggacttgttttccagaaagatgatggttttgataacctatactatgtaaccagagaagacaaagacctgcacagaaagatccaccggatcattcagcaggactgccagaaaccaaatcacatggagaagggctgtcacttcctgcacatcttggcctgtgctcgcctgagcatccgcccgggcctgagcgaggctgtgctgcagcaagttctggagctcctggaggaccagagtgacattgtcagcacaatggagcactactacacagcgttctgagcagagacacgcagaccagctgaggaggacaaagataaggtggcattcacccccaggctctgactttcagcatcatgcaggggcttatctgtctggaggcagttacctcataataaactataaaatatagtcatcttgggaa

SEQ ID NO: 2954 - DNA, 1311 bp, Homo sapiens
  source 1..1311: mol_type = genomic DNA
gtgtcccatctagatgcttgactcagtgatgcagaacctttcagagttagctggaagccacagccctgcctcttgatgcagcctggatccagccggtgtgaagaggagaccccttccctcttgtggggtttggatcctgtgtttctagcctttgcaaaactctacatcagggatatcctggacatgaaggagtcccgccaggtgccaggtgtatttttgtacaatggacatccaataaaacaggtagatgtcttgggaactgtcattggagtgagagaaagagatgctttctacagttatggagtggatgacagcactggagttataaactgcatctgctggaaaaagttgaatactgagtctgtatcagctgctccaagtgcagcaagagagctcagcttaacctcacaacttaagaagctacaagagaccattgagcagaaaacaaagatagagatcggggacacgatccgagtcagaggcagtatccgcacatacagagaagagcgagagattcatgccaccacttactataaagtggacgacccagtgtggaacattcaaattgcaaggatgcttgagctgcccactatctacaggaaagtttatgaccagccttttcacagctcagccctagagaaagaagaggcactaagcaatccaggcgccctggacctccccagtctcacgagtttgctgagtgaaaaagccaaagaattcctcatggagaacagagtgcagagcttttaccagcaggagctggaaatggtggagtctttgctgtcccttgccaatcagcctgtgattcacagtgcctcctccgaccaagtgaattttaagaaggacaccacttccaaggcaattcatagtatatttaagaatgctatacaactgctgcaggaaaaaggacttgttttccagaaagatgatggttttgataacctatactatgtaaccagagaagacaaagacctgcacagaaagatccaccggatcattcagcaggactgccagaaaccaaatcacatggagaagggctgtcacttcctgcacatcttggcctgtgctcgcctgagcatccgcccgggcctgagcgaggctgtgctgcagcaagttctggagctcctggaggaccagagtgacattgtcagcacaatggagcactactacacagcgttctgagcagagacacgcagaccagctgaggaggacaaagataaggtggcattcacccccaggctctgactttcagcatcatgcaggggcttatctgtctggaggcagttacctcataataaactataaaatata

SEQ ID NO: 2955 - DNA, 6833 bp, Homo sapiens
  source 1..6833: mol_type = genomic DNA
cccgccttggaactttttgccgccttggggttccagatgcgagacctggggctgggggacacgtacatctgtccatgtgtgtgatctaataaaccatttcctcctctccttgaagccgcagctttttatgacagctcctgtatgtcagagacacttgccttcttctttgggttataaacttttgatgccagagctctgcagaacgtgcccaactgaatcttaaagtagcgtctcgaagagagaggcagagaaagcgcaatctgtgaccttcatccccgcaccttgcttcttcctctcccctcctggccgcctccctcctccccaggggagcgtcaagaaagctctttttggatgcaggagggggcatctggttctgctaggctggaaagctgaggcaggatctgaggaagaattctcagactccggagagcccggactcctctcttctccttccccctgctcctggcgaactctgccccttccctcctccccgcaccgcttcccgagcccgctggtgcgcggggcgggggaccaggactgtgcggctgccggagtcctgggaagttgtggctgtcgagaatgggggtctgtgggtacctgttcctgccctggaagtgcctcgtggtcgtgtctctcaggctgctgttccttgtacccacaggagtgcccgtgcgcagcggagatgccaccttccccaaagctatggacaacgtgacggtccggcagggggagagcgccaccctcaggtgtaccatagatgaccgggtaacccgggtggcctggctaaaccgcagcaccatcctctacgctgggaatgacaagtggtccatagaccctcgtgtgatcatcctggtcaatacaccaacccagtacagcatcatgatccaaaatgtggatgtgtatgacgaaggtccgtacacctgctctgtgcagacagacaatcatcccaaaacgtcccgggttcacctaatagtgcaagttcctcctcagatcatgaatatctcctcagacatcactgtgaatgagggaagcagtgtgaccctgctgtgtcttgctattggcagaccagagccaactgtgacatggagacacctgtcagtcaaggaaggccagggctttgtaagtgaggatgagtacctggagatctctgacatcaagcgagaccagtccggggagtacgaatgcagcgcgttgaacgatgtcgctgcgcccgatgtgcggaaagtaaaaatcactgtaaactatcctccctatatctcaaaagccaagaacactggtgtttcagtcggtcagaagggcatcctgagctgtgaagcctctgcagtccccatggctgaattccagtggttcaaggaagaaaccaggttagccactggtctggatggaatgaggattgaaaacaaaggccgcatgtccactctgactttcttcaatgtttcagaaaaggattatgggaactatacttgtgtggccacgaacaagcttgggaacaccaatgccagcatcacattgtatgggcctggagcagtcattgatggtgtaaactcggcctccagagcactggcttgtctctggctatcagggaccctcttagcccacttcttcatcaagttttgataagaaatcctaggtcctctgagcaacgcctgcttctccatatcacagactttaatctacactgcggagagcaaaccagcttgggcttctttttgtttttttctgttattctagatttgttttctttttgtttttgtttatttgtttgtttgcttttatttccagcttgaatgagtggggttgggggcggggtgggcagggttctaccacgtgtaggataatcattcattggtgtgtccaaaaatggggtctgctcctgctaccttgacccttccctttcctctgcttctctcctcatcatcattcccaacaacatcctctgccacacacaacaaaacgtaagtttcatttgggcaaaaattgagcctcacaataaacaccctgaagacacaacttgacttataacatagtgcacagcaagagctacatccaagtgtcctattatctgtgattattttcttaatgacaatgtacatatgcccccatccatgttaattattatctaattccattagggttcacgtcttttctttctgggacactatcctactatatccatatctatagatttcaatatagatgattgtgccatcttctgtagcccctccgctctactcattccttccaccatctgcagagatttgaagtttggggctatgcatgaaacccaacactaaattttgcaagtcaagtaaccaaaaaagggggaggcattttgaagatagaacctctattttaaaaagagaagttcaactcataaacgtgattgataggtggctgatttatttaggttttgtcaagctatctatcaaagtaatggtacagttacccatctactcaaatatctgatttatctcaccatccaattatctacccacctgtcttcctctctagcaatctatttactgtttatcaatctatcaatgtaattgtctaacactcctttctattctctccctactactcactatcaattcatccccatatgaatctctaaccatattgtatctctcccactgtattcatttatacaccatcagcagacattggcatcttcaaaattatctttcaacttctgtgaaagccaacgatctcacaggttaacaaaatacaaaagcaataccctgtgttgtggactctttaaaatctggtatcctatccacccaagggagacactaacagataggccaaagtagcaagctaatgatcagtcactcactattcccagaagagcctgtgttttctaaaacactttcttgggaagcagatcagcctagaaaagttttgattagcactgtggttttccttttgcacttgaaggacaaaggtgccagcctttatgcttctctcaacccttcaagaaagtacatgtcaggaacctatggctggctttccttagcagcaagaacttgagagaaaaacacatctgtctctgcaatgcaaagtgaagagtccacccgcctgagtgggatgacttcagctagagtctcctttctgctccagttctggtttaatctgtttgaaaactatccagtaaaaagctgatggaggccaattacatggcgggtgtattgacaactctggtatttgtttcaggaagctcttctaagctgagggcacttgagcaactgacttaattttcaagcacttgattaacacaacactgcaaacagaagggagaaagtgtcagtgacacagtttcctctgatgcagctgcttctccaatggctttggggaagaacttcaccagctcttcaggttcaaagcagacccagcatacaaacaagagctgagccacctttgctgtcttgtctcctgggacgagaaggactcatccagcaaagttgcctgggattcaaaataaaggcattgcagaccgcacaggtgtgctgcagggactgatccacagagaggatgagaatgcagcatcaatcgcagacctgccctgcctcagttggaaaaccttttcaggccctcagtctaaaaaataaaaaatatgagcaccattgaattctgtgcccttaatgcttaactggtcttcttcctctggtatcagtgtcctctttgtttttgtccatcaaggcacatgagtgtgacctctgccatggggaaacacacacagagatatctatacatatatacatacatacaaacataggctatcttggcacactaaatgctaagcactgtcttaagaggtagagctggtgtgagtgaaattaatgttacattttccagctgtaaacagacatctgcatttcctagtgagctgccaggagccagattcgggaaccgtaactgatgtgccaggaatggtgcattgattcccagttccagggatgatcatgagcaggcgcaaaatcagaattaaaggtcgcacatagacgtttcagatctgtcaccaccttcagcatctggagttgagttggtgtcagatagtgtatgagaattaaatgtgtcatctgagcatgctactgatgataaatttgttactttggagttgaataaatgtgaaggctgtgaagagtggacagtcttggagaacacagtgcttgaaatggacaagctggacctattcctcactccaagacttgttctacaggaaagggtccatgctcctttggccaagatcatcagaacctctcaacccaacaaggctggcttcagggccactatggaaccctgctgttcccccttccaaaggatactaagatgcccctctggtgggtacctatcccagccacgtttcagagggagagaaatgctacagttgatcctcatctgtctggggtaaagacaacaaagtaaatacaacccaaggcaactggggtactcactgggagtgaaaatgacttcttcacaacagacatatttctgcttctgtgtttttgtgtttctttggtggggatggcttcatgggagagtggctgtcacccatcattttgaagcatatagaacaacaaatgcttacacaagacaatatccacacttttccaacttcacacacggagagtacatggagaatgcctacaggctagatttgttcagggtgccagtagtgggcatggggtgggggcaaggcaggacaaaacatacaagtctgagcaagtacatctcttgcaggttttccacatgaaaaggaagccaaataagtcctgttaggagattaggtgagaggaattagcaatgtagggactctgaaacccttccccttcccaaaacagagttcatatgcacttccaccaaagtaatgccaatgaaagtgctcgtgttaaggctgcagccaagcttgtttttcagtagtttaatgtcaagtgcctgatacagtcgactgcaagtctaaacaagcatgtttagtttttctcattcttgctttaattcagggagggggagatgtagagaagtggttgtgaaaacatgtacaggctttatgcagagcactgcgcatggctgttctgctgcaactgtgctccacgaaacagaagaaaaggtaaggtgttgtgtcacaaagaggccccagtctctttcttcttacatccatgcctcttactagatgatacatttacagattgggcagtttgttctcaaaacctgggtgagaagactattcctggactctagcaacttcaaaactgaggctgggtttcagaatctttttctgcatcaattcagtcaatttgccttcaacaaagagaagtcagcaagttctatttatgctgaaagaactattccatgagaaaagcagagaaccccaaagtgggcaggcaaccccgacgagagcttatccctgtggcggcatcaggagtggctgtacattgaattttcaagtgctggttggctgtcgccagcccatggtaggaggggaggaatggcttaagatgaggtaagatctggtggtggggcatctttcctcaattccatactgactttgatcttgagaaagaaaaactggctatgcattacctaaaaccagtccaaaatgaaacagaccaacacacacacaaaagcaaattgtcaatccctttggaattaagggaagcagcataaggtttttctttttggaaaaaatgcatttattttctttttctccaacagcaagaatcttttgttttcattttgcacgtgaccttatcttggaaactcttatacccaattgcctcccctcctattattcagagcttccctgtctttttacttgaagacaaataagtttgagcacttgagtaaaacttcacaggtgtgtaagtaggaaggcaacattttcaaaaagagaccatatgatgagaacgcctaatgatcaccacatgcaaacaaacaaaactgccagtctcatttcccacatttcttacttaagagaagagaagtaaatgaaaggaagaagaaatagatttgtaattaaagatgtggcaaaaaagatagggctgagccagttcaatttagccttcaggtgcagaatacttagagtccaaagaaatgtggagtggacttaattagatgcagttgtctttatcctgaaagtagtgagctaagcctaatttccagcattttgaaagagattcctttttgtttctttccatggtgccctctttaaggcacagagttgctccacaccactgggtggagaaagaaagattgcgaaccctcgaccatccttttgaggctacattctatgttatttggcagatttataaagctatcagtaataacaatgctatgtactgcaagctgcccttgtgttagttaaagggagcatttttaatcgttcggaaattttcgtgacatgtcaagtgcagttgtgaggactgtgtgggtgaacgaaaatgtgtctgtcaagttcagagtcctttagatttaaaaaaaaattatgacttatcaatggtgccgttatagctgtgtcagacaatgggtgtgcccattctcacaattatccttcaaaaaaaatctatgttcaaatgctttaaaaatttatcacacgatacaagagtatgactttgtcagccttctagagttctttttttcttttattttctttcgtattttttccttcaaaaaatcaatgaagacttgatttctgtcaataattgtatcaagggtgaatatactacctgaattttgtgcatgttacattgtagttgtaaccttttctaattcaggatgaatacgagatggttgtgattgtgcagtgtaccaataaagttcgagaaatttgtaacttt

SEQ ID NO: 2956 - DNA, 939 bp, Homo sapiens
  source 1..939: mol_type = genomic DNA
atgtaccatcctgcctactgggtcgtcttctcggcgacaactgccctgctcttcatcccaggagtgcccgtgcgcagcggagatgccaccttccccaaagctatggacaacgtgacggtccggcagggggagagcgccaccctcaggtgtaccatagatgaccgggtaacccgggtggcctggctaaaccgcagcaccatcatgatccaaaatgtggatgtgtatgacgaaggtccgtacacctgctctgtgcagacagacaatcatcccaaaacgtcccgggttcacctaatagtgcaagttcctcctcagatcatgaatatctcctcagacatcactgtgaatgagggaagcagtgtgaccctgctgtgtcttgctattggcagaccagagccaactgtgacatggagacacctgtcagtcaaggaaggccagggctttgtaagtgaggatgagtacctggagatctctgacatcaagcgagaccagtccggggagtacgaatgcagcgcgttgaacgatgtcgctgcgcccgatgtgcggaaagtaaaaatcactgtaaactatcctccctatatctcaaaagccaagaacactggtgtttcagtcggtcagaagggcatcctgagctgtgaagcctctgcagtccccatggctgaattccagtggttcaaggaagaaaccaggttagccactggtctggatggaatgaggattgaaaacaaaggccgcatgtccactctgactttcttcaatgtttcagaaaaggattatgggaactatacttgtgtggccacgaacaagcttgggaacaccaatgccagcatcacattgtatgggcctggagcagtcattgatggtgtaaactcggcctccagagcactggcttgtctctggctatcagggaccctcttagcccacttcttcatcaagttttga

SEQ ID NO: 2957 - DNA, 6424 bp, Homo sapiens
  source 1..6424: mol_type = genomic DNA
tgtgcaagaaaagaaatcagagacgctgcctgcctgctcccatctctcgcgcgctctctctctcttctgctctctccctccctttgcaaacattggatttaaacctgctcagaattcagcacagaggaaggcagcagcggtagcagcagcagaagcagtagcaagcccggcagctgagagcaccgcagcgtcgagatgtaccatcctgcctactgggtcgtcttctcggcgacaactgccctgctcttcatcccaggagtgcccgtgcgcagcggagatgccaccttccccaaagctatggacaacgtgacggtccggcagggggagagcgccaccctcaggtgtaccatagatgaccgggtaacccgggtggcctggctaaaccgcagcaccatcctctacgctgggaatgacaagtggtccatagaccctcgtgtgatcatcctggtcaatacaccaacccagtacagcatcatgatccaaaatgtggatgtgtatgacgaaggtccgtacacctgctctgtgcagacagacaatcatcccaaaacgtcccgggttcacctaatagtgcaagttcctcctcagatcatgaatatctcctcagacatcactgtgaatgagggaagcagtgtgaccctgctgtgtcttgctattggcagaccagagccaactgtgacatggagacacctgtcagtcaaggaaggccagggctttgtaagtgaggatgagtacctggagatctctgacatcaagcgagaccagtccggggagtacgaatgcagcgcgttgaacgatgtcgctgcgcccgatgtgcggaaagtaaaaatcactgtaaactatcctccctatatctcaaaagccaagaacactggtgtttcagtcggtcagaagggcatcctgagctgtgaagcctctgcagtccccatggctgaattccagtggttcaaggaagaaaccaggttagccactggtctggatggaatgaggattgaaaacaaaggccgcatgtccactctgactttcttcaatgtttcagaaaaggattatgggaactatacttgtgtggccacgaacaagcttgggaacaccaatgccagcatcacattgtatgggcctggagcagtcattgatggtgtaaactcggcctccagagcactggcttgtctctggctatcagggaccctcttagcccacttcttcatcaagttttgataagaaatcctaggtcctctgagcaacgcctgcttctccatatcacagactttaatctacactgcggagagcaaaccagcttgggcttctttttgtttttttctgttattctagatttgttttctttttgtttttgtttatttgtttgtttgcttttatttccagcttgaatgagtggggttgggggcggggtgggcagggttctaccacgtgtaggataatcattcattggtgtgtccaaaaatggggtctgctcctgctaccttgacccttccctttcctctgcttctctcctcatcatcattcccaacaacatcctctgccacacacaacaaaacgtaagtttcatttgggcaaaaattgagcctcacaataaacaccctgaagacacaacttgacttataacatagtgcacagcaagagctacatccaagtgtcctattatctgtgattattttcttaatgacaatgtacatatgcccccatccatgttaattattatctaattccattagggttcacgtcttttctttctgggacactatcctactatatccatatctatagatttcaatatagatgattgtgccatcttctgtagcccctccgctctactcattccttccaccatctgcagagatttgaagtttggggctatgcatgaaacccaacactaaattttgcaagtcaagtaaccaaaaaagggggaggcattttgaagatagaacctctattttaaaaagagaagttcaactcataaacgtgattgataggtggctgatttatttaggttttgtcaagctatctatcaaagtaatggtacagttacccatctactcaaatatctgatttatctcaccatccaattatctacccacctgtcttcctctctagcaatctatttactgtttatcaatctatcaatgtaattgtctaacactcctttctattctctccctactactcactatcaattcatccccatatgaatctctaaccatattgtatctctcccactgtattcatttatacaccatcagcagacattggcatcttcaaaattatctttcaacttctgtgaaagccaacgatctcacaggttaacaaaatacaaaagcaataccctgtgttgtggactctttaaaatctggtatcctatccacccaagggagacactaacagataggccaaagtagcaagctaatgatcagtcactcactattcccagaagagcctgtgttttctaaaacactttcttgggaagcagatcagcctagaaaagttttgattagcactgtggttttccttttgcacttgaaggacaaaggtgccagcctttatgcttctctcaacccttcaagaaagtacatgtcaggaacctatggctggctttccttagcagcaagaacttgagagaaaaacacatctgtctctgcaatgcaaagtgaagagtccacccgcctgagtgggatgacttcagctagagtctcctttctgctccagttctggtttaatctgtttgaaaactatccagtaaaaagctgatggaggccaattacatggcgggtgtattgacaactctggtatttgtttcaggaagctcttctaagctgagggcacttgagcaactgacttaattttcaagcacttgattaacacaacactgcaaacagaagggagaaagtgtcagtgacacagtttcctctgatgcagctgcttctccaatggctttggggaagaacttcaccagctcttcaggttcaaagcagacccagcatacaaacaagagctgagccacctttgctgtcttgtctcctgggacgagaaggactcatccagcaaagttgcctgggattcaaaataaaggcattgcagaccgcacaggtgtgctgcagggactgatccacagagaggatgagaatgcagcatcaatcgcagacctgccctgcctcagttggaaaaccttttcaggccctcagtctaaaaaataaaaaatatgagcaccattgaattctgtgcccttaatgcttaactggtcttcttcctctggtatcagtgtcctctttgtttttgtccatcaaggcacatgagtgtgacctctgccatggggaaacacacacagagatatctatacatatatacatacatacaaacataggctatcttggcacactaaatgctaagcactgtcttaagaggtagagctggtgtgagtgaaattaatgttacattttccagctgtaaacagacatctgcatttcctagtgagctgccaggagccagattcgggaaccgtaactgatgtgccaggaatggtgcattgattcccagttccagggatgatcatgagcaggcgcaaaatcagaattaaaggtcgcacatagacgtttcagatctgtcaccaccttcagcatctggagttgagttggtgtcagatagtgtatgagaattaaatgtgtcatctgagcatgctactgatgataaatttgttactttggagttgaataaatgtgaaggctgtgaagagtggacagtcttggagaacacagtgcttgaaatggacaagctggacctattcctcactccaagacttgttctacaggaaagggtccatgctcctttggccaagatcatcagaacctctcaacccaacaaggctggcttcagggccactatggaaccctgctgttcccccttccaaaggatactaagatgcccctctggtgggtacctatcccagccacgtttcagagggagagaaatgctacagttgatcctcatctgtctggggtaaagacaacaaagtaaatacaacccaaggcaactggggtactcactgggagtgaaaatgacttcttcacaacagacatatttctgcttctgtgtttttgtgtttctttggtggggatggcttcatgggagagtggctgtcacccatcattttgaagcatatagaacaacaaatgcttacacaagacaatatccacacttttccaacttcacacacggagagtacatggagaatgcctacaggctagatttgttcagggtgccagtagtgggcatggggtgggggcaaggcaggacaaaacatacaagtctgagcaagtacatctcttgcaggttttccacatgaaaaggaagccaaataagtcctgttaggagattaggtgagaggaattagcaatgtagggactctgaaacccttccccttcccaaaacagagttcatatgcacttccaccaaagtaatgccaatgaaagtgctcgtgttaaggctgcagccaagcttgtttttcagtagtttaatgtcaagtgcctgatacagtcgactgcaagtctaaacaagcatgtttagtttttctcattcttgctttaattcagggagggggagatgtagagaagtggttgtgaaaacatgtacaggctttatgcagagcactgcgcatggctgttctgctgcaactgtgctccacgaaacagaagaaaaggtaaggtgttgtgtcacaaagaggccccagtctctttcttcttacatccatgcctcttactagatgatacatttacagattgggcagtttgttctcaaaacctgggtgagaagactattcctggactctagcaacttcaaaactgaggctgggtttcagaatctttttctgcatcaattcagtcaatttgccttcaacaaagagaagtcagcaagttctatttatgctgaaagaactattccatgagaaaagcagagaaccccaaagtgggcaggcaaccccgacgagagcttatccctgtggcggcatcaggagtggctgtacattgaattttcaagtgctggttggctgtcgccagcccatggtaggaggggaggaatggcttaagatgaggtaagatctggtggtggggcatctttcctcaattccatactgactttgatcttgagaaagaaaaactggctatgcattacctaaaaccagtccaaaatgaaacagaccaacacacacacaaaagcaaattgtcaatccctttggaattaagggaagcagcataaggtttttctttttggaaaaaatgcatttattttctttttctccaacagcaagaatcttttgttttcattttgcacgtgaccttatcttggaaactcttatacccaattgcctcccctcctattattcagagcttccctgtctttttacttgaagacaaataagtttgagcacttgagtaaaacttcacaggtgtgtaagtaggaaggcaacattttcaaaaagagaccatatgatgagaacgcctaatgatcaccacatgcaaacaaacaaaactgccagtctcatttcccacatttcttacttaagagaagagaagtaaatgaaaggaagaagaaatagatttgtaattaaagatgtggcaaaaaagatagggctgagccagttcaatttagccttcaggtgcagaatacttagagtccaaagaaatgtggagtggacttaattagatgcagttgtctttatcctgaaagtagtgagctaagcctaatttccagcattttgaaagagattcctttttgtttctttccatggtgccctctttaaggcacagagttgctccacaccactgggtggagaaagaaagattgcgaaccctcgaccatccttttgaggctacattctatgttatttggcagatttataaagctatcagtaataacaatgctatgtactgcaagctgcccttgtgttagttaaagggagcatttttaatcgttcggaaattttcgtgacatgtcaagtgcagttgtgaggactgtgtgggtgaacgaaaatgtgtctgtcaagttcagagtcctttagatttaaaaaaaaattatgacttatcaatggtgccgttatagctgtgtcagacaatgggtgtgcccattctcacaattatccttcaaaaaaaatctatgttcaaatgctttaaaaatttatcacacgatacaagagtatgactttgtcagccttctagagttctttttttcttttattttctttcgtattttttccttcaaaaaatcaatgaagacttgatttctgtcaataattgtatcaagggtgaatatactacctgaattttgtgcatgttacattgtagttgtaaccttttctaattcaggatgaatacgagatggttgtgattgtgcagtgtaccaataaagttcgagaaatttgtaa

SEQ ID NO: 2958 - DNA, 1065 bp, Homo sapiens
  source 1..1065: mol_type = genomic DNA
atgggggtctgtgggtacctgttcctgccctggaagtgcctcgtggtcgtgtctctcaggctgctgttccttgtacccacaggagtgcccgtgcgcagcggagatgccaccttccccaaagctatggacaacgtgacggtccggcagggggagagcgccaccctcaggtgtaccatagatgaccgggtaacccgggtggcctggctaaaccgcagcaccatcctctacgctgggaatgacaagtggtccatagaccctcgtgtgatcatcctggtcaatacaccaacccagtacagcatcatgatccaaaatgtggatgtgtatgacgaaggtccgtacacctgctctgtgcagacagacaatcatcccaaaacgtcccgggttcacctaatagtgcaagttcctcctcagatcatgaatatctcctcagacatcactgtgaatgagggaagcagtgtgaccctgctgtgtcttgctattggcagaccagagccaactgtgacatggagacacctgtcagtcaaggaaggccagggctttgtaagtgaggatgagtacctggagatctctgacatcaagcgagaccagtccggggagtacgaatgcagcgcgttgaacgatgtcgctgcgcccgatgtgcggaaagtaaaaatcactgtaaactatcctccctatatctcaaaagccaagaacactggtgtttcagtcggtcagaagggcatcctgagctgtgaagcctctgcagtccccatggctgaattccagtggttcaaggaagaaaccaggttagccactggtctggatggaatgaggattgaaaacaaaggccgcatgtccactctgactttcttcaatgtttcagaaaaggattatgggaactatacttgtgtggccacgaacaagcttgggaacaccaatgccagcatcacattgtatgaaataagcccctcatcagcagtggcagggcctggagcagtcattgatggtgtaaactcggcctccagagcactggcttgtctctggctatcagggaccctcttagcccacttcttcatcaagttttga

SEQ ID NO: 2959 - DNA, 2543 bp, Homo sapiens
  source 1..2543: mol_type = genomic DNA
cctcccgcggctgcagccggagccgaaggtggtggctgcacagtagacgccccctcacggcttcccccacacgctcccgccccctcgctcgcccatcgcgcttccctcacaggctctgcagtcctcccccacagacgccttcccccttggactctcattcccttttccacggagccccgcgctttcgtgagccccctcgaggaacctggtctccgcatccagttaccacctcctgcctcagaggccatctgagcccttcgcacctcgcccctcagtccccccttccccccccgcccgcgtcgcctcgctccctcccgcccccccatcatcccttccctcgcagttcccctgtcctgaggggagccccgccacgggcagcgcggcggcggcggcaggagggagaaagtgaagcggtagctcgcgcacactcgcgccctcactcccggctaggcggcacccaccgccgggaggaggaggaggagccgagaggagctgagcgagcgcggaagtagctgctgctggtggtgacaatgtcaaataacggcctagacattcaagacaaacccccagcccctccgatgagaaataccagcactatgattggagccggcagcaaagatgctggaaccctaaaccatggttctaaacctctgcctccaaacccagaggagaagaaaaagaaggaccgattttaccgatccattttacctggagataaaacaaataaaaagaaagagaaagagcggccagagatttctctcccttcagattttgaacacacaattcatgtcggttttgatgctgtcacaggggagtttacgggaatgccagagcagtgggcccgcttgcttcagacatcaaatatcactaagtcggagcagaagaaaaacccgcaggctgttctggatgtgttggagttttacaactcgaagaagacatccaacagccagaaatacatgagctttacagataagtcagctgaggattacaattcttctaatgccttgaatgtgaaggctgtgtctgagactcctgcagtgccaccagtttcagaagatgaggatgatgatgatgatgatgctaccccaccaccagtgattgctccacgcccagagcacacaaaatctgtatacacacggtctgtgattgaaccacttcctgtcactccaactcgggacgtggctacatctcccatttcacctactgaaaataacaccactccaccagatgctttgacccggaatactgagaagcagaagaagaagcctaaaatgtctgatgaggagatcttggagaaattacgaagcatagtgagtgtgggcgatcctaagaagaaatatacacggtttgagaagattggacaaggtgcttcaggcaccgtgtacacagcaatggatgtggccacaggacaggaggtggccattaagcagatgaatcttcagcagcagcccaagaaagagctgattattaatgagatcctggtcatgagggaaaacaagaacccaaacattgtgaattacttggacagttacctcgtgggagatgagctgtgggttgttatggaatacttggctggaggctccttgacagatgtggtgacagaaacttgcatggatgaaggccaaattgcagctgtgtgccgtgagtgtctgcaggctctggagttcttgcattcgaaccaggtcattcacagagacatcaagagtgacaatattctgttgggaatggatggctctgtcaagctaactgactttggattctgtgcacagataaccccagagcagagcaaacggagcaccatggtaggaaccccatactggatggcaccagaggttgtgacacgaaaggcctatgggcccaaggttgacatctggtccctgggcatcatggccatcgaaatgattgaaggggagcctccatacctcaatgaaaaccctctgagagccttgtacctcattgccaccaatgggaccccagaacttcagaacccagagaagctgtcagctatcttccgggactttctgaaccgctgtctcgagatggatgtggagaagagaggttcagctaaagagctgctacaggtgagaaaactgaggtttcaagtgtttagtaacttttccatgatagctgcatcaattcctgaagattgccaagcccctctccagcctcactccactgattgctgcagctaaggaggcaacaaagaacaatcactaaaaccacactcaccccagcctcattgtgccaagccttctgtgagataaatgcacatttcagaaattccaactcctgatgccctcttctccttgccttgcttctcccatttcctgatctagcactcctcaagactttgatccttggaaaccgtgtgtccagcattgaagagaactgcaactgaatgactaatcagatgatggccatttctaaataaggaatttcctcccaattcatggatatgagggtggtttatgattaagggtttatataaataaatgtttctagtcttccgtgtgtcaaaatcctcacctccttcataaccatct

SEQ ID NO: 2960 - DNA, 3737 bp, Homo sapiens
  source 1..3737: mol_type = genomic DNA
gccctcccgcggctgcagccggagccgaaggtggtggctgcacagtagacgccccctcacggcttcccccacacgctcccgccccctcgctcgcccatcgcgcttccctcacaggctctgcagtcctcccccacagacgccttcccccttggactctcattcccttttccacggagccccgcgctttcgtgagccccctcgaggaacctggtctccgcatccagttaccacctcctgcctcagaggccatctgagcccttcgcacctcgcccctcagtccccccttccccccccgcccgcgtcgcctcgctccctcccgcccccccatcatcccttccctcgcagttcccctgtcctgaggggagccccgccacgggcagcgcggcggcggcggcaggagggagaaagtgaagcggtagctcgcgcacactcgcgccctcactcccggctaggcggcacccaccgccgggaggaggaggaggagccgagaggagctgagcgagcgcggaagtagctgctgctggtggtgacaatgtcaaataacggcctagacattcaagacaaacccccagcccctccgatgagaaataccagcactatgattggagccggcagcaaagatgctggaaccctaaaccatggttctaaacctctgcctccaaacccagaggagaagaaaaagaaggaccgattttaccgatccattttacctggagataaaacaaataaaaagaaagagaaagagcggccagagatttctctcccttcagattttgaacacacaattcatgtcggttttgatgctgtcacaggggagtttacgggaatgccagagcagtgggcccgcttgcttcagacatcaaatatcactaagtcggagcagaagaaaaacccgcaggctgttctggatgtgttggagttttacaactcgaagaagacatccaacagccagaaatacatgagctttacagataagtcagctgaggattacaattcttctaatgccttgaatgtgaaggctgtgtctgagactcctgcagtgccaccagtttcagaagatgaggatgatgatgatgatgatgctaccccaccaccagtgattgctccacgcccagagcacacaaaatctgtatacacacggtctgtgattgaaccacttcctgtcactccaactcgggacgtggctacatctcccatttcacctactgaaaataacaccactccaccagatgctttgacccggaatactgagaagcagaagaagaagcctaaaatgtctgatgaggagatcttggagaaattacgaagcatagtgagtgtgggcgatcctaagaagaaatatacacggtttgagaagattggacaaggtgcttcaggcaccgtgtacacagcaatggatgtggccacaggacaggaggtggccattaagcagatgaatcttcagcagcagcccaagaaagagctgattattaatgagatcctggtcatgagggaaaacaagaacccaaacattgtgaattacttggacagttacctcgtgggagatgagctgtgggttgttatggaatacttggctggaggctccttgacagatgtggtgacagaaacttgcatggatgaaggccaaattgcagctgtgtgccgtgagtgtctgcaggctctggagttcttgcattcgaaccaggtcattcacagagacatcaagagtgacaatattctgttgggaatggatggctctgtcaagctaactgactttggattctgtgcacagataaccccagagcagagcaaacggagcaccatggtaggaaccccatactggatggcaccagaggttgtgacacgaaaggcctatgggcccaaggttgacatctggtccctgggcatcatggccatcgaaatgattgaaggggagcctccatacctcaatgaaaaccctctgagagccttgtacctcattgccaccaatgggaccccagaacttcagaacccagagaagctgtcagctatcttccgggactttctgaaccgctgtctcgagatggatgtggagaagagaggttcagctaaagagctgctacagcatcaattcctgaagattgccaagcccctctccagcctcactccactgattgctgcagctaaggaggcaacaaagaacaatcactaaaaccacactcaccccagcctcattgtgccaagccttctgtgagataaatgcacatttcagaaattccaactcctgatgccctcttctccttgccttgcttctcccatttcctgatctagcactcctcaagactttgatccttggaaaccgtgtgtccagcattgaagagaactgcaactgaatgactaatcagatgatggccatttctaaataaggaatttcctcccaattcatggatatgagggtggtttatgattaagggtttatataaataaatgtttctagtcttccgtgtgtcaaaatcctcacctccttcataaccatctcccacaattaattcttgactatataaatttatggtttgataatattatcaatttgtaatcaattgagatttctttagtgcttgcttttctgtgactcaactgcccagacacctcattgtacttgaaaactggaacagcttgggaatgccatggggtttgataatctgccagggacatgaagaggctcagcttcctggaccatgactttggctcagctgatcctgacatgggagaacaaccacatttttctttgtgtgtgcttctagcagctgttcgggaggaccttgacccaatagtgttcccatgctgtttcttgtgaaatgctctcggctatgtagcagcttttgattccctgcataccctaggctgctgcccctatcctgtcccttgtttataacattgagaggttttctagggcacatactgagtgagagcagtgttgagaagtcggggaaaatggtgactacttttagagcaaggctgggcatcagcacctgtccagctctacttgtgtgatgtttcaggaactcagcccctttttctgcctaggataaggagctgaaagattaacttggatcttctaatggtccaaatcttttggtcacaataaagagtctccaaattagagactgcatgttagttctggatggatttggtggcctgacatgataccctgccagctgtgaggggaccccgtttttaagatgcatggccaagctctctgcaaatggaaatgcttacactgggtgttggggatgtttgctacctcctgctatttttgtggttttggttctcccactatggtaggacccctggccagcattgtggcttgtcatgtcagccccattgactaccttctcatgctctgaggtactactgcctctgcagcacaaatttctatttctgtcaataaaaggagatgaaaatattctattggagtatgcctttcttttttctcttcgttttttctttccttttctaattttttatatgaaataatgagtagtttcttcctgaaccatttgagagtggtaagttgcagatagaatgcccctttaccactatatacctgaatgtgtattctttctttttaacacttttattttaaatataaattaagagaaatgggccaaaaccatttgtattgtttaaagaataattataaacacacttgtatccaccaaatcaagaaatggaacactgacagtaagaaccttctctatcttgtccttcctttctca

SEQ ID NO: 2961 - DNA, 559 bp, Homo sapiens
  source 1..559: mol_type = genomic DNA
tcatcccttccctcgcagttcccctgtcctgaggggagccccgccacgggcagcgcggcggcggcggcaggagggagaaagtgaagcggtagctcgcgcacactcgcgccctcactcccggctaggcggcacccaccgccgggaggaggaggaggagccgagaggagctgagcgagcgcggaagatgacatacccctcattcttcagagctcagtctcctgtcaagtctttcttcctttattagctgctgctggtggtgacaatgtcaaataacggcctagacattcaagacaaacccccagcccctccgatgagaaataccagcactatgattggagccggcagcaaagatgctggaaccctaaaccatggttctaaacctctgcctccaaacccagaggagaagaaaaagaaggaccgattttaccgatccattttacctggagataaaacaaataaaaagaaagagaaagagcggccagagatttctctcccttcagattttgaacacacaattcatgtcggttttgatgctgtcacaggggagtttacgggaatg

SEQ ID NO: 2962 - DNA, 502 bp, Homo sapiens
  source 1..502: mol_type = genomic DNA
acacgacatcggatagttttcaaattcagcccttgacaacgagctcatagatgcggtggtgctttgttaacctgaaaaggaccctcagcgccggaagttagccgtctttctccatcctgactactacagtagccctcccagaaatcgtcccaaaattgtctgatagaaaggctgcacggaaacaacccgccacggacagcggaccgagaacagtgacgcgacgcgatgacgtcacgcagcaagcgggtgattccccagcctctggcgtcacgcgccgatgacgtaatcccaggcgttcgccctcatgcgggccagggtttggcctcgctcccacggcacgtctgaggcattggtttttcatccttccaaacttttggtctacagagactattagaagattaagtagctgctgctggtggtgacaatgtcaaataacggcctagacattcaagacaaacccccagcccctccgatgagaaataccagcactatgattggagcc

SEQ ID NO: 2963 - DNA, 581 bp, Homo sapiens
  source 1..581: mol_type = genomic DNA
acctcgggagctggcggctgagctgccaggagcccagcccagctgaatcgagcggagccggtggagcaggggccttgtgggtacccggttgggcagggagaggtgcggctctgcgacggaaacaatcgccagagatgccggggctagccttccccaccaggatggatagaatggtgctatctgagctgttataatgttggcctcatgcctagctttatattgcagcacgtctgaggcattggtttttcatccttccaaacttttggtctacagagactattagaagattaagtagctgctgctggtggtgacaatgtcaaataacggcctagacattcaagacaaacccccagcccctccgatgagaaataccagcactatgattggagccggcagcaaagatgctggaaccctaaaccatggttctaaacctctgcctccaaacccagaggagaagaaaaagaaggaccgattttaccgatccattttacctggagataaaacaaataaaaagaaagagaaagagcggccagagatttctctcccttcagattttgaacacacaattcatgtcggttttg

SEQ ID NO: 2964 - DNA, 450 bp, Homo sapiens
  source 1..450: mol_type = genomic DNA
acctcgggagctggcggctgagctgccaggagcccagcccagctgaatcgagcggagccggtggagcaggggccttgtgggtacccggttgggcagggagaggtgcggctctgcgacggaaacaatcgccagagatgccggggctagccttccccaccaggttggtggcgatacaaaaattgaaactggcctcagttgttgctctcaaatgcagatcaaggaatgtggacgctcatgtgtagctgctgctggtggtgacaatgtcaaataacggcctagacattcaagacaaacccccagcccctccgatgagaaataccagcactatgattggagccggcagcaaagatgctggaaccctaaaccatggttctaaacctctgcctccaaacccagaggagaagaaaaagaaggaccgattttaccgatccattttacctggagataaaa

SEQ ID NO: 2965 - DNA, 576 bp, Homo sapiens
  source 1..576: mol_type = genomic DNA
gagcgtgctgcacctcgggagctggcggctgagctgccaggagcccagcccagctgaatcgagcggagccggtggagcaggggccttgtgggtacccggttgggcagggagaggtgcggctctgcgacggaaacaatcgccagagatgccggggctagccttccccaccagcacgtctgaggcattggtttttcatccttccaaacttttggtctacagagactattagaagattaagctgctgctggtggtgacaatgtcaaataacggcctagacattcaagacaaacccccagcccctccgatgagaaataccagcactatgattggagccggcagcaaagatgctggaaccctaaaccatggttctaaacctctgcctccaaacccagaggagaagaaaaagaaggaccgattttaccgatccattttacctggagataaaacaaataaaaagaaagagaaagagcggccagagatttctctcccttcagattttgaacacacaattcatgtcggttttgatgctgtcacaggggagtttacgggaatgccagagcagtgggcccgcttgct

SEQ ID NO: 2966 - DNA, 3001 bp, Homo sapiens
  source 1..3001: mol_type = genomic DNA
tgctttgcagaaaaggagaagcgcgcggcttcctcccgcctccttccctcctttcttcccccgccccttctgtttcgccaaccccgacgcggcgccttcgctgccgccctgcgagagcgcgagcgtgctgcacctcgggagctggcggctgagctgccaggagcccagcccagctgaatcgagcggagccggtggagcaggggccttgtgggtacccggttgggcagggagaggtgcggctctgcgacggaaacaatcgccagagatgccggggctagccttccccaccagtagctgctgctggtggtgacaatgtcaaataacggcctagacattcaagacaaacccccagcccctccgatgagaaataccagcactatgattggagccggcagcaaagatgctggaaccctaaaccatggttctaaacctctgcctccaaacccagaggagaagaaaaagaaggaccgattttaccgatccattttacctggagataaaacaaataaaaagaaagagaaagagcggccagagatttctctcccttcagattttgaacacacaattcatgtcggttttgatgctgtcacaggggagtttacgggaatgccagagcagtgggcccgcttgcttcagacatcaaatatcactaagtcggagcagaagaaaaacccgcaggctgttctggatgtgttggagttttacaactcgaagaagacatccaacagccagaaatacatgagctttacagataagtcagctgaggattacaattcttctaatgccttgaatgtgaaggctgtgtctgagactcctgcagtgccaccagtttcagaagatgaggatgatgatgatgatgatgctaccccaccaccagtgattgctccacgcccagagcacacaaaatctgtatacacacggtctgtgattgaaccacttcctgtcactccaactcgggacgtggctacatctcccatttcacctactgaaaataacaccactccaccagatgctttgacccggaatactgagaagcagaagaagaagcctaaaatgtctgatgaggagatcttggagaaattacgaagcatagtgagtgtgggcgatcctaagaagaaatatacacggtttgagaagattggacaaggtgcttcaggcaccgtgtacacagcaatggatgtggccacaggacaggaggtggccattaagcagatgaatcttcagcagcagcccaagaaagagctgattattaatgagatcctggtcatgagggaaaacaagaacccaaacattgtgaattacttggacagttacctcgtgggagatgagctgtgggttgttatggaatacttggctggaggctccttgacagatgtggtgacagaaacttgcatggatgaaggccaaattgcagctgtgtgccgtgagtgtctgcaggctctggagttcttgcattcgaaccaggtcattcacagagacatcaagagtgacaatattctgttgggaatggatggctctgtcaagctaactgactttggattctgtgcacagataaccccagagcagagcaaacggagcaccatggtaggaaccccatactggatggcaccagaggttgtgacacgaaaggcctatgggcccaaggttgacatctggtccctgggcatcatggccatcgaaatgattgaaggggagcctccatacctcaatgaaaaccctctgagagccttgtacctcattgccaccaatgggaccccagaacttcagaacccagagaagctgtcagctatcttccgggactttctgaaccgctgtctcgagatggatgtggagaagagaggttcagctaaagagctgctacagcactcctcaagactttgatccttggaaaccgtgtgtccagcattgaagagaactgcaactgaatgactaatcagatgatggccatttctaaataaggaatttcctcccaattcatggatatgagggtggtttatgattaagggtttatataaataaatgtttctagtcttccgtgtgtcaaaatcctcacctccttcataaccatctcccacaattaattcttgactatataaatttatggtttgataatattatcaatttgtaatcaattgagatttctttagtgcttgcttttctgtgactcaactgcccagacacctcattgtacttgaaaactggaacagcttgggaatgccatggggtttgataatctgccagggacatgaagaggctcagcttcctggaccatgactttggctcagctgatcctgacatgggagaacaaccacatttttctttgtgtgtgcttctagcagctgttcgggaggaccttgacccaatagtgttcccatgctgtttcttgtgaaatgctctcggctatgtagcagcttttgattccctgcataccctaggctgctgcccctatcctgtcccttgtttataacattgagaggttttctagggcacatactgagtgagagcagtgttgagaagtcggggaaaatggtgactacttttagagcaaggctgggcatcagcacctgtccagctctacttgtgtgatgtttcaggaactcagcccctttttctgcctaggataaggagctgaaagattaacttggatcttctaatggtccaaatcttttggtcacaataaagagtctccaaattagagactgcatgttagttctggatggatttggtggcctgacatgataccctgccagctgtgaggggaccccgtttttaagatgcatggccaagctctctgcaaatggaaatgcttacactgggtgttggggatgtttgctacctcctgctatttttgtggttttggttctcccactatggtaggacccctggccagcattgtggcttgtcatgtcagccccattgactaccttctcatgctctgaggtactactgcctctgcagcacaaatttctatttctgtcaataaaaggagatgaaaatattc

SEQ ID NO: 2967 - DNA, 2306 bp, Homo sapiens
  source 1..2306: mol_type = genomic DNA
agccccggatgttcgttggggattcaacatggcggcgggagtgtccgcggtggtggcggtgcaagagagctgagggaggcgcgagggcgcggagttccaggtcgagcagttaggccgcgagcgactgcggcgccgagccggccgcaccgagtccccggcaccatgtttgggaagaggaagaagcgggtggagatctccgcgccgtccaacttcgagcaccgcgtgcacacgggcttcgaccagcacgagcagaagttcacggggctgccccgccagtggcagagcctgatcgaggagtcggctcgccggcccaagcccctcgtcgaccccgcctgcatcacctccatccagcccggggcccccaagggggagcctcatgacgtggcccctaacgggccatcagcggggggcctggccatcccccagtcctcctcctcctcctcccggcctcccacccgagcccgaggtgcccccagccctggagtgctgggaccccacgcctcagagccccagctggcccctccagcctgcacccccgccgcccctgctgttcctgggccccctggcccccgctcaccacagcgggagccacagcgagtatcccatgagcagttccgggctgccctgcagctggtggtggacccaggcgacccccgctcctacctggacaacttcatcaagattggcgagggctccacgggcatcgtgtgcatcgccaccgtgcgcagctcgggcaagctggtggccgtcaagaagatggacctgcgcaagcagcagaggcgcgagctgctcttcaacgaggtggtaatcatgagggactaccagcacgagaatgtggtggagatgtacaacagctacctggtgggggacgagctctgggtggtcatggagttcctggaaggaggcgccctcaccgacatcgtcacccacaccaggatgaacgaggagcagatcgcggccgtgtgccttgcagtgctgcaggccctgtcggtgctccacgcccagggcgtcatccaccgggacatcaagagcgactcgatcctgctgacccatgatggcagggtgaagctgtcagactttgggttctgcgcccaggtgagcaaggaagtgccccgaaggaagtcgctggtcggcacgccctactggatggccccagagctcatctcccgccttccctacgggccagaggtagacatctggtcgctggggataatggtgattgagatggtggacggagagcccccctacttcaacgagccacccctcaaagccatgaagatgattcgggacaacctgccaccccgactgaagaacctgcacaaggtgtcgccatccctgaagggcttcctggaccgcctgctggtgcgagaccctgcccagcgggccacggcagccgagctgctgaagcacccattcctggccaaggcagggccgcctgccagcatcgtgcccctcatgcgccagaaccgcaccagatgaggcccagcgcccttcccctcaaccaaagagccccccgggtcacccccgccccactgaggccagtagggggccaggcctcccactcctcccagcccgggagatgctccgcgtggcaccaccctccttgctgggggtagatgagaccctactactgaactccagttttgatctcgtgacttttagaaaaacacagggactcgtgggagcaagcgaggctcccaggacccccaccctctgggacaggccctcccccatgttcttctgtctccaggaagggcagcggccctcccatcactggaagtctgcagtgggggtcgctgggggtggagagaacactaagaggtgaacatgtatgagtgtgtgcacgcgtgtgagtgtgcatgtgtgtgtgtgcaaaggtccagccaccccgtcctccagcctgcaaggggtgtctggcgccttgcctgacacccagccccctctccccctgagccattgtgggggtcgatcatgaatgtccgaagagtggccttttcccgtagccctgcgccccctttctgtggctggatggggagacaggtcagggccccccaccctctccagcccctgcagcaaatgactactgcacctggacagcctcctcttttctagaagtctatttatattgtcattttataacactctagcccctgcccttattgggggacagatggtccctgtcctgcggggtggccctggcagaaccactgcctgaagaaccaggttcctgcccggtcagcgcagccccagcccgcccacccctgcctcgagttagttttacaattaaaacattgtcttgttttgtg

SEQ ID NO: 2968 - DNA, 2765 bp, Homo sapiens
  source 1..2765: mol_type = genomic DNA
agccccggatgttcgttggggattcaacatggcggcgggagtgtccgcggtggtggcggtgcaagagagctgagggaggcgcgagggcgcggagttccaggtcgagcagttaggccgcgagcgactgcggcgccgagccggccgcaccgagtccccggcaccatgtttgggaagaggaagaagcgggtggagatctccgcgccgtccaacttcgagcaccgcgtgcacacgggcttcgaccagcacgagcagaagttcacggggctgccccgccagtggcagagcctgatcgaggagtcggctcgccggcccaagcccctcgtcgaccccgcctgcatcacctccatccagcccggggcccccaagaccatcgtgcggggcagcaaaggtgccaaagatggggccctcacgctgctgctggacgagtttgagaacatgtcggtgacacgctccaactccctgcggagagacagcccgccgccgcccgcccgtgcccgccaggaaaatgggatgccagaggagccggccaccacggccagagggggcccagggaaggcaggcagccgaggccggttcgccggtcacagcgaggcgggtggcggcagtggtgacaggcgacgggcggggccagagaagaggcccaagtcttccagggagggctcagggggtccccaggagtcctcccgggacaaacgccccctctccgggcctgatgtcggcaccccccagcctgctggtctggccagtggggcgaaactggcagctggccggccctttaacacctacccgagggctgacacggaccacccatcccggggtgcccagggggagcctcatgacgtggcccctaacgggccatcagcggggggcctggccatcccccagtcctcctcctcctcctcccggcctcccacccgagcccgaggtgcccccagccctggagtgctgggaccccacgcctcagagccccagctggcccctccagcctgcacccccgccgcccctgctgttcctgggccccctggcccccgctcaccacagcgggagccacagcgagtatcccatgagcagttccgggctgccctgcagctggtggtggacccaggcgacccccgctcctacctggacaacttcatcaagattggcgagggctccacgggcatcgtgtgcatcgccaccgtgcgcagctcgggcaagctggtggccgtcaagaagatggacctgcgcaagcagcagaggcgcgagctgctcttcaacgaggtggtaatcatgagggactaccagcacgagaatgtggtggagatgtacaacagctacctggtgggggacgagctctgggtggtcatggagttcctggaaggaggcgccctcaccgacatcgtcacccacaccaggatgaacgaggagcagatcgcggccgtgtgccttgcagtgctgcaggccctgtcggtgctccacgcccagggcgtcatccaccgggacatcaagagcgactcgatcctgctgacccatgatggcagggtgaagctgtcagactttgggttctgcgcccaggtgagcaaggaagtgccccgaaggaagtcgctggtcggcacgccctactggatggccccagagctcatctcccgccttccctacgggccagaggtagacatctggtcgctggggataatggtgattgagatggtggacggagagcccccctacttcaacgagccacccctcaaagccatgaagatgattcgggacaacctgccaccccgactgaagaacctgcacaaggtgtcgccatccctgaagggcttcctggaccgcctgctggtgcgagaccctgcccagcgggccacggcagccgagctgctgaagcacccattcctggccaaggcagggccgcctgccagcatcgtgcccctcatgcgccagaaccgcaccagatgaggcccagcgcccttcccctcaaccaaagagccccccgggtcacccccgccccactgaggccagtagggggccaggcctcccactcctcccagcccgggagatgctccgcgtggcaccaccctccttgctgggggtagatgagaccctactactgaactccagttttgatctcgtgacttttagaaaaacacagggactcgtgggagcaagcgaggctcccaggacccccaccctctgggacaggccctcccccatgttcttctgtctccaggaagggcagcggccctcccatcactggaagtctgcagtgggggtcgctgggggtggagagaacactaagaggtgaacatgtatgagtgtgtgcacgcgtgtgagtgtgcatgtgtgtgtgtgcaaaggtccagccaccccgtcctccagcctgcaaggggtgtctggcgccttgcctgacacccagccccctctccccctgagccattgtgggggtcgatcatgaatgtccgaagagtggccttttcccgtagccctgcgccccctttctgtggctggatggggagacaggtcagggccccccaccctctccagcccctgcagcaaatgactactgcacctggacagcctcctcttttctagaagtctatttatattgtcattttataacactctagcccctgcccttattgggggacagatggtccctgtcctgcggggtggccctggcagaaccactgcctgaagaaccaggttcctgcccggtcagcgcagccccagcccgcccacccctgcctcgagttagttttacaattaaaacattgtcttgttttgtg

SEQ ID NO: 2969 - DNA, 1814 bp, Homo sapiens
  source 1..1814: mol_type = genomic DNA
atgttcgttggggattcaacatggcggcgggagtgtccgcggtggtggcggtgcaagagagctgagggaggcgcgagggcgcggagttccaggtcgagcagttaggccgcgagcgactgcggcgccgagccggccgcaccgagtccccggcaccatgtttgggaagaggaagaagcgggtggagatctccgcgccgtccaacttcgagcaccgcgtgcacacgggcttcgaccagcacgagcagaagttcacggggctgccccgccagtggcagagcctgatcgaggagtcggctcgccggcccaagcccctcgtcgaccccgcctgcatcacctccatccagcccggggcccccaagaccatcgtgcggggcagcaaaggtgccaaagatggggccctcacgctgctgctggacgagtttgagaacatgtcggtgacacgctccaactccctgcggagagacagcccgccgccgcccgcccgtgcccgccaggaaaatgggatgccagaggagccggccctttaacacctacccgagggctgacacggaccacccatcccggggtgcccagggggagcctcatgacgtggcccctaacgggccatcagcggggggcctggccatcccccagtcctcctcctcctcctcccggcctcccacccgagcccgaggtgcccccagccctggagtgctgggaccccacgcctcagagccccagctggcccctccagcctgcacccccgccgcccctgctgttcctgggccccctggcccccgctcaccacagcgggagccacagcgagtatcccatgagcagttccgggctgccctgcagctggtggtggacccaggcgacccccgctcctacctggacaacttcatcaagattggcgagggctccacgggcatcgtgtgcatcgccaccgtgcgcagctcgggcaagctggtggccgtcaagaagatggacctgcgcaagcagcagaggcgcgagctgctcttcaacgaggtggtaatcatgagggactaccagcacgagaatgtggtggagatgtacaacagctacctggtgggggacgagctctgggtggtcatggagttcctggaaggaggcgccctcaccgacatcgtcacccacaccaggatgaacgaggagcagatcgcggccgtgtgccttgcagtgctgcaggccctgtcggtgctccacgcccagggcgtcatccaccgggacatcaagagcgactcgatcctgctgacccatgatggcagggtgaagctgtcagactttgggttctgcgcccaggtgagcaaggaagtgccccgaaggaagtcgctggtcggcacgccctactggatggccccagagctcatctcccgccttccctacgggccagaggtagacatctggtcgctggggataatggtgattgagatggtggacggagagcccccctacttcaacgagccacccctcaaagccatgaagatgattcgggacaacctgccaccccgactgaagaacctgcacaaggtgtcgccatccctgaagggcttcctggaccgcctgctggtgcgagaccctgcccagcgggccacggcagccgagctgctgaagcacccattcctggccaaggcagggccgcctgccagcatcgtgcccctcatgcgccagaaccgcaccagatgaggcccagcgcccttcccctcaaccaaagagccccccgggtcacccccgccccactgaggccagtagggggccaggcctcccactcctcccagcccgggagatgctccgcgtggcaccaccctccttgct

SEQ ID NO: 2970 - DNA, 2855 bp, Homo sapiens
  source 1..2855: mol_type = genomic DNA
ccatctttctccaggctctctatgggatgccgccatcagaatgtctcttcctcagcccctttgttttttaaagtggctttggtcgaccatttgctctgtgcttggtactgtgtcaagggcccgattgaagaccacagatcctaaagataggggagtgtcgcgacaaggctgcctggggtgccctcttaacccaggggatcagtaaccctgtgctgagtcaatatccaaaggccgcaccgagtccccggcaccatgtttgggaagaggaagaagcgggtggagatctccgcgccgtccaacttcgagcaccgcgtgcacacgggcttcgaccagcacgagcagaagttcacggggctgccccgccagtggcagagcctgatcgaggagtcggctcgccggcccaagcccctcgtcgaccccgcctgcatcacctccatccagcccggggcccccaagaccatcgtgcggggcagcaaaggtgccaaagatggggccctcacgctgctgctggacgagtttgagaacatgtcggtgacacgctccaactccctgcggagagacagcccgccgccgcccgcccgtgcccgccaggaaaatgggatgccagaggagccggccaccacggccagagggggcccagggaaggcaggcagccgaggccggttcgccggtcacagcgaggcgggtggcggcagtggtgacaggcgacgggcggggccagagaagaggcccaagtcttccagggagggctcagggggtccccaggagtcctcccgggacaaacgccccctctccgggcctgatgtcggcaccccccagcctgctggtctggccagtggggcgaaactggcagctggccggccctttaacacctacccgagggctgacacggaccacccatcccggggtgcccagggggagcctcatgacgtggcccctaacgggccatcagcggggggcctggccatcccccagtcctcctcctcctcctcccggcctcccacccgagcccgaggtgcccccagccctggagtgctgggaccccacgcctcagagccccagctggcccctccagcctgcacccccgccgcccctgctgttcctgggccccctggcccccgctcaccacagcgggagccacagcgagtatcccatgagcagttccgggctgccctgcagctggtggtggacccaggcgacccccgctcctacctggacaacttcatcaagattggcgagggctccacgggcatcgtgtgcatcgccaccgtgcgcagctcgggcaagctggtggccgtcaagaagatggacctgcgcaagcagcagaggcgcgagctgctcttcaacgaggtggtaatcatgagggactaccagcacgagaatgtggtggagatgtacaacagctacctggtgggggacgagctctgggtggtcatggagttcctggaaggaggcgccctcaccgacatcgtcacccacaccaggatgaacgaggagcagatcgcggccgtgtgccttgcagtgctgcaggccctgtcggtgctccacgcccagggcgtcatccaccgggacatcaagagcgactcgatcctgctgacccatgatggcagggtgaagctgtcagactttgggttctgcgcccaggtgagcaaggaagtgccccgaaggaagtcgctggtcggcacgccctactggatggccccagagctcatctcccgccttccctacgggccagaggtagacatctggtcgctggggataatggtgattgagatggtggacggagagcccccctacttcaacgagccacccctcaaagccatgaagatgattcgggacaacctgccaccccgactgaagaacctgcacaaggtgtcgccatccctgaagggcttcctggaccgcctgctggtgcgagaccctgcccagcgggccacggcagccgagctgctgaagcacccattcctggccaaggcagggccgcctgccagcatcgtgcccctcatgcgccagaaccgcaccagatgaggcccagcgcccttcccctcaaccaaagagccccccgggtcacccccgccccactgaggccagtagggggccaggcctcccactcctcccagcccgggagatgctccgcgtggcaccaccctccttgctgggggtagatgagaccctactactgaactccagttttgatctcgtgacttttagaaaaacacagggactcgtgggagcaagcgaggctcccaggacccccaccctctgggacaggccctcccccatgttcttctgtctccaggaagggcagcggccctcccatcactggaagtctgcagtgggggtcgctgggggtggagagaacactaagaggtgaacatgtatgagtgtgtgcacgcgtgtgagtgtgcatgtgtgtgtgtgcaaaggtccagccaccccgtcctccagcctgcaaggggtgtctggcgccttgcctgacacccagccccctctccccctgagccattgtgggggtcgatcatgaatgtccgaagagtggccttttcccgtagccctgcgccccctttctgtggctggatggggagacaggtcagggccccccaccctctccagcccctgcagcaaatgactactgcacctggacagcctcctcttttctagaagtctatttatattgtcattttataacactctagcccctgcccttattgggggacagatggtccctgtcctgcggggtggccctggcagaaccactgcctgaagaaccaggttcctgcccggtcagcgcagccccagcccgcccacccctgcctcgagttagttttacaattaaaacattgtcttgttttgtg

SEQ ID NO: 2971 - DNA, 2701 bp, Homo sapiens
  source 1..2701: mol_type = genomic DNA
cagatgagtaacccgaagcccctagaggagtggtcacctgcctgagggcacttctgtcccaccagcatcagaccaggccgcaccgagtccccggcaccatgtttgggaagaggaagaagcgggtggagatctccgcgccgtccaacttcgagcaccgcgtgcacacgggcttcgaccagcacgagcagaagttcacggggctgccccgccagtggcagagcctgatcgaggagtcggctcgccggcccaagcccctcgtcgaccccgcctgcatcacctccatccagcccggggcccccaagaccatcgtgcggggcagcaaaggtgccaaagatggggccctcacgctgctgctggacgagtttgagaacatgtcggtgacacgctccaactccctgcggagagacagcccgccgccgcccgcccgtgcccgccaggaaaatgggatgccagaggagccggccaccacggccagagggggcccagggaaggcaggcagccgaggccggttcgccggtcacagcgaggcgggtggcggcagtggtgacaggcgacgggcggggccagagaagaggcccaagtcttccagggagggctcagggggtccccaggagtcctcccgggacaaacgccccctctccgggcctgatgtcggcaccccccagcctgctggtctggccagtggggcgaaactggcagctggccggccctttaacacctacccgagggctgacacggaccacccatcccggggtgcccagggggagcctcatgacgtggcccctaacgggccatcagcggggggcctggccatcccccagtcctcctcctcctcctcccggcctcccacccgagcccgaggtgcccccagccctggagtgctgggaccccacgcctcagagccccagctggcccctccagcctgcacccccgccgcccctgctgttcctgggccccctggcccccgctcaccacagcgggagccacagcgagtatcccatgagcagttccgggctgccctgcagctggtggtggacccaggcgacccccgctcctacctggacaacttcatcaagattggcgagggctccacgggcatcgtgtgcatcgccaccgtgcgcagctcgggcaagctggtggccgtcaagaagatggacctgcgcaagcagcagaggcgcgagctgctcttcaacgaggtggtaatcatgagggactaccagcacgagaatgtggtggagatgtacaacagctacctggtgggggacgagctctgggtggtcatggagttcctggaaggaggcgccctcaccgacatcgtcacccacaccaggatgaacgaggagcagatcgcggccgtgtgccttgcagtgctgcaggccctgtcggtgctccacgcccagggcgtcatccaccgggacatcaagagcgactcgatcctgctgacccatgatggcagggtgaagctgtcagactttgggttctgcgcccaggtgagcaaggaagtgccccgaaggaagtcgctggtcggcacgccctactggatggccccagagctcatctcccgccttccctacgggccagaggtagacatctggtcgctggggataatggtgattgagatggtggacggagagcccccctacttcaacgagccacccctcaaagccatgaagatgattcgggacaacctgccaccccgactgaagaacctgcacaaggtgtcgccatccctgaagggcttcctggaccgcctgctggtgcgagaccctgcccagcgggccacggcagccgagctgctgaagcacccattcctggccaaggcagggccgcctgccagcatcgtgcccctcatgcgccagaaccgcaccagatgaggcccagcgcccttcccctcaaccaaagagccccccgggtcacccccgccccactgaggccagtagggggccaggcctcccactcctcccagcccgggagatgctccgcgtggcaccaccctccttgctgggggtagatgagaccctactactgaactccagttttgatctcgtgacttttagaaaaacacagggactcgtgggagcaagcgaggctcccaggacccccaccctctgggacaggccctcccccatgttcttctgtctccaggaagggcagcggccctcccatcactggaagtctgcagtgggggtcgctgggggtggagagaacactaagaggtgaacatgtatgagtgtgtgcacgcgtgtgagtgtgcatgtgtgtgtgtgcaaaggtccagccaccccgtcctccagcctgcaaggggtgtctggcgccttgcctgacacccagccccctctccccctgagccattgtgggggtcgatcatgaatgtccgaagagtggccttttcccgtagccctgcgccccctttctgtggctggatggggagacaggtcagggccccccaccctctccagcccctgcagcaaatgactactgcacctggacagcctcctcttttctagaagtctatttatattgtcattttataacactctagcccctgcccttattgggggacagatggtccctgtcctgcggggtggccctggcagaaccactgcctgaagaaccaggttcctgcccggtcagcgcagccccagcccgcccacccctgcctcgagttagttttacaattaaaacattgtcttgttttgtg

SEQ ID NO: 2972 - DNA, 1827 bp, Homo sapiens
  source 1..1827: mol_type = genomic DNA
gattcaacatggcggcgggagtgtccgcggtggtggcggtgcaagagagctgagggaggcgcgagggcgcggagttccaggtcgagcagttaggccgcgagcgactgcggcgccgagccggccgcaccgagtccccggcaccatgtttgggaagaggaagaagcgggtggagatctccgcgccgtccaacttcgagcaccgcgtgcacacgggcttcgaccagcacgagcagaagttcacggggctgccccgccagtggcagagcctgatcgaggagtcggctcgccggcccaagcccctcgtcgaccccgcctgcatcacctccatccagcccggggcccccaagggggagcctcatgacgtggcccctaacgggccatcagcggggggcctggccatcccccagtcctcctcctcctcctcccggcctcccacccgagcccgaggtgcccccagccctggagtgctgggaccccacgcctcagagcccccgctcaccacagcgggagccacagcgagtatcccatgagcagttccgggctgccctgcagctggtggtggacccaggcgacccccgctcctacctggacaacttcatcaagattggcgagggctccacgggcatcgtgtgcatcgccaccgtgcgcagctcgggcaagctggtggccgtcaagaagatggacctgcgcaagcagcagaggcgcgagctgctcttcaacgaggtggtaatcatgagggactaccagcacgagaatgtggtggagatgtacaacagctacctggtgggggacgagctctgggtggtcatggagttcctggaaggaggcgccctcaccgacatcgtcacccacaccaggatgaacgaggagcagatcgcggccgtgtgccttgcagtgctgcaggccctgtcggtgctccacgcccagggcgtcatccaccgggacatcaagagcgactcgatcctgctgacccatgatggcagggtgaagctgtcagactttgggttctgcgcccaggtgagcaaggaagtgccccgaaggaagtcgctggtcggcacgccctactggatggccccagagctcatctcccgccttccctacgggccagaggtagacatctggtcgctggggataatggtgattgagatggtggacggagagcccccctacttcaacgagccacccctcaaagccatgaagatgattcgggacaacctgccaccccgactgaagaacctgcacaaggtgtcgccatccctgaagggcttcctggaccgcctgctggtgcgagaccctgcccagcgggccacggcagccgagctgctgaagcacccattcctggccaaggcagggccgcctgccagcatcgtgcccctcatgcgccagaaccgcaccagatgaggcccagcgcccttcccctcaaccaaagagccccccgggtcacccccgccccactgaggccagtagggggccaggcctcccactcctcccagcccgggagatgctccgcgtggcaccaccctccttgctgggggtagatgagaccctactactgaactccagttttgatctcgtgacttttagaaaaacacagggactcgtgggagcaagcgaggctcccaggacccccaccctctgggacaggccctcccccatgttcttctgtctccaggaagggcagcggccctcccatcactggaagtctgcagtgggggtcgctgggggtggagagaacactaagaggtgaacatgtatgagtgtgtgcacgcgtgtgagtgtgcatgtgtgtgtgtgcaaaggtccagccaccccgtcctccagcctgcaa

SEQ ID NO: 2973 - DNA, 3025 bp, Homo sapiens
  source 1..3025: mol_type = genomic DNA
gcgggagtgtccgcggtggtggcggtgcaagagagctgagggaggcgcgagggcgcggagttccaggtcgagcagttaggccgcgagcgactgcggcgccgagccgatgagtaacccgaagcccctagaggagtggtcacctgcctgagggcacttctgtcccaccagcatcagaccaggtgtgtgcaggctctctatgggatgccgccatcagaatgtctcttcctcagcccctttgttttttaaagtggctttggtcgaccatttgctctgtgcttggtactgtgtcaagggcccgattgaagaccacagatcctaaagataggggagtgtcgcgacaaggctgcctggggtgccctcttaacccaggggatcagtaaccctgtgctgagtcaatatccaaaggccgcaccgagtccccggcaccatgtttgggaagaggaagaagcgggtggagatctccgcgccgtccaacttcgagcaccgcgtgcacacgggcttcgaccagcacgagcagaagttcacggggctgccccgccagtggcagagcctgatcgaggagtcggctcgccggcccaagcccctcgtcgaccccgcctgcatcacctccatccagcccggggcccccaagaccatcgtgcggggcagcaaaggtgccaaagatggggccctcacgctgctgctggacgagtttgagaacatgtcggtgacacgctccaactccctgcggagagacagcccgccgccgcccgcccgtgcccgccaggaaaatgggatgccagaggagccggccaccacggccagagggggcccagggaaggcaggcagccgaggccggttcgccggtcacagcgaggcgggtggcggcagtggtgacaggcgacgggcggggccagagaagaggcccaagtcttccagggagggctcagggggtccccaggagtcctcccgggacaaacgccccctctccgggcctgatgtcggcaccccccagcctgctggtctggccagtggggcgaaactggcagctggccggccctttaacacctacccgagggctgacacggaccacccatcccggggtgcccagggggagcctcatgacgtggcccctaacgggccatcagcggggggcctggccatcccccagtcctcctcctcctcctcccggcctcccacccgagcccgaggtgcccccagccctggagtgctgggaccccacgcctcagagccccagctggcccctccagcctgcacccccgccgcccctgctgttcctgggccccctggcccccgctcaccacagcgggagccacagcgagtatcccatgagcagttccgggctgccctgcagctggtggtggacccaggcgacccccgctcctacctggacaacttcatcaagattggcgagggctccacgggcatcgtgtgcatcgccaccgtgcgcagctcgggcaagctggtggccgtcaagaagatggacctgcgcaagcagcagaggcgcgagctgctcttcaacgaggtggtaatcatgagggactaccagcacgagaatgtggtggagatgtacaacagctacctggtgggggacgagctctgggtggtcatggagttcctggaaggaggcgccctcaccgacatcgtcacccacaccaggatgaacgaggagcagatcgcggccgtgtgccttgcagtgctgcaggccctgtcggtgctccacgcccagggcgtcatccaccgggacatcaagagcgactcgatcctgctgacccatgatggcagggtgaagctgtcagactttgggttctgcgcccaggtgagcaaggaagtgccccgaaggaagtcgctggtcggcacgccctactggatggccccagagctcatctcccgccttccctacgggccagaggtagacatctggtcgctggggataatggtgattgagatggtggacggagagcccccctacttcaacgagccacccctcaaagccatgaagatgattcgggacaacctgccaccccgactgaagaacctgcacaaggtgtcgccatccctgaagggcttcctggaccgcctgctggtgcgagaccctgcccagcgggccacggcagccgagctgctgaagcacccattcctggccaaggcagggccgcctgccagcatcgtgcccctcatgcgccagaaccgcaccagatgaggcccagcgcccttcccctcaaccaaagagccccccgggtcacccccgccccactgaggccagtagggggccaggcctcccactcctcccagcccgggagatgctccgcgtggcaccaccctccttgctgggggtagatgagaccctactactgaactccagttttgatctcgtgacttttagaaaaacacagggactcgtgggagcaagcgaggctcccaggacccccaccctctgggacaggccctcccccatgttcttctgtctccaggaagggcagcggccctcccatcactggaagtctgcagtgggggtcgctgggggtggagagaacactaagaggtgaacatgtatgagtgtgtgcacgcgtgtgagtgtgcatgtgtgtgtgtgcaaaggtccagccaccccgtcctccagcctgcaaggggtgtctggcgccttgcctgacacccagccccctctccccctgagccattgtgggggtcgatcatgaatgtccgaagagtggccttttcccgtagccctgcgccccctttctgtggctggatggggagacaggtcagggccccccaccctctccagcccctgcagcaaatgactactgcacctggacagcctcctcttttctagaagtctatttatattgtcattttataacactctagcccctgcccttattgggggacagatggtccctgtcctgcggggtggccctggcagaaccactgcctgaagaaccaggttcctgcccggtcagcgcagccccagcccgcccacccctgcctcgagttagttttacaattaaaacattgtcttgtt

SEQ ID NO: 2974 - DNA, 5735 bp, Homo sapiens
  source 1..5735: mol_type = genomic DNA
ggcggtgcaagagagctgagggaggcgcgagggcgcggagttccaggtcgagcagttaggccgcgagcgactgcggcgccgagccgatgagtaacccgaagcccctagaggagtggtcacctgcctgagggcacttctgtcccaccagcatcagaccaggccgcaccgagtccccggcaccatgtttgggaagaggaagaagcgggtggagatctccgcgccgtccaacttcgagcaccgcgtgcacacgggcttcgaccagcacgagcagaagttcacggggctgccccgccagtggcagagcctgatcgaggagtcggctcgccggcccaagcccctcgtcgaccccgcctgcatcacctccatccagcccggggcccccaagggggagcctcatgacgtggcccctaacgggccatcagcggggggcctggccatcccccagtcctcctcctcctcctcccggcctcccacccgagcccgaggtgcccccagccctggagtgctgggaccccacgcctcagagccccagctggcccctccagcctgcacccccgccgcccctgctgttcctgggccccctggcccccgctcaccacagcgggagccacagcgagtatcccatgagcagttccgggctgccctgcagctggtggtggacccaggcgacccccgctcctacctggacaacttcatcaagattggcgagggctccacgggcatcgtgtgcatcgccaccgtgcgcagctcgggcaagctggtggccgtcaagaagatggacctgcgcaagcagcagaggcgcgagctgctcttcaacgaggtggtaatcatgagggactaccagcacgagaatgtggtggagatgtacaacagctacctggtgggggacgagctctgggtggtcatggagttcctggaaggaggcgccctcaccgacatcgtcacccacaccaggatgaacgaggagcagatcgcggccgtgtgccttgcagtgctgcaggccctgtcggtgctccacgcccagggcgtcatccaccgggacatcaagagcgactcgatcctgctgacccatgatggcagggtgaagctgtcagactttgggttctgcgcccaggtgagcaaggaagtgccccgaaggaagtcgctggtcggcacgccctactggatggccccagagctcatctcccgccttccctacgggccagaggtagacatctggtcgctggggataatggtgattgagatggtggacggagagcccccctacttcaacgagccacccctcaaagccatgaagatgattcgggacaacctgccaccccgactgaagaacctgcacaaggtgtcgccatccctgaagggcttcctggaccgcctgctggtgcgagaccctgcccagcgggccacggcagccgagctgctgaagcacccattcctggccaaggcagggccgcctgccagcatcgtgcccctcatgcgccagaaccgcaccagatgaggcccagcgcccttcccctcaaccaaagagccccccgggtcacccccgccccactgaggccagtagggggccaggcctcccactcctcccagcccgggagatgctccgcgtggcaccaccctccttgctgggggtagatgagaccctactactgaactccagttttgatctcgtgacttttagaaaaacacagggactcgtgggagcaagcgaggctcccaggacccccaccctctgggacaggccctcccccatgttcttctgtctccaggaagggcagcggccctcccatcactggaagtctgcagtgggggtcgctgggggtggagagaacactaagaggtgaacatgtatgagtgtgtgcacgcgtgtgagtgtgcatgtgtgtgtgtgcaaaggtccagccaccccgtcctccagcctgcaaggggtgtctggcgccttgcctgacacccagccccctctccccctgagccattgtgggggtcgatcatgaatgtccgaagagtggccttttcccgtagccctgcgccccctttctgtggctggatggggagacaggtcagggccccccaccctctccagcccctgcagcaaatgactactgcacctggacagcctcctcttttctagaagtctatttatattgtcattttataacactctagcccctgcccttattgggggacagatggtccctgtcctgcggggtggccctggcagaaccactgcctgaagaaccaggttcctgcccggtcagcgcagccccagcccgcccacccctgcctcgagttagttttacaattaaaacattgtcttgttttgtgtctgtgtgcgatgtgtggggggcagggggccctgcccggctgtcttgggtgggaatttgcagggagagggtctggatctgggagcaaaccacgattccagccaaggcagggcaagggtggggtggggagtggggagttcaggtcatagcagccagtaagctcccccagcctgccactccccagaatggggcaggattgtccccacccctggaagcagccagtttgccacagtccatgtgcagactgatcccagtttgccaaatctgcaatttcctggaaccttttaaaggctgtcttgagcgcgtttggtgagtaggagctaacccaagttagtaaattgaaggccatttggcaaattggtcagtgggcagatgggcttttggggattgactgaggctgactggcctggagctgctggcttcggagagacaccctgtgaagtgtgtccttccacgcaggagcccagagccgagcccacgctggggggaatctgactggcatggaggtggccatgccaccatcgctgctgcagctgcatcctggcactttgcgcctcaggccctgttgggctccactttctgcatcctccccagcccccagggaggcagtggagtggggagagagccaggagtgagcctccgtccccaaagccagccaggcgtcatcagcaccagagacctcagcctggtcctctcgggaagtgagtggccagggcagagattccaggttagtccacgcctcccacccttcacaggtcctgaccccaagaatcagagcactgtgtgtgtggcagggcctatgccaagtgcaaacacagcctagatggatcatcacagagtgaaacccagcggtgcaagcagctgtgctctctgcgatgtattggaggcttaggtgaggtggatgcctttctggaaaaaaaaaaaatgctaacattggcaaaagaagaaatagaaaacaagaccaaaataactgtctcctcactgcacacacactccagaataaataaaaggtttcaggcttgaatgcactttcaaatgagattttttttttttttttgagacggagtatcgctctgtcgcccaggctggagtgcagtggcacgatcttggctcactgcaacttctgcctcctgggttcaagcgattctcctgcctcagcctcccaagtagctgggattacaggcgcttgccaccacgccaggctaattttttgtattttgagtagagactggatttcgccatcttggccagactggtcttgaactcctgacctcgtgatccacccacctcagcctcccaaagtgctgggattacaggcatgagccaccatgcctggcctcaaatgaggtttaccagactttgaaggagcaggtaattccttctaccttgtgaacaagttgttccagaaagatagcagctcaggaggcctctgtgaccatggttccagacccagataaggacggcaaagaacagagcatctcagaaacgcaaggctcacagccagggtgcccggcgaccccacgggcactgagaacagctagctctaggagctccactctcctgctgaagaaaccacgggctcagagacggggagctccctcgcccagccacatctgtgaccccacggtaactctgctggttttggtgccttcagtcactcactgcaggtttgttttgttttgttttgttttgagtttttttgttttttgttttttgtttttagagacaagatgttgctatgttgcctaggctggtttcgaactcctggcctcaagggatcctccctccttggccccgcaaagtgctgggattacaggcgtgagccaccgtgcccagcccgctcactgcagtttgaaggcatggctttgggtggcgtggggtgaaagctgcccgaggccccgttcctccccacgtggctgcctcctgccagagccagtcaggaaaacagaccccaactagagttgtttcaaatggcagggatttggtaccggtggttggatcatgacaaagctctgagaaggctggaggagccacagagtgccaagtgcccagcaatcattagaggaaggaggctgctgccacctgtgtggctagaggaacagaggggccaatggcattccccaaaccccactctcgcctctgtctggccagagcagaatggcttcttccagcttcccaccctggactcccacccaggagcctcctcctggcagacccttcctgaccccaccggcccggggggtctacagatccatgtttcaggcgtccgcctggagcggaacaggggagtgcttaggacaagggtggtgccagaggatccactctgcccacatttagttgaccagctgaggcactccacgggaatgaatgactctcgacaggtgccggaggtgaggaggggcccggaggcccaggaggggcacagggatggattcgtccgcctgggggctggaggtgtgtttacagagccccaaaataaacaatgcaaccaggtcagaccagcggttctcacagtgtggttcccagaccagcagcatcactgggagcttactggacacgcaaataaatccctgtgtgccaccccagctgcatcagatgctggtggggcccagtgatctgtatttaacacaccctccgggggatgccggtgcccactcacgtttgagaacccctgcgatccacgactgccctcccgtgtaaaaggcccacctctgtgggactccaagtcatcagcaccctagggtccttccgtctttttccttcctcctgggacacctgcctctcccatgtcgtattagagaattccttatgctcccaagtgggcacggggagaggaaggcactcctctttaaggaccgacccagaggttttgccattgcttcactggccagagcttagtcacgcagcctcacccagaggcaagggaggttggaaaatgtagtgtttgtgtgtgtctaacacaaattctattaccatgcagtcaggattctccactcttgctctttcattagatttgctgggcttcaccctggactttctgatttagtgacagaacagagaacccagaggcagacccagatgtgtacaagggcttcatatacaatcaggagatttaataatcatgctaggggccgggtgcagtggctcacgcctgtaatcccaagcactttggggagccgaggcaggcagatcacttgaggtcaggagtttgagaccagcctgggcaacaaagtgagaccctgtctctactaaaaataacaaaaattagccgggcgtggtggtgggcgcctgtaatcccagctcctcgggtggctgaggcatgagaatcacttgaacccaggaggcagaggtttcagtgagctgagatcacatcactgcactccagcctgggtgacagagtgagattctgtc

SEQ ID NO: 2975 - DNA, 1810 bp, Homo sapiens
  source 1..1810: mol_type = genomic DNA
ttcatttccccgaaggcgtcgcggcctgaggagacccgttgggtcctcagcgtcttggcggcagttggtggaaccggagcttcgagtccgtccccggtgctgcctgcgcgttcacctgagtctcgctggagctcttctcgcccgcccacctcatctcaacccactttccgcggggagcggcgccaagctgggccttcctcggatcaggcgtcccctgaagtcggcacgcccctctgcgtcccccttcggtcccgctaggaccccgtccgggctgccgtcgcctcgtcgctatggcgcccaccatccagacccaggcccagcgggaggatggccacaggtctggagtggtctgccgagtcaagtactgcaatagcctccctgatatccccttcgaccccaagttcatcacctaccccttcgaccagaacaggttcgtccagtacaaagccacttccttggagaaacagcacaaacatgacctcctgactgagccagacctgggggtcaccatcgatctcatcaatcctgacacctaccgcatcgaccccaatgttcttctagatccagctgatgagaaacttttggaagaggagattcaggcccccaccagctccaagagatcccagcagcacgcgaaggtggtgccatggatgcgaaagacagagtacatctccactgagttcaaccgttatggcatctccaatgagaagcctgaggtcaagattggggtttctgtgaagcagcagtttaccgaggaagaaatatacaaagacagggatagccagatcacagccattgagaagacttttgaggatgcccagaaatcaatctcacagcattacagcaaaccccgagtcacaccggtggaggtcatgcctgtcttcccagactttaagatgtggatcaatccatgtgctcaggtgatctttgactcagacccagcccccaaggacacgagtggtgcagctgcgttggagatgatgtctcaggccatgattaggggcatgatggatgaggaagggaaccagtttgtggcctatttcctgcctgtagaagagacgttgaagaaacgaaagcgggaccaggaggaggagatggactatgcaccagatgatgtgtatgactacaaaattgctcgggagtacaactggaacgtgaagaacaaagctagcaagggctatgaggaaaactacttcttcatcttccgagagggtgacggggtttactacaatgagttggaaaccagggtccgccttagtaagcgccgggccaaggctggggttcagtcaggcaccaacgccctgcttgtggtcaaacatcgggacatgaatgagaaggaactggaagctcaggaggcacggaaggcccagctagaaaaccacgaaccggaggaggaagaggaagaggagatggagacagaagagaaagaagctgggggctcagtgatgctgattctgaggacgatgccgactctgatgatgaggacagaggacaggcccaaggtggcagtgacaatgattcagacagcggcagcaatgggggtggccagcggagccggagccacagccgcagcgccagtcccttccccagtggcagcgagcactcggcccaggaggatggcagtgaagctgcagcttctgattccagtgaagctgatagtgacagtgactgagtcccagggcattcagggctggttcagacaccattattgtgagcagcaaagcacttttctagtggtctgtttgtgagcctttcacttgtttgttccccacccccaaacctttgctgttaataaagtcaacttctcttt

SEQ ID NO: 2976 - DNA, 2127 bp, Homo sapiens
  source 1..2127: mol_type = genomic DNA
ctgagtctcgctggagctcttctcgcccgcccacctcatctcaacccactttccgcggggagcggcgccaagctgggccttcctcggatcaggcgtcccctgaagtcggcacgcccctctgcgtcccccttcggtcccgctaggaccccgtccgggctgccgtcgcctcgtcgctatggcgcccaccatccagacccaggcccagcgggaggatggccacaggcccaattcccaccggactctgcctgagaggtctggagtggtctgccgagtcaagtactgcaatagcctccctgatatccccttcgaccccaagttcatcacctaccccttcgaccagaacaggttcgtccagtacaaagccacttccttggagaaacagcacaaacatgacctcctgactgagccagacctgggggtcaccatcgatctcatcaatcctgacacctaccgcatcgaccccaatgttcttctagatccagctgatgagaaacttttggaagaggagattcaggcccccaccagctccaagagatcccagcagcacgcgaaggtggtgccatggatgcgaaagacagagtacatctccactgagttcaaccgttatggcatctccaatgagaagcctgaggtcaagattggggtttctgtgaagcagcagtttaccgaggaagaaatatacaaagacagggatagccagatcacagccattgagaagacttttgaggatgcccagaaatcaatctcacagcattacagcaaaccccgagtcacaccggtggaggtcatgcctgtcttcccagactttaagatgtggatcaatccatgtgctcaggtgatctttgactcagacccagcccccaaggacacgagtggtgcagctgcgttggagatgatgtctcaggccatgattaggggcatgatggatgaggaagggaaccagtttgtggcctatttcctgcctgtagaagagacgttgaagaaacgaaagcgggaccaggaggaggagatggactatgcaccagatgatgtgtatgactacaaaattgctcgggagtacaactggaacgtgaagaacaaagctagcaagggctatgaggaaaactacttcttcatcttccgagagggtgacggggtttactacaatgagttggaaaccagggtccgccttagtaagcgccgggccaaggctggggttcagtcaggcaccaacgccctgcttgtggtcaaacatcgggacatgaatgagaaggaactggaagctcaggaggcacggaaggcccagctagaaaaccacgaaccggaggaggaagaggaagaggagatggagacagaagagaaagaagctgggggctcagatgaggagcaggagaagggcagcagcagtgagaaggagggcagtgaagatgagcactcgggcagcgagagtgaacgggaggaaggtgacagggacgaggccagtgacaagagtggcagtggtgaggacgagagcagcgaggatgaggcccgggctgcccgtgacaaagaggagatctttggcagtgatgctgattctgaggacgatgccgactctgatgatgaggacagaggacaggcccaaggtggcagtgacaatgattcagacagcggcagcaatgggggtggccagcggagccggagccacagccgcagcgccagtcccttccccagtggcagcgagcactcggcccaggaggatggcagtgaagctgcagcttctgattccagtgaagctgatagtgacagtgactgagtcccagggcattcagggctggttcagacaccattattgtgagcagcaaagcacttttctagtggtctgtttgtgagcctttcacttgtttgttccccacccccaaacctttgctgttaataaagtcaacttctctttacttcccctcccagcccctatgatgtcattcagcccagcacatacctcccgcaacccccaggtgctcaaggatcttggcttgaggcttagaaacacaggccagaggcagggccaatggtttcccacaaaatgtagcacaacgaaggtcagaattcgttttttttgtttgttttttttttttccaaaataagcccagaccattaaacaagtgaaactcc

SEQ ID NO: 2977 - DNA, 1631 bp, Homo sapiens
  source 1..1631: mol_type = genomic DNA
agcgtcttggcggcagttggtggaaccggagcttcgagtccgtccccggtgctgcctgcgcgttcacctgagtctcgctggagctcttctcgcccgcccacctcatctcaacccactttccgcggggagcggcgccaagctgggccttcctcggatcaggcgtcccctgaagtcggcacgcccctctgcgtcccccttcggtcccgctaggaccccgtccgggctgccgtcgcctcgtcgctatggcgcccaccatccagacccaggcccagcgggaggatggccacaggtctggagtggtctgccgagtcaagtactgcaatagcctccctgatatccccttcgaccccaagttcatcacctaccccttcgaccagaacaggttcgtccagtacaaagccacttccttggagaaacagcacaaacatgacctcctgactgagccagacctgggggtcaccatcgatctcatcaatcctgacacctaccgcatcgaccccaatgttcttctagatccagctgatgagaaacttttggaagaggagattcaggcccccaccagctccaagagatcccagcagcacgcgaaggtggtgccatggatgcgaaagacagagtacatctccactgagttcaaccgttatggcatctccaatgagaagcctgaggtcaagattggggtttctgtgaagcagcagtttaccgaggaagaaatatacaaagacagggatagccagatcacagccattgagaagacttttgaggatgcccagaaatcaatgtggatcaatccatgtgctcaggtgatctttgactcagacccagcccccaaggacacgagtggtgcagctgcgttggagatgatgtctcaggccatgattaggggcatgatggatgaggaagggaaccagtttgtggcctatttcctgcctgtagaagagacgttgaagaaacgaaagcgggaccaggaggaggagatggactatgcaccagatgatgtgtatgactacaaaattgctcgggagtacaactggaacgtgaagaacaaagctagcaagggctatgaggaaaactacttcttcatcttccgagagggtgacggggtttactacaatgagttggaaaccagggtccgccttagtaagcgccgggccaaggctggggttcagtcaggcaccaacgccctgcttgtggtcaaacatcgggacatgaatgagaaggaactggaagctcaggaggcacggaaggcccagctagaaaaccacgaaccggaggaggaagaggaagaggagatggagacagaagagaaagaagctgggggctcagtgatgctgattctgaggacgatgccgactctgatgatgaggacagaggacaggcccaaggtggcagtgacaatgattcagacagcggcagcaatgggggtggccagcggagccggagccacagccgcagcgccagtcccttccccagtggcagcgagcactcggcccaggaggatggcagtgaagctgcagcttctgattccagtgaagctgatagtgacagtgactgagtcccagggcattcagggctggttcagacaccattattgtgagcagcaaagcacttttctagtggtctgtttgtga

SEQ ID NO: 2978 - DNA, 1387 bp, Homo sapiens
  source 1..1387: mol_type = genomic DNA
gttgggtcctcagcgtcttggcggcagttggtggaaccggagcttcgagtccgtccccggtgctgcctgcgcgttcacctgagtctcgctggagctcttctcgcccgcccacctcatctcaacccactttccgcggggagcggcgccaagctgggccttcctcggatcaggcgtcccctgaagtcggcacgcccctctgcgtcccccttcggtcccgctaggaccccgtccgggctgccgtcgcctcgtcgctatggcgcccaccatccagacccaggcccagcgggaggatggccacaggcccaattcccaccggactctgcctgagaggtctggagtggtctgccgagtcaagtactgcaatagcctccctgatatccccttcgaccccaagttcatcacctaccccttcgaccagaacagttcttctagatccagctgatgagaaacttttggaagaggagattcaggcccccaccagctccaagagatcccagcagcacgcgaaggtggtgccatggatgcgaaagacagagtacatctccactgagttcaaccgttatggcatctccaatgagaagcctgaggtcaagattggggtttctgtgaagcagcagtttaccgaggaagaaatatacaaagacagggatagccagatcacagccattgagaagacttttgaggatgcccagaaatcaatctcacagcattacagcaaaccccgagtcacaccggtggaggtcatgcctgtcttcccagactttaagatgtggatcaatccatgtgctcaggtgatctttgactcagacccagcccccaaggacacgagtggtgcagctgcgttggagatgatgtctcaggccatgattaggggcatgatggatgaggaagggaaccagtttgtggcctatttcctgcctgtagaagagacgttgaagaaacgaaagcgggaccaggaggaggagatggactatgcaccagatgatgtgtatgactacaaaattgctcgggagtacaactggaacgtgaagaacaaagctagcaagggctatgaggaaaactacttcttcatcttccgagagggtgacggggtttactacaatgagttggaaaccagtattcagtacagtcacatgctgtacaaccttgtagcctaggagcaataggctacaccattacagcctagggtccgccttagtaagcgccgggccaaggctggggttcagtcaggcaccaacgccctgcttgtggtcaaacatcgggacatgaatgagaaggaactggaagctcaggaggcacggaaggcccagctagaaaaccacgaaccggaggaggaagaggaagaggagatggagacagaagagaaagaagctgggggctcaggtaa

SEQ ID NO: 2979 - DNA, 8536 bp, Homo sapiens
  source 1..8536: mol_type = genomic DNA
aaaaaaaagaaaaaaaaaggcacaaaaaagtggaaacttttccctgtccattccatcaagtcctgaaaaatcaaaatggatttagagaaaaattatccgactcctcggaccagcaggacaggacatggaggagtgaatcagcttgggggggtttttgtgaatggacggccactcccggatgtagtccgccagaggatagtggaacttgctcatcaaggtgtcaggccctgcgacatctccaggcagcttcgggtcagccatggttgtgtcagcaaaattcttggcaggtattatgagacaggaagcatcaagcctggggtaattggaggatccaaaccaaaggtcgccacacccaaagtggtggaaaaaatcgctgaatataaacgccaaaatcccaccatgtttgcctgggagatcagggaccggctgctggcagagcgggtgtgtgacaatgacaccgtgcctagcgtcagttccatcaacaggatcatccggacaaaagtacagcagccacccaaccaaccagtcccagcttccagtcacagcatagtgtccactggctccgtgacgcaggtgtcctcggtgagcacggattcggccggctcgtcgtactccatcagcggcatcctgggcatcacgtcccccagcgccgacaccaacaagcgcaagagagacgaaggtattcaggagtctccggtgccgaacggccactcgcttccgggcagagacttcctccggaagcagatgcggggagacttgttcacacagcagcagctggaggtgctggaccgcgtgtttgagaggcagcactactcagacatcttcaccaccacagagcccatcaagcccgagcagaccacagagtattcagccatggcctcgctggctggtgggctggacgacatgaaggccaatctggccagccccacccctgctgacatcgggagcagtgtgccaggcccgcagtcctaccccattgtgacaggccgtgacttggcgagcacgaccctccccgggtaccctccacacgtcccccccgctggacagggcagctactcagcaccgacgctgacagggatggtgcctgggagtgagttttccgggagtccctacagccaccctcagtattcctcgtacaacgactcctggaggttccccaacccggggctgcttggctccccctactattatagcgctgccgcccgaggagccgccccacctgcagccgccactgcctatgaccgtcactgacccttggagccaggcgggcaccaaacactgatggcacctattgagggtgacagccacccagccctcctgaagatagccagagagcccatgagaccgtcccccagcatcccccacttgcctgaagctcccctcttcctctcttcctccagggactctggggccctttggtggggccgttggacttctggatgcttgtctatttctaaaagccaatctatgagcttctcccgatggccactgggtctctgcaaaccaatagactgtcctgcaaataaccgcagccccagcccagcctgcctgtcctccagctgtctgactatccatccatcataaccaccccagcctgggaaggagagcttgcttttgttgcttcagcagcacccatgtaaataccttcttgcttttctgtgggcctgaaggtccgactgagaagactgctccacccatgatgcatctcgcactcttggtgcatcaccggacatcttagacctatggcagagcatcctctctgccctgggtgaccctggcaggtgcgctcagagctgtcctcaagatggaggatgctgcccttgggccccagcctcctgctcatccctccttctttagtatctttacgaggagtctcactgggctggttgtgctgcaggctccccctgaggcccctctccaagaggagcacactttggggagatgtcctggtttcctgcctccatttctctgggaccgatgcagtatcagcagctcttttccagatcaaagaactcaaagaaaactgtctgggagattcctcagctacttttccgaagcagaatgtcatccgaggtattgattacattgtggactttgaatgtgagggctggatgggacgcaggagatcatctgatcccagccaaggaggggcctgaggctctccctactccctcagcccctggaacggtgttttctgaggcatgcccaggttcaggtcacttcggacacctgccatggacacttcacccaccctccaggaccccagcaagtggattctgggcaagcctgttccggtgatgtagacaataattaacacagaggactttcccccacacccagatcacaaacagcctacagccagaacttctgagcatcctctcggggcagaccctccccgtcctcgtggagcttagcaggcagctgggcatggaggtgctggggctggggcagatgcctaatttcgcacaatgcatgcccacctgttgatctaaggggccgcgatggtcagggccacggccaagggccacgggaacttggagagggagcttggagaactcactgtgggctagggtggtcagaggaagccagcagggaagatctgggggacagaggaaggcctcctgagggaggggcaggagagcagtgaggagctgctgtgtgacctgggagtgattttgacatgggggtgccaggtgccatcatctctttacctggggccttaattccttgcatagtctctcttgtcaagtcagaacagccaggtagagcccttgtccaaacctgggctgaatgacagtgatgagagggggcttggccttcttaggtgacaatgtcccccatatctgtatgtcaccaggatggcagagagccagggcagagagagactggacttgggatcagcaggccaggcaggtcttgtcctggtcctggccacatgtctttgctgtgggacctcagacaaaaccctgcacctctttgagccttggctgccttggtgcagcagggtcatctgtagggccaccccacagctctttccttcccctcctctctccagggagccggggctgtgagaggatcatctggggcaggccctccacttccaagcaagcagatgggggtgggcacctgaggcccaataatatttggaccaagtgggaaacaagaacactcggaggggcgggaatcagaagagcctggaaaaagacctagcccaacttcccttgtgggaaactgaggcccagcttggggaaggccaggaccatgcagggagaaaaagcagacttcctctggccaccgctaagtattttgttccctaagtcccccacagggtggtggaacagaagagaaaactaaggctcagcaaggtggagtcctcaagcagtgactggtgggggtggggctgggactcgggctcctgacccccaacccatggtgttccctgtcaccctggtctatccacatctcctattcctgaggagagttgacagtaagagcagtgagagatggttctgggccccatgccctagacaatcagtctgtaagaactgccaaggaagcctggtcacccaggccagggatggagcccagcgagctcacagcaggcacatgcacccccgcccccacccagaacctgcggggcaaagaagggaggtagttggggccagagtccacctccaggagccagggtgagctggctgcagcttccacctgtcaggtaaggtaggagaaggtatgttacctggcatctctctccctgcctccctccatttagcaggaagtggtggggtcaggggtcttcagcacagacttcttgagcctctgccccctgtcacccttcttttggaatgatgtgtacccacatctttggatcctgccctccttgtggttccaggctgttgggaggaggtcagcctcccctgaaccagctgcctgaggcatgcagcatccttcctcggcaaagcccacctggctcacagcggccccctctccccatcctgttcctcttcttgccctgtaatgagctccccccatacctttcctccctcacctgaggctttgctggtcctcagattggttttgtatttgtgagacaaccacttgactcctgggctgccaggcggaagcacaagcgcacatggatgcacacggatgttctcacacacacacgcccgctctcaccaattcacagcacctcgtggtccagcggagctgcctgggagcttggtgaggatggctccaaaggacacaagccgttgagtagatgccagagaattctgaatggaaaacacaagtccggggcctcaccagcatcgtggcagaaggcctggggcatttctccatgggccttcttccctgtgttcgagctctgacttttggaaaaggacattgtggattttatgaaaatttctcataccatcagtctagctccaacctagaaaaattggatgatatatcaaacccaacatccctttcccaaggcaccttagttaaggctagcccttccataactgacattgtacggtgctttgcaatcctcaaccactctgtggagcaaagagcatgatgcctactttatagacggggaaattgacatttggggctctcacggcaacatagaggcgaagtgaattctcagatctccaggccccattctctctccaccgagttgtgctcctgtcatgggagtgtatggcttaaagacactcccccacccccattccctagaaatcccccagacccacaatcaggcaagaaagaacagggacccagaggctggcctgacctaggggcctgcaggttggcggctttgtttcctaagaacattgaaacctgcggagtctttgaccaaatccacaacagtgcttctgaggtttcatccagactctttcccagctgtccctgaggttcagagggtatcagagtcaattcaaggccatgccataatccctgaccaggcctggacatgggtccagccctgactccaggggtccaggtgccaaggtcatgtgctgtcccccacttccctttctttgccttcgcactttggaacaggctccaggcctggctgtgacagtatgcaggagtgcccaagccagggccaccagggtgtccacagcccctggaaacacagatcacaatctcaagtcccctgaatgaactgcttcctgggtgaacggggtggtgtagccttgccactcgggcagcgcaccagacagtacggtgcagcagtgcccgagatgcccagaagtgtgcctgcccccctgagtggcattcaagtatgaaaacttgtaaaattttctgtcggcctaaagaaaaatgtccatgggccaaacttgacccactgggcaccagcctgtgagccccaatgcctgtcaattgccccctttctcattcacctcctgtcctttgttgcagatttggaggagatgggagcccagagaggtgagagatgtgcttcagggtgtccagcaaggcaggggtagaaacgggcacgcccagagcctgccactctcccaggcctcatcttgggctcttgcaagtcttgcgctttgaagatggagttgggtggaaggtcagaggcgctggggacgggattggggagctgctgggttttcaggggaggtcagtgctgcttgggcacctttcacatgtgcagggaagagactcagatgtggccacagggcactgaggggtgaaatccatttaccagaagtcacgctccagaacgactgcccagccttggcagccagtggctccagccaccccctcctcatgacattcagccagaattgagctccaagccagggaagcaaatcttaaaaaccaaccaagcaccctgacacagccctagaaacacgatgagtctgaaatacagcttcccaggaggggagtctaagatacagcttcccgggagggtggaaaccaactcctgccccacggccaggccaggcccaggcaggcatgggtggatcccacagggctctgagctagaccggctccacggtggccccactacgaggccagttctgcagtcttggccttgtcacccatcgagaggctgctctgatggttcccagccacacaccagctctcctggggaaactatttctttcgttcttttggcctcggagaggtccgaggcaagtacatttcttaaaaggtaataaaatgcattattggaaagttggacagtcaggccacgactcctagcccacggcgtgccccacctcccagcagccccttcagccccttgcccctgttgccccaaacctcagggttccctcttgcatattcatgggggaaccacagtgctgatgtgtacttccccactgtcagctcggctgcacctcgtgtggcgccaggtcccaagggcctctgcagaggccaggctgtgagccccttgcctgcctgctcccctgatgaggcaacagcttctctgaaatgagctgccggccaggagcaggcaggcaccagcctgtctttccttttctggtaattcctcagcactgaggctccgttcctgggcaccccaggattgaagggaacctcagaatcatgtcactgccattctagagtttcaatccaaggggtcccctttagctcatctccaagatgggtaaacgtagccaccattcagaaagcccagaaattcttgttcccacatcttagacccctgagcaacacaaggagaaaatgcagctgcttacctattaatatctactgagggacaatcagcaaagcctcaaaggagtcgtctcaggtagggtacttggcctgtggcaggagagacagaggcacaaacccacccacccatcagcttccggtggctgatcggggcccagggagggaagcaggtgaaacagcagggtgggggtgacttggcagtcgtgcatctcctccccgactctgaggcctggcaggaggaggccacaccagcctcacctgccctgacccccgccccccaccctgtgaccctgtggctatggccgctggtcgcccttgtccccaaaatcaccatgcctgtggccacgtccctcatcttctccaaaagcatcattaagaacaagtgattttggatgatggatttttgatttacaaacggcgcatttcccttggagtggaacagaaaggaaaccatttaatggcgcccttcttttcaagcatgaatacattttaatgaaactattttattgtatttgaggaaatggagagttgaacattccaaccaatcaatagccaattaattgctataaagctaaaaagaaaataaataaatcctgagtctattttaaacactgcaaaaagttcagagcctcagaatctggccttcccctccataaggtgcacgagcatgtaaacacacacacacacacacacacacacacacacacactcactcactcccctacacctcagacatacttgaaactcagaaacagcactgagtctccccatgccaattcttgcctgctgtcttcgacttgggtcagagaaggtgagcagacccggcagcagcctgtcccggggctcaggaagaggcaggcccatcccctggccccaagcacccagcacaacagagggtggcgggcagtgagggcctggcgttgcctgggccccacttctcagccccagctgctgggcctccaaggttgggctgaggatggagttttggctctgggtttgccctgactcctgctggaagacgctgccctggtttttcaccctctagtggccttggacattgagtatttgtagaaatgcagattacattgcaaatggaaacctttgccaggaagacacatgcattttgcttttaattctttgagacatttgattttgtcttagggactgacctttcagcatcaaagaaatacatatctactgtatccgccaaagtttgtgatgcctgcatagacgcttacttgtaaaaaaaaaaaaatacaaaaaaatacaaaaaaaccaacaacaaaaaccacaattgaattgcctttgaaagtgggagatgatctgtctccaacggattgaaaaaaaaaaatgcttcttaaaaaatgtgtatgttttgtattctttttttctagtagaaaataactgacttgaaatattggtggtttttttcttagtgacgtgtgttgcttttgtgtgtaataatatttgaatgtaattacagcagtgccaatttgccaaagatgttggacatatttttcttttttggggaggagggcagggctaggggtgggacttgggagaaaacaggggtggggttttggtttaattttttttttacttttttttccttgtcaaacctgaaatttgtggcttccttttaagttaaatggttgactgcaacacctttattttagattagttggagaaacatgcaataagattggcgtagtttcaatatctgtgtgtcttttcatgagtggctgttacttgtgaagaattgattttatgtaacctttatgtgagataattatttgtaaatatttgccataattttattggttcctaaaataaaagtaattttttaagttca

SEQ ID NO: 2980 - DNA, 1444 bp, Homo sapiens
  source 1..1444: mol_type = genomic DNA
aaaaatcaaaatggatttagagaaaaattatccgactcctcggaccagcaggacaggacatggaggagtgaatcagcttgggggggtttttgtgaatggacggccactcccggatgtagtccgccagaggatagtggaacttgctcatcaaggtgtcaggccctgcgacatctccaggcagcttcgggtcagccatggttgtgtcagcaaaattcttggcaggtattatgagacaggaagcatcaagcctggggtaattggaggatccaaaccaaaggtcgccacacccaaagtggtggaaaaaatcgctgaatataaacgccaaaatcccaccatgtttgcctgggagatcagggaccggctgctggcagagcgggtgtgtgacaatgacaccgtgcctagcgtcagttccatcaacaggatcatccggacaaaagtacagcagccacccaaccaaccagtcccagcttccagtcacagcatagtgtccactggctccgtgacgcaggtgtcctcggtgagcacggattcggccggctcgtcgtactccatcagcggcatcctgggcatcacgtcccccagcgccgacaccaacaagcgcaagagagacgaaggtattcaggagtctccggtgccgaacggccactcgcttccgggcagagacttcctccggaagcagatgcggggagacttgttcacacagcagcagctggaggtgctggaccgcgtgtttgagaggcagcactactcagacatcttcaccaccacagagcccatcaagcccgagcaggccgtgacttggcgagcacgaccctccccgggtaccctccacacgtcccccccgctggacagggcagctactcagcaccgacgctgacagggatggtgcctgggagtgagttttccgggagtccctacagccaccctcagtattcctcgtacaacgactcctggaggttccccaacccggggctgcttggctccccctactattatagcgctgccgcccgaggagccgccccacctgcagccgccactgcctatgaccgtcactgacccttggagccaggcgggcaccaaacactgatggcacctattgagggtgacagccacccagccctcctgaagatagccagagagcccatgagaccgtcccccagcatcccccacttgcctgaagctcccctcttcctctcttcctccagggactctggggccctttggtggggccgttggacttctggatgcttgtctatttctaaaagccaatctatgagcttctcccgatggccactgggtctctgcaaaccaatagactgtcctgcaaataaccgcagccccagcccagcctgcctgtcctccagctgtctgactatccatccatcataaccaccccagcctgggaaggagagcttgcttttgttgcttcagcagcacccatgta

SEQ ID NO: 2981 - DNA, 996 bp, Homo sapiens
  source 1..996: mol_type = genomic DNA
atggatttagagaaaaattatccgactcctcggaccagcaggacaggacatggaggagtgaatcagcttgggggggtttttgtgaatggacggccactcccggatgtagtccgccagaggatagtggaacttgctcatcaaggtgtcaggccctgcgacatctccaggcagcttcgggtcagccatggttgtgtcagcaaaattcttggcaggtattatgagacaggaagcatcaagcctggggtaattggaggatccaaaccaaaggtcgccacacccaaagtggtggaaaaaatcgctgaatataaacgccaaaatcccaccatgtttgcctgggagatcagggaccggctgctggcagagcgggtgtgtgacaatgacaccgtgcctagcgtcagttccatcaacaggatcatccggacaaaagtacagcagccacccaaccaaccagtcccagcttccagtcacagcatagtgtccactggctccgtgacgcaggtgtcctcggtgagcacggattcggccggctcgtcgtactccatcagcggcatcctgggcatcacgtcccccagcgccgacaccaacaagcgcaagagagacgaaggtattcaggagtctccggtgccgaacggccactcgcttccgggcagagacttcctccggaagcagatgcggggagacttgttcacacagcagcagctggaggtgctggaccgcgtgtttgagaggcagcactactcagacatcttcaccaccacagagcccatcaagcccgagcagaccacagagtattcagccatggcctcgctggctggtgggctggacgacatgaaggccaatctggccagccccacccctgctgacatcgggagcagtgtgccaggcccgcagtcctaccccattgtgacaggctccccctactattatagcgctgccgcccgaggagccgccccacctgcagccgccactgcctatgaccgtcactgacccttggag

SEQ ID NO: 2982 - DNA, 3699 bp, Homo sapiens
  source 1..3699: mol_type = genomic DNA
agcactgctgctctcccggcttcccgctctactccggccgggccgggtccgccacgtctggcgcgctgagcaggcccggccgcgcagcgcctaccctttcctcgctccgggccggcagtgtggggcggcgcgctgggggcgcggcgtgtctggggacatcttgtgatgttggcgagaacaggacatgatctcacatggcgagaagctctttagttccttaatcatttcacggtgccttcggacgctttttttccacctaaaacgtttagtttcagctcagtgatcagctaccccagctcggcgggggagcggaaggcttgaattattccgacctgtgagcggcccctggcaccaaaaaaaaaaaaaaaaaaaaaaaaaaaagaaaaaaaaaggcacaaaaaagtggaaacttttccctgtccattccatcaagtcctgaaaaatcaaaatggatttagagaaaaattatccgactcctcggaccagcaggacaggacatggaggagtgaatcagcttgggggggtttttgtgaatggacggccactcccggatgtagtccgccagaggatagtggaacttgctcatcaaggtgtcaggccctgcgacatctccaggcagcttcgggtcagccatggttgtgtcagcaaaattcttggcaggtattatgagacaggaagcatcaagcctggggtaattggaggatccaaaccaaaggtcgccacacccaaagtggtggaaaaaatcgctgaatataaacgccaaaatcccaccatgtttgcctgggagatcagggaccggctgctggcagagcgggtgtgtgacaatgacaccgtgcctagcgtcagttccatcaacaggatcatccggacaaaagtacagcagccacccaaccaaccagtcccagcttccagtcacagcatagtgtccactggctccgtgacgcaggtgtcctcggtgagcacggattcggccggctcgtcgtactccatcagcggcatcctgggcatcacgtcccccagcgccgacaccaacaagcgcaagagagacgaaggtattcaggagtctccggtgccgaacggccactcgcttccgggcagagacttcctccggaagcagatgcggggagacttgttcacacagcagcagctggaggtgctggaccgcgtgtttgagaggcagcactactcagacatcttcaccaccacagagcccatcaagcccgagcagtggtgccccgtgctgatgagacaatacttggtgcagccccaggcagtccttttccagaccacagagtattcagccatggcctcgctggctggtgggctggacgacatgaaggccaatctggccagccccacccctgctgacatcgggagcagtgtgccaggcccgcagtcctaccccattgtgacaggccgtgacttggcgagcacgaccctccccgggtaccctccacacgtcccccccgctggacagggcagctactcagcaccgacgctgacagggatggtgcctgggagtgagttttccgggagtccctacagccaccctcagtattcctcgtacaacgactcctggaggttccccaacccggggctgcttggctccccctactattatagcgctgccgcccgaggagccgccccacctgcagccgccactgcctatgaccgtcactgacccttggagccaggcgggcaccaaacactgatggcacctattgagggtgacagccacccagccctcctgaagatagccagagagcccatgagaccgtcccccagcatcccccacttgcctgaagctcccctcttcctctcttcctccagggactctggggccctttggtggggccgttggacttctggatgcttgtctatttctaaaagccaatctatgagcttctcccgatggccactgggtctctgcaaaccaatagactgtcctgcaaataaccgcagccccagcccagcctgcctgtcctccagctgtctgactatccatccatcataaccaccccagcctgggaaggagagcttgcttttgttgcttcagcagcacccatgtaaataccttcttgcttttctgtgggcctgaaggtccgactgagaagactgctccacccatgatgcatctcgcactcttggtgcatcaccggacatcttagacctatggcagagcatcctctctgccctgggtgaccctggcaggtgcgctcagagctgtcctcaagatggaggatgctgcccttgggccccagcctcctgctcatccctccttctttagtatctttacgaggagtctcactgggctggttgtgctgcaggctccccctgaggcccctctccaagaggagcacactttggggagatgtcctggtttcctgcctccatttctctgggaccgatgcagtatcagcagctcttttccagatcaaagaactcaaagaaaactgtctgggagattcctcagctacttttccgaagcagaatgtcatccgaggtattgattacattgtggactttgaatgtgagggctggatgggacgcaggagatcatctgatcccagccaaggaggggcctgaggctctccctactccctcagcccctggaacggtgttttctgaggcatgcccaggttcaggtcacttcggacacctgccatggacacttcacccaccctccaggaccccagcaagtggattctgggcaagcctgttccggtgatgtagacaataattaacacagaggactttcccccacacccagatcacaaacagcctacagccagaacttctgagcatcctctcggggcagaccctccccgtcctcgtggagcttagcaggcagctgggcatggaggtgctggggctggggcagatgcctaatttcgcacaatgcatgcccacctgttgatctaaggggccgcgatggtcagggccacggccaagggccacgggaacttggagagggagcttggagaactcactgtgggctagggtggtcagaggaagccagcagggaagatctgggggacagaggaaggcctcctgagggaggggcaggagagcagtgaggagctgctgtgtgacctgggagtgattttgacatgggggtgccaggtgccatcatctctttacctggggccttaattccttgcatagtctctcttgtcaagtcagaacagccaggtagagcccttgtccaaacctgggctgaatgacagtgatgagagggggcttggccttcttaggtgacaatgtcccccatatctgtatgtcaccaggatggcagagagccagggcagagagagactggacttgggatcagcaggccaggcaggtcttgtcctggtcctggccacatgtctttgctgtgggacctcagacaaaaccctgcacctctttgagccttggctgccttggtgcagcagggtcatctgtagggccaccccacagctctttccttcccctcctctctccagggagccggggctgtgagaggatcatctggggcaggccctccacttccaagcaagcagatgggggtgggcacctgaggcccaataatatttggaccaagtgggaaacaagaacactcggaggggcgggaatcagaagagcctggaaaaagacctagcccaacttcccttgtgggaaactgaggcccagcttggggaaggccaggaccatgcaggg

SEQ ID NO: 2983 - DNA, 1472 bp, Homo sapiens
  source 1..1472: mol_type = genomic DNA
aaaaatcaaaatggatttagagaaaaattatccgactcctcggaccagcaggacaggacatggaggagtgaatcagcttgggggggtttttgtgaatggacggccactcccggatgtagtccgccagaggatagtggaacttgctcatcaaggtgtcaggccctgcgacatctccaggcagcttcgggtcagccatggttgtgtcagcaaaattcttggcaggtattatgagacaggaagcatcaagcctggggtaattggaggatccaaaccaaaggtcgccacacccaaagtggtggaaaaaatcgctgaatataaacgccaaaatcccaccatgtttgcctgggagatcagggaccggctgctggcagagcgggtgtgtgacaatgacaccgtgcctagcgtcagttccatcaacaggatcatccggacaaaagtacagcagccacccaaccaaccagtcccagcttccagtcacagcatagtgtccactggctccgtgacgcaggtgtcctcggtgagcacggattcggccggctcgtcgtactccatcagcggcatcctgggcatcacgtcccccagcgccgacaccaacaagcgcaagagagacgaaggtattcaggagtctccggtgccgaacggccactcgcttccgggcagagacttcctccggaagcagatgcggggagacttgttcacacagcagcagctggaggtgctggaccgcgtgtttgagaggcagcactactcagacatcttcaccaccacagagcccatcaagcccgagcagaccacagagtattcagccatggcctcgctggctggtgggctggacgacatgaaggccaatctggccagccccacccctgctgacatcgggagcagtgtgccaggcccgcagtcctaccccattgtgacagggagtgagttttccgggagtccctacagccaccctcagtattcctcgtacaacgactcctggaggttccccaacccggggctgcttggctccccctactattatagcgctgccgcccgaggagccgccccacctgcagccgccactgcctatgaccgtcactgacccttggagccaggcgggcaccaaacactgatggcacctattgagggtgacagccacccagccctcctgaagatagccagagagcccatgagaccgtcccccagcatcccccacttgcctgaagctcccctcttcctctcttcctccagggactctggggccctttggtggggccgttggacttctggatgcttgtctatttctaaaagccaatctatgagcttctcccgatggccactgggtctctgcaaaccaatagactgtcctgcaaataaccgcagccccagcccagcctgcctgtcctccagctgtctgactatccatccatcataaccaccccagcctgggaaggagagcttgcttttgttgcttcagcagcacccatgta

SEQ ID NO: 2984 - DNA, 1487 bp, Homo sapiens
  source 1..1487: mol_type = genomic DNA
aaaaatcaaaatggatttagagaaaaattatccgactcctcggaccagcaggacaggacatggaggagtgaatcagcttgggggggtttttgtgaatggacggccactcccggatgtagtccgccagaggatagtggaacttgctcatcaaggtgtcaggccctgcgacatctccaggcagcttcgggtcagccatggttgtgtcagcaaaattcttggcaggtattatgagacaggaagcatcaagcctggggtaattggaggatccaaaccaaaggtcgccacacccaaagtggtggaaaaaatcgctgaatataaacgccaaaatcccaccatgtttgcctgggagatcagggaccggctgctggcagagcgggtgtgtgacaatgacaccgtgcctagcgtcagttccatcaacaggatcatccggacaaaagtacagcagccacccaaccaaccagtcccagcttccagtcacagcatagtgtccactggctccgtgacgcaggtgtcctcggtgagcacggattcggccggctcgtcgtactccatcagcggcatcctgggcatcacgtcccccagcgccgacaccaacaagcgcaagagagacgaaggtattcaggagtctccggtgccgaacggccactcgcttccgggcagagacttcctccggaagcagatgcggggagacttgttcacacagcagcagctggaggtgctggaccgcgtgtttgagaggcagcactactcagacatcttcaccaccacagagcccatcaagcccgagcagaccacagagtattcagccatggcctcgctggctggtgggctggacgacatgaaggccaatctggccagccccacccctgctgacatcgggagcagtgtgccaggcccgcagtcctaccccattgtgacaggccgtgacttggcgagcacgaccctccccgggtaccctccacacgtcccccccgctggacagggcagctactcagcaccgacgctgacagggatggtgcctggctccccctactattatagcgctgccgcccgaggagccgccccacctgcagccgccactgcctatgaccgtcactgacccttggagccaggcgggcaccaaacactgatggcacctattgagggtgacagccacccagccctcctgaagatagccagagagcccatgagaccgtcccccagcatcccccacttgcctgaagctcccctcttcctctcttcctccagggactctggggccctttggtggggccgttggacttctggatgcttgtctatttctaaaagccaatctatgagcttctcccgatggccactgggtctctgcaaaccaatagactgtcctgcaaataaccgcagccccagcccagcctgcctgtcctccagctgtctgactatccatccatcataaccaccccagcctgggaaggagagcttgcttttgttgcttcagcagcacccatgta

SEQ ID NO: 2985 - DNA, 1056 bp, Homo sapiens
  source 1..1056: mol_type = genomic DNA
atggatttagagaaaaattatccgactcctcggaccagcaggacaggacatggaggagtgaatcagcttgggggggtttttgtgaatggacggccactcccggatgtagtccgccagaggatagtggaacttgctcatcaaggtgtcaggccctgcgacatctccaggcagcttcgggtcagccatggttgtgtcagcaaaattcttggcaggtattatgagacaggaagcatcaagcctggggtaattggaggatccaaaccaaaggtcgccacacccaaagtggtggaaaaaatcgctgaatataaacgccaaaatcccaccatgtttgcctgggagatcagggaccggctgctggcagagcgggtgtgtgacaatgacaccgtgcctagcgtcagttccatcaacaggatcatccggacaaaagtacagcagccacccaaccaaccagtcccagcttccagtcacagcataggtattcaggagtctccggtgccgaacggccactcgcttccgggcagagacttcctccggaagcagatgcggggagacttgttcacacagcagcagctggaggtgctggaccgcgtgtttgagaggcagcactactcagacatcttcaccaccacagagcccatcaagcccgagcagaccacagagtattcagccatggcctcgctggctggtgggctggacgacatgaaggccaatctggccagccccacccctgctgacatcgggagcagtgtgccaggcccgcagtcctaccccattgtgacaggccgtgacttggcgagcacgaccctccccgggtaccctccacacgtcccccccgctggacagggcagctactcagcaccgacgctgacagggatggtgcctgggagtgagttttccgggagtccctacagccaccctcagtattcctcgtacaacgactcctggaggttccccaacccggggctgcttggctccccctactattatagcgctgccgcccgaggagccgccccacctgcagccgccactgcctatgaccgtcactgacccttggag

SEQ ID NO: 2986 - DNA, 885 bp, Homo sapiens
  source 1..885: mol_type = genomic DNA
atggatttagagaaaaattatccgactcctcggaccagcaggacaggacatggaggagtgaatcagcttgggggggtttttgtgaatggacggccactcccggatgtagtccgccagaggatagtggaacttgctcatcaaggtgtcaggccctgcgacatctccaggcagcttcgggtcagccatggttgtgtcagcaaaattcttggcaggatcatccggacaaaagtacagcagccacccaaccaaccagtcccagcttccagtcacagcatagtgtccactggctccgtgacgcaggtgtcctcggtgagcacggattcggccggctcgtcgtactccatcagcggcatcctgggcatcacgtcccccagcgccgacaccaacaagcgcaagagagacgaaggtattcaggagtctccggtgccgaacggccactcgcttccgggcagagacttcctccggaagcagatgcggggagacttgttcacacagcagcagctggaggtgctggaccgcgtgtttgagaggcagcactactcagacatcttcaccaccacagagcccatcaagcccgagcagaccacagagtattcagccatggcctcgctggctggtgggctggacgacatgaaggccaatctggccagccccacccctgctgacatcgggagcagtgtgccaggcccgcagtcctaccccattgtgacagggagtgagttttccgggagtccctacagccaccctcagtattcctcgtacaacgactcctggaggttccccaacccggggctgcttggctccccctactattatagcgctgccgcccgaggagccgccccacctgcagccgccactgcctatgaccgtcactgacccttggag

SEQ ID NO: 2987 - DNA, 969 bp, Homo sapiens
  source 1..969: mol_type = genomic DNA
atggatttagagaaaaattatccgactcctcggaccagcaggacaggacatggaggagtgaatcagcttgggggggtttttgtgaatggacggccactcccggatgtagtccgccagaggatagtggaacttgctcatcaaggtgtcaggccctgcgacatctccaggcagcttcgggtcagccatggttgtgtcagcaaaattcttggcaggtattatgagacaggaagcatcaagcctggggtaattggaggatccaaaccaaaggtcgccacacccaaagtggtggaaaaaatcgctgaatataaacgccaaaatcccaccatgtttgcctgggagatcagggaccggctgctggcagagcgggtgtgtgacaatgacaccgtgcctagcgtcagttccatcaacaggatcatccggacaaaagtacagcagccacccaaccaaccagtcccagcttccagtcacagcataggtattcaggagtctccggtgccgaacggccactcgcttccgggcagagacttcctccggaagcagatgcggggagacttgttcacacagcagcagctggaggtgctggaccgcgtgtttgagaggcagcactactcagacatcttcaccaccacagagcccatcaagcccgagcagaccacagagtattcagccatggcctcgctggctggtgggctggacgacatgaaggccaatctggccagccccacccctgctgacatcgggagcagtgtgccaggcccgcagtcctaccccattgtgacaggccgtgacttggcgagcacgaccctccccgggtaccctccacacgtcccccccgctggacagggcagctactcagcaccgacgctgacagggatggtgcctggctccccctactattatagcgctgccgcccgaggagccgccccacctgcagccgccactgcctatgaccgtcactgacccttggag

SEQ ID NO: 2988 - DNA, 1019 bp, Homo sapiens
  source 1..1019: mol_type = genomic DNA
atggatttagagaaaaattatccgactcctcggaccagcaggacaggtattatgagacaggaagcatcaagcctggggtaattggaggatccaaaccaaaggtcgccacacccaaagtggtggaaaaaatcgctgaatataaacgccaaaatcccaccatgtttgcctgggagatcagggaccggctgctggcagagcgggtgtgtgacaatgacaccgtgcctagcgtcagttccatcaacaggatcatccggacaaaagtacagcagccacccaaccaaccagtcccagcttccagtcacagcatagtgtccactggctccgtgacgcaggtgtcctcggtgagcacggattcggccggctcgtcgtactccatcagcggcatcctgggcatcacgtcccccagcgccgacaccaacaagcgcaagagagacgaaggtattcaggagtctccggtgccgaacggccactcgcttccgggcagagacttcctccggaagcagatgcggggagacttgttcacacagcagcagctggaggtgctggaccgcgtgtttgagaggcagcactactcagacatcttcaccaccacagagcccatcaagcccgagcagaccacagagtattcagccatggcctcgctggctggtgggctggacgacatgaaggccaatctggccagccccacccctgctgacatcgggagcagtgtgccaggcccgcagtcctaccccattgtgacaggccgtgacttggcgagcacgaccctccccgggtaccctccacacgtcccccccgctggacagggcagctactcagcaccgacgctgacagggatggtgcctgggagtgagttttccgggagtccctacagccaccctcagtattcctcgtacaacgactcctggaggttccccaacccggggctgcttggctccccctactattatagcgctgccgcccgaggagccgccccacctgcagccgccactgcctatgaccgtcactgacccttggag

SEQ ID NO: 2989 - DNA, 1112 bp, Homo sapiens
  source 1..1112: mol_type = genomic DNA
atggatttagagaaaaattatccgactcctcggaccagcaggacaggacatggaggagtgaatcagcttgggggggtttttgtgaatggacggccactcccggatgtagtccgccagaggatagtggaacttgctcatcaaggtgtcaggccctgcgacatctccaggcagcttcgggtcagccatggttgtgtcagcaaaattcttggcaggtattatgagacaggaagcatcaagcctggggtaattggaggatccaaaccaaaggtcgccacacccaaagtggtggaaaaaatcgctgaatataaacgccaaaatcccaccatgtttgcctgggagatcagggaccggctgctggcagagcgggtgtgtgacaatgacaccgtgcctagcgtcagttccatcaacaggatcatccggacaaaagtacagcagccacccaaccaaccagtcccagcttccagtcacagcatagtgtccactggctccgtgacgcaggtgtcctcggtgagcacggattcggccggctcgtcgtactccatcagcggcatcctgggcatcacgtcccccagcgccgacaccaacaagcgcaagagagacgaaggtattcaggagtctccggtgccgaacggccactcgcttccgggcagagacttcctccggaagcagatgcggggagacttgttcacacagcagcagctggaggtgctggaccgcgtgtttgagaggcagcactactcagacatcttcaccaccacagagcccatcaagcccgagcagtggtgccccgtgctgatgagacaatacttggtgcagccccaggcagtccttttccaggccgtgacttggcgagcacgaccctccccgggtaccctccacacgtcccccccgctggacagggcagctactcagcaccgacgctgacagggatggtgcctgggagtgagttttccgggagtccctacagccaccctcagtattcctcgtacaacgactcctggaggttccccaacccggggctgcttggctccccctactattatagcgctgccgcccgaggagccgccccacctgcagccgccactgcctatgaccgtcactgacccttggag

SEQ ID NO: 2990 - DNA, 1197 bp, Homo sapiens
  source 1..1197: mol_type = genomic DNA
atgcctcacaactccatcagatctggccatggagggctgaaccagctgggaggggcctttgtgaatggcagacctctgccggaagtggtccgccagcgcatcgtagacctggcccaccagggtgtaaggccctgcgacatctctcgccagctccgcgtcagccatggctgcgtcagcaagatccttggcaggtactacgagactggcagcatccggcctggagtgatagggggctccaagcccaaggtggccacccccaaggtggtggagaagattggggactacaaacgccagaaccctaccatgtttgcctgggagatccgagaccggctcctggctgagggcgtctgtgacaatgacactgtgcccagtgtcagctccattaatagaatcatccggaccaaagtgcagcaaccattcaacctccctatggacagctgcgtggccaccaagtccctgagtcccggacacacgctgatccccagctcagctgtaactcccccggagtcaccccagtcggattccctgggctccacctactccatcaatgggctcctgggcatcgctcagcctggcagcgacaagaggaaaatggatgacagtgatcaggatagctgccgactaagcattgactcacagagcagcagcagcggaccccgaaagcaccttcgcacggatgccttcagccagcaccacctcgagccgctcgagtgcccatttgagcggcagcactacccagaggcctatgcctcccccagccacaccaaaggcgagcagggcctctacccgctgcccttgctcaacagcaccctggacgacgggaaggccaccctgaccccttccaacacgccactggggcgcaacctctcgactcaccagacctaccccgtggtggcagctccgcctttttggatctgcagcaagtcggctccggggtcccgcccttcaatgcctttccccatgctgcctccgtgtacgggcagttcacgggccaggccctcctctcagggcgagagatggtggggcccacgctgcccggatacccaccccacatccccaccagcggacagggcagctatgcctcctctgccatcgcaggcatggtggcaggaagtgaatactctggcaatgcctatggccacaccccctactcctcctacagcgaggcctggcgcttccccaactccagcttgctga

SEQ ID NO: 2991 - DNA, 3735 bp, Homo sapiens
  source 1..3735: mol_type = genomic DNA
ttcagaaggaggagagacaccgggcccagggcaccctcgcgggcggacccaaccagtgagggcctgcagccggccggccagggcagcggcaggcgcggcccggacctacgggaggaagccccgagccctcggcgggctgcgagcgactccccggcgatgcctcacaactccatcagatctggccatggagggctgaaccagctgggaggggcctttgtgaatggcagacctctgccggaagtggtccgccagcgcatcgtagacctggcccaccagggtgtaaggccctgcgacatctctcgccagctccgcgtcagccatggctgcgtcagcaagatccttggcaggtactacgagactggcagcatccggcctggagtgatagggggctccaagcccaaggtggccacccccaaggtggtggagaagattggggactacaaacgccagaaccctaccatgtttgcctgggagatccgagaccggctcctggctgagggcgtctgtgacaatgacactgtgcccagtgtcagctccattaatagaatcatccggaccaaagtgcagcaaccattcaacctccctatggacagctgcgtggccaccaagtccctgagtcccggacacacgctgatccccagctcagctgtaactcccccggagtcaccccagtcggattccctgggctccacctactccatcaatgggctcctgggcatcgctcagcctggcagcgacaagaggaaaatggatgacagtgatcaggatagctgccgactaagcattgactcacagagcagcagcagcggaccccgaaagcaccttcgcacggatgccttcagccagcaccacctcgagccgctcgagtgcccatttgagcggcagcactacccagaggcctatgcctcccccagccacaccaaaggcgagcagggcgagagatggtggggcccacgctgcccggatacccaccccacatccccaccagcggacagggcagctatgcctcctctgccatcgcaggcatggtggcaggaagtgaatactctggcaatgcctatggccacaccccctactcctcctacagcgaggcctggcgcttccccaactccagcttgctgagttccccatattattacagttccacatcaaggccgagtgcaccgcccaccactgccacggcctttgaccatctgtagttgccatggggacagtgggagcgactgagcaacaggaggactcagcctgggacaggccccagagagtcacacaaaggaatctttatttattacatgaaaaataaccacaagtccagcattgcggcacactccctgtgtggttaatttaatgaaccatgaaagacaggatgaccttggacaaggccaaactgtcctccaagactccttaatgaggggcaggagtcccagggaaagagaaccatgccatgctgaaaaagacaaaattgaagaagaaatgtagcccccagccggtacccaccaaaggagagaagaagcaatagccgaggaacttggggggatggcgaatggttcctgcccgggcccaaggggtgcacagggcacctccatggctccattattaacacaactctagcaattatggaccataagcacttccctccagcccacaagtcacagcctggtgccgaggctctcctcaccagccacccagggagtcacctccctcagcctcccgcctgccccacacggaggctctggctgtcctctttctccactccatttgcttggctctttctacacctccctcttgggcatgggctgagggctggagcgagtccctcagaaattccaccaggctgtcagctgacctcttttgcctgctgctgtgaaggtatagcaccaccccaggtcctcctgcagtgcggcatccccttggcagctgccgtcagccaggccagccccagggagcttaaaacagacattccacagggcctgggcccctgggaggtgaggtgtggtgtgcggcttcacccagggcagaacaaggcagaatcgcaggaaacccgcttccccttcctgacagctcctgccaagccaaatgtgcttcctgcagctcacgcccaccagctactgaagggacccaaggcaccccctgaagccagcgatagagggtccctctctgctccccagcagctcctgcccccaaggcctgactgtatatactgtaaatgaaactttgtttgggtcaagcttccttctttctaacccccagactttggcctctgagtgaaatgtctctctttgccctgtggggcttctctccttgatgcttctttctttttttaaagacaacctgccattaccacatgactcaataaaccattgctcttcatctcaggctttggggttggctggggaaggaggcatcccggggctgggctttctcccaagaacatcagagctgagtagccgacaaactcactttggggccgtgggctggaagggaccatctgatgccccagagctctggcttggccttctccctctgcctttaattcacgttgaacgctgggtacctcactcatcccaagttcttcaacactgagcaaatgcaaggatagcacagtactgagccaaccatagactccccacaaggagttgctgttgttattaacaggaagccagagaatcagcagggtgggttagtgagggatccgggaatagctgtgactggagcctgcataaacagctctgaagggagagagaagactgggctctcttgtgtgccaggcacagtatggaaggcttcatataagttaagctgaaattagccctgttttacatacagcttcattttacatatgaggaaactgaggctttgaaaaaaatgagatgtcttgtccaagatgaaaagtagtagattcaaccaagtcctcttactctaagcccaacgcttttacccaaaaccccagagtcctcatcagggatgccaaatggttctagacccagtggaggttctggagctgccactggggatttaatttcttttgatttgctaaagatttgacctgactgaatggagaggtagagtgtagtgtggccaggacaaggtgagggaggctgtagagacttagcactttaggccaaccacctccaggaaatctgggaaatgcaatgtgacagctcgggctctgcactccagggggctgtctggtgtccacatggaccttctccatgtgggacacagctggaacaagggggcaggggcctgcagctgggatgcccaggtgaatatgggcagctggacaaacaacactgggattgagtcagatagaaggggcccaaggactccagggctgggaggacagaggctgggagagagggctcttacctccttaggcctcccaaagagcggttagggatgctgccatggatggcatggcagggggaaccctcctggaagaaaatccatctcttctgaagggatctgagatgcggctggtttttcaatggcagaacttccctctgcagcgcgactccgaatccatgacatctgagagtcttcctgaccacaaacctctgggatcccgagggctccctacccaagaatcactttgagcacagcatcccaaggagcccatagagcgatcccttgcattcacagccacagcccctctggggacactctgtacccccggcagaccctttccaactcacaaccaataaaggggcttgggctgtgctttgactaaggtga

SEQ ID NO: 2992 - DNA, 3966 bp, Homo sapiens
  source 1..3966: mol_type = genomic DNA
ttcagaaggaggagagacaccgggcccagggcaccctcgcgggcggacccaaccagtgagggcctgcagccggccggccagggcagcggcaggcgcggcccggacctacgggaggaagccccgagccctcggcgggctgcgagcgactccccggcgatgcctcacaactccatcagatctggccatggagggctgaaccagctgggaggggcctttgtgaatggcagacctctgccggaagtggtccgccagcgcatcgtagacctggcccaccagggtgtaaggccctgcgacatctctcgccagctccgcgtcagccatggctgcgtcagcaagatccttggcaggtactacgagactggcagcatccggcctggagtgatagggggctccaagcccaaggtggccacccccaaggtggtggagaagattggggactacaaacgccagaaccctaccatgtttgcctgggagatccgagaccggctcctggctgagggcgtctgtgacaatgacactgtgcccagtgtcagctccattaatagaatcatccggaccaaagtgcagcaaccattcaacctccctatggacagctgcgtggccaccaagtccctgagtcccggacacacgctgatccccagctcagctgtaactcccccggagtcaccccagtcggattccctgggctccacctactccatcaatgggctcctgggcatcgctcagcctggcagcgacaagaggaaaatggatgacagtgatcaggatagctgccgactaagcattgactcacagagcagcagcagcggaccccgaaagcaccttcgcacggatgccttcagccagcaccacctcgagccgctcgagtgcccatttgagcggcagcactacccagaggcctatgcctcccccagccacaccaaaggcgagcagggcctctacccgctgcccttgctcaacagcaccctggacgacgggaaggccaccctgaccccttccaacacgccactggggcgcaacctctcgactcaccagacctaccccgtggtggcagctccgcctttttggatctgcagcaagtcggctccggggtcccgcccttcaatgcctttccccatgctgcctccgtgtacgggcagttcacgggccaggccctcctctcagggcgagagatggtggggcccacgctgcccggatacccaccccacatccccaccagcggacagggcagctatgcctcctctgccatcgcaggcatggtggcaggaagtgaatactctggcaatgcctatggccacaccccctactcctcctacagcgaggcctggcgcttccccaactccagcttgctgagttccccatattattacagttccacatcaaggccgagtgcaccgcccaccactgccacggcctttgaccatctgtagttgccatggggacagtgggagcgactgagcaacaggaggactcagcctgggacaggccccagagagtcacacaaaggaatctttatttattacatgaaaaataaccacaagtccagcattgcggcacactccctgtgtggttaatttaatgaaccatgaaagacaggatgaccttggacaaggccaaactgtcctccaagactccttaatgaggggcaggagtcccagggaaagagaaccatgccatgctgaaaaagacaaaattgaagaagaaatgtagcccccagccggtacccaccaaaggagagaagaagcaatagccgaggaacttggggggatggcgaatggttcctgcccgggcccaaggggtgcacagggcacctccatggctccattattaacacaactctagcaattatggaccataagcacttccctccagcccacaagtcacagcctggtgccgaggctctcctcaccagccacccagggagtcacctccctcagcctcccgcctgccccacacggaggctctggctgtcctctttctccactccatttgcttggctctttctacacctccctcttgggcatgggctgagggctggagcgagtccctcagaaattccaccaggctgtcagctgacctcttttgcctgctgctgtgaaggtatagcaccaccccaggtcctcctgcagtgcggcatccccttggcagctgccgtcagccaggccagccccagggagcttaaaacagacattccacagggcctgggcccctgggaggtgaggtgtggtgtgcggcttcacccagggcagaacaaggcagaatcgcaggaaacccgcttccccttcctgacagctcctgccaagccaaatgtgcttcctgcagctcacgcccaccagctactgaagggacccaaggcaccccctgaagccagcgatagagggtccctctctgctccccagcagctcctgcccccaaggcctgactgtatatactgtaaatgaaactttgtttgggtcaagcttccttctttctaacccccagactttggcctctgagtgaaatgtctctctttgccctgtggggcttctctccttgatgcttctttctttttttaaagacaacctgccattaccacatgactcaataaaccattgctcttcatctcaggctttggggttggctggggaaggaggcatcccggggctgggctttctcccaagaacatcagagctgagtagccgacaaactcactttggggccgtgggctggaagggaccatctgatgccccagagctctggcttggccttctccctctgcctttaattcacgttgaacgctgggtacctcactcatcccaagttcttcaacactgagcaaatgcaaggatagcacagtactgagccaaccatagactccccacaaggagttgctgttgttattaacaggaagccagagaatcagcagggtgggttagtgagggatccgggaatagctgtgactggagcctgcataaacagctctgaagggagagagaagactgggctctcttgtgtgccaggcacagtatggaaggcttcatataagttaagctgaaattagccctgttttacatacagcttcattttacatatgaggaaactgaggctttgaaaaaaatgagatgtcttgtccaagatgaaaagtagtagattcaaccaagtcctcttactctaagcccaacgcttttacccaaaaccccagagtcctcatcagggatgccaaatggttctagacccagtggaggttctggagctgccactggggatttaatttcttttgatttgctaaagatttgacctgactgaatggagaggtagagtgtagtgtggccaggacaaggtgagggaggctgtagagacttagcactttaggccaaccacctccaggaaatctgggaaatgcaatgtgacagctcgggctctgcactccagggggctgtctggtgtccacatggaccttctccatgtgggacacagctggaacaagggggcaggggcctgcagctgggatgcccaggtgaatatgggcagctggacaaacaacactgggattgagtcagatagaaggggcccaaggactccagggctgggaggacagaggctgggagagagggctcttacctccttaggcctcccaaagagcggttagggatgctgccatggatggcatggcagggggaaccctcctggaagaaaatccatctcttctgaagggatctgagatgcggctggtttttcaatggcagaacttccctctgcagcgcgactccgaatccatgacatctgagagtcttcctgaccacaaacctctgggatcccgagggctccctacccaagaatcactttgagcacagcatcccaaggagcccatagagcgatcccttgcattcacagccacagcccctctggggacactctgtacccccggcagaccctttccaactcacaaccaataaaggggcttgggctgtgctttgactaaggtga

SEQ ID NO: 2993 - DNA, 3633 bp, Homo sapiens
  source 1..3633: mol_type = genomic DNA
ttcagaaggaggagagacaccgggcccagggcaccctcgcgggcggacccaaccagtgagggcctgcagccggccggccagggcagcggcaggcgcggcccggacctacgggaggaagccccgagccctcggcgggctgcgagcgactccccggcgatgcctcacaactccatcagatctggccatggagggctgaaccagctgggaggggcctttgtgaatggcagacctctgccggaagtggtccgccagcgcatcgtagacctggcccaccagggtgtaaggccctgcgacatctctcgccagctccgcgtcagccatggctgcgtcagcaagatccttggcaggtactacgagactggcagcatccggcctggagtgatagggggctccaagcccaaggtggccacccccaaggtggtggagaagattggggactacaaacgccagaaccctaccatgtttgcctgggagatccgagaccggctcctggctgagggcgtctgtgacaatgacactgtgcccagtgtcagctccattaatagaatcatccggaccaaagtgcagcaaccattcaacctccctatggacagctgcgtggccaccaagtccctgagtcccggacacacgctgatccccagctcagctgtaactcccccggagtcaccccagtcggattccctgggctccacctactccatcaatgggctcctgggcatcgctcagcctggcagcgacaagaggaaaatggatgacagtgatcaggatagctgccgactaagcattgactcacagagcagcagcagcggaccccgaaagcaccttcgcacggatgccttcagccagcaccacctcgagccgctcgagtgcccatttgagcggcagcactacccagaggcctatgcctcccccagccacaccaaaggcgagcaggaagtgaatactctggcaatgcctatggccacaccccctactcctcctacagcgaggcctggcgcttccccaactccagcttgctgagttccccatattattacagttccacatcaaggccgagtgcaccgcccaccactgccacggcctttgaccatctgtagttgccatggggacagtgggagcgactgagcaacaggaggactcagcctgggacaggccccagagagtcacacaaaggaatctttatttattacatgaaaaataaccacaagtccagcattgcggcacactccctgtgtggttaatttaatgaaccatgaaagacaggatgaccttggacaaggccaaactgtcctccaagactccttaatgaggggcaggagtcccagggaaagagaaccatgccatgctgaaaaagacaaaattgaagaagaaatgtagcccccagccggtacccaccaaaggagagaagaagcaatagccgaggaacttggggggatggcgaatggttcctgcccgggcccaaggggtgcacagggcacctccatggctccattattaacacaactctagcaattatggaccataagcacttccctccagcccacaagtcacagcctggtgccgaggctctcctcaccagccacccagggagtcacctccctcagcctcccgcctgccccacacggaggctctggctgtcctctttctccactccatttgcttggctctttctacacctccctcttgggcatgggctgagggctggagcgagtccctcagaaattccaccaggctgtcagctgacctcttttgcctgctgctgtgaaggtatagcaccaccccaggtcctcctgcagtgcggcatccccttggcagctgccgtcagccaggccagccccagggagcttaaaacagacattccacagggcctgggcccctgggaggtgaggtgtggtgtgcggcttcacccagggcagaacaaggcagaatcgcaggaaacccgcttccccttcctgacagctcctgccaagccaaatgtgcttcctgcagctcacgcccaccagctactgaagggacccaaggcaccccctgaagccagcgatagagggtccctctctgctccccagcagctcctgcccccaaggcctgactgtatatactgtaaatgaaactttgtttgggtcaagcttccttctttctaacccccagactttggcctctgagtgaaatgtctctctttgccctgtggggcttctctccttgatgcttctttctttttttaaagacaacctgccattaccacatgactcaataaaccattgctcttcatctcaggctttggggttggctggggaaggaggcatcccggggctgggctttctcccaagaacatcagagctgagtagccgacaaactcactttggggccgtgggctggaagggaccatctgatgccccagagctctggcttggccttctccctctgcctttaattcacgttgaacgctgggtacctcactcatcccaagttcttcaacactgagcaaatgcaaggatagcacagtactgagccaaccatagactccccacaaggagttgctgttgttattaacaggaagccagagaatcagcagggtgggttagtgagggatccgggaatagctgtgactggagcctgcataaacagctctgaagggagagagaagactgggctctcttgtgtgccaggcacagtatggaaggcttcatataagttaagctgaaattagccctgttttacatacagcttcattttacatatgaggaaactgaggctttgaaaaaaatgagatgtcttgtccaagatgaaaagtagtagattcaaccaagtcctcttactctaagcccaacgcttttacccaaaaccccagagtcctcatcagggatgccaaatggttctagacccagtggaggttctggagctgccactggggatttaatttcttttgatttgctaaagatttgacctgactgaatggagaggtagagtgtagtgtggccaggacaaggtgagggaggctgtagagacttagcactttaggccaaccacctccaggaaatctgggaaatgcaatgtgacagctcgggctctgcactccagggggctgtctggtgtccacatggaccttctccatgtgggacacagctggaacaagggggcaggggcctgcagctgggatgcccaggtgaatatgggcagctggacaaacaacactgggattgagtcagatagaaggggcccaaggactccagggctgggaggacagaggctgggagagagggctcttacctccttaggcctcccaaagagcggttagggatgctgccatggatggcatggcagggggaaccctcctggaagaaaatccatctcttctgaagggatctgagatgcggctggtttttcaatggcagaacttccctctgcagcgcgactccgaatccatgacatctgagagtcttcctgaccacaaacctctgggatcccgagggctccctacccaagaatcactttgagcacagcatcccaaggagcccatagagcgatcccttgcattcacagccacagcccctctggggacactctgtacccccggcagaccctttccaactcacaaccaataaaggggcttgggctgtgctttgactaaggtga

SEQ ID NO: 2994 - DNA, 4084 bp, Homo sapiens
  source 1..4084: mol_type = genomic DNA
ataaaaccggtcggtgatgccgggtggatgggaacaaacttcagaaggaggagagacaccgggcccagggcaccctcgcgggcggacccaaccagtgagggcctgcagccggccggccagggcagcggcaggcgcggcccggacctacgggaggaagccccgagccctcggcgggctgcgagcgactccccggcgatgcctcacaactccatcagatctggccatggagggctgaaccagctgggaggggcctttgtgaatggcagacctctgccggaagtggtccgccagcgcatcgtagacctggcccaccagggtgtaaggccctgcgacatctctcgccagctccgcgtcagccatggctgcgtcagcaagatccttggcaggtactacgagactggcagcatccggcctggagtgatagggggctccaagcccaaggtggccacccccaaggtggtggagaagattggggactacaaacgccagaaccctaccatgtttgcctgggagatccgagaccggctcctggctgagggcgtctgtgacaatgacactgtgcccagtgtcagctccattaatagaatcatccggaccaaagtgcagcaaccattcaacctccctatggacagctgcgtggccaccaagtccctgagtcccggacacacgctgatccccagctcagctgtaactcccccggagtcaccccagtcggattccctgggctccacctactccatcaatgggctcctgggcatcgctcagcctggcagcgacaagaggaaaatggatgacagtgatcaggatagctgccgactaagcattgactcacagagcagcagcagcggaccccgaaagcaccttcgcacggatgccttcagccagcaccacctcgagccgctcgagtgcccatttgagcggcagcactacccagaggcctatgcctcccccagccacaccaaaggcgagcagggcctctacccgctgcccttgctcaacagcaccctggacgacgggaaggccaccctgaccccttccaacacgccactggggcgcaacctctcgactcaccagacctaccccgtggtggcagatcctcactcacccttcgccataaagcaggaaacccccgaggtgtccagttctagctccaccccttcctctttatctagctccgcctttttggatctgcagcaagtcggctccggggtcccgcccttcaatgcctttccccatgctgcctccgtgtacgggcagttcacgggccaggccctcctctcagggcgagagatggtggggcccacgctgcccggatacccaccccacatccccaccagcggacagggcagctatgcctcctctgccatcgcaggcatggtggcaggaagtgaatactctggcaatgcctatggccacaccccctactcctcctacagcgaggcctggcgcttccccaactccagcttgctgagttccccatattattacagttccacatcaaggccgagtgcaccgcccaccactgccacggcctttgaccatctgtagttgccatggggacagtgggagcgactgagcaacaggaggactcagcctgggacaggccccagagagtcacacaaaggaatctttatttattacatgaaaaataaccacaagtccagcattgcggcacactccctgtgtggttaatttaatgaaccatgaaagacaggatgaccttggacaaggccaaactgtcctccaagactccttaatgaggggcaggagtcccagggaaagagaaccatgccatgctgaaaaagacaaaattgaagaagaaatgtagcccccagccggtacccaccaaaggagagaagaagcaatagccgaggaacttggggggatggcgaatggttcctgcccgggcccaaggggtgcacagggcacctccatggctccattattaacacaactctagcaattatggaccataagcacttccctccagcccacaagtcacagcctggtgccgaggctctcctcaccagccacccagggagtcacctccctcagcctcccgcctgccccacacggaggctctggctgtcctctttctccactccatttgcttggctctttctacacctccctcttgggcatgggctgagggctggagcgagtccctcagaaattccaccaggctgtcagctgacctcttttgcctgctgctgtgaaggtatagcaccaccccaggtcctcctgcagtgcggcatccccttggcagctgccgtcagccaggccagccccagggagcttaaaacagacattccacagggcctgggcccctgggaggtgaggtgtggtgtgcggcttcacccagggcagaacaaggcagaatcgcaggaaacccgcttccccttcctgacagctcctgccaagccaaatgtgcttcctgcagctcacgcccaccagctactgaagggacccaaggcaccccctgaagccagcgatagagggtccctctctgctccccagcagctcctgcccccaaggcctgactgtatatactgtaaatgaaactttgtttgggtcaagcttccttctttctaacccccagactttggcctctgagtgaaatgtctctctttgccctgtggggcttctctccttgatgcttctttctttttttaaagacaacctgccattaccacatgactcaataaaccattgctcttcatctcaggctttggggttggctggggaaggaggcatcccggggctgggctttctcccaagaacatcagagctgagtagccgacaaactcactttggggccgtgggctggaagggaccatctgatgccccagagctctggcttggccttctccctctgcctttaattcacgttgaacgctgggtacctcactcatcccaagttcttcaacactgagcaaatgcaaggatagcacagtactgagccaaccatagactccccacaaggagttgctgttgttattaacaggaagccagagaatcagcagggtgggttagtgagggatccgggaatagctgtgactggagcctgcataaacagctctgaagggagagagaagactgggctctcttgtgtgccaggcacagtatggaaggcttcatataagttaagctgaaattagccctgttttacatacagcttcattttacatatgaggaaactgaggctttgaaaaaaatgagatgtcttgtccaagatgaaaagtagtagattcaaccaagtcctcttactctaagcccaacgcttttacccaaaaccccagagtcctcatcagggatgccaaatggttctagacccagtggaggttctggagctgccactggggatttaatttcttttgatttgctaaagatttgacctgactgaatggagaggtagagtgtagtgtggccaggacaaggtgagggaggctgtagagacttagcactttaggccaaccacctccaggaaatctgggaaatgcaatgtgacagctcgggctctgcactccagggggctgtctggtgtccacatggaccttctccatgtgggacacagctggaacaagggggcaggggcctgcagctgggatgcccaggtgaatatgggcagctggacaaacaacactgggattgagtcagatagaaggggcccaaggactccagggctgggaggacagaggctgggagagagggctcttacctccttaggcctcccaaagagcggttagggatgctgccatggatggcatggcagggggaaccctcctggaagaaaatccatctcttctgaagggatctgagatgcggctggtttttcaatggcagaacttccctctgcagcgcgactccgaatccatgacatctgagagtcttcctgaccacaaacctctgggatcccgagggctccctacccaagaatcactttgagcacagcatcccaaggagcccatagagcgatcccttgcattcacagccacagcccctctggggacactctgtacccccggcagaccctttccaactcacaaccaataaaggggcttgggctgtgctttgactaaggtga

SEQ ID NO: 2995 - DNA, 949 bp, Homo sapiens
  source 1..949: mol_type = genomic DNA
gcagtgtggggctgagggaggccggacggcgcgcgtgcgtgctggcgtgcgttcattttcagcctggtgtggggtgagtggtacccaacgggccggggcgccgcgtccgcaggaagaggcgcggggtgcaggcttgtaaacatataacataaaaatggcttccaaaagagctctggtcatcctggctaaaggagcagaggaaatggagacggtcatccctgtagatgtcatgaggcgagctgggattaaggtcaccgttgcaggcctggctggaaaagacccagtacagtgtagccgtgatgtggtcatttgtcctgatgccagccttgaagatgcaaaaaaagagggaccatatgatgtggtggttctaccaggaggtaatctgggcgcacagaatttatctgagtctgctgctgtgaaggagatactgaaggagcaggaaaaccggaagggcctgatagccgccatctgtgcaggtcctactgctctgttggctcatgaaataggttttggaagtaaagttacaacacaccctcttgctaaagacaaaatgatgaatggaggtcattacacctactctgagaatcgtgtggaaaaagacggcctgattcttacaagccgggggcctgggaccagcttcgagtttgcgcttgcaattgttgaagccctgaatggcaaggaggtggcggctcaagtgaaggctccacttgttcttaaagactagagcagcgaactgcgacgatcacttagagaaacaggccgttaggaatccattctcactgtgttcgctctaaacaaaacagtggtaggttaatgtgttcagaagtcgctgtccttactacttttgcggaagtatggaagtcacaactacacagagatttctcagcctacaaattgtgtctatacatttctaagccttgtttgcagaataaacagggcatttagcaaa

SEQ ID NO: 2996 - DNA, 783 bp, Homo sapiens
  source 1..783: mol_type = genomic DNA
tttgactgaccgccagcgtggtggcaacgctgaagcgtccagaatcttctgcctaacctctcgccggcatggaactggctagccgttttattaaactctgttttgcgtggacggtaaaccctccagataatctgcttgtaaacatataacataaaaatggcttccaaaagagctctggtcatcctggctaaaggagcagaggaaatggagacggtcatccctgtagatgtcatgaggcgagctgggattaaggtcaccgttgcaggcctggctggaaaagacccagtacagtgtagccgtgatgtggtcatttgtcctgatgccagccttgaagatgcaaaaaaagagggaccatatgatgtggtggttctaccaggaggtaatctgggcgcacagaatttatctgagtctgctgctgtgaaggagatactgaaggagcaggaaaaccggaagggcctgatagccgccatctgtgcaggtcctactgctctgttggctcatgaaataggttttggaagtaaagttacaacacaccctcttgctaaagacaaaatgatgaatggaggtcattacacctactctgagaatcgtgtggaaaaagacggcctgattcttacaagccgggggcctgggaccagcttcgagtttgcgcttgcaattgttgaagccctgaatggcaaggaggtggcggctcaagtgaaggctccacttgttcttaaagactagagcagcgaactgcgacgatcacttagagaaacaggccgttaggaatccattctcact

SEQ ID NO: 2997 - DNA, 977 bp, Homo sapiens
  source 1..977: mol_type = genomic DNA
agaaccggcgcggggcctgggtcggggccgccctcgcttccggcctcccagtcgggccctgtcgctggcgttggatttgactgaccgccagcgtggtggcaacgctgaagcgtccagaatcttctgcctaacctctcgccggcatggaactggctagccgttttattaaactctgttttgcgtggacggcttgtaaacatataacataaaaatggcttccaaaagagctctggtcatcctggctaaaggagcagaggaaatggagacggtcatccctgtagatgtcatgaggcgagctgggattaaggtcaccgttgcaggcctggctggaaaagacccagtacagtgtagccgtgatgtggtcatttgtcctgatgccagccttgaagatgcaaaaaaagagggaccatatgatgtggtggttctaccaggaggtaatctgggcgcacagaatttatctgagtctgctgctgtgaaggagatactgaaggagcaggaaaaccggaagggcctgatagccgccatctgtgcaggtcctactgctctgttggctcatgaaataggttttggaagtaaagttacaacacaccctcttgctaaagacaaaatgatgaatggaggtcattacacctactctgagaatcgtgtggaaaaagacggcctgattcttacaagccgggggcctgggaccagcttcgagtttgcgcttgcaattgttgaagccctgaatggcaaggaggtggcggctcaagtgaaggctccacttgttcttaaagactagagcagcgaactgcgacgatcacttagagaaacaggccgttaggaatccattctcactgtgttcgctctaaacaaaacagtggtaggttaatgtgttcagaagtcgctgtccttactacttttgcggaagtatggaagtcacaactacacagagatttctcagcctacaaattgtgtctatacatttctaagccttg

SEQ ID NO: 2998 - DNA, 1088 bp, Homo sapiens
  source 1..1088: mol_type = genomic DNA
cgcgcgtgcgtgctggcgtgcgttcattttcagcctggtgtggggcttgtaaacatataacataaaaatggcttccaaaagagctctggtcatcctggctaaaggagcagaggaaatggagacggtcatccctgtagatgtcatgaggcgagctgggattaaggtcaccgttgcaggcctggctggaaaagacccagtacagtgtagccgtgatgtggtcatttgtcctgatgccagccttgaagatgcaaaaaaagagggaccatatgatgtggtggttctaccaggaggtaatctgggcgcacagaatttatctgagtctgctgctgtgaaggagatactgaaggagcaggaaaaccggaagggcctgatagccgccatctgtgcaggtcctactgctctgttggctcatgaaataggttttggaagtaaagttacaacacaccctcttgctaaagacaaaatgatgaatggaggtcattacacctactctgagaatcgtgtggaaaaagacggcctgattcttacaagccgggggcctgggaccagcttcgagtttgcgcttgcaattgttgaagccctgaatggcaaggaggtggcggctcaagtgaaggctccacttgttcttaaagactagagcagcgaactgcgacgatcacttagagaaacaggccgttaggaatccattctcactgtgttcgctctaaacaaaacagtggtaggttaatgtgttcagaagtcgctgtccttactacttttgcggaagtatggaagtcacaactacacagagatttctcagcctacaaattgtgtctatacatttctaagccttgtttgcagaataaacagggcatttagcaaactactgattgtttcttgttttgtctctcatttcttttgtgaaattaaattccgtatcaccttcatttgcagctcttaactgtccatatggcactgaaataaaagaacagtgaccacattttacacagcaaggaggaaaggcatacaaacagaatttaagaggcttgtgattttctctgcttattagctgtgtgtttttaatgtgctattaaaaaataccaatgagg

SEQ ID NO: 2999 - DNA, 4058 bp, Homo sapiens
  source 1..4058: mol_type = genomic DNA
gcaggccgaatggtggatttaattggccggagtttagggcgcgcttggcccgcgtgggtcagctgatcgcgcactgagggtgcgatcccgggctccccattccttcctggggcgcctccccggcccagggccaactgggtcccggtgtcggcaggcctggggtcggcgacggctgctcttttcgttctgtcgcctgcccgatggacgagcctcccgggaagcccctcagctgtgaggagaaggaaaagttaaaggagaaattagcattcttgaaaagggaatacagcaagacactagcccgccttcagcgtgcccaaagagctgaaaagattaagcattctattaagaaaacagtagaagaacaagattgtttgtctcagcaggatctctcaccgcagctaaaacactcagaacctaaaaataaaatatgtgtttatgacaagttacacatcaaaacccatcttgatgaagaaactggagaaaagacatctatcacacttgatgttgggcctgagtcctttaaccctggagatggcccaggaggattacctatacaaagaacagatgacacccaagaacattttccccacagggtcagtgaccctagtggtgagcaaaagcagaagctgccaagcagaagaaagaagcagcagaagaggacatttatttcacaggagagagactgtgtctttggcactgattcactcagattgtctgggaaaagactaaaggaacaggaagaaatcagtagcaaaaatcctgctagatcaccagtaactgaaataagaactcaccttttaagtcttaaatctgaacttccagattctccagaaccagttacagaaattaatgaagacagtgtattaattccaccaactgcccaaccagaaaaaggtgttgatacattcctaagaagacctaatttcaccagggcgactacagttcctttacagactctatcagatagcggtagtagtcagcaccttgaacacattcctcctaaaggtagcagtgaacttactactcacgacctaaaaaacattagatttacttcacctgtaagtttggaggcacaaggcaaaaaaatgactgtctctacagataacctccttgtaaataaagctataagtaaaagtggccaactgcccacaagttctaatttagaggcaaatatttcatgttctctaaatgaactcacctacaataacttaccagcaaatgaaaaccaaaacttaaaagaacaaaatcaaacagagaaatctttaaaatctcccagtgacactcttgatggcaggaatgaaaatcttcaggaaagtgagattctaagtcaacctaagagtcttagcctggaagcaacctctcctctttctgcagaaaaacattcttgcacagtgcctgaaggccttctgtttcctgcagaatattatgttagaacaacacgaagcatgtccaattgccagaggaaagtagccgtggaggctgtcattcagagtcatttggatgtcaagaaaaaagggtttaaaaataaaaataaggatgcaagtaaaaatttaaacctttccaatgaggaaactgaccaaagtgaaattaggatgtctggcacatgcacaggacaaccaagttcaagaacctctcagaaacttctctcattaactaaagtcagctctcccgctgggcccactgaagataatgacttgtctaggaaggcagttgcccaagcacctggtagaagatacacaggaaaaagaaaatcagcctgcaccccagcatcagatcattgtgaaccacttttgccaacttctagcctgtcgattgttaacaggtccaaggaagaagtcacctcacacaaatatcagcacgaaaaattatttattcaagtgaaagggaagaaaagtcgtcatcaaaaagaggattccctttcttggagtaatagtgcttatttatccttggatgatgatgctttcacggctccatttcatagggatggaatgctgagtttaaagcaactactgtcttttctcagtatcacagactttcagttacctgatgaagactttggacctcttaagcttgaaaaagtgaagtcctgctcagaaaaaccagtggagccctttgagtcaaaaatgtttggagagagacatcttaaagagggaagctgtatttttccagaggaactgagtcctaaacgcatggatacagaaatggaggacttagaagaggaccttattgttctaccaggaaaatcacatcccaaaaggccaaactcgcaaagccagcatacaaagacgggcctttcttcatccatattactttatactcctttaaatacggttgcgcctgatgataatgacaggcctaccacagacatgtgttcacctgctttccccatcttaggtactactccagcctttggccctcaaggctcctatgaaaaagcatctacagaagttgctggacgaacttgctgcacaccccaacttgctcatttgaaagactcagtctgtcttgccagtgatactaaacaattcgacagttcaggcagcccagcaaaaccacataccaccctgcaagtgtcaggcaggcaaggacaacctacctgtgactgtgactctgtcccgccaggaacacctccacccattgagtcattcacttttaaagaaaatcagctctgtagaaacacatgccaggagctgcataaacattccgtcgaacagactgaaacagcagagcttcctgcttctgatagcataaacccaggcaacctacaattggtttcagagttaaagaatccttcaggttcctgttccgtagatgtgagtgccatgttttgggaaagagccggttgtaaagagccatgtatcataactgcttgcgaagatgtagtttctctttggaaagctctggatgcttggcagtgggaaaaactttatacctggcacttcgcagaggttccagtattacagatagttccagtgcctgatgtgtataatctcgtgtgtgtagctttgggaaatttggaaatcagagagatcagggcattgttttgttcctctgatgatgaaagtgaaaagcaagtactactgaagtctggaaatataaaagctgtgcttggcctgacaaagaggaggctagttagtagcagtgggaccctttctgatcaacaagtagaagtcatgacgtttgcagaagatggaggaggcaaagaaaaccaatttttgatgccccctgaggagactatactaacttttgctgaggtccaagggatgcaagaagctctgcttggtactactattatgaacaacattgttatttggaatttaaaaactggtcaactcctgaaaaagatgcacattgatgattcttaccaagcttcagtctgtcacaaagcctattctgaaatggggcttctctttattgtcctgagtcatccctgtgccaaagagagtgagtcgttgcgaagccctgtgtttcagctcattgtgattaaccctaagacgactctcagcgtgggtgtgatgctgtactgtcttcctccagggcaggctggcaggttcctggaaggtgacgtgaaagatcactgtgcagcagcaatcttgacttctggaacaattgccatttgggacttacttctcggtcagtgtactgccctcctcccacctgtctctgaccaacattggtcttttgtgaaatggtcgggtacagactctcatttgctggctggacaaaaagatggaaatatatttgtataccactattcataagttagggtaaagtgaaaacacaattttctggatatattgggcctcttagtattttttggagttttaaatataaaggagaatatctgaatgacacttaaaatgattgcttgtttatgtccagacagacttattttttattctaatgatggtagcaccactgatcttggatgtacatttatgtatactttgagaaaaagggttttaggttgatttttgtaatttcccacatttgtacatgtgcttttaaaggtgtacataaagcttcaaatggcaataaatatttatttttatacattc

SEQ ID NO: 3000 - DNA, 8057 bp, Homo sapiens
  source 1..8057: mol_type = genomic DNA
gaactggatgtgggcagcggcggccgcagagacctcgggacccccgcgcaatgtggcaatggaaggcgcagggtctgactccccggcagcggccgcggccgcagcggcagcagcgcccgccgtgtgagcagcagcagcggctggtctgtcaaccggagcccgagcccgagcagcctgcggccagcagcgtcctcgcaagccgagcgcccaggcgcgccaggagcccgcagcagcggcagcagcgcgccgggccgcccgggaagcctccgtccccgcggcggcggcggcggcggcggcaacatggcctcggctggtaacgccgccgagccccaggaccgcggcggcggcggcagcggctgtatcggtgccccgggacggccggctggaggcgggaggcgcagacggacgggggggctgcgccgtgctgccgcgccggaccgggactatctgcaccggcccagctactgcgacgccgccttcgctctggagcagatttccaaggggaaggctactggccggaaagcgccgctgtggctgagagcgaagtttcagagactcttatttaaactgggttgttacattcaaaaaaactgcggcaagttcttggttgtgggcctcctcatatttggggccttcgcggtgggattaaaagcagcgaacctcgagaccaacgtggaggagctgtgggtggaagttggaggacgagtaagtcgtgaattaaattatactcgccagaagattggagaagaggctatgtttaatcctcaactcatgatacagacccctaaagaagaaggtgctaatgtcctgaccacagaagcgctcctacaacacctggactcggcactccaggccagccgtgtccatgtatacatgtacaacaggcagtggaaattggaacatttgtgttacaaatcaggagagcttatcacagaaacaggttacatggatcagataatagaatatctttacccttgtttgattattacacctttggactgcttctgggaaggggcgaaattacagtctgggacagcatacctcctaggtaaacctcctttgcggtggacaaacttcgaccctttggaattcctggaagagttaaagaaaataaactatcaagtggacagctgggaggaaatgctgaataaggctgaggttggtcatggttacatggaccgcccctgcctcaatccggccgatccagactgccccgccacagcccccaacaaaaattcaaccaaacctcttgatatggcccttgttttgaatggtggatgtcatggcttatccagaaagtatatgcactggcaggaggagttgattgtgggtggcacagtcaagaacagcactggaaaactcgtcagcgcccatgccctgcagaccatgttccagttaatgactcccaagcaaatgtacgagcacttcaaggggtacgagtatgtctcacacatcaactggaacgaggacaaagcggcagccatcctggaggcctggcagaggacatatgtggaggtggttcatcagagtgtcgcacagaactccactcaaaaggtgctttccttcaccaccacgaccctggacgacatcctgaaatccttctctgacgtcagtgtcatccgcgtggccagcggctacttactcatgctcgcctatgcctgtctaaccatgctgcgctgggactgctccaagtcccagggtgccgtggggctggctggcgtcctgctggttgcactgtcagtggctgcaggactgggcctgtgctcattgatcggaatttcctttaacgctgcaacaactcaggttttgccatttctcgctcttggtgttggtgtggatgatgtttttcttctggcccacgccttcagtgaaacaggacagaataaaagaatcccttttgaggacaggaccggggagtgcctgaagcgcacaggagccagcgtggccctcacgtccatcagcaatgtcacagccttcttcatggccgcgttaatcccaattcccgctctgcgggcgttctccctccaggcagcggtagtagtggtgttcaattttgccatggttctgctcatttttcctgcaattctcagcatggatttatatcgacgcgaggacaggagactggatattttctgctgttttacaagcccctgcgtcagcagagtgattcaggttgaacctcaggcctacaccgacacacacgacaatacccgctacagccccccacctccctacagcagccacagctttgcccatgaaacgcagattaccatgcagtccactgtccagctccgcacggagtacgacccccacacgcacgtgtactacaccaccgctgagccgcgctccgagatctctgtgcagcccgtcaccgtgacacaggacaccctcagctgccagagcccagagagcaccagctccacaagggacctgctctcccagttctccgactccagcctccactgcctcgagcccccctgtacgaagtggacactctcatcttttgctgagaagcactatgctcctttcctcttgaaaccaaaagccaaggtagtggtgatcttcctttttctgggcttgctgggggtcagcctttatggcaccacccgagtgagagacgggctggaccttacggacattgtacctcgggaaaccagagaatatgactttattgctgcacaattcaaatacttttctttctacaacatgtatatagtcacccagaaagcagactacccgaatatccagcacttactttacgacctacacaggagtttcagtaacgtgaagtatgtcatgttggaagaaaacaaacagcttcccaaaatgtggctgcactacttcagagactggcttcagggacttcaggatgcatttgacagtgactgggaaaccgggaaaatcatgccaaacaattacaagaatggatcagacgatggagtccttgcctacaaactcctggtgcaaaccggcagccgcgataagcccatcgacatcagccagttgactaaacagcgtctggtggatgcagatggcatcattaatcccagcgctttctacatctacctgacggcttgggtcagcaacgaccccgtcgcgtatgctgcctcccaggccaacatccggccacaccgaccagaatgggtccacgacaaagccgactacatgcctgaaacaaggctgagaatcccggcagcagagcccatcgagtatgcccagttccctttctacctcaacggcttgcgggacacctcagactttgtggaggcaattgaaaaagtaaggaccatctgcagcaactatacgagcctggggctgtccagttaccccaacggctaccccttcctcttctgggagcagtacatcggcctccgccactggctgctgctgttcatcagcgtggtgttggcctgcacattcctcgtgtgcgctgtcttccttctgaacccctggacggccgggatcattgtgatggtcctggcgctgatgacggtcgagctgttcggcatgatgggcctcatcggaatcaagctcagtgccgtgcccgtggtcatcctgatcgcttctgttggcataggagtggagttcaccgttcacgttgctttggcctttctgacggccatcggcgacaagaaccgcagggctgtgcttgccctggagcacatgtttgcacccgtcctggatggcgccgtgtccactctgctgggagtgctgatgctggcgggatctgagttcgacttcattgtcaggtatttctttgctgtgctggcgatcctcaccatcctcggcgttctcaatgggctggttttgcttcccgtgcttttgtctttctttggaccatatcctgaggtgtctccagccaacggcttgaaccgcctgcccacaccctcccctgagccaccccccagcgtggtccgcttcgccatgccgcccggccacacgcacagcgggtctgattcctccgactcggagtatagttcccagacgacagtgtcaggcctcagcgaggagcttcggcactacgaggcccagcagggcgcgggaggccctgcccaccaagtgatcgtggaagccacagaaaaccccgtcttcgcccactccactgtggtccatcccgaatccaggcatcacccaccctcgaacccgagacagcagccccacctggactcagggtccctgcctcccggacggcaaggccagcagccccgcagggacccccccagagaaggcttgtggccacccccctacagaccgcgcagagacgcttttgaaatttctactgaagggcattctggccctagcaatagggcccgctggggccctcgcggggcccgttctcacaaccctcggaacccagcgtccactgccatgggcagctccgtgcccggctactgccagcccatcaccactgtgacggcttctgcctccgtgactgtcgccgtgcacccgccgcctgtccctgggcctgggcggaacccccgagggggactctgcccaggctaccctgagactgaccacggcctgtttgaggacccccacgtgcctttccacgtccggtgtgagaggagggattcgaaggtggaagtcattgagctgcaggacgtggaatgcgaggagaggccccggggaagcagctccaactgagggtgattaaaatctgaagcaaagaggccaaagattggaaaccccccacccccacctctttccagaactgcttgaagagaactggttggagttatggaaaagatgccctgtgccaggacagcagttcattgttactgtaaccgattgtattattttgttaaatatttctataaatatttaagagatgtacacatgtgtaatataggaaggaaggatgtaaagtggtatgatctggggcttctccactcctgccccagagtgtggaggccacagtggggcctctccgtatttgtgcattgggctccgtgccacaaccaagcttcattagtcttaaatttcagcatatgttgctgctgcttaaatattgtataatttacttgtataattctatgcaaatattgcttatgtaataggattattttgtaaaggtttctgtttaaaatattttaaatttgcatatcacaaccctgtggtagtatgaaatgttactgttaactttcaaacacgctatgcgtgataatttttttgtttaatgagcagatatgaagaaagcacgttaatcctggtggcttctctaggtgtcgttgtgtgcggtcctcttgtttggctgtgcgtgtgaacacgtgtgtgagttcaccatgtactgtactgtgattttttttttgtcttgttttgtttctctacactgtctgtaacctgtagtaggctctgacctagtcaggctggaagcgtcaggatatcttttcttcgtgctggtgagggctggccctaaacatccacctaatcctttcaaatcagcccggcaaaagctagactctcctcgtgtctacggcatctcttatgatcattggctgccatccaggaccccaatttgtgcttcagggggataatctccttctctcggatcattgtgatggatgctggaacctcagggtatggagctcacatcagttcatcatggtgggtgttagagaattcggtgacatgcctagtgctgagccttggctgggccatgagagtctgtatactctaaaaagcatgcagcatggtgcccctcttctgaccaacacacacacgacccctcccccaacacccccaaattcaagagtggatgtggccctgtcacaggtagaaaaacctatttagttaattctttcttggcccacagtctcccagaaatgatgttttgagtccctatagtttaaactccctctcttaaatggagcagctggttgaggctttctagatctgtttgcatcttctttaaaactaagtggtgagcatgcattgtggtgtagaggcaggcattatgtaggataagagctccggggggattcttcatgcaccagtgtttagggtacgtgcttcctaagtaaatccaaacattgtctccatcctccccgtcattagtgctctttcaatgtgatgtgggaaagcaggaggatggacacaccccactgaaagatgtaggcaggggcaggtctctcaaccaggcatatttttaaaagttgcttctgtactggttctcttcttttgctctgaggtgtgggctccctcatctcgtaaccagagaccagcacatgtcagggaagcacccagtgtcggctccccatccaaatccacaccagcaccttgttacagacaagaagtcagaggaaagggcggggtccctgcagggctgaagcctaagctactgtgaggcgctcacgagtggcagctcctgttactcccttttaaattacctgggaaatcttaacagaaaggtaatgggcccccagaaatacccacagcatagtgacctcagaccctgatactcaccacaaaacttttaagatgctgattgggagccgcttgtggctgctgggtgtgtgtgtgtgtgtgtgcgtgcgtgcgtgtgtgtgtgtctctgctggggaccctggccacccccctgctgctgtcttggtgcctgtcacccacatggtctgccatcctaacacccagctctgctcagaaaacgtcctgcgtggaggagggatgatgcagaattctgaagtcgacttccctctggctcctggcgtgccctcgctcccttcctgagcccagctcgtgttgcgccggaggctgcgcggcccctgatttctgcatggtgtagaactttctccaatagtcacattggcaaagggagaactggggtgggcggggggtggggctggcagggaattagaatttctctctctcttttaatagttttattttgtctgtcctgtttgttcatttggatgttttaatttttaaaaaaaaaaaaactttgctgatatttataattttgtatcataagaatgttttcctctacagtatttgtcatgccagtttataacaaaaaaaaatgcagggattttatttctattggaaacattacagctatgttttacttttggacagaatttttatttgtatagagtgcttactaatgttaaatagttcagagtatataacatttacattaaggactcatggtaggttttagggtaaggagtttaaaggaaataaatattcaaactgggtctcattgccaattttggtggaaatgagtttgtgtcatttcaattacaaagataaaagtatgccatataatttatttatatgaagatttatttttgtagtgtacatagtagtcatcaagtcttttgacagaagtatatttttaaagaatttatatgtgatgaatccataatgtctggaactttgctgagacatgagtgggcacagttttcattgtaaattacagcaaggaaagaaaatgtttaacagtgttaagagagtcagagcagagtggatattcatgcgattatgaagtgtttattagttaccattggcgacctagcatgcttctcatttcaaaccttggaaggtgaaaatgtacaaactctctaaataattaatgttcaaacactgatagaaattctaacatgaataaaaaataatataacttgttggttatatctttgtttgtagaatgctttttttctttaaaatacttgggagagacagttagtgttggagccatcagaaactgttgtttcatcttgctgaccttgtgacactcttcttttttgctctatctgatggagagagttttaggttttcctcctttttgttttgtataaatagtgggtataagcatagctctgttacatggatgtattacaaagtgggggctgagcttttagtgtgatcatcacccaaatagtgtacattgtacccattaattaatttcttatcacctgaccctatttttgttttctcataccaagaaacttcctaagttaaccatcaaaattagtccttctgtcatctctcttagcatacttatttcccttatgtgatgcctaataatgagggaacataaataaagccaaattcaaagatga

SEQ ID NO: 3001 - DNA, 1058 bp, Homo sapiens
  source 1..1058: mol_type = genomic DNA
aaggctgaggttggtcatggttacatggaccgcccctgcctcaatccggccgatccagactgccccgccacagcccccaacaaaaattcaaccaaacctcttgatatggcccttgttttgaatggtggatgtcatggcttatccagaaagtatatgcactggcaggaggagttgattgtgggtggcacagtcaagaacagcactggaaaactcgtcagcgcccatgccctgcagaccatgttccagttaatgactcccaagcaaatgtacgagcacttcaaggggtacgagtatgtctcacacatcaactggaacgaggacaaagcggcagccatcctggaggcctggcagaggacatatgtggaggtggttcatcagagtgtcgcacagaactccactcaaaaggtgctttccttcaccaccacgaccctggacgacatcctgaaatccttctctgacgtcagtgtcatccgcgtggccagcggctacttactcatggttttgccatttctcgctcttggtgttggtgtggatgatgtttttcttctggcccacgccttcagtgaaacaggacagaataaaagaatcccttttgaggacaggaccggggagtgcctgaagcgcacaggagccagcgtggccctcacgtccatcagcaatgtcacagccttcttcatggccgcgttaatcccaattcccgctctgcgggcgttctccctccaggcagcggtagtagtggtgttcaattttgccatggttctgctcatttttcctgcaattctcagcatggatttatatcgacgcgaggacaggagactggatattttctgctgttttacaagcccctgcgtcagcagagtgattcaggttgaacctcaggcctacaccgacacacacgacaatacccgctacagccccccacctccctacagcagccacagctttgcccatgaaacgcagattaccatgcagtccactgtccagctccgcacggagtacgacccccacacgcacgtgtactacaccaccgctgagccgcgctccgagatctctgtgca

SEQ ID NO: 3002 - DNA, 4720 bp, Homo sapiens
  source 1..4720: mol_type = genomic DNA
acccaggagggctgtgctgatagcacgttcctcgagtttactttgctttccttgagtttattgtaaaggggtaaagttttcggatccgtcacgtgaccctgacaggtcctgcctatggcgcggcagaccacccacgccgagggccatggaactgcttaatagaaacaggcttgtaattgtgagtccgcgctgcactccgccgaaagcctccggcggcccagcgcgccggggtttttacactttccgttccttttgtaaagacggaggaggaggagaagaagaagaagaaaacggaggagaagaaaaagacgacaggggagacaaagagacccgcagcgacaaggggaaggctactggccggaaagcgccgctgtggctgagagcgaagtttcagagactcttatttaaactgggttgttacattcaaaaaaactgcggcaagttcttggttgtgggcctcctcatatttggggccttcgcggtgggattaaaagcagcgaacctcgagaccaacgtggaggagctgtgggtggaagttggaggacgagtaagtcgtgaattaaattatactcgccagaagattggagaagaggctatgtttaatcctcaactcatgatacagacccctaaagaagaaggtgctaatgtcctgaccacagaagcgctcctacaacacctggactcggcactccaggccagccgtgtccatgtatacatgtacaacaggcagtggaaattggaacatttgtgttacaaatcaggagagcttatcacagaaacaggttacatggatcagataatagaatatctttacccttgtttgattattacacctttggactgcttctgggaaggggcgaaattacagtctgggacagcatacctcctaggtaaacctcctttgcggtggacaaacttcgaccctttggaattcctggaagagttaaagaaaataaactatcaagtggacagctgggaggaaatgctgaataaggctgaggttggtcatggttacatggaccgcccctgcctcaatccggccgatccagactgccccgccacagcccccaacaaaaattcaaccaaacctcttgatatggcccttgttttgaatggtggatgtcatggcttatccagaaagtatatgcactggcaggaggagttgattgtgggtggcacagtcaagaacagcactggaaaactcgtcagcgcccatgccctgcagaccatgttccagttaatgactcccaagcaaatgtacgagcacttcaaggggtacgagtatgtctcacacatcaactggaacgaggacaaagcggcagccatcctggaggcctggcagaggacatatgtggaggtggttcatcagagtgtcgcacagaactccactcaaaaggtgctttccttcaccaccacgaccctggacgacatcctgaaatccttctctgacgtcagtgtcatccgcgtggccagcggctacttactcatgctcgcctatgcctgtctaaccatgctgcgctgggactgctccaagtcccagggtgccgtggggctggctggcgtcctgctggttgcactgtcagtggctgcaggactgggcctgtgctcattgatcggaatttcctttaacgctgcaacaactcaggttttgccatttctcgctcttggtgttggtgtggatgatgtttttcttctggcccacgccttcagtgaaacaggacagaataaaagaatcccttttgaggacaggaccggggagtgcctgaagcgcacaggagccagcgtggccctcacgtccatcagcaatgtcacagccttcttcatggccgcgttaatcccaattcccgctctgcgggcgttctccctccaggcagcggtagtagtggtgttcaattttgccatggttctgctcatttttcctgcaattctcagcatggatttatatcgacgcgaggacaggagactggatattttctgctgttttacaagcccctgcgtcagcagagtgattcaggttgaacctcaggcctacaccgacacacacgacaatacccgctacagccccccacctccctacagcagccacagctttgcccatgaaacgcagattaccatgcagtccactgtccagctccgcacggagtacgacccccacacgcacgtgtactacaccaccgctgagccgcgctccgagatctctgtgcagcccgtcaccgtgacacaggacaccctcagctgccagagcccagagagcaccagctccacaagggacctgctctcccagttctccgactccagcctccactgcctcgagcccccctgtacgaagtggacactctcatcttttgctgagaagcactatgctcctttcctcttgaaaccaaaagccaaggtagtggtgatcttcctttttctgggcttgctgggggtcagcctttatggcaccacccgagtgagagacgggctggaccttacggacattgtacctcgggaaaccagagaatatgactttattgctgcacaattcaaatacttttctttctacaacatgtatatagtcacccagaaagcagactacccgaatatccagcacttactttacgacctacacaggagtttcagtaacgtgaagtatgtcatgttggaagaaaacaaacagcttcccaaaatgtggctgcactacttcagagactggcttcagggacttcaggatgcatttgacagtgactgggaaaccgggaaaatcatgccaaacaattacaagaatggatcagacgatggagtccttgcctacaaactcctggtgcaaaccggcagccgcgataagcccatcgacatcagccagttgactaaacagcgtctggtggatgcagatggcatcattaatcccagcgctttctacatctacctgacggcttgggtcagcaacgaccccgtcgcgtatgctgcctcccaggccaacatccggccacaccgaccagaatgggtccacgacaaagccgactacatgcctgaaacaaggctgagaatcccggcagcagagcccatcgagtatgcccagttccctttctacctcaacggcttgcgggacacctcagactttgtggaggcaattgaaaaagtaaggaccatctgcagcaactatacgagcctggggctgtccagttaccccaacggctaccccttcctcttctgggagcagtacatcggcctccgccactggctgctgctgttcatcagcgtggtgttggcctgcacattcctcgtgtgcgctgtcttccttctgaacccctggacggccgggatcattgtgatggtcctggcgctgatgacggtcgagctgttcggcatgatgggcctcatcggaatcaagctcagtgccgtgcccgtggtcatcctgatcgcttctgttggcataggagtggagttcaccgttcacgttgctttggcctttctgacggccatcggcgacaagaaccgcagggctgtgcttgccctggagcacatgtttgcacccgtcctggatggcgccgtgtccactctgctgggagtgctgatgctggcgggatctgagttcgacttcattgtcaggtatttctttgctgtgctggcgatcctcaccatcctcggcgttctcaatgggctggttttgcttcccgtgcttttgtctttctttggaccatatcctgaggtgtctccagccaacggcttgaaccgcctgcccacaccctcccctgagccaccccccagcgtggtccgcttcgccatgccgcccggccacacgcacagcgggtctgattcctccgactcggagtatagttcccagacgacagtgtcaggcctcagcgaggagcttcggcactacgaggcccagcagggcgcgggaggccctgcccaccaagtgatcgtggaagccacagaaaaccccgtcttcgcccactccactgtggtccatcccgaatccaggcatcacccaccctcgaacccgagacagcagccccacctggactcagggtccctgcctcccggacggcaaggccagcagccccgcagggacccccccagagaaggcttgtggccacccccctacagaccgcgcagagacgcttttgaaatttctactgaagggcattctggccctagcaatagggcccgctggggccctcgcggggcccgttctcacaaccctcggaacccagcgtccactgccatgggcagctccgtgcccggctactgccagcccatcaccactgtgacggcttctgcctccgtgactgtcgccgtgcacccgccgcctgtccctgggcctgggcggaacccccgagggggactctgcccaggctaccctgagactgaccacggcctgtttgaggacccccacgtgcctttccacgtccggtgtgagaggagggattcgaaggtggaagtcattgagctgcaggacgtggaatgcgaggagaggccccggggaagcagctccaactgagggtgattaaaatctgaagcaaagaggccaaagattggaaaccccccacccccacctctttccagaactgcttgaagagaactggttggagttatggaaaagatgccctgtgccaggacagcagttcattgttactgtaaccgattgtattattttgttaaatatttctataaatatttaagagatgtacacatgtgtaatataggaaggaaggatgtaaagtggtatgatctg

SEQ ID NO: 3003 - DNA, 6061 bp, Homo sapiens
  source 1..6061: mol_type = genomic DNA
ccttgtagaaaatccagtgcgctaaattctcccaaggcagcggtagtagtggtgttcaattttgccatggttctgctcatttttcctgcaattctcagcatggatttatatcgacgcgaggacaggagactggatattttctgctgttttacaagcccctgcgtcagcagagtgattcaggttgaacctcaggcctacaccgacacacacgacaatacccgctacagccccccacctccctacagcagccacagctttgcccatgaaacgcagattaccatgcagtccactgtccagctccgcacggagtacgacccccacacgcacgtgtactacaccaccgctgagccgcgctccgagatctctgtgcagcccgtcaccgtgacacaggacaccctcagctgccagagcccagagagcaccagctccacaagggacctgctctcccagttctccgactccagcctccactgcctcgagcccccctgtacgaagtggacactctcatcttttgctgagaagcactatgctcctttcctcttgaaaccaaaagccaaggtagtggtgatcttcctttttctgggcttgctgggggtcagcctttatggcaccacccgagtgagagacgggctggaccttacggacattgtacctcgggaaaccagagaatatgactttattgctgcacaattcaaatacttttctttctacaacatgtatatagtcacccagaaagcagactacccgaatatccagcacttactttacgacctacacaggagtttcagtaacgtgaagtatgtcatgttggaagaaaacaaacagcttcccaaaatgtggctgcactacttcagagactggcttcagggacttcaggatgcatttgacagtgactgggaaaccgggaaaatcatgccaaacaattacaagaatggatcagacgatggagtccttgcctacaaactcctggtgcaaaccggcagccgcgataagcccatcgacatcagccagttgactaaacagcgtctggtggatgcagatggcatcattaatcccagcgctttctacatctacctgacggcttgggtcagcaacgaccccgtcgcgtatgctgcctcccaggccaacatccggccacaccgaccagaatgggtccacgacaaagccgactacatgcctgaaacaaggctgagaatcccggcagcagagcccatcgagtatgcccagttccctttctacctcaacggcttgcgggacacctcagactttgtggaggcaattgaaaaagtaaggaccatctgcagcaactatacgagcctggggctgtccagttaccccaacggctaccccttcctcttctgggagcagtacatcggcctccgccactggctgctgctgttcatcagcgtggtgttggcctgcacattcctcgtgtgcgctgtcttccttctgaacccctggacggccgggatcattgtgatggtcctggcgctgatgacggtcgagctgttcggcatgatgggcctcatcggaatcaagctcagtgccgtgcccgtggtcatcctgatcgcttctgttggcataggagtggagttcaccgttcacgttgctttggcctttctgacggccatcggcgacaagaaccgcagggctgtgcttgccctggagcacatgtttgcacccgtcctggatggcgccgtgtccactctgctgggagtgctgatgctggcgggatctgagttcgacttcattgtcaggtatttctttgctgtgctggcgatcctcaccatcctcggcgttctcaatgggctggttttgcttcccgtgcttttgtctttctttggaccatatcctgaggtgtctccagccaacggcttgaaccgcctgcccacaccctcccctgagccaccccccagcgtggtccgcttcgccatgccgcccggccacacgcacagcgggtctgattcctccgactcggagtatagttcccagacgacagtgtcaggcctcagcgaggagcttcggcactacgaggcccagcagggcgcgggaggccctgcccaccaagtgatcgtggaagccacagaaaaccccgtcttcgcccactccactgtggtccatcccgaatccaggcatcacccaccctcgaacccgagacagcagccccacctggactcagggtccctgcctcccggacggcaaggccagcagccccgcagggacccccccagagaaggcttgtggccacccccctacagaccgcgcagagacgcttttgaaatttctactgaagggcattctggccctagcaatagggcccgctggggccctcgcggggcccgttctcacaaccctcggaacccagcgtccactgccatgggcagctccgtgcccggctactgccagcccatcaccactgtgacggcttctgcctccgtgactgtcgccgtgcacccgccgcctgtccctgggcctgggcggaacccccgagggggactctgcccaggctaccctgagactgaccacggcctgtttgaggacccccacgtgcctttccacgtccggtgtgagaggagggattcgaaggtggaagtcattgagctgcaggacgtggaatgcgaggagaggccccggggaagcagctccaactgagggtgattaaaatctgaagcaaagaggccaaagattggaaaccccccacccccacctctttccagaactgcttgaagagaactggttggagttatggaaaagatgccctgtgccaggacagcagttcattgttactgtaaccgattgtattattttgttaaatatttctataaatatttaagagatgtacacatgtgtaatataggaaggaaggatgtaaagtggtatgatctggggcttctccactcctgccccagagtgtggaggccacagtggggcctctccgtatttgtgcattgggctccgtgccacaaccaagcttcattagtcttaaatttcagcatatgttgctgctgcttaaatattgtataatttacttgtataattctatgcaaatattgcttatgtaataggattattttgtaaaggtttctgtttaaaatattttaaatttgcatatcacaaccctgtggtagtatgaaatgttactgttaactttcaaacacgctatgcgtgataatttttttgtttaatgagcagatatgaagaaagcacgttaatcctggtggcttctctaggtgtcgttgtgtgcggtcctcttgtttggctgtgcgtgtgaacacgtgtgtgagttcaccatgtactgtactgtgattttttttttgtcttgttttgtttctctacactgtctgtaacctgtagtaggctctgacctagtcaggctggaagcgtcaggatatcttttcttcgtgctggtgagggctggccctaaacatccacctaatcctttcaaatcagcccggcaaaagctagactctcctcgtgtctacggcatctcttatgatcattggctgccatccaggaccccaatttgtgcttcagggggataatctccttctctcggatcattgtgatggatgctggaacctcagggtatggagctcacatcagttcatcatggtgggtgttagagaattcggtgacatgcctagtgctgagccttggctgggccatgagagtctgtatactctaaaaagcatgcagcatggtgcccctcttctgaccaacacacacacgacccctcccccaacacccccaaattcaagagtggatgtggccctgtcacaggtagaaaaacctatttagttaattctttcttggcccacagtctcccagaaatgatgttttgagtccctatagtttaaactccctctcttaaatggagcagctggttgaggctttctagatctgtttgcatcttctttaaaactaagtggtgagcatgcattgtggtgtagaggcaggcattatgtaggataagagctccggggggattcttcatgcaccagtgtttagggtacgtgcttcctaagtaaatccaaacattgtctccatcctccccgtcattagtgctctttcaatgtgatgtgggaaagcaggaggatggacacaccccactgaaagatgtaggcaggggcaggtctctcaaccaggcatatttttaaaagttgcttctgtactggttctcttcttttgctctgaggtgtgggctccctcatctcgtaaccagagaccagcacatgtcagggaagcacccagtgtcggctccccatccaaatccacaccagcaccttgttacagacaagaagtcagaggaaagggcggggtccctgcagggctgaagcctaagctactgtgaggcgctcacgagtggcagctcctgttactcccttttaaattacctgggaaatcttaacagaaaggtaatgggcccccagaaatacccacagcatagtgacctcagaccctgatactcaccacaaaacttttaagatgctgattgggagccgcttgtggctgctgggtgtgtgtgtgtgtgtgtgcgtgcgtgcgtgtgtgtgtgtctctgctggggaccctggccacccccctgctgctgtcttggtgcctgtcacccacatggtctgccatcctaacacccagctctgctcagaaaacgtcctgcgtggaggagggatgatgcagaattctgaagtcgacttccctctggctcctggcgtgccctcgctcccttcctgagcccagctcgtgttgcgccggaggctgcgcggcccctgatttctgcatggtgtagaactttctccaatagtcacattggcaaagggagaactggggtgggcggggggtggggctggcagggaattagaatttctctctctcttttaatagttttattttgtctgtcctgtttgttcatttggatgttttaatttttaaaaaaaaaaaaactttgctgatatttataattttgtatcataagaatgttttcctctacagtatttgtcatgccagtttataacaaaaaaaaatgcagggattttatttctattggaaacattacagctatgttttacttttggacagaatttttatttgtatagagtgcttactaatgttaaatagttcagagtatataacatttacattaaggactcatggtaggttttagggtaaggagtttaaaggaaataaatattcaaactgggtctcattgccaattttggtggaaatgagtttgtgtcatttcaattacaaagataaaagtatgccatataatttatttatatgaagatttatttttgtagtgtacatagtagtcatcaagtcttttgacagaagtatatttttaaagaatttatatgtgatgaatccataatgtctggaactttgctgagacatgagtgggcacagttttcattgtaaattacagcaaggaaagaaaatgtttaacagtgttaagagagtcagagcagagtggatattcatgcgattatgaagtgtttattagttaccattggcgacctagcatgcttctcatttcaaaccttggaaggtgaaaatgtacaaactctctaaataattaatgttcaaacactgatagaaattctaacatgaataaaaaataatataacttgttggttatatctttgtttgtagaatgctttttttctttaaaatacttgggagagacagttagtgttggagccatcagaaactgttgtttcatcttgctgaccttgtgacactcttcttttttgctctatctgatggagagagttttaggttttcctcctttttgttttgtataaatagtgggtataagcatagctctgttacatggatgtattacaaagtgggggctgagcttttagtgtgatcatcacccaaatagtgtacattgtacccattaattaatttcttatcacctgaccctatttttgttttctcataccaagaaacttcctaagttaaccatcaaaattagtccttctgtcatctctcttagcatacttatttcccttatgtgatgcctaataatgagggaacataaataaagccaaattcaaag

SEQ ID NO: 3004 - DNA, 4388 bp, Homo sapiens
  source 1..4388: mol_type = genomic DNA
ttctttgctgtgctggcgatcctcaccatcctcggcgttctcaatgggctggttttgcttcccgtgcttttgtctttctttggaccatatcctgaggtcagtagtgacacggggatgtcccacgtgtaggccggctgaatgctgtgtttcctgtgccgctcttcacttcgatacttaggtgcctccccacttgctggtggttcttcagtaaacatctcagagtcatgtctgttttcctcttcggtgtactggctttgagggctagagggcgggttcggtttggttcctctaaatcaactgattggcagcctgggtcttacagatctttatacagtaaatgaagactttccccttgagatgcataattggacttcacaagagtaaaaagtacacatcctgcctttccagtgtggagcagaggacagttcttctgctccagctgcgggacctgaaggtcctccaggtggtagagaaggggaggttaatacggcacagtgcgcagggccccagggcagggaacagaggcccctgaaaaataccgtgctttgagctttgagtgtggccagcaggtaaatggacaagaacacttttaacatggaatccccttaaataggtgtctccagccaacggcttgaaccgcctgcccacaccctcccctgagccaccccccagcgtggtccgcttcgccatgccgcccggccacacgcacagcgggtctgattcctccgactcggagtatagttcccagacgacagtgtcaggcctcagcgaggagcttcggcactacgaggcccagcagggcgcgggaggccctgcccaccaagtgatcgtggaagccacagaaaaccccgtcttcgcccactccactgtggtccatcccgaatccaggcatcacccaccctcgaacccgagacagcagccccacctggactcagggtccctgcctcccggacggcaaggccagcagccccgcagggacccccccagagaaggcttgtggccacccccctacagaccgcgcagagacgcttttgaaatttctactgaagggcattctggccctagcaatagggcccgctggggccctcgcggggcccgttctcacaaccctcggaacccagcgtccactgccatgggcagctccgtgcccggctactgccagcccatcaccactgtgacggcttctgcctccgtgactgtcgccgtgcacccgccgcctgtccctgggcctgggcggaacccccgagggggactctgcccaggctaccctgagactgaccacggcctgtttgaggaccccacgtgcctttccacgtccggtgtgagaggagggattcgaaggtggaagtcattgagctgcaggacgtggaatgcgaggagaggccccggggaagcagctccaactgagggtgattaaaatctgaagcaaagaggccaaagattggaaaccccccacccccacctctttccagaactgcttgaagagaactggttggagttatggaaaagatgccctgtgccaggacagcagttcattgttactgtaaccgattgtattattttgttaaatatttctataaatatttaagagatgtacacatgtgtaatataggaaggaaggatgtaaagtggtatgatctggggcttctccactcctgccccagagtgtggaggccacagtggggcctctccgtatttgtgcattgggctccgtgccacaaccaagcttcattagtcttaaatttcagcatatgttgctgctgcttaaatattgtataatttacttgtataattctatgcaaatattgcttatgtaataggattattttgtaaaggtttctgtttaaaatattttaaatttgcatatcacaaccctgtggtagtatgaaatgttactgttaactttcaaacacgctatgcgtgataatttttttgtttaatgagcagatatgaagaaagcacgttaatcctggtggcttctctaggtgtcgttgtgtgcggtcctcttgtttggctgtgcgtgtgaacacgtgtgtgagttcaccatgtactgtactgtgattttttttttgtcttgttttgtttctctacactgtctgtaacctgtagtaggctctgacctagtcaggctggaagcgtcaggatatcttttcttcgtgctggtgagggctggccctaaacatccacctaatcctttcaaatcagcccggcaaaagctagactctcctcgtgtctacggcatctcttatgatcattggctgccatccaggaccccaatttgtgcttcagggggataatctccttctctcggatcattgtgatggatgctggaacctcagggtatggagctcacatcagttcatcatggtgggtgttagagaattcggtgacatgcctagtgctgagccttggctgggccatgagagtctgtatactctaaaaagcatgcagcatggtgcccctcttctgaccaacacacacacgacccctcccccaacacccccaaattcaagagtggatgtggccctgtcacaggtagaaaaacctatttagttaattctttcttggcccacagtctcccagaaatgatgttttgagtccctatagtttaaactccctctcttaaatggagcagctggttgaggctttctagatctgtttgcatcttctttaaaactaagtggtgagcatgcattgtggtgtagaggcaggcattatgtaggataagagctccggggggattcttcatgcaccagtgtttagggtacgtgcttcctaagtaaatccaaacattgtctccatcctccccgtcattagtgctctttcaatgtgatgtgggaaagcaggaggatggacacaccccactgaaagatgtaggcaggggcaggtctctcaaccaggcatatttttaaaagttgcttctgtactggttctcttcttttgctctgaggtgtgggctccctcatctcgtaaccagagaccagcacatgtcagggaagcacccagtgtcggctccccatccaaatccacaccagcaccttgttacagacaagaagtcagaggaaagggcggggtccctgcagggctgaagcctaagctactgtgaggcgctcacgagtggcagctcctgttactcccttttaaattacctgggaaatcttaacagaaaggtaatgggcccccagaaatacccacagcatagtgacctcagaccctgatactcaccacaaaacttttaagatgctgattgggagccgcttgtggctgctgggtgtgtgtgtgtgtgtgtgcgtgcgtgcgtgtgtgtgtgtctctgctggggaccctggccacccccctgctgctgtcttggtgcctgtcacccacatggtctgccatcctaacacccagctctgctcagaaaacgtcctgcgtggaggagggatgatgcagaattctgaagtcgacttccctctggctcctggcgtgccctcgctcccttcctgagcccagctcgtgttgcgccggaggctgcgcggcccctgatttctgcatggtgtagaactttctccaatagtcacattggcaaagggagaactggggtgggcggggggtggggctggcagggaattagaatttctctctctcttttaatagttttattttgtctgtcctgtttgttcatttggatgttttaatttttaaaaaaaaaaaaactttgctgatatttataattttgtatcataagaatgttttcctctacagtatttgtcatgccagtttataacaaaaaaaaatgcagggattttatttctattggaaacattacagctatgttttacttttggacagaatttttatttgtatagagtgcttactaatgttaaatagttcagagtatataacatttacattaaggactcatggtaggttttagggtaaggagtttaaaggaaataaatattcaaactgggtctcattgccaattttggtggaaatgagtttgtgtcatttcaattacaaagataaaagtatgccatataatttatttatatgaagatttatttttgtagtgtacatagtagtcatcaagtcttttgacagaagtatatttttaaagaatttatatgtgatgaatccataatgtctggaactttgctgagacatgagtgggcacagttttcattgtaaattacagcaaggaaagaaaatgtttaacagtgttaagagagtcagagcagagtggatattcatgcgattatgaagtgtttattagttaccattggcgacctagcatgcttctcatttcaaaccttggaaggtgaaaatgtacaaactctctaaataattaatgttcaaacactgatagaaattctaacatgaataaaaaataatataacttgttggtt

SEQ ID NO: 3005 - DNA, 10631 bp, Homo sapiens
  source 1..10631: mol_type = genomic DNA
gggaaggctactggccggaaagcgccgctgtggctgagagcgaagtttcagagactcttatttaaactgggttgttacattcaaaaaaactgcggcaagttcttggttgtgggcctcctcatatttggggccttcgcggtgggattaaaagcagcgaacctcgagaccaacgtggaggagctgtgggtggaagttggaggacgagtaagtcgtgaattaaattatactcgccagaagattggagaagaggctatgtttaatcctcaactcatgatacagacccctaaagaagaaggtgctaatgtcctgaccacagaagcgctcctacaacacctggactcggcactccaggccagccgtgtccatgtatacatgtacaacagaggtaaacctcctttgcggtggacaaacttcgaccctttggaattcctggaagagttaaagaaaataaactatcaagtggacagctgggaggaaatgctgaataaggctgaggttggtcatggttacatggaccgcccctgcctcaatccggccgatccagactgccccgccacagcccccaacaaaaattcaaccaaacctcttgatatggcccttgttttgaatggtggatgtcatggcttatccagaaagtatatgcactggcaggaggagttgattgtgggtggcacagtcaagaacagcactggaaaactcgtcagcgcccatgccctgcagaccatgttccagttaatgactcccaagcaaatgtacgagcacttcaaggggtacgagtatgtctcacacatcaactggaacgaggacaaagcggcagccatcctggaggcctggcagaggacatatgtggaggtggttcatcagagtgtcgcacagaactccactcaaaaggtgctttccttcaccaccacgaccctggacgacatcctgaaatccttctctgacgtcagtgtcatccgcgtggccagcggctacttactcatgctcgcctatgcctgtctaaccatgctgcgctgggactgctccaagtcccagggtgccgtggggctggctggcgtcctgctggttgcactgtcagtggctgcaggactgggcctgtgctcattgatcggaatttcctttaacgctgcaacaactcaggttttgccatttctcgctcttggtgttggtgtggatgatgtttttcttctggcccacgccttcagtgaaacaggacagaataaaagaatcccttttgaggacaggaccggggagtgcctgaagcgcacaggagccagcgtggccctcacgtccatcagcaatgtcacagccttcttcatggccgcgttaatcccaattcccgctctgcgggcgttctccctccagtacatactgatggctcatcgaggccgactctcctttaatgataccctgtggtgtggtggtctgaaaagctacatgaggtttccttacgaggagtagccttgtagaaaatccagtgcgctaaattctcccaaggcagcggtagtagtggtgttcaattttgccatggttctgctcatttttcctgcaattctcagcatggatttatatcgacgcgaggacaggagactggatattttctgctgttttacaagcccctgcgtcagcagagtgattcaggttgaacctcaggcctacaccgacacacacgacaatacccgctacagccccccacctccctacagcagccacagctttgcccatgaaacgcagattaccatgcagtccactgtccagctccgcacggagtacgacccccacacgcacgtgtactacaccaccgctgagccgcgctccgagatctctgtgcagcccgtcaccgtgacacaggacaccctcagctgccagagcccagagagcaccagctccacaagggacctgctctcccagttctccgactccagcctccactgcctcgagcccccctgtacgaagtggacactctcatcttttgctgagaagcactatgctcctttcctcttgaaaccaaaagccaaggtagtggtgatcttcctttttctgggcttgctgggggtcagcctttatggcaccacccgagtgagagacgggctggaccttacggacattgtacctcgggaaaccagagaatatgactttattgctgcacaattcaaatacttttctttctacaacatgtatatagtcacccagaaagcagactacccgaatatccagcacttactttacgacctacacaggagtttcagtaacgtgaagtatgtcatgttggaagaaaacaaacagcttcccaaaatgtggctgcactacttcagagactggcttcagggacttcaggatgcatttgacagtgactgggaaaccgggaaaatcatgccaaacaattacaagaatggatcagacgatggagtccttgcctacaaactcctggtgcaaaccggcagccgcgataagcccatcgacatcagccagttgactaaacagcgtctggtggatgcagatggcatcattaatcccagcgctttctacatctacctgacggcttgggtcagcaacgaccccgtcgcgtatgctgcctcccaggccaacatccggccacaccgaccagaatgggtccacgacaaagccgactacatgcctgaaacaaggctgagaatcccggcagcagagcccatcgagtatgcccagttccctttctacctcaacggcttgcgggacacctcagactttgtggaggcaattgaaaaagtaaggaccatctgcagcaactatacgagcctggggctgtccagttaccccaacggctaccccttcctcttctgggagcagtacatcggcctccgccactggctgctgctgttcatcagcgtggtgttggcctgcacattcctcgtgtgcgctgtcttccttctgaacccctggacggccgggatcattgtgatggtcctggcgctgatgacggtcgagctgttcggcatgatgggcctcatcggaatcaagctcagtgccgtgcccgtggtcatcctgatcgcttctgttggcataggagtggagttcaccgttcacgttgctttggcctttctgacggccatcggcgacaagaaccgcagggctgtgcttgccctggagcacatgtttgcacccgtcctggatggcgccgtgtccactctgctgggagtgctgatgctggcgggatctgagttcgacttcattgtcaggtaagcaggcgtgtgcaaggagacatgttttagaaatcattgtgattgggccgggtgcagtggctcacgcctgtaatcccagcactttaggaggccgaggcgggtggatcagaaggtcaaggagttcaagaccagcctggccaagatggtgaaactcatctccactcaaaatacaaaaattagccgggcgtggtggtgggtgcctgtaatcccagctacttgggaggctgaggcagagaattgctcgaacccgggaggcggaggttgcagtgagctgagattgcgccactacactccagcctgggtgacagagcgagattctgtctcaaaaaaaaaaatattgttattagctcaggtgatcttcgttgcttatttccttctgtatctggtagattgcagcacctcgtcatcgtgactctgctttcttttgaacttgttaacgtagagatattcggaggtataaagacaagctctcttctagagctgtcttggggagtatcttgaaaacagaaggtaaaggatttggggctggcagcaaagacaactctgcagcttgaagccaaaggatcacccaataggtggcccattattgtctcgggttagaaacactgcagaaagaaatgccacatttgacctacgctccctctccttcaaactgtagaaaggaaaacttaaaaatacctaaaattgtcacctgactttattcttttaagaagtgaaaatgacgtgctcagatttcatattcgagtccccacaattaggaagcatttagcattggactttggtgtcaactcttgggaatctaagcctagtttggatctcaaggcaagtcgtttccagttgatttaattaagaatatgactttgtgaaatataaaagaacagtgagttttccttttgaaaagaatttgagaactgcagaggaggaaaccacttgcttctttgagcagcctccatggctttgtgagggacctgctcttggatagaactctgctactttatggagctctaaggccagaatcaccaataagtaaaagatagtccaggattagaaccatgacagggcagaaccagatgtgagaaatgattggtttgtttggcacgcttcagtactgagaggttgtgtgtgtgtgtgtgtgtgtgtgtgtgtcagagagagagatacgcttcttatcttcaagtaaaaagaagagggtttcaactagaagttttagccaaagttttattacgggaaagagatgagtccattggttggcctgtggcatagcccactgggcaatttggcatcatggaggccgccttcttagaatgagtgccaagcttgcttattgtagtttttgcatagagtgaatggtgaagtggaatcgctgtagaccagcgcttctcacaccgatgtgctgaggaatcatctgagggtctaagtgcagggccgatttcggggggcgggaggtgggatgagggctgggtctgcatctccagctacctccctgcaatgtccatggagctagacttctcagcacaaactactgctaagccagcaagccagttcctaaattcctgtttgccaataccaagtagagagttgcccaactgagttaaatgttttggtctgtgttttattttagttcttagtttgattttagcttttcctttgttcttagtatacactttttcaggcactaacgttatcattatgatataaaagctcaatgtcaagtagagtttcttttgcatatttactttctcgtttaacacaaatataacaagcaccccataagtgccatttgcacaacagcaaataatggggacccccatatccctctgtgtagcctaaggtcttttaggggagagacaagttcacaggcaaaaccaggggaaatgcaaggtgtgctggggtctcatgagttacaggagggtctcgctcagccttgtgggggatgctgaatgaggaaacttagcctgaattagagcccccagctggaaacctggcagctggaatcccagcgctctcctctcagccggggttgttcccgcccagaaatatcagggttcctctttcaagcacttaaaagggcttcccattttctaggatgggatggattaacctgataaaggcctcaccaaggtcaaataaatgagcagacactgtatatgctaagccgtcagaaatctaattggcctgtttatgcttcagctagatggatgggatgcaaatgtcttaatgtggctgctgatacatgccccagccgaaagttccagcagtttacattagaccaagacattggctgcttggtttttactaatgtagttcagaagtttctagtgtttacaatagctgtgaggtatttgtatttttatggggattctctctcctttcatctgatgtcaaaacatatatagacatggcagcactggttgcctgttccattttatgaaccagaggaccattaacagatagatatcttgccccccccttcccagaacatcctgagcctctcccctaccccagcccacttccatcagagttgccctagaaatcattagttccagaaacgcatccctgcgtggagtctgtgccctccagccatgcagagtgtctgccagaggctgtccctggctgacaggtttaccttggtattcatgaaggattccagaccttagccctcaatggtgggaaagcagaactacttctgcactctcctcctctgccatggtgctgcggcctttatgtttgaattggctgacgcaaaacaagagtattcagagatgctaaattgttcaacaaaagattggcccgcagagcagccccgccattgtggagtgccctcacccagcacaatgccccagctcccacagaatgggcagcattttctttgcagaaagctggttcctgtgttctaaaaaggttgcaattggagctatttggtaaaactggaactcacagaattctaggcagaaagttgtgattaatgaaaggccagggaaagccttacctgatatgctagagacttaattagagattctgccgtaagatgcagaagcatttcacagtggattagcagcctgcagaagtgggctgcttttcctcctgggctaaattgtttaaattctacacccttcacttcatttgtttgcttctgctgggttttcacgagcggggcccctcggcattgtgtttgtgctttcagtctgcccagccattcaggtcgcattccatatttttgtgtttgtgtaacacattcataaataacattacatgccatcagagttcagcaaattaacaaactaattttttttttcttcccttcatgaactaacactttgggttgtggaatgtagtcctcaaagtcataaggtaaagaaacaaaaagcaaaaactcaccttgtgttgaatgtgaactgcggttggataacagccttttcagtggggtgggttttgttcatttctggcgttgccatgctgctgtgtcgggcacacggagggtggcgcgatccaccctgtcacagcgcgtgttcccgtttcctcttgatctcccaggtatttctttgctgtgctggcgatcctcaccatcctcggcgttctcaatgggctggttttgcttcccgtgcttttgtctttctttggaccatatcctgaggtgtctccagccaacggcttgaaccgcctgcccacaccctcccctgagccaccccccagcgtggtccgcttcgccatgccgcccggccacacgcacagcgggtctgattcctccgactcggagtatagttcccagacgacagtgtcaggcctcagcgaggagcttcggcactacgaggcccagcagggcgcgggaggccctgcccaccaagtgatcgtggaagccacagaaaaccccgtcttcgcccactccactgtggtccatcccgaatccaggcatcacccaccctcgaacccgagacagcagccccacctggactcagggtccctgcctcccggacggcaaggccagcagccccgcagggacccccccagagaaggcttgtggccacccccctacagaccgcgcagagacgcttttgaaatttctactgaagggcattctggccctagcaatagggcccgctggggccctcgcggggcccgttctcacaaccctcggaacccagcgtccactgccatgggcagctccgtgcccggctactgccagcccatcaccactgtgacggcttctgcctccgtgactgtcgccgtgcacccgccgcctgtccctgggcctgggcggaacccccgagggggactctgcccaggctaccctgagactgaccacggcctgtttgaggacccccacgtgcctttccacgtccggtgtgagaggagggattcgaaggtggaagtcattgagctgcaggacgtggaatgcgaggagaggccccggggaagcagctccaactgagggtgattaaaatctgaagcaaagaggccaaagattggaaaccccccacccccacctctttccagaactgcttgaagagaactggttggagttatggaaaagatgccctgtgccaggacagcagttcattgttactgtaaccgattgtattattttgttaaatatttctataaatatttaagagatgtacacatgtgtaatataggaaggaaggatgtaaagtggtatgatctggggcttctccactcctgccccagagtgtggaggccacagtggggcctctccgtatttgtgcattgggctccgtgccacaaccaagcttcattagtcttaaatttcagcatatgttgctgctgcttaaatattgtataatttacttgtataattctatgcaaatattgcttatgtaataggattattttgtaaaggtttctgtttaaaatattttaaatttgcatatcacaaccctgtggtagtatgaaatgttactgttaactttcaaacacgctatgcgtgataatttttttgtttaatgagcagatatgaagaaagcacgttaatcctggtggcttctctaggtgtcgttgtgtgcggtcctcttgtttggctgtgcgtgtgaacacgtgtgtgagttcaccatgtactgtactgtgattttttttttgtcttgttttgtttctctacactgtctgtaacctgtagtaggctctgacctagtcaggctggaagcgtcaggatatcttttcttcgtgctggtgagggctggccctaaacatccacctaatcctttcaaatcagcccggcaaaagctagactctcctcgtgtctacggcatctcttatgatcattggctgccatccaggaccccaatttgtgcttcagggggataatctccttctctcggatcattgtgatggatgctggaacctcagggtatggagctcacatcagttcatcatggtgggtgttagagaattcggtgacatgcctagtgctgagccttggctgggccatgagagtctgtatactctaaaaagcatgcagcatggtgcccctcttctgaccaacacacacacgacccctcccccaacacccccaaattcaagagtggatgtggccctgtcacaggtagaaaaacctatttagttaattctttcttggcccacagtctcccagaaatgatgttttgagtccctatagtttaaactccctctcttaaatggagcagctggttgaggctttctagatctgtttgcatcttctttaaaactaagtggtgagcatgcattgtggtgtagaggcaggcattatgtaggataagagctccggggggattcttcatgcaccagtgtttagggtacgtgcttcctaagtaaatccaaacattgtctccatcctccccgtcattagtgctctttcaatgtgatgtgggaaagcaggaggatggacacaccccactgaaagatgtaggcaggggcaggtctctcaaccaggcatatttttaaaagttgcttctgtactggttctcttcttttgctctgaggtgtgggctccctcatctcgtaaccagagaccagcacatgtcagggaagcacccagtgtcggctccccatccaaatccacaccagcaccttgttacagacaagaagtcagaggaaagggcggggtccctgcagggctgaagcctaagctactgtgaggcgctcacgagtggcagctcctgttactcccttttaaattacctgggaaatcttaacagaaaggtaatgggcccccagaaatacccacagcatagtgacctcagaccctgatactcaccacaaaacttttaagatgctgattgggagccgcttgtggctgctgggtgtgtgtgtgtgtgtgtgcgtgcgtgcgtgtgtgtgtgtctctgctggggaccctggccacccccctgctgctgtcttggtgcctgtcacccacatggtctgccatcctaacacccagctctgctcagaaaacgtcctgcgtggaggagggatgatgcagaattctgaagtcgacttccctctggctcctggcgtgccctcgctcccttcctgagcccagctcgtgttgcgccggaggctgcgcggcccctgatttctgcatggtgtagaactttctccaatagtcacattggcaaagggagaactggggtgggcggggggtggggctggcagggaattagaatttctctctctcttttaatagttttattttgtctgtcctgtttgttcatttggatgttttaatttttaaaaaaaaaaaaactttgctgatatttataattttgtatcataagaatgttttcctctacagtatttgtcatgccagtttataacaaaaaaaaatgcagggattttatttctattggaaacattacagctatgttttacttttggacagaatttttatttgtatagagtgcttactaatgttaaatagttcagagtatataacatttacattaaggactcatggtaggttttagggtaaggagtttaaaggaaataaatattcaaactgggtctcattgccaattttggtggaaatgagtttgtgtcatttcaattacaaagataaaagtatgccatataatttatttatatgaagatttatttttgtagtgtacatagtagtcatcaagtcttttgacagaagtatatttttaaagaatttatatgtgatgaatccataatgtctggaactttgctgagacatgagtgggcacagttttcattgtaaattacagcaaggaaagaaaatgtttaacagtgttaagagagtcagagcagagtggatattcatgcgattatgaagtgtttattagttaccattggcgacctagcatgcttctcatttcaaaccttggaaggtgaaaatgtacaaactctctaaataattaatgttcaaacactgatagaaattctaacatgaataaaaaataatataacttgttggtt

SEQ ID NO: 3006 - DNA, 7815 bp, Homo sapiens
  source 1..7815: mol_type = genomic DNA
aattcagctcacacagcctctccccacgctatggaaatgcgtcgggagtgaactccggcggccgcgctcaccacgtggatccccacttactaccattctcggcgggggtccagttgggggaacccgcaatatgttgttccaaagagcgctcgcccctagcgcccgtccccgagggtgatggacagagcaggactggtttgctggctcctgaaccttgggctccatcgctgggattacgcagcccctcccttctcagctctggggggaaggctactggccggaaagcgccgctgtggctgagagcgaagtttcagagactcttatttaaactgggttgttacattcaaaaaaactgcggcaagttcttggttgtgggcctcctcatatttggggccttcgcggtgggattaaaagcagcgaacctcgagaccaacgtggaggagctgtgggtggaagttggaggacgagtaagtcgtgaattaaattatactcgccagaagattggagaagaggctatgtttaatcctcaactcatgatacagacccctaaagaagaaggtgctaatgtcctgaccacagaagcgctcctacaacacctggactcggcactccaggccagccgtgtccatgtatacatgtacaacaggcagtggaaattggaacatttgtgttacaaatcaggagagcttatcacagaaacaggttacatggatcagataatagaatatctttacccttgtttgattattacacctttggactgcttctgggaaggggcgaaattacagtctgggacagcatacctcctaggtaaacctcctttgcggtggacaaacttcgaccctttggaattcctggaagagttaaagaaaataaactatcaagtggacagctgggaggaaatgctgaataaggctgaggttggtcatggttacatggaccgcccctgcctcaatccggccgatccagactgccccgccacagcccccaacaaaaattcaaccaaacctcttgatatggcccttgttttgaatggtggatgtcatggcttatccagaaagtatatgcactggcaggaggagttgattgtgggtggcacagtcaagaacagcactggaaaactcgtcagcgcccatgccctgcagaccatgttccagttaatgactcccaagcaaatgtacgagcacttcaaggggtacgagtatgtctcacacatcaactggaacgaggacaaagcggcagccatcctggaggcctggcagaggacatatgtggaggtggttcatcagagtgtcgcacagaactccactcaaaaggtgctttccttcaccaccacgaccctggacgacatcctgaaatccttctctgacgtcagtgtcatccgcgtggccagcggctacttactcatgctcgcctatgcctgtctaaccatgctgcgctgggactgctccaagtcccagggtgccgtggggctggctggcgtcctgctggttgcactgtcagtggctgcaggactgggcctgtgctcattgatcggaatttcctttaacgctgcaacaactcaggttttgccatttctcgctcttggtgttggtgtggatgatgtttttcttctggcccacgccttcagtgaaacaggacagaataaaagaatcccttttgaggacaggaccggggagtgcctgaagcgcacaggagccagcgtggccctcacgtccatcagcaatgtcacagccttcttcatggccgcgttaatcccaattcccgctctgcgggcgttctccctccaggcagcggtagtagtggtgttcaattttgccatggttctgctcatttttcctgcaattctcagcatggatttatatcgacgcgaggacaggagactggatattttctgctgttttacaagcccctgcgtcagcagagtgattcaggttgaacctcaggcctacaccgacacacacgacaatacccgctacagccccccacctccctacagcagccacagctttgcccatgaaacgcagattaccatgcagtccactgtccagctccgcacggagtacgacccccacacgcacgtgtactacaccaccgctgagccgcgctccgagatctctgtgcagcccgtcaccgtgacacaggacaccctcagctgccagagcccagagagcaccagctccacaagggacctgctctcccagttctccgactccagcctccactgcctcgagcccccctgtacgaagtggacactctcatcttttgctgagaagcactatgctcctttcctcttgaaaccaaaagccaaggtagtggtgatcttcctttttctgggcttgctgggggtcagcctttatggcaccacccgagtgagagacgggctggaccttacggacattgtacctcgggaaaccagagaatatgactttattgctgcacaattcaaatacttttctttctacaacatgtatatagtcacccagaaagcagactacccgaatatccagcacttactttacgacctacacaggagtttcagtaacgtgaagtatgtcatgttggaagaaaacaaacagcttcccaaaatgtggctgcactacttcagagactggcttcagggacttcaggatgcatttgacagtgactgggaaaccgggaaaatcatgccaaacaattacaagaatggatcagacgatggagtccttgcctacaaactcctggtgcaaaccggcagccgcgataagcccatcgacatcagccagttgactaaacagcgtctggtggatgcagatggcatcattaatcccagcgctttctacatctacctgacggcttgggtcagcaacgaccccgtcgcgtatgctgcctcccaggccaacatccggccacaccgaccagaatgggtccacgacaaagccgactacatgcctgaaacaaggctgagaatcccggcagcagagcccatcgagtatgcccagttccctttctacctcaacggcttgcgggacacctcagactttgtggaggcaattgaaaaagtaaggaccatctgcagcaactatacgagcctggggctgtccagttaccccaacggctaccccttcctcttctgggagcagtacatcggcctccgccactggctgctgctgttcatcagcgtggtgttggcctgcacattcctcgtgtgcgctgtcttccttctgaacccctggacggccgggatcattgtgatggtcctggcgctgatgacggtcgagctgttcggcatgatgggcctcatcggaatcaagctcagtgccgtgcccgtggtcatcctgatcgcttctgttggcataggagtggagttcaccgttcacgttgctttggcctttctgacggccatcggcgacaagaaccgcagggctgtgcttgccctggagcacatgtttgcacccgtcctggatggcgccgtgtccactctgctgggagtgctgatgctggcgggatctgagttcgacttcattgtcaggtatttctttgctgtgctggcgatcctcaccatcctcggcgttctcaatgggctggttttgcttcccgtgcttttgtctttctttggaccatatcctgaggtgtctccagccaacggcttgaaccgcctgcccacaccctcccctgagccaccccccagcgtggtccgcttcgccatgccgcccggccacacgcacagcgggtctgattcctccgactcggagtatagttcccagacgacagtgtcaggcctcagcgaggagcttcggcactacgaggcccagcagggcgcgggaggccctgcccaccaagtgatcgtggaagccacagaaaaccccgtcttcgcccactccactgtggtccatcccgaatccaggcatcacccaccctcgaacccgagacagcagccccacctggactcagggtccctgcctcccggacggcaaggccagcagccccgcagggacccccccagagaaggcttgtggccacccccctacagaccgcgcagagacgcttttgaaatttctactgaagggcattctggccctagcaatagggcccgctggggccctcgcggggcccgttctcacaaccctcggaacccagcgtccactgccatgggcagctccgtgcccggctactgccagcccatcaccactgtgacggcttctgcctccgtgactgtcgccgtgcacccgccgcctgtccctgggcctgggcggaacccccgagggggactctgcccaggctaccctgagactgaccacggcctgtttgaggacccccacgtgcctttccacgtccggtgtgagaggagggattcgaaggtggaagtcattgagctgcaggacgtggaatgcgaggagaggccccggggaagcagctccaactgagggtgattaaaatctgaagcaaagaggccaaagattggaaaccccccacccccacctctttccagaactgcttgaagagaactggttggagttatggaaaagatgccctgtgccaggacagcagttcattgttactgtaaccgattgtattattttgttaaatatttctataaatatttaagagatgtacacatgtgtaatataggaaggaaggatgtaaagtggtatgatctggggcttctccactcctgccccagagtgtggaggccacagtggggcctctccgtatttgtgcattgggctccgtgccacaaccaagcttcattagtcttaaatttcagcatatgttgctgctgcttaaatattgtataatttacttgtataattctatgcaaatattgcttatgtaataggattattttgtaaaggtttctgtttaaaatattttaaatttgcatatcacaaccctgtggtagtatgaaatgttactgttaactttcaaacacgctatgcgtgataatttttttgtttaatgagcagatatgaagaaagcacgttaatcctggtggcttctctaggtgtcgttgtgtgcggtcctcttgtttggctgtgcgtgtgaacacgtgtgtgagttcaccatgtactgtactgtgattttttttttgtcttgttttgtttctctacactgtctgtaacctgtagtaggctctgacctagtcaggctggaagcgtcaggatatcttttcttcgtgctggtgagggctggccctaaacatccacctaatcctttcaaatcagcccggcaaaagctagactctcctcgtgtctacggcatctcttatgatcattggctgccatccaggaccccaatttgtgcttcagggggataatctccttctctcggatcattgtgatggatgctggaacctcagggtatggagctcacatcagttcatcatggtgggtgttagagaattcggtgacatgcctagtgctgagccttggctgggccatgagagtctgtatactctaaaaagcatgcagcatggtgcccctcttctgaccaacacacacacgacccctcccccaacacccccaaattcaagagtggatgtggccctgtcacaggtagaaaaacctatttagttaattctttcttggcccacagtctcccagaaatgatgttttgagtccctatagtttaaactccctctcttaaatggagcagctggttgaggctttctagatctgtttgcatcttctttaaaactaagtggtgagcatgcattgtggtgtagaggcaggcattatgtaggataagagctccggggggattcttcatgcaccagtgtttagggtacgtgcttcctaagtaaatccaaacattgtctccatcctccccgtcattagtgctctttcaatgtgatgtgggaaagcaggaggatggacacaccccactgaaagatgtaggcaggggcaggtctctcaaccaggcatatttttaaaagttgcttctgtactggttctcttcttttgctctgaggtgtgggctccctcatctcgtaaccagagaccagcacatgtcagggaagcacccagtgtcggctccccatccaaatccacaccagcaccttgttacagacaagaagtcagaggaaagggcggggtccctgcagggctgaagcctaagctactgtgaggcgctcacgagtggcagctcctgttactcccttttaaattacctgggaaatcttaacagaaaggtaatgggcccccagaaatacccacagcatagtgacctcagaccctgatactcaccacaaaacttttaagatgctgattgggagccgcttgtggctgctgggtgtgtgtgtgtgtgtgtgcgtgcgtgcgtgtgtgtgtgtctctgctggggaccctggccacccccctgctgctgtcttggtgcctgtcacccacatggtctgccatcctaacacccagctctgctcagaaaacgtcctgcgtggaggagggatgatgcagaattctgaagtcgacttccctctggctcctggcgtgccctcgctcccttcctgagcccagctcgtgttgcgccggaggctgcgcggcccctgatttctgcatggtgtagaactttctccaatagtcacattggcaaagggagaactggggtgggcggggggtggggctggcagggaattagaatttctctctctcttttaatagttttattttgtctgtcctgtttgttcatttggatgttttaatttttaaaaaaaaaaaaactttgctgatatttataattttgtatcataagaatgttttcctctacagtatttgtcatgccagtttataacaaaaaaaaatgcagggattttatttctattggaaacattacagctatgttttacttttggacagaatttttatttgtatagagtgcttactaatgttaaatagttcagagtatataacatttacattaaggactcatggtaggttttagggtaaggagtttaaaggaaataaatattcaaactgggtctcattgccaattttggtggaaatgagtttgtgtcatttcaattacaaagataaaagtatgccatataatttatttatatgaagatttatttttgtagtgtacatagtagtcatcaagtcttttgacagaagtatatttttaaagaatttatatgtgatgaatccataatgtctggaactttgctgagacatgagtgggcacagttttcattgtaaattacagcaaggaaagaaaatgtttaacagtgttaagagagtcagagcagagtggatattcatgcgattatgaagtgtttattagttaccattggcgacctagcatgcttctcatttcaaaccttggaaggtgaaaatgtacaaactctctaaataattaatgttcaaacactgatagaaattctaacatgaataaaaaataatataacttgttggttatatctttgtttgtagaatgctttttttctttaaaatacttgggagagacagttagtgttggagccatcagaaactgttgtttcatcttgctgaccttgtgacactcttcttttttgctctatctgatggagagagttttaggttttcctcctttttgttttgtataaatagtgggtataagcatagctctgttacatggatgtattacaaagtgggggctgagcttttagtgtgatcatcacccaaatagtgtacattgtacccattaattaatttcttatcacctgaccctatttttgttttctcataccaagaaacttcctaagttaaccatcaaaattagtccttctgtcatctctcttagcatacttatttcccttatgtgatgcctaataatgagggaacataaataaagccaaattcaaag

SEQ ID NO: 3007 - DNA, 7659 bp, Homo sapiens
  source 1..7659: mol_type = genomic DNA
actcacacctctccaggaaaagcagcagacaaatggggattgaaaaattcaaaccctccctctggtcctgggaggaaagggctgtctgaggtccgcagggggtggaggggaaggctactggccggaaagcgccgctgtggctgagagcgaagtttcagagactcttatttaaactgggttgttacattcaaaaaaactgcggcaagttcttggttgtgggcctcctcatatttggggccttcgcggtgggattaaaagcagcgaacctcgagaccaacgtggaggagctgtgggtggaagttggaggacgagtaagtcgtgaattaaattatactcgccagaagattggagaagaggctatgtttaatcctcaactcatgatacagacccctaaagaagaaggtgctaatgtcctgaccacagaagcgctcctacaacacctggactcggcactccaggccagccgtgtccatgtatacatgtacaacaggcagtggaaattggaacatttgtgttacaaatcaggagagcttatcacagaaacaggttacatggatcagataatagaatatctttacccttgtttgattattacacctttggactgcttctgggaaggggcgaaattacagtctgggacagcatacctcctaggtaaacctcctttgcggtggacaaacttcgaccctttggaattcctggaagagttaaagaaaataaactatcaagtggacagctgggaggaaatgctgaataaggctgaggttggtcatggttacatggaccgcccctgcctcaatccggccgatccagactgccccgccacagcccccaacaaaaattcaaccaaacctcttgatatggcccttgttttgaatggtggatgtcatggcttatccagaaagtatatgcactggcaggaggagttgattgtgggtggcacagtcaagaacagcactggaaaactcgtcagcgcccatgccctgcagaccatgttccagttaatgactcccaagcaaatgtacgagcacttcaaggggtacgagtatgtctcacacatcaactggaacgaggacaaagcggcagccatcctggaggcctggcagaggacatatgtggaggtggttcatcagagtgtcgcacagaactccactcaaaaggtgctttccttcaccaccacgaccctggacgacatcctgaaatccttctctgacgtcagtgtcatccgcgtggccagcggctacttactcatgctcgcctatgcctgtctaaccatgctgcgctgggactgctccaagtcccagggtgccgtggggctggctggcgtcctgctggttgcactgtcagtggctgcaggactgggcctgtgctcattgatcggaatttcctttaacgctgcaacaactcaggttttgccatttctcgctcttggtgttggtgtggatgatgtttttcttctggcccacgccttcagtgaaacaggacagaataaaagaatcccttttgaggacaggaccggggagtgcctgaagcgcacaggagccagcgtggccctcacgtccatcagcaatgtcacagccttcttcatggccgcgttaatcccaattcccgctctgcgggcgttctccctccaggcagcggtagtagtggtgttcaattttgccatggttctgctcatttttcctgcaattctcagcatggatttatatcgacgcgaggacaggagactggatattttctgctgttttacaagcccctgcgtcagcagagtgattcaggttgaacctcaggcctacaccgacacacacgacaatacccgctacagccccccacctccctacagcagccacagctttgcccatgaaacgcagattaccatgcagtccactgtccagctccgcacggagtacgacccccacacgcacgtgtactacaccaccgctgagccgcgctccgagatctctgtgcagcccgtcaccgtgacacaggacaccctcagctgccagagcccagagagcaccagctccacaagggacctgctctcccagttctccgactccagcctccactgcctcgagcccccctgtacgaagtggacactctcatcttttgctgagaagcactatgctcctttcctcttgaaaccaaaagccaaggtagtggtgatcttcctttttctgggcttgctgggggtcagcctttatggcaccacccgagtgagagacgggctggaccttacggacattgtacctcgggaaaccagagaatatgactttattgctgcacaattcaaatacttttctttctacaacatgtatatagtcacccagaaagcagactacccgaatatccagcacttactttacgacctacacaggagtttcagtaacgtgaagtatgtcatgttggaagaaaacaaacagcttcccaaaatgtggctgcactacttcagagactggcttcagggacttcaggatgcatttgacagtgactgggaaaccgggaaaatcatgccaaacaattacaagaatggatcagacgatggagtccttgcctacaaactcctggtgcaaaccggcagccgcgataagcccatcgacatcagccagttgactaaacagcgtctggtggatgcagatggcatcattaatcccagcgctttctacatctacctgacggcttgggtcagcaacgaccccgtcgcgtatgctgcctcccaggccaacatccggccacaccgaccagaatgggtccacgacaaagccgactacatgcctgaaacaaggctgagaatcccggcagcagagcccatcgagtatgcccagttccctttctacctcaacggcttgcgggacacctcagactttgtggaggcaattgaaaaagtaaggaccatctgcagcaactatacgagcctggggctgtccagttaccccaacggctaccccttcctcttctgggagcagtacatcggcctccgccactggctgctgctgttcatcagcgtggtgttggcctgcacattcctcgtgtgcgctgtcttccttctgaacccctggacggccgggatcattgtgatggtcctggcgctgatgacggtcgagctgttcggcatgatgggcctcatcggaatcaagctcagtgccgtgcccgtggtcatcctgatcgcttctgttggcataggagtggagttcaccgttcacgttgctttggcctttctgacggccatcggcgacaagaaccgcagggctgtgcttgccctggagcacatgtttgcacccgtcctggatggcgccgtgtccactctgctgggagtgctgatgctggcgggatctgagttcgacttcattgtcaggtatttctttgctgtgctggcgatcctcaccatcctcggcgttctcaatgggctggttttgcttcccgtgcttttgtctttctttggaccatatcctgaggtgtctccagccaacggcttgaaccgcctgcccacaccctcccctgagccaccccccagcgtggtccgcttcgccatgccgcccggccacacgcacagcgggtctgattcctccgactcggagtatagttcccagacgacagtgtcaggcctcagcgaggagcttcggcactacgaggcccagcagggcgcgggaggccctgcccaccaagtgatcgtggaagccacagaaaaccccgtcttcgcccactccactgtggtccatcccgaatccaggcatcacccaccctcgaacccgagacagcagccccacctggactcagggtccctgcctcccggacggcaaggccagcagccccgcagggacccccccagagaaggcttgtggccacccccctacagaccgcgcagagacgcttttgaaatttctactgaagggcattctggccctagcaatagggcccgctggggccctcgcggggcccgttctcacaaccctcggaacccagcgtccactgccatgggcagctccgtgcccggctactgccagcccatcaccactgtgacggcttctgcctccgtgactgtcgccgtgcacccgccgcctgtccctgggcctgggcggaacccccgagggggactctgcccaggctaccctgagactgaccacggcctgtttgaggacccccacgtgcctttccacgtccggtgtgagaggagggattcgaaggtggaagtcattgagctgcaggacgtggaatgcgaggagaggccccggggaagcagctccaactgagggtgattaaaatctgaagcaaagaggccaaagattggaaaccccccacccccacctctttccagaactgcttgaagagaactggttggagttatggaaaagatgccctgtgccaggacagcagttcattgttactgtaaccgattgtattattttgttaaatatttctataaatatttaagagatgtacacatgtgtaatataggaaggaaggatgtaaagtggtatgatctggggcttctccactcctgccccagagtgtggaggccacagtggggcctctccgtatttgtgcattgggctccgtgccacaaccaagcttcattagtcttaaatttcagcatatgttgctgctgcttaaatattgtataatttacttgtataattctatgcaaatattgcttatgtaataggattattttgtaaaggtttctgtttaaaatattttaaatttgcatatcacaaccctgtggtagtatgaaatgttactgttaactttcaaacacgctatgcgtgataatttttttgtttaatgagcagatatgaagaaagcacgttaatcctggtggcttctctaggtgtcgttgtgtgcggtcctcttgtttggctgtgcgtgtgaacacgtgtgtgagttcaccatgtactgtactgtgattttttttttgtcttgttttgtttctctacactgtctgtaacctgtagtaggctctgacctagtcaggctggaagcgtcaggatatcttttcttcgtgctggtgagggctggccctaaacatccacctaatcctttcaaatcagcccggcaaaagctagactctcctcgtgtctacggcatctcttatgatcattggctgccatccaggaccccaatttgtgcttcagggggataatctccttctctcggatcattgtgatggatgctggaacctcagggtatggagctcacatcagttcatcatggtgggtgttagagaattcggtgacatgcctagtgctgagccttggctgggccatgagagtctgtatactctaaaaagcatgcagcatggtgcccctcttctgaccaacacacacacgacccctcccccaacacccccaaattcaagagtggatgtggccctgtcacaggtagaaaaacctatttagttaattctttcttggcccacagtctcccagaaatgatgttttgagtccctatagtttaaactccctctcttaaatggagcagctggttgaggctttctagatctgtttgcatcttctttaaaactaagtggtgagcatgcattgtggtgtagaggcaggcattatgtaggataagagctccggggggattcttcatgcaccagtgtttagggtacgtgcttcctaagtaaatccaaacattgtctccatcctccccgtcattagtgctctttcaatgtgatgtgggaaagcaggaggatggacacaccccactgaaagatgtaggcaggggcaggtctctcaaccaggcatatttttaaaagttgcttctgtactggttctcttcttttgctctgaggtgtgggctccctcatctcgtaaccagagaccagcacatgtcagggaagcacccagtgtcggctccccatccaaatccacaccagcaccttgttacagacaagaagtcagaggaaagggcggggtccctgcagggctgaagcctaagctactgtgaggcgctcacgagtggcagctcctgttactcccttttaaattacctgggaaatcttaacagaaaggtaatgggcccccagaaatacccacagcatagtgacctcagaccctgatactcaccacaaaacttttaagatgctgattgggagccgcttgtggctgctgggtgtgtgtgtgtgtgtgtgcgtgcgtgcgtgtgtgtgtgtctctgctggggaccctggccacccccctgctgctgtcttggtgcctgtcacccacatggtctgccatcctaacacccagctctgctcagaaaacgtcctgcgtggaggagggatgatgcagaattctgaagtcgacttccctctggctcctggcgtgccctcgctcccttcctgagcccagctcgtgttgcgccggaggctgcgcggcccctgatttctgcatggtgtagaactttctccaatagtcacattggcaaagggagaactggggtgggcggggggtggggctggcagggaattagaatttctctctctcttttaatagttttattttgtctgtcctgtttgttcatttggatgttttaatttttaaaaaaaaaaaaactttgctgatatttataattttgtatcataagaatgttttcctctacagtatttgtcatgccagtttataacaaaaaaaaatgcagggattttatttctattggaaacattacagctatgttttacttttggacagaatttttatttgtatagagtgcttactaatgttaaatagttcagagtatataacatttacattaaggactcatggtaggttttagggtaaggagtttaaaggaaataaatattcaaactgggtctcattgccaattttggtggaaatgagtttgtgtcatttcaattacaaagataaaagtatgccatataatttatttatatgaagatttatttttgtagtgtacatagtagtcatcaagtcttttgacagaagtatatttttaaagaatttatatgtgatgaatccataatgtctggaactttgctgagacatgagtgggcacagttttcattgtaaattacagcaaggaaagaaaatgtttaacagtgttaagagagtcagagcagagtggatattcatgcgattatgaagtgtttattagttaccattggcgacctagcatgcttctcatttcaaaccttggaaggtgaaaatgtacaaactctctaaataattaatgttcaaacactgatagaaattctaacatgaataaaaaataatataacttgttggttatatctttgtttgtagaatgctttttttctttaaaatacttgggagagacagttagtgttggagccatcagaaactgttgtttcatcttgctgaccttgtgacactcttcttttttgctctatctgatggagagagttttaggttttcctcctttttgttttgtataaatagtgggtataagcatagctctgttacatggatgtattacaaagtgggggctgagcttttagtgtgatcatcacccaaatagtgtacattgtacccattaattaatttcttatcacctgaccctatttttgttttctcataccaagaaacttcctaagttaaccatcaaaattagtccttctgtcatctctcttagcatacttatttcccttatgtgatgcctaataatgagggaacataaataaagccaaattcaaag

SEQ ID NO: 3008 - DNA, 6563 bp, Homo sapiens
  source 1..6563: mol_type = genomic DNA
gaaggcgagcacccagacgggggcccgccggggccgcggccagcgccggggaaatgccgcgccggggagcagcctgcgccggcctgagcccttccctttgcactcggctgttttttacgtttaaccagaaaggaagggagaggagggaaagatccatgtggctgccctcttccgatcacaaatattgtcgggaaggctactggccggaaagcgccgctgtggctgagagcgaagtttcagagactcttatttaaactgggttgttacattcaaaaaaactgcggcaagttcttggttgtgggcctcctcatatttggggccttcgcggtgggattaaaagcagcgaacctcgagaccaacgtggaggagctgtgggtggaagttggaggacgagtaagtcgtgaattaaattatactcgccagaagattggagaagaggctatgtttaatcctcaactcatgatacagacccctaaagaagaaggtgctaatgtcctgaccacagaagcgctcctacaacacctggactcggcactccaggccagccgtgtccatgtatacatgtacaacaggcagtggaaattggaacatttgtgttacaaatcaggagagcttatcacagaaacaggttacatggatcagataatagaatatctttacccttgtttgattattacacctttggactgcttctgggaaggggcgaaattacagtctgggacagcatacctcctaggtaaacctcctttgcggtggacaaacttcgaccctttggaattcctggaagagttaaagaaaataaactatcaagtggacagctgggaggaaatgctgaataaggctgaggttggtcatggttacatggaccgcccctgcctcaatccggccgatccagactgccccgccacagcccccaacaaaaattcaaccaaacctcttgatatggcccttgttttgaatggtggatgtcatggcttatccagaaagtatatgcactggcaggaggagttgattgtgggtggcacagtcaagaacagcactggaaaactcgtcagcgcccatgccctgcagaccatgttccagttaatgactcccaagcaaatgtacgagcacttcaaggggtacgagtatgtctcacacatcaactggaacgaggacaaagcggcagccatcctggaggcctggcagaggacatatgtggaggtggttcatcagagtgtcgcacagaactccactcaaaaggtgctttccttcaccaccacgaccctggacgacatcctgaaatccttctctgacgtcagtgtcatccgcgtggccagcggctacttactcatgctcgcctatgcctgtctaaccatgctgcgctgggactgctccaagtcccagggtgccgtggggctggctggcgtcctgctggttgcactgtcagtggctgcaggactgggcctgtgctcattgatcggaatttcctttaacgctgcaacaactcaggttttgccatttctcgctcttggtgttggtgtggatgatgtttttcttctggcccacgccttcagtgaaacaggacagaataaaagaatcccttttgaggacaggaccggggagtgcctgaagcgcacaggagccagcgtggccctcacgtccatcagcaatgtcacagccttcttcatggccgcgttaatcccaattcccgctctgcgggcgttctccctccaggcagcggtagtagtggtgttcaattttgccatggttctgctcatttttcctgcaattctcagcatggatttatatcgacgcgaggacaggagactggatattttctgctgttttacaagcccctgcgtcagcagagtgattcaggttgaacctcaggcctacaccgacacacacgacaatacccgctacagccccccacctccctacagcagccacagctttgcccatgaaacgcagattaccatgcagtccactgtccagctccgcacggagtacgacccccacacgcacgtgtactacaccaccgctgagccgcgctccgagatctctgtgcagcccgtcaccgtgacacaggacaccctcagctgccagagcccagagagcaccagctccacaagggacctgctctcccagttctccgactccagcctccactgcctcgagcccccctgtacgaagtggacactctcatcttttgctgagaagcactatgctcctttcctcttgaaaccaaaagccaaggtagtggtgatcttcctttttctgggcttgctgggggtcagcctttatggcaccacccgagtgagagacgggctggaccttacggacattgtacctcgggaaaccagagaatatgactttattgctgcacaattcaaatacttttctttctacaacatgtatatagtcacccagaaagcagactacccgaatatccagcacttactttacgacctacacaggagtttcagtaacgtgaagtatgtcatgttggaagaaaacaaacagcttcccaaaatgtggctgcactacttcagagactggcttcagggacttcaggatgcatttgacagtgactgggaaaccgggaaaatcatgccaaacaattacaagaatggatcagacgatggagtccttgcctacaaactcctggtgcaaaccggcagccgcgataagcccatcgacatcagccagttgactaaacagcgtctggtggatgcagatggcatcattaatcccagcgctttctacatctacctgacggcttgggtcagcaacgaccccgtcgcgtatgctgcctcccaggccaacatccggccacaccgaccagaatgggtccacgacaaagccgactacatgcctgaaacaaggctgagaatcccggcagcagagcccatcgagtatgcccagttccctttctacctcaacggcttgcgggacacctcagactttgtggaggcaattgaaaaagtaaggaccatctgcagcaactatacgagcctggggctgtccagttaccccaacggctaccccttcctcttctgggagcagtacatcggcctccgccactggctgctgctgttcatcagcgtggtgttggcctgcacattcctcgtgtgcgctgtcttccttctgaacccctggacggccgggatcattgtgatggtcctggcgctgatgacggtcgagctgttcggcatgatgggcctcatcggaatcaagctcagtgccgtgcccgtggtcatcctgatcgcttctgttggcataggagtggagttcaccgttcacgttgctttggcctttctgacggccatcggcgacaagaaccgcagggctgtgcttgccctggagcacatgtttgcacccgtcctggatggcgccgtgtccactctgctgggagtgctgatgctggcgggatctgagttcgacttcattgtcaggtatttctttgctgtgctggcgatcctcaccatcctcggcgttctcaatgggctggttttgcttcccgtgcttttgtctttctttggaccatatcctgaggtgtctccagccaacggcttgaaccgcctgcccacaccctcccctgagccaccccccagcgtggtccgcttcgccatgccgcccggccacacgcacagcgggtctgattcctccgactcggagtatagttcccagacgacagtgtcaggcctcagcgaggagcttcggcactacgaggcccagcagggcgcgggaggccctgcccaccaagtgatcgtggaagccacagaaaaccccgtcttcgcccactccactgtggtccatcccgaatccaggcatcacccaccctcgaacccgagacagcagccccacctggactcagggtccctgcctcccggacggcaaggccagcagccccgcagggacccccccagagaaggcttgtggccacccccctacagaccgcgcagagacgcttttgaaatttctactgaagggcattctggccctagcaatagggcccgctggggccctcgcggggcccgttctcacaaccctcggaacccagcgtccactgccatgggcagctccgtgcccggctactgccagcccatcaccactgtgacggcttctgcctccgtgactgtcgccgtgcacccgccgcctgtccctgggcctgggcggaacccccgagggggactctgcccaggctaccctgagactgaccacggcctgtttgaggacccccacgtgcctttccacgtccggtgtgagaggagggattcgaaggtggaagtcattgagctgcaggacgtggaatgcgaggagaggccccggggaagcagctccaactgagggtgattaaaatctgaagcaaagaggccaaagattggaaaccccccacccccacctctttccagaactgcttgaagagaactggttggagttatggaaaagatgccctgtgccaggacagcagttcattgttactgtaaccgattgtattattttgttaaatatttctataaatatttaagagatgtacacatgtgtaatataggaaggaaggatgtaaagtggtatgatctggggcttctccactcctgccccagagtgtggaggccacagtggggcctctccgtatttgtgcattgggctccgtgccacaaccaagcttcattagtcttaaatttcagcatatgttgctgctgcttaaatattgtataatttacttgtataattctatgcaaatattgcttatgtaataggattattttgtaaaggtttctgtttaaaatattttaaatttgcatatcacaaccctgtggtagtatgaaatgttactgttaactttcaaacacgctatgcgtgataatttttttgtttaatgagcagatatgaagaaagcacgttaatcctggtggcttctctaggtgtcgttgtgtgcggtcctcttgtttggctgtgcgtgtgaacacgtgtgtgagttcaccatgtactgtactgtgattttttttttgtcttgttttgtttctctacactgtctgtaacctgtagtaggctctgacctagtcaggctggaagcgtcaggatatcttttcttcgtgctggtgagggctggccctaaacatccacctaatcctttcaaatcagcccggcaaaagctagactctcctcgtgtctacggcatctcttatgatcattggctgccatccaggaccccaatttgtgcttcagggggataatctccttctctcggatcattgtgatggatgctggaacctcagggtatggagctcacatcagttcatcatggtgggtgttagagaattcggtgacatgcctagtgctgagccttggctgggccatgagagtctgtatactctaaaaagcatgcagcatggtgcccctcttctgaccaacacacacacgacccctcccccaacacccccaaattcaagagtggatgtggccctgtcacaggtagaaaaacctatttagttaattctttcttggcccacagtctcccagaaatgatgttttgagtccctatagtttaaactccctctcttaaatggagcagctggttgaggctttctagatctgtttgcatcttctttaaaactaagtggtgagcatgcattgtggtgtagaggcaggcattatgtaggataagagctccggggggattcttcatgcaccagtgtttagggtacgtgcttcctaagtaaatccaaacattgtctccatcctccccgtcattagtgctctttcaatgtgatgtgggaaagcaggaggatggacacaccccactgaaagatgtaggcaggggcaggtctctcaaccaggcatatttttaaaagttgcttctgtactggttctcttcttttgctctgaggtgtgggctccctcatctcgtaaccagagaccagcacatgtcagggaagcacccagtgtcggctccccatccaaatccacaccagcaccttgttacagacaagaagtcagaggaaagggcggggtccctgcagggctgaagcctaagctactgtgaggcgctcacgagtggcagctcctgttactcccttttaaattacctgggaaatcttaacagaaaggtaatgggcccccagaaatacccacagcatagtgacctcagaccctgatactcaccacaaaacttttaagatgctgattgggagccgcttgtggctgctgggtgtgtgtgtgtgtgtgtgcgtgcgtgcgtgtgtgtgtgtctctgctggggaccctggccacccccctgctgctgtcttggtgcctgtcacccacatggtctgccatcctaacacccagctctgctcagaaaacgtcctgcgtggaggagggatgatgcagaattctgaagtcgacttccctctggctcctggcgtgccctcgctcccttcctgagcccagctcgtgttgcgccggaggctgcgcggcccctgatttctgcatggtgtagaactttctccaatagtcacattggcaaagggagaactggggtgggcggggggtggggctggcagggaattagaatttctctctctcttttaatagtt

SEQ ID NO: 3009 - DNA, 8232 bp, Homo sapiens
  source 1..8232: mol_type = genomic DNA
cggccgcggggggcggggagagggtggctaggctcgcgggagctcgccgggcagggcgcctcccaggaaggcggggaggggagcgcctgtttacccaggagggctgtgctgatagcacgttcctcgagtttactttgctttccttgagtttattgtaaaggggtaaagttttcggatccgtcacgtgaccctgacaggtcctgcctatggcgcggcagaccacccacgccgagggccatggaactgcttaatagaaacaggcttgtaattgtgagtccgcgctgcactccgccgaaagcctccggcggcccagcgcgccggggtttttacactttccgttccttttgtaaagacggaggaggaggagaagaagaagaagaaaacggaggagaagaaaaagacgacaggggagacaaagagacccgcagcgacaaggcaagggggagacgagggaagactgggagaagacggaggagcggaggacgaggaaaggggggccagggaaaaaaaaggaattgatgtgaaatccaagcccagcgtccgcgccatcggcacccgcgctccgagcaggggttgacggccggctatggggaaggctactggccggaaagcgccgctgtggctgagagcgaagtttcagagactcttatttaaactgggttgttacattcaaaaaaactgcggcaagttcttggttgtgggcctcctcatatttggggccttcgcggtgggattaaaagcagcgaacctcgagaccaacgtggaggagctgtgggtggaagttggaggacgagtaagtcgtgaattaaattatactcgccagaagattggagaagaggctatgtttaatcctcaactcatgatacagacccctaaagaagaaggtgctaatgtcctgaccacagaagcgctcctacaacacctggactcggcactccaggccagccgtgtccatgtatacatgtacaacaggcagtggaaattggaacatttgtgttacaaatcaggagagcttatcacagaaacaggttacatggatcagataatagaatatctttacccttgtttgattattacacctttggactgcttctgggaaggggcgaaattacagtctgggacagcatacctcctaggtaaacctcctttgcggtggacaaacttcgaccctttggaattcctggaagagttaaagaaaataaactatcaagtggacagctgggaggaaatgctgaataaggctgaggttggtcatggttacatggaccgcccctgcctcaatccggccgatccagactgccccgccacagcccccaacaaaaattcaaccaaacctcttgatatggcccttgttttgaatggtggatgtcatggcttatccagaaagtatatgcactggcaggaggagttgattgtgggtggcacagtcaagaacagcactggaaaactcgtcagcgcccatgccctgcagaccatgttccagttaatgactcccaagcaaatgtacgagcacttcaaggggtacgagtatgtctcacacatcaactggaacgaggacaaagcggcagccatcctggaggcctggcagaggacatatgtggaggtggttcatcagagtgtcgcacagaactccactcaaaaggtgctttccttcaccaccacgaccctggacgacatcctgaaatccttctctgacgtcagtgtcatccgcgtggccagcggctacttactcatgctcgcctatgcctgtctaaccatgctgcgctgggactgctccaagtcccagggtgccgtggggctggctggcgtcctgctggttgcactgtcagtggctgcaggactgggcctgtgctcattgatcggaatttcctttaacgctgcaacaactcaggttttgccatttctcgctcttggtgttggtgtggatgatgtttttcttctggcccacgccttcagtgaaacaggacagaataaaagaatcccttttgaggacaggaccggggagtgcctgaagcgcacaggagccagcgtggccctcacgtccatcagcaatgtcacagccttcttcatggccgcgttaatcccaattcccgctctgcgggcgttctccctccaggcagcggtagtagtggtgttcaattttgccatggttctgctcatttttcctgcaattctcagcatggatttatatcgacgcgaggacaggagactggatattttctgctgttttacaagcccctgcgtcagcagagtgattcaggttgaacctcaggcctacaccgacacacacgacaatacccgctacagccccccacctccctacagcagccacagctttgcccatgaaacgcagattaccatgcagtccactgtccagctccgcacggagtacgacccccacacgcacgtgtactacaccaccgctgagccgcgctccgagatctctgtgcagcccgtcaccgtgacacaggacaccctcagctgccagagcccagagagcaccagctccacaagggacctgctctcccagttctccgactccagcctccactgcctcgagcccccctgtacgaagtggacactctcatcttttgctgagaagcactatgctcctttcctcttgaaaccaaaagccaaggtagtggtgatcttcctttttctgggcttgctgggggtcagcctttatggcaccacccgagtgagagacgggctggaccttacggacattgtacctcgggaaaccagagaatatgactttattgctgcacaattcaaatacttttctttctacaacatgtatatagtcacccagaaagcagactacccgaatatccagcacttactttacgacctacacaggagtttcagtaacgtgaagtatgtcatgttggaagaaaacaaacagcttcccaaaatgtggctgcactacttcagagactggcttcagggacttcaggatgcatttgacagtgactgggaaaccgggaaaatcatgccaaacaattacaagaatggatcagacgatggagtccttgcctacaaactcctggtgcaaaccggcagccgcgataagcccatcgacatcagccagttgactaaacagcgtctggtggatgcagatggcatcattaatcccagcgctttctacatctacctgacggcttgggtcagcaacgaccccgtcgcgtatgctgcctcccaggccaacatccggccacaccgaccagaatgggtccacgacaaagccgactacatgcctgaaacaaggctgagaatcccggcagcagagcccatcgagtatgcccagttccctttctacctcaacggcttgcgggacacctcagactttgtggaggcaattgaaaaagtaaggaccatctgcagcaactatacgagcctggggctgtccagttaccccaacggctaccccttcctcttctgggagcagtacatcggcctccgccactggctgctgctgttcatcagcgtggtgttggcctgcacattcctcgtgtgcgctgtcttccttctgaacccctggacggccgggatcattgtgatggtcctggcgctgatgacggtcgagctgttcggcatgatgggcctcatcggaatcaagctcagtgccgtgcccgtggtcatcctgatcgcttctgttggcataggagtggagttcaccgttcacgttgctttggcctttctgacggccatcggcgacaagaaccgcagggctgtgcttgccctggagcacatgtttgcacccgtcctggatggcgccgtgtccactctgctgggagtgctgatgctggcgggatctgagttcgacttcattgtcaggtatttctttgctgtgctggcgatcctcaccatcctcggcgttctcaatgggctggttttgcttcccgtgcttttgtctttctttggaccatatcctgaggtgtctccagccaacggcttgaaccgcctgcccacaccctcccctgagccaccccccagcgtggtccgcttcgccatgccgcccggccacacgcacagcgggtctgattcctccgactcggagtatagttcccagacgacagtgtcaggcctcagcgaggagcttcggcactacgaggcccagcagggcgcgggaggccctgcccaccaagtgatcgtggaagccacagaaaaccccgtcttcgcccactccactgtggtccatcccgaatccaggcatcacccaccctcgaacccgagacagcagccccacctggactcagggtccctgcctcccggacggcaaggccagcagccccgcagggacccccccagagaaggcttgtggccacccccctacagaccgcgcagagacgcttttgaaatttctactgaagggcattctggccctagcaatagggcccgctggggccctcgcggggcccgttctcacaaccctcggaacccagcgtccactgccatgggcagctccgtgcccggctactgccagcccatcaccactgtgacggcttctgcctccgtgactgtcgccgtgcacccgccgcctgtccctgggcctgggcggaacccccgagggggactctgcccaggctaccctgagactgaccacggcctgtttgaggacccccacgtgcctttccacgtccggtgtgagaggagggattcgaaggtggaagtcattgagctgcaggacgtggaatgcgaggagaggccccggggaagcagctccaactgaggtgagtgccactgacaagggcagccaagggacctagagccaggcaaagaggaggacaaggttctcctggggttctcggcatccccgaggggctgtggcgctcgggcacatcccacgctggaccccagtgaccttttatccccagagcaaggctgatgtgtccaagctttgtcatccttggggaaccagtccagctccacactgctctcttcccccactgctaacctgcggagggtcggtgcagcgccacaaggacacaaacagcaccaccttttaccaatatttgccagtctttatggaggtgcatgccacagcgaattggtcacatgggaacgcatccgtgtaaccagcccccagatgaagggagaggtcacaagcagcccccagggacacctcaggcccacaccccactctcgtgatttctaataccaaggttactgctgcctgcttttgtactttataaatacggacttgcacacctcttactctgttcaacttccttttttgcttccttttaaagggtgattaaaatctgaagcaaagaggccaaagattggaaaccccccacccccacctctttccagaactgcttgaagagaactggttggagttatggaaaagatgccctgtgccaggacagcagttcattgttactgtaaccgattgtattattttgttaaatatttctataaatatttaagagatgtacacatgtgtaatataggaaggaaggatgtaaagtggtatgatctggggcttctccactcctgccccagagtgtggaggccacagtggggcctctccgtatttgtgcattgggctccgtgccacaaccaagcttcattagtcttaaatttcagcatatgttgctgctgcttaaatattgtataatttacttgtataattctatgcaaatattgcttatgtaataggattattttgtaaaggtttctgtttaaaatattttaaatttgcatatcacaaccctgtggtagtatgaaatgttactgttaactttcaaacacgctatgcgtgataatttttttgtttaatgagcagatatgaagaaagcacgttaatcctggtggcttctctaggtgtcgttgtgtgcggtcctcttgtttggctgtgcgtgtgaacacgtgtgtgagttcaccatgtactgtactgtgattttttttttgtcttgttttgtttctctacactgtctgtaacctgtagtaggctctgacctagtcaggctggaagcgtcaggatatcttttcttcgtgctggtgagggctggccctaaacatccacctaatcctttcaaatcagcccggcaaaagctagactctcctcgtgtctacggcatctcttatgatcattggctgccatccaggaccccaatttgtgcttcagggggataatctccttctctcggatcattgtgatggatgctggaacctcagggtatggagctcacatcagttcatcatggtgggtgttagagaattcggtgacatgcctagtgctgagccttggctgggccatgagagtctgtatactctaaaaagcatgcagcatggtgcccctcttctgaccaacacacacacgacccctcccccaacacccccaaattcaagagtggatgtggccctgtcacaggtagaaaaacctatttagttaattctttcttggcccacagtctcccagaaatgatgttttgagtccctatagtttaaactccctctcttaaatggagcagctggttgaggctttctagatctgtttgcatcttctttaaaactaagtggtgagcatgcattgtggtgtagaggcaggcattatgtaggataagagctccggggggattcttcatgcaccagtgtttagggtacgtgcttcctaagtaaatccaaacattgtctccatcctccccgtcattagtgctctttcaatgtgatgtgggaaagcaggaggatggacacaccccactgaaagatgtaggcaggggcaggtctctcaaccaggcatatttttaaaagttgcttctgtactggttctcttcttttgctctgaggtgtgggctccctcatctcgtaaccagagaccagcacatgtcagggaagcacccagtgtcggctccccatccaaatccacaccagcaccttgttacagacaagaagtcagaggaaagggcggggtccctgcagggctgaagcctaagctactgtgaggcgctcacgagtggcagctcctgttactcccttttaaattacctgggaaatcttaacagaaaggtaatgggcccccagaaatacccacagcatagtgacctcagaccctgatactcaccacaaaacttttaagatgctgattgggagccgcttgtggctgctgggtgtgtgtgtgtgtgtgtgcgtgcgtgcgtgtgtgtgtgtctctgctggggaccctggccacccccctgctgctgtcttggtgcctgtcacccacatggtctgccatcctaacacccagctctgctcagaaaacgtcctgcgtggaggagggatgatgcagaattctgaagtcgacttccctctggctcctggcgtgccctcgctcccttcctgagcccagctcgtgttgcgccggaggctgcgcggcccctgatttctgcatggtgtagaactttctccaatagtcacattggcaaagggagaactggggtgggcggggggtggggctggcagggaattagaatttctctctctcttttaatagttttattttgtctgtcctgtttgttcatttggatgttttaatttttaaaaaaaaaaaaactttgctgatatttataattttgtatcataagaatgttttcctctacagtatttgtcatgccagtttataacaaaaaaaaatgcagggattttatttctattggaaacattacagctatgttttacttttggacagaatttttatttgtatagagtgcttactaatgttaaatagttcagagtatataacatttacattaaggactcatggtaggttttagggtaaggagtttaaaggaaataaatattcaaactgggtctcattgccaattttggtggaaatgagtttgtgtcatttcaattacaaagataaaagtatgccatataatttatttatatgaagatttatttttgtagtgtacatagtagtcatcaagtcttttgacagaagtatatttttaaagaatttatatgtgatgaatccataatgtctggaactttgctgagacatgagtgggcacagttttcattgtaaattacagcaaggaaagaaaatgtttaacagtgttaagagagtcagagcagagtggatattcatgcgattatgaagtgtttattagttaccattggcgacctagcatgcttctcatttcaaaccttggaaggtgaaaatgtacaaactctctaaataattaatgttcaaacactgatagaaattctaacatgaataaaaaataatataacttgttggtt

SEQ ID NO: 3010 - DNA, 8049 bp, Homo sapiens
  source 1..8049: mol_type = genomic DNA
acccaggagggctgtgctgatagcacgttcctcgagtttactttgctttccttgagtttattgtaaaggggtaaagttttcggatccgtcacgtgaccctgacaggtcctgcctatggcgcggcagaccacccacgccgagggccatggaactgcttaatagaaacaggcttgtaattgtgagtccgcgctgcactccgccgaaagcctccggcggcccagcgcgccggggtttttacactttccgttccttttgtaaagacggaggaggaggagaagaagaagaagaaaacggaggagaagaaaaagacgacaggggagacaaagagacccgcagcgacaaggcaagggggagacgagggaagactgggagaagacggaggagcggaggacgaggaaaggggggccagggaaaaaaaaggaattgatgtgaaatccaagcccagcgtccgcgccatcggcacccgcgctccgagcaggggttgacggccggctatggggaaggctactggccggaaagcgccgctgtggctgagagcgaagtttcagagactcttatttaaactgggttgttacattcaaaaaaactgcggcaagttcttggttgtgggcctcctcatatttggggccttcgcggtgggattaaaagcagcgaacctcgagaccaacgtggaggagctgtgggtggaagttggaggacgagtaagtcgtgaattaaattatactcgccagaagattggagaagaggctatgtttaatcctcaactcatgatacagacccctaaagaagaaggtgctaatgtcctgaccacagaagcgctcctacaacacctggactcggcactccaggccagccgtgtccatgtatacatgtacaacaggcagtggaaattggaacatttgtgttacaaatcaggagagcttatcacagaaacaggttacatggatcagataatagaatatctttacccttgtttgattattacacctttggactgcttctgggaaggggcgaaattacagtctgggacagcatacctcctaggtaaacctcctttgcggtggacaaacttcgaccctttggaattcctggaagagttaaagaaaataaactatcaagtggacagctgggaggaaatgctgaataaggctgaggttggtcatggttacatggaccgcccctgcctcaatccggccgatccagactgccccgccacagcccccaacaaaaattcaaccaaacctcttgatatggcccttgttttgaatggtggatgtcatggcttatccagaaagtatatgcactggcaggaggagttgattgtgggtggcacagtcaagaacagcactggaaaactcgtcagcgcccatgccctgcagaccatgttccagttaatgactcccaagcaaatgtacgagcacttcaaggggtacgagtatgtctcacacatcaactggaacgaggacaaagcggcagccatcctggaggcctggcagaggacatatgtggaggtggttcatcagagtgtcgcacagaactccactcaaaaggtgctttccttcaccaccacgaccctggacgacatcctgaaatccttctctgacgtcagtgtcatccgcgtggccagcggctacttactcatgctcgcctatgcctgtctaaccatgctgcgctgggactgctccaagtcccagggtgccgtggggctggctggcgtcctgctggttgcactgtcagtggctgcaggactgggcctgtgctcattgatcggaatttcctttaacgctgcaacaactcaggttttgccatttctcgctcttggtgttggtgtggatgatgtttttcttctggcccacgccttcagtgaaacaggacagaataaaagaatcccttttgaggacaggaccggggagtgcctgaagcgcacaggagccagcgtggccctcacgtccatcagcaatgtcacagccttcttcatggccgcgttaatcccaattcccgctctgcgggcgttctccctccaggcagcggtagtagtggtgttcaattttgccatggttctgctcatttttcctgcaattctcagcatggatttatatcgacgcgaggacaggagactggatattttctgctgttttacaagcccctgcgtcagcagagtgattcaggttgaacctcaggcctacaccgacacacacgacaatacccgctacagccccccacctccctacagcagccacagctttgcccatgaaacgcagattaccatgcagtccactgtccagctccgcacggagtacgacccccacacgcacgtgtactacaccaccgctgagccgcgctccgagatctctgtgcagcccgtcaccgtgacacaggacaccctcagctgccagagcccagagagcaccagctccacaagggacctgctctcccagttctccgactccagcctccactgcctcgagcccccctgtacgaagtggacactctcatcttttgctgagaagcactatgctcctttcctcttgaaaccaaaagccaaggtagtggtgatcttcctttttctgggcttgctgggggtcagcctttatggcaccacccgagtgagagacgggctggaccttacggacattgtacctcgggaaaccagagaatatgactttattgctgcacaattcaaatacttttctttctacaacatgtatatagtcacccagaaagcagactacccgaatatccagcacttactttacgacctacacaggagtttcagtaacgtgaagtatgtcatgttggaagaaaacaaacagcttcccaaaatgtggctgcactacttcagagactggcttcagggacttcaggatgcatttgacagtgactgggaaaccgggaaaatcatgccaaacaattacaagaatggatcagacgatggagtccttgcctacaaactcctggtgcaaaccggcagccgcgataagcccatcgacatcagccagttgactaaacagcgtctggtggatgcagatggcatcattaatcccagcgctttctacatctacctgacggcttgggtcagcaacgaccccgtcgcgtatgctgcctcccaggccaacatccggccacaccgaccagaatgggtccacgacaaagccgactacatgcctgaaacaaggctgagaatcccggcagcagagcccatcgagtatgcccagttccctttctacctcaacggcttgcgggacacctcagactttgtggaggcaattgaaaaagtaaggaccatctgcagcaactatacgagcctggggctgtccagttaccccaacggctaccccttcctcttctgggagcagtacatcggcctccgccactggctgctgctgttcatcagcgtggtgttggcctgcacattcctcgtgtgcgctgtcttccttctgaacccctggacggccgggatcattgtgatggtcctggcgctgatgacggtcgagctgttcggcatgatgggcctcatcggaatcaagctcagtgccgtgcccgtggtcatcctgatcgcttctgttggcataggagtggagttcaccgttcacgttgctttggcctttctgacggccatcggcgacaagaaccgcagggctgtgcttgccctggagcacatgtttgcacccgtcctggatggcgccgtgtccactctgctgggagtgctgatgctggcgggatctgagttcgacttcattgtcaggtatttctttgctgtgctggcgatcctcaccatcctcggcgttctcaatgggctggttttgcttcccgtgcttttgtctttctttggaccatatcctgaggtgtctccagccaacggcttgaaccgcctgcccacaccctcccctgagccaccccccagcgtggtccgcttcgccatgccgcccggccacacgcacagcgggtctgattcctccgactcggagtatagttcccagacgacagtgtcaggcctcagcgaggagcttcggcactacgaggcccagcagggcgcgggaggccctgcccaccaagtgatcgtggaagccacagaaaaccccgtcttcgcccactccactgtggtccatcccgaatccaggcatcacccaccctcgaacccgagacagcagccccacctggactcagggtccctgcctcccggacggcaaggccagcagccccgcagggacccccccagagaaggcttgtggccacccccctacagaccgcgcagagacgcttttgaaatttctactgaagggcattctggccctagcaatagggcccgctggggccctcgcggggcccgttctcacaaccctcggaacccagcgtccactgccatgggcagctccgtgcccggctactgccagcccatcaccactgtgacggcttctgcctccgtgactgtcgccgtgcacccgccgcctgtccctgggcctgggcggaacccccgagggggactctgcccaggctaccctgagactgaccacggcctgtttgaggacccccacgtgcctttccacgtccggtgtgagaggagggattcgaaggtggaagtcattgagctgcaggacgtggaatgcgaggagaggccccggggaagcagctccaactgagggtgattaaaatctgaagcaaagaggccaaagattggaaaccccccacccccacctctttccagaactgcttgaagagaactggttggagttatggaaaagatgccctgtgccaggacagcagttcattgttactgtaaccgattgtattattttgttaaatatttctataaatatttaagagatgtacacatgtgtaatataggaaggaaggatgtaaagtggtatgatctggggcttctccactcctgccccagagtgtggaggccacagtggggcctctccgtatttgtgcattgggctccgtgccacaaccaagcttcattagtcttaaatttcagcatatgttgctgctgcttaaatattgtataatttacttgtataattctatgcaaatattgcttatgtaataggattattttgtaaaggtttctgtttaaaatattttaaatttgcatatcacaaccctgtggtagtatgaaatgttactgttaactttcaaacacgctatgcgtgataatttttttgtttaatgagcagatatgaagaaagcacgttaatcctggtggcttctctaggtgtcgttgtgtgcggtcctcttgtttggctgtgcgtgtgaacacgtgtgtgagttcaccatgtactgtactgtgattttttttttgtcttgttttgtttctctacactgtctgtaacctgtagtaggctctgacctagtcaggctggaagcgtcaggatatcttttcttcgtgctggtgagggctggccctaaacatccacctaatcctttcaaatcagcccggcaaaagctagactctcctcgtgtctacggcatctcttatgatcattggctgccatccaggaccccaatttgtgcttcagggggataatctccttctctcggatcattgtgatggatgctggaacctcagggtatggagctcacatcagttcatcatggtgggtgttagagaattcggtgacatgcctagtgctgagccttggctgggccatgagagtctgtatactctaaaaagcatgcagcatggtgcccctcttctgaccaacacacacacgacccctcccccaacacccccaaattcaagagtggatgtggccctgtcacaggtagaaaaacctatttagttaattctttcttggcccacagtctcccagaaatgatgttttgagtccctatagtttaaactccctctcttaaatggagcagctggttgaggctttctagatctgtttgcatcttctttaaaactaagtggtgagcatgcattgtggtgtagaggcaggcattatgtaggataagagctccggggggattcttcatgcaccagtgtttagggtacgtgcttcctaagtaaatccaaacattgtctccatcctccccgtcattagtgctctttcaatgtgatgtgggaaagcaggaggatggacacaccccactgaaagatgtaggcaggggcaggtctctcaaccaggcatatttttaaaagttgcttctgtactggttctcttcttttgctctgaggtgtgggctccctcatctcgtaaccagagaccagcacatgtcagggaagcacccagtgtcggctccccatccaaatccacaccagcaccttgttacagacaagaagtcagaggaaagggcggggtccctgcagggctgaagcctaagctactgtgaggcgctcacgagtggcagctcctgttactcccttttaaattacctgggaaatcttaacagaaaggtaatgggcccccagaaatacccacagcatagtgacctcagaccctgatactcaccacaaaacttttaagatgctgattgggagccgcttgtggctgctgggtgtgtgtgtgtgtgtgtgcgtgcgtgcgtgtgtgtgtgtctctgctggggaccctggccacccccctgctgctgtcttggtgcctgtcacccacatggtctgccatcctaacacccagctctgctcagaaaacgtcctgcgtggaggagggatgatgcagaattctgaagtcgacttccctctggctcctggcgtgccctcgctcccttcctgagcccagctcgtgttgcgccggaggctgcgcggcccctgatttctgcatggtgtagaactttctccaatagtcacattggcaaagggagaactggggtgggcggggggtggggctggcagggaattagaatttctctctctcttttaatagttttattttgtctgtcctgtttgttcatttggatgttttaatttttaaaaaaaaaaaaactttgctgatatttataattttgtatcataagaatgttttcctctacagtatttgtcatgccagtttataacaaaaaaaaatgcagggattttatttctattggaaacattacagctatgttttacttttggacagaatttttatttgtatagagtgcttactaatgttaaatagttcagagtatataacatttacattaaggactcatggtaggttttagggtaaggagtttaaaggaaataaatattcaaactgggtctcattgccaattttggtggaaatgagtttgtgtcatttcaattacaaagataaaagtatgccatataatttatttatatgaagatttatttttgtagtgtacatagtagtcatcaagtcttttgacagaagtatatttttaaagaatttatatgtgatgaatccataatgtctggaactttgctgagacatgagtgggcacagttttcattgtaaattacagcaaggaaagaaaatgtttaacagtgttaagagagtcagagcagagtggatattcatgcgattatgaagtgtttattagttaccattggcgacctagcatgcttctcatttcaaaccttggaaggtgaaaatgtacaaactctctaaataattaatgttcaaacactgatagaaattctaacatgaataaaaaataatataacttgttggttatatctttgtttgtagaatgctttttttctttaaaatacttgggagagacagttagtgttggagccatcagaaactgttgtttcatcttgctgaccttgtgacactcttcttttttgctctatctgatggagagagttttaggttttcctcctttttgttttgtataaatagtgggtataagcatagctctgttacatggatgtattacaaagtgggggctgagcttttagtgtgatcatcacccaaatagtgtacattgtacccattaattaatttcttatcacctgaccctatttttgttttctcataccaagaaacttcctaagttaaccatcaaaattagtccttctgtcatctctcttagcatacttatttcccttatgtgatgcctaataatgagggaacataaataaagccaaattcaaag

SEQ ID NO: 3011 - DNA, 919 bp, Homo sapiens
  source 1..919: mol_type = genomic DNA
acccaggagggctgtgctgatagcacgttcctcgagtttactttgctttccttgagtttattgtaaaggggtaaagttttcggatccgtcacgtgaccctgacaggtcctgcctatggcgcggcagaccacccacgccgagggccatggaactgcttaatagaaacaggcttgtaattgtgagtccgcgctgcactccgccgaaagcctccggcggcccagcgcgccggggtttttacactttccgttccttttgtaaagacggaggaggaggagaagaagaagaagaaaacggaggagaagaaaaagacgacaggggagacaaagagacccgcagcgacaaggcaagggggagacgagggaagactgggagaagacggaggagcggaggacgaggaaaggggggccagggaaaaaaaaggaattgatgtgaaatccaagcccagcgtccgcgccatcggcacccgcgctccgagcaggggttgacggccggctatggggaaggctactggccggaaagcgccgctgtggctgagagcgaagtttcagagactcttatttaaactgggttgttacattcaaaaaaactgcggcaagttcttggttgtgggcctcctcatatttggggccttcgcggtgggattaaaagcagcgaacctcgagaccaacgtggaggagctgtgggtggaagaggtaaacctcctttgcggtggacaaacttcgaccctttggaattcctggaagagttaaagaaaataaactatcaagtggacagctgggaggaaatgctgaataaggctgaggttggtcatggttacatggaccgcccctgcctcaatccggccgatccagactgccccgccacagcccccaacaaaaattcaaccaaacctcttgatatggcccttgttttgaatggt

SEQ ID NO: 3012 - DNA, 864 bp, Homo sapiens
  source 1..864: mol_type = genomic DNA
actcacacctctccaggaaaagcagcagacaaatggggattgaaaaattcaaaccctccctctggtcctgggaggaaagggctgtctgaggggaaggctactggccggaaagcgccgctgtggctgagagcgaagtttcagagactcttatttaaactgggttgttacattcaaaaaaactgcggcaagttcttggttgtgggcctcctcatatttggggccttcgcggtgggattaaaagcagcgaacctcgagaccaacgtggaggagctgtgggtggaagttggaggacgagtaagtcgtgaattaaattatactcgccagaagattggagaagaggctatgtttaatcctcaactcatgatacagacccctaaagaagaaggtgctaatgtcctgaccacagaagcgctcctacaacacctggactcggcactccaggccagccgtgtccatgtatacatgtacaacaggcagtggaaattggaacatttgtgttacaaatcaggagagcttatcacagaaacaggttacatggatcagataatagaatatctttacccttgtttgattattacacctttggactgcttctgggaaggggcgaaattacagtctgggacagcatacctcctaggtaaacctcctttgcggtggacaaacttcgaccctttggaattcctggaagagttaaagaaaataaactatcaagtggacagctgggaggaaatgctgaataaggctgaggttggtcatggttacatggaccgcccctgcctcaatccggccgatccagactgccccgccacagcccccaacaaaaattcaaccaaacctcttgatatggcccttgttttgaatggt

SEQ ID NO: 3013 - DNA, 881 bp, Homo sapiens
  source 1..881: mol_type = genomic DNA
actcacacctctccaggaaaagcagcagacaaatggggattgaaaaattcaaaccctccctctggtcctgggaggaaagggctgtctgaggtccgcagggggtggaggggaaggctactggccggaaagcgccgctgtggctgagagcgaagtttcagagactcttatttaaactgggttgttacattcaaaaaaactgcggcaagttcttggttgtgggcctcctcatatttggggccttcgcggtgggattaaaagcagcgaacctcgagaccaacgtggaggagctgtgggtggaagttggaggacgagtaagtcgtgaattaaattatactcgccagaagattggagaagaggctatgtttaatcctcaactcatgatacagacccctaaagaagaaggtgctaatgtcctgaccacagaagcgctcctacaacacctggactcggcactccaggccagccgtgtccatgtatacatgtacaacaggcagtggaaattggaacatttgtgttacaaatcaggagagcttatcacagaaacaggttacatggatcagataatagaatatctttacccttgtttgattattacacctttggactgcttctgggaaggggcgaaattacagtctgggacagcatacctcctaggtaaacctcctttgcggtggacaaacttcgaccctttggaattcctggaagagttaaagaaaataaactatcaagtggacagctgggaggaaatgctgaataaggctgaggttggtcatggttacatggaccgcccctgcctcaatccggccgatccagactgccccgccacagcccccaacaaaaattcaaccaaacctcttgatatggcccttgttttgaatggt

SEQ ID NO: 3014 - DNA, 539 bp, Homo sapiens
  source 1..539: mol_type = genomic DNA
ttcgtccccaggggaaggctactggccggaaagcgccgctgtggctgagagcgaagtttcagagactcttatttaaactgggttgttacattcaaaaaaactgcggcaagttcttggttgtgggcctcctcatatttggggccttcgcggtgggattaaaagcagcgaacctcgagaccaacgtggaggagctgtgggtggaagttggaggacgagtaagtcgtgaattaaattatactcgccagaagattggagaagaggctatgtttaatcctcaactcatgatacagacccctaaagaagaaggtgctaatgtcctgaccacagaagcgctcctacaacacctggactcggcactccaggccagccgtgtccatgtatacatgtacaacaggcagtggaaattggaacatttgtgttacaaatcaggagagcttatcacagaaacaggttacatggatcagataatagaatatctttacccttgtttgattattacacctttggactgcttctgggaaggggcgaaattacagtct

SEQ ID NO: 3015 - DNA, 809 bp, Homo sapiens
  source 1..809: mol_type = genomic DNA
atccatgtggctgccctcttccgatcacaaatattgggaaggctactggccggaaagcgccgctgtggctgagagcgaagtttcagagactcttatttaaactgggttgttacattcaaaaaaactgcggcaagttcttggttgtgggcctcctcatatttggggccttcgcggtgggattaaaagcagcgaacctcgagaccaacgtggaggagctgtgggtggaagttggaggacgagtaagtcgtgaattaaattatactcgccagaagattggagaagaggctatgtttaatcctcaactcatgatacagacccctaaagaagaaggtgctaatgtcctgaccacagaagcgctcctacaacacctggactcggcactccaggccagccgtgtccatgtatacatgtacaacaggcagtggaaattggaacatttgtgttacaaatcaggagagcttatcacagaaacaggttacatggatcagataatagaatatctttacccttgtttgattattacacctttggactgcttctgggaaggggcgaaattacagtctgggacagcatacctcctaggtaaacctcctttgcggtggacaaacttcgaccctttggaattcctggaagagttaaagaaaataaactatcaagtggacagctgggaggaaatgctgaataaggctgaggttggtcatggttacatggaccgcccctgcctcaatccggccgatccagactgccccgccacagcccccaacaaaaattcaaccaaacctcttgatatggcccttgttttgaatggt

SEQ ID NO: 3016 - DNA, 1037 bp, Homo sapiens
  source 1..1037: mol_type = genomic DNA
aattcagctcacacagcctctccccacgctatggaaatgcgtcgggagtgaactccggcggccgcgctcaccacgtggatccccacttactaccattctcggcgggggtccagttgggggaacccgcaatatgttgttccaaagagcgctcgcccctagcgcccgtccccgagggtgatggacagagcaggactggtttgctggctcctgaaccttgggctccatcgctgggattacgcagcccctcccttctcagctctggggggaaggctactggccggaaagcgccgctgtggctgagagcgaagtttcagagactcttatttaaactgggttgttacattcaaaaaaactgcggcaagttcttggttgtgggcctcctcatatttggggccttcgcggtgggattaaaagcagcgaacctcgagaccaacgtggaggagctgtgggtggaagttggaggacgagtaagtcgtgaattaaattatactcgccagaagattggagaagaggctatgtttaatcctcaactcatgatacagacccctaaagaagaaggtgctaatgtcctgaccacagaagcgctcctacaacacctggactcggcactccaggccagccgtgtccatgtatacatgtacaacaggcagtggaaattggaacatttgtgttacaaatcaggagagcttatcacagaaacaggttacatggatcagataatagaatatctttacccttgtttgattattacacctttggactgcttctgggaaggggcgaaattacagtctgggacagcatacctcctaggtaaacctcctttgcggtggacaaacttcgaccctttggaattcctggaagagttaaagaaaataaactatcaagtggacagctgggaggaaatgctgaataaggctgaggttggtcatggttacatggaccgcccctgcctcaatccggccgatccagactgccccgccacagcccccaacaaaaattcaaccaaacctcttgatatggcccttgttttgaatggt

SEQ ID NO: 3017 - DNA, 3785 bp, Homo sapiens
  source 1..3785: mol_type = genomic DNA
ggcgggcgcgggcgcgggcgcgcgcggcggcggcgcgttccgttccgggccgaggctcgcggcggaaaagttgcggggcatagacgagcggccccgggacgggcagctagcgcgaccctgagccggcgcccgtggtccggccatggacgacctcgacgccctgctggcggacttggagtctaccacctcccacatctccaaacggcctgtgttcttgtcggaggagaccccctactcatacccaactggaaaccacacataccaggagattgccgtgccaccccccgtccccccacccccgtccagcgaggccctcaatggcacaatccttgaccccttagaccagtggcagcccagcagctcccgattcatccaccagcagcctcagtcctcatcacctgtgtacggctccagtgccaaaacttccagtgtctccaaccctcaggacagtgttggctctccgtgctcccgagtgggtgaggaggagcacgtctacagcttccccaacaagcagaaatcagctgagccttcacccaccgtaatgagcacgtccctgggcagcaacctttctgaactcgaccgcctgctgctggaactgaacgctgtacagcataacccgccaggcttccctgcagatgaggccaactcaagccccccgcttcctggggccctgagccccctctatggtgtcccagagactaacagccccttgggaggcaaagctgggcccctgacgaaagagaagcctaagcggaatgggggccggggcctggaggacgtgcggcccagtgtggagagtctcttggatgaactggagagctccgtgcccagccccgtccctgccatcactgtgaaccagggcgagatgagcagcccgcagcgcgtcacctccacccaacagcagacacgcatctcggcctcctctgccaccagggagctggacgagctgatggcttcgctgtcggatttcaagatccagggcctggagcaaagagcggatggggagcggtgctgggcggccggctggcctcgggacggcgggcggagcagccccggagggcaggacgagggagggttcatggcccaggggaagacagggagcagctcaccccctggggggcccccgaagcccgggagccagctggacagcatgctggggagcctgcagtctgacctgaacaagctgggggtcgccacagtcgccaaaggagtctgcggggcctgcaagaagcccatcgccgggcaggttgtgaccgccatggggaagacgtggcaccccgagcacttcgtctgcacccactgccaggaggagatcggatcccggaacttcttcgagcgggatggacagccctactgtgaaaaggactaccacaacctcttctccccgcgctgctactactgcaacggccccatcctggataaagtggtgacagcccttgaccggacgtggcaccctgaacacttcttctgtgcacagtgtggagccttctttggtcccgaagggttccacgagaaggacggcaaggcctactgtcgcaaggactacttcgacatgttcgcacccaagtgtggcggctgcgcccgggccatcctggagaactatatctcagccctcaacacgctgtggcatcctgagtgctttgtgtgccgggaatgcttcacgccattcgtgaacggcagcttcttcgagcacgacgggcagccctactgtgaggtgcactaccacgagcggcgcggctcgctgtgttctggctgccagaagcccatcaccggccgctgcatcaccgccatggccaagaagttccaccccgagcacttcgtctgtgccttctgcctcaagcagctcaacaagggcaccttcaaggagcagaacgacaagccttactgtcagaactgcttcctcaagctcttctgctaggtgccctgcccctgtctctgccccccttccccagccagcatccccaactgcgactgtgacctagagacttcacccgggggtgaaggggtaaacccgactgaaactggaacccttgtcctccgctggtgcgggatggacagagggccgtgaggggtccccctgcttgtcttcacccctgccagagcctctgggccccctcctccctcctgtagctctccctaggctgcccactctccatcctccccaggggtagaggctgggggctccaccccagcccatgtacgtccccacgaactggcctggccagcaccccacactggagccatctcttcctcatatttcagcagtgcagccggggggcagggaagggcaggcagggtctgttggggtctctttttatccttattcctcccccgacctaattgtctttgttctgtgattattgggggacacccggctccctccagacaatgccagcataaatccatccatccaaaggcagagaaccaaaggggccatggaaggttctctgtgctcctcctacccttccagtgccctaggcctggcgactgcccctgccttttagacccgccctccccttttatacctgctcttgttctactgagaaaagcctctccagcaataatgttttctagtcacttcctccgtctccgggacggcgtgcctggacactgtaccgactttgatagatttctacactgaggtttgaattcatatcgcctgagttgcttttacttctctatacaaaatgattttgaagagattttaaagacgttcccttttgtattctcttcctcatccaccgccactgggcctgtcactgatggtggctctggtgtgaagtttgctttgtactgagggttggggtggggaagcaatttgtattttattgtttcttagcacaagcaggtgaactgggagcagctctgtgactccccctctttcacttcatagctcaccaggactgttttataaactgctgtatttggaaaccccttctttacttcccaggccagcaagctcttcactgaaactggttgaagggtgttgcacccttttgggcctagaattctgaactttatctgttctgtttctgtgggaggagaaggggaagtatgttttggggggctgcttcctgtctgagtaagccctcaggagcctctgctcccctgtgaacccactgaaccttctgagcccccactgcttctatggggctctctcttctgccttctcaggaaagctggtgtctgattttggccatcaggactctgacgtctctttggtcttgttgatttcctctgggcatatcccttccccagatctgctcctcccctttcacaggtgggatcggcactcagggggtctggaaagaaggtcataagggagcatgataggatttggggcagagggacaggctcctctggggaaaccccccagagctctttaccaaggatgaaagaggagccaggccttgggctcctgatgaggagaaaggggccccaccggggtctaatggtgacagtccaaaccactccactggcctcctggcagaagccgagtgtgctggggtctccgaagagggtccctcctttttgggggaaggtcagcccagcccctccaaaggtctgatgtctccactttcacccgcaggccttaccgctctgtttatagtgacccaccctagatcttccccaagagggactggggtttctggggtccattctctgagtcagtggttatttgaaaatttgattttgattttattttttctctgtaaacttccaagctggcttttcccatttcaattcctgtgatttatgccaataaagtttgcccatgattttca

SEQ ID NO: 3018 - DNA, 3815 bp, Homo sapiens
  source 1..3815: mol_type = genomic DNA
gcgcgggcgcgcgcggcggcggcgcgttccgttccgggccgaggctcgcggcggaaaagttgcggggcatagacgagcggccccgggacgggcagctagcgcgaccctgagccggcgcccgtggtccggccatggacgacctcgacgccctgctggcggacttggagtctaccacctcccacatctccaaacggcctgtgttcttgtcggaggagaccccctactcatacccaactggaaaccacacataccaggagattgccgtgccaccccccgtccccccacccccgtccagcgaggccctcaatggcacaatccttgaccccttagaccagtggcagcccagcagctcccgattcatccaccagcagcctcagtcctcatcacctgtgtacggctccagtgccaaaacttccagtgtctccaaccctcaggacagtgttggctctccgtgctcccgagtgggtgaggaggagcacgtctacagcttccccaacaagcagaaatcagctgagccttcacccaccgtaatgagcacgtccctgggcagcaacctttctgaactcgaccgcctgctgctggaactgaacgctgtacagcataacccgccaggcttccctgcagatgaggccaactcaagccccccgcttcctggggccctgagccccctctatggtgtcccagagactaacagccccttgggaggcaaagctgggcccctgacgaaagagaagcctaagcggaatgggggccggggcctggaggacgtgcggcccagtgtggagagtctcttggatgaactggagagctccgtgcccagccccgtccctgccatcactgtgaaccagggcgagatgagcagcccgcagcgcgtcacctccacccaacagcagacacgcatctcggcctcctctgccaccagggagctggacgagctgatggcttcgctgtcggatttcaagggctcctggcccctggaggaggttgtacttcttgtctccatcagctcatctgtccaggagggagaaaagtacccccatccctgtgctgccagacaccgtaccccgagcctcaggagtcctgaccagccccctccgtgtccacagttcatggcccaggggaagacagggagcagctcaccccctggggggcccccgaagcccgggagccagctggacagcatgctggggagcctgcagtctgacctgaacaagctgggggtcgccacagtcgccaaaggagtctgcggggcctgcaagaagcccatcgccgggcaggttgtgaccgccatggggaagacgtggcaccccgagcacttcgtctgcacccactgccaggaggagatcggatcccggaacttcttcgagcgggatggacagccctactgtgaaaaggactaccacaacctcttctccccgcgctgctactactgcaacggccccatcctggataaagtggtgacagcccttgaccggacgtggcaccctgaacacttcttctgtgcacagtgtggagccttctttggtcccgaagggttccacgagaaggacggcaaggcctactgtcgcaaggactacttcgacatgttcgcacccaagtgtggcggctgcgcccgggccatcctggagaactatatctcagccctcaacacgctgtggcatcctgagtgctttgtgtgccgggaatgcttcacgccattcgtgaacggcagcttcttcgagcacgacgggcagccctactgtgaggtgcactaccacgagcggcgcggctcgctgtgttctggctgccagaagcccatcaccggccgctgcatcaccgccatggccaagaagttccaccccgagcacttcgtctgtgccttctgcctcaagcagctcaacaagggcaccttcaaggagcagaacgacaagccttactgtcagaactgcttcctcaagctcttctgctaggtgccctgcccctgtctctgccccccttccccagccagcatccccaactgcgactgtgacctagagacttcacccgggggtgaaggggtaaacccgactgaaactggaacccttgtcctccgctggtgcgggatggacagagggccgtgaggggtccccctgcttgtcttcacccctgccagagcctctgggccccctcctccctcctgtagctctccctaggctgcccactctccatcctccccaggggtagaggctgggggctccaccccagcccatgtacgtccccacgaactggcctggccagcaccccacactggagccatctcttcctcatatttcagcagtgcagccggggggcagggaagggcaggcagggtctgttggggtctctttttatccttattcctcccccgacctaattgtctttgttctgtgattattgggggacacccggctccctccagacaatgccagcataaatccatccatccaaaggcagagaaccaaaggggccatggaaggttctctgtgctcctcctacccttccagtgccctaggcctggcgactgcccctgccttttagacccgccctccccttttatacctgctcttgttctactgagaaaagcctctccagcaataatgttttctagtcacttcctccgtctccgggacggcgtgcctggacactgtaccgactttgatagatttctacactgaggtttgaattcatatcgcctgagttgcttttacttctctatacaaaatgattttgaagagattttaaagacgttcccttttgtattctcttcctcatccaccgccactgggcctgtcactgatggtggctctggtgtgaagtttgctttgtactgagggttggggtggggaagcaatttgtattttattgtttcttagcacaagcaggtgaactgggagcagctctgtgactccccctctttcacttcatagctcaccaggactgttttataaactgctgtatttggaaaccccttctttacttcccaggccagcaagctcttcactgaaactggttgaagggtgttgcacccttttgggcctagaattctgaactttatctgttctgtttctgtgggaggagaaggggaagtatgttttggggggctgcttcctgtctgagtaagccctcaggagcctctgctcccctgtgaacccactgaaccttctgagcccccactgcttctatggggctctctcttctgccttctcaggaaagctggtgtctgattttggccatcaggactctgacgtctctttggtcttgttgatttcctctgggcatatcccttccccagatctgctcctcccctttcacaggtgggatcggcactcagggggtctggaaagaaggtcataagggagcatgataggatttggggcagagggacaggctcctctggggaaaccccccagagctctttaccaaggatgaaagaggagccaggccttgggctcctgatgaggagaaaggggccccaccggggtctaatggtgacagtccaaaccactccactggcctcctggcagaagccgagtgtgctggggtctccgaagagggtccctcctttttgggggaaggtcagcccagcccctccaaaggtctgatgtctccactttcacccgcaggccttaccgctctgtttatagtgacccaccctagatcttccccaagagggactggggtttctggggtccattctctgagtcagtggttatttgaaaatttgattttgattttattttttctctgtaaacttccaagctggcttttcccatttcaattcctgtgatttatgccaataaagtttgcccatgattttc

SEQ ID NO: 3019 - DNA, 1847 bp, Homo sapiens
  source 1..1847: mol_type = genomic DNA
gcgcgggcgcgcgcggcggcggcgcgttccgttccgggccgaggctcgcggcggaaaagttgcggggcatagacgagcggccccgggacgggcagctagcgcgaccctgagccggcgcccgtggtccggccatggacgacctcgacgccctgctggcggacttggagtctaccacctcccacatctccaaacggcctgtgttcttgtcggaggagaccccctactcatacccaactggaaaccacacataccaggagattgccgtgccaccccccgtccccccacccccgtccagcgaggccctcaatggcacaatccttgaccccttagaccagtggcagcccagcagctcccgattcatccaccagcagcctcagtcctcatcacctgtgtacggctccagtgccaaaacttccagtgtctccaaccctcaggacagtgttggctctccgtgctcccgagtgggtgaggaggagcacgtctacagcttccccaacaagcagaaatcagctgagccttcacccaccgtaatgagcacgtccctgggcagcaacctttctgaactcgaccgcctgctgctggaactgaacgctgtacagcataacccgccaggcttccctgcagatgaggccaactcaagccccccgcttcctggggccctgagccccctctatggtgtcccagagactaacagccccttgggaggcaaagctgggcccctgacgaaagagaagcctaagcggaatgggggccggggcctggaggacgtgcggcccagtgtggagagtctcttggatgaactggagagctccgtgcccagccccgtccctgccatcactgtgaaccagggcgagatgagcagcccgcagcgcgtcacctccacccaacagcagacacgcatctcggcctcctctgccaccagggagctggacgagctgatggcttcgctgtcggatttcaagttcatggcccaggggaagacagggagcagctcaccccctggggggcccccgaagcccgggagccagctggacagcatgctggggagcctgcagtctgacctgaacaagctgggggtcgccacagtcgccaaaggagtctgcggggcctgcaagaagcccatcgccgggcaggttgtgaccgccatggggaagacgtggcaccccgagcacttcgtctgcacccactgccaggaggagatcggatcccggaacttcttcgagcgggatggacagccctactgtgaaaaggactaccacaacctcttctccccgcgctgctactactgcaacggccccatcctggataaagtggtgacagcccttgaccggacgtggcaccctgaacacttcttctgtgcacagtgtggagccttctttggtcccgaagggttccacgagaaggacggcaaggcctactgtcgcaaggactacttcgacatgttcgcacccaagtgtggcggctgcgcccgggccatcctggagaactatatctcagccctcaacacgctgtggcatcctgagtgctttgtgtgccgggaatgcttcacgccattcgtgaacggcagcttcttcgagcacgacgggcagccctactgtgaggtgcactaccacgagcggcgcggctcgctgtgttctggctgccagaagcccatcaccggccgctgcatcaccgccatggccaagaagttccaccccgacccatgtacgtccccacgaactggcctggccagcaccccacactggagccatctcttcctcatatttcagcagtgcagccggggggcagggaagggcaggcagggtctgttggggtctctttttatccttattcctcccccgacctaa

SEQ ID NO: 3020 - DNA, 4132 bp, Homo sapiens
  source 1..4132: mol_type = genomic DNA
gatgaccgagaggggaagtgtggccaggccaacccagggacctgaaaccccaaggagcccagagggcaccacggaagctgccacccaggacgggaaggaacagccagagcttccatgtgccatggccatgggcacacccagcaccacggagaggatttccacctctggccagatccgatctgtgatcaggaggagctgggagtctggccacgcacaccccatgtcccgggagccctcccctcgccgccggctggaccctgccaccttgagcaggaccccatcccaggaacagctcatcgcggagctgcaggggcggctgggcatccagcctgaggcagaggagccggcggaggcggcggggccctctgcccaggactggctgaccgagggcgtcatcatcactgtgcagccacgtgggaagcgggccggggggcagctcgtagagaaggtggcgaggagatgcccatggctggggctgggccagagccaagcacctggggtccgggttcttccctggccccagtgctggccggaggggagatctggggagagggtgggggtttcttgcctcctgtgactttggaagactggccccactcttggtgcagagtgggaaggcccagggggagcctggggaggtcccgccacccctgtgggctgagctggcgatttcttcctcatcgctctccctcctttcttctccccaggttgtcttccctcctggctctcccattcccctgagaagaaccatctctgtcctggcttctccttctgtccctttgctccagcatcgcacagacgccgcggccagcagctcttctcccctgcccagcctgctcgcctcctcccccctggggccctcagcttatacctgtggttcttctggggtccagagtgcaggggaagagccccatgatgagggggtgcagggccctgcccttcccattcctgcaccccacaccatgaggtccgtgggctgccagactgatgaggacccgctcttccccccgatgcagaaggtccgctgccctcttgcttttctgtgggtccacccatgtctgctccttcctcgactggtcctcagtactgccccgggctcccatcgaggaaagaagccactccagaagggagaccagaaacctgtctcctcccttccagcccccaggcccagcgcccgatccagggcctggagcaaagagcggatggggagcggtgctgggcggccggctggcctcgggacggcgggcggagcagccccggagggcaggacgagggagggggctcctggcccctggaggaggttgtacttcttgtctccatcagctcatctgtccaggagggagaaaagtacccccatccctgtgctgccagacaccgtaccccgagcctcaggagtcctgaccagccccctccgtgtccacagttcatggcccaggggaagacagggagcagctcaccccctggggggcccccgaagcccgggagccagctggacagcatgctggggagcctgcagtctgacctgaacaagctgggggtcgccacagtcgccaaaggagtctgcggggcctgcaagaagcccatcgccgggcaggttgtgaccgccatggggaagacgtggcaccccgagcacttcgtctgcacccactgccaggaggagatcggatcccggaacttcttcgagcgggatggacagccctactgtgaaaaggactaccacaacctcttctccccgcgctgctactactgcaacggccccatcctggataaagtggtgacagcccttgaccggacgtggcaccctgaacacttcttctgtgcacagtgtggagccttctttggtcccgaagggttccacgagaaggacggcaaggcctactgtcgcaaggactacttcgacatgttcgcacccaagtgtggcggctgcgcccgggccatcctggagaactatatctcagccctcaacacgctgtggcatcctgagtgctttgtgtgccgggaatgcttcacgccattcgtgaacggcagcttcttcgagcacgacgggcagccctactgtgaggtgcactaccacgagcggcgcggctcgctgtgttctggctgccagaagcccatcaccggccgctgcatcaccgccatggccaagaagttccaccccgagcacttcgtctgtgccttctgcctcaagcagctcaacaagggcaccttcaaggagcagaacgacaagccttactgtcagaactgcttcctcaagctcttctgctaggtgccctgcccctgtctctgccccccttccccagccagcatccccaactgcgactgtgacctagagacttcacccgggggtgaaggggtaaacccgactgaaactggaacccttgtcctccgctggtgcgggatggacagagggccgtgaggggtccccctgcttgtcttcacccctgccagagcctctgggccccctcctccctcctgtagctctccctaggctgcccactctccatcctccccaggggtagaggctgggggctccaccccagcccatgtacgtccccacgaactggcctggccagcaccccacactggagccatctcttcctcatatttcagcagtgcagccggggggcagggaagggcaggcagggtctgttggggtctctttttatccttattcctcccccgacctaattgtctttgttctgtgattattgggggacacccggctccctccagacaatgccagcataaatccatccatccaaaggcagagaaccaaaggggccatggaaggttctctgtgctcctcctacccttccagtgccctaggcctggcgactgcccctgccttttagacccgccctccccttttatacctgctcttgttctactgagaaaagcctctccagcaataatgttttctagtcacttcctccgtctccgggacggcgtgcctggacactgtaccgactttgatagatttctacactgaggtttgaattcatatcgcctgagttgcttttacttctctatacaaaatgattttgaagagattttaaagacgttcccttttgtattctcttcctcatccaccgccactgggcctgtcactgatggtggctctggtgtgaagtttgctttgtactgagggttggggtggggaagcaatttgtattttattgtttcttagcacaagcaggtgaactgggagcagctctgtgactccccctctttcacttcatagctcaccaggactgttttataaactgctgtatttggaaaccccttctttacttcccaggccagcaagctcttcactgaaactggttgaagggtgttgcacccttttgggcctagaattctgaactttatctgttctgtttctgtgggaggagaaggggaagtatgttttggggggctgcttcctgtctgagtaagccctcaggagcctctgctcccctgtgaacccactgaaccttctgagcccccactgcttctatggggctctctcttctgccttctcaggaaagctggtgtctgattttggccatcaggactctgacgtctctttggtcttgttgatttcctctgggcatatcccttccccagatctgctcctcccctttcacaggtgggatcggcactcagggggtctggaaagaaggtcataagggagcatgataggatttggggcagagggacaggctcctctggggaaaccccccagagctctttaccaaggatgaaagaggagccaggccttgggctcctgatgaggagaaaggggccccaccggggtctaatggtgacagtccaaaccactccactggcctcctggcagaagccgagtgtgctggggtctccgaagagggtccctcctttttgggggaaggtcagcccagcccctccaaaggtctgatgtctccactttcacccgcaggccttaccgctctgtttatagtgacccaccctagatcttccccaagagggactggggtttctggggtccattctctgagtcagtggttatttgaaaatttgattttgattttattttttctctgtaaacttccaagctggcttttcccatttcaattcctgtgatttatgccaataaagtttgcccatgattttc

SEQ ID NO: 3021 - DNA, 3683 bp, Homo sapiens
  source 1..3683: mol_type = genomic DNA
ggcgggcgcgggcgcgggcgcgcgcggcggcggcgcgttccgttccgggccgaggctcgcggcggaaaagttgcggggcatagacgagcggccccgggacgggcagctagcgcgaccctgagccggcgcccgtggtccggccatggacgacctcgacgccctgctggcggacttggagtctaccacctcccacatctccaaacggcctgtgttcttgtcggaggagaccccctactcatacccaactggaaaccacacataccaggagattgccgtgccaccccccgtccccccacccccgtccagcgaggccctcaatggcacaatccttgaccccttagaccagtggcagcccagcagctcccgattcatccaccagcagcctcagtcctcatcacctgtgtacggctccagtgccaaaacttccagtgtctccaaccctcaggacagtgttggctctccgtgctcccgagtgggtgaggaggagcacgtctacagcttccccaacaagcagaaatcagctgagccttcacccaccgtaatgagcacgtccctgggcagcaacctttctgaactcgaccgcctgctgctggaactgaacgctgtacagcataacccgccaggcttccctgcagatgaggccaactcaagccccccgcttcctggggccctgagccccctctatggtgtcccagagactaacagccccttgggaggcaaagctgggcccctgacgaaagagaagcctaagcggaatgggggccggggcctggaggacgtgcggcccagtgtggagagtctcttggatgaactggagagctccgtgcccagccccgtccctgccatcactgtgaaccagggcgagatgagcagcccgcagcgcgtcacctccacccaacagcagacacgcatctcggcctcctctgccaccagggagctggacgagctgatggcttcgctgtcggatttcaagttcatggcccaggggaagacagggagcagctcaccccctggggggcccccgaagcccgggagccagctggacagcatgctggggagcctgcagtctgacctgaacaagctgggggtcgccacagtcgccaaaggagtctgcggggcctgcaagaagcccatcgccgggcaggttgtgaccgccatggggaagacgtggcaccccgagcacttcgtctgcacccactgccaggaggagatcggatcccggaacttcttcgagcgggatggacagccctactgtgaaaaggactaccacaacctcttctccccgcgctgctactactgcaacggccccatcctggataaagtggtgacagcccttgaccggacgtggcaccctgaacacttcttctgtgcacagtgtggagccttctttggtcccgaagggttccacgagaaggacggcaaggcctactgtcgcaaggactacttcgacatgttcgcacccaagtgtggcggctgcgcccgggccatcctggagaactatatctcagccctcaacacgctgtggcatcctgagtgctttgtgtgccgggaatgcttcacgccattcgtgaacggcagcttcttcgagcacgacgggcagccctactgtgaggtgcactaccacgagcggcgcggctcgctgtgttctggctgccagaagcccatcaccggccgctgcatcaccgccatggccaagaagttccaccccgagcacttcgtctgtgccttctgcctcaagcagctcaacaagggcaccttcaaggagcagaacgacaagccttactgtcagaactgcttcctcaagctcttctgctaggtgccctgcccctgtctctgccccccttccccagccagcatccccaactgcgactgtgacctagagacttcacccgggggtgaaggggtaaacccgactgaaactggaacccttgtcctccgctggtgcgggatggacagagggccgtgaggggtccccctgcttgtcttcacccctgccagagcctctgggccccctcctccctcctgtagctctccctaggctgcccactctccatcctccccaggggtagaggctgggggctccaccccagcccatgtacgtccccacgaactggcctggccagcaccccacactggagccatctcttcctcatatttcagcagtgcagccggggggcagggaagggcaggcagggtctgttggggtctctttttatccttattcctcccccgacctaattgtctttgttctgtgattattgggggacacccggctccctccagacaatgccagcataaatccatccatccaaaggcagagaaccaaaggggccatggaaggttctctgtgctcctcctacccttccagtgccctaggcctggcgactgcccctgccttttagacccgccctccccttttatacctgctcttgttctactgagaaaagcctctccagcaataatgttttctagtcacttcctccgtctccgggacggcgtgcctggacactgtaccgactttgatagatttctacactgaggtttgaattcatatcgcctgagttgcttttacttctctatacaaaatgattttgaagagattttaaagacgttcccttttgtattctcttcctcatccaccgccactgggcctgtcactgatggtggctctggtgtgaagtttgctttgtactgagggttggggtggggaagcaatttgtattttattgtttcttagcacaagcaggtgaactgggagcagctctgtgactccccctctttcacttcatagctcaccaggactgttttataaactgctgtatttggaaaccccttctttacttcccaggccagcaagctcttcactgaaactggttgaagggtgttgcacccttttgggcctagaattctgaactttatctgttctgtttctgtgggaggagaaggggaagtatgttttggggggctgcttcctgtctgagtaagccctcaggagcctctgctcccctgtgaacccactgaaccttctgagcccccactgcttctatggggctctctcttctgccttctcaggaaagctggtgtctgattttggccatcaggactctgacgtctctttggtcttgttgatttcctctgggcatatcccttccccagatctgctcctcccctttcacaggtgggatcggcactcagggggtctggaaagaaggtcataagggagcatgataggatttggggcagagggacaggctcctctggggaaaccccccagagctctttaccaaggatgaaagaggagccaggccttgggctcctgatgaggagaaaggggccccaccggggtctaatggtgacagtccaaaccactccactggcctcctggcagaagccgagtgtgctggggtctccgaagagggtccctcctttttgggggaaggtcagcccagcccctccaaaggtctgatgtctccactttcacccgcaggccttaccgctctgtttatagtgacccaccctagatcttccccaagagggactggggtttctggggtccattctctgagtcagtggttatttgaaaatttgattttgattttattttttctctgtaaacttccaagctggcttttcccatttcaattcctgtgatttatgccaataaagtttgcccatgattttca

SEQ ID NO: 3022 - DNA, 3807 bp, Homo sapiens
  source 1..3807: mol_type = genomic DNA
ttcccctgtgtactcctggctcggctggccggctaaggcagtttctcatcactgatgtgctctgggacagctgagtgggatgggctcctctggggtgggtgtggaggagtggtcgtgatgcctggaacactgcagtcactcctcagagacacgacttggcagccctcctgagcctgcctggtcacatgctgcctgtcttggaaggtcctctgtcccaagcagtggatgtgcagtttcttcacccctgcttagcttcatcaggcacaatgcgtctttgagacgccctgctggcggacttggagtctaccacctcccacatctccaaacggcctgtgttcttgtcggaggagaccccctactcatacccaactggaaaccacacataccaggagattgccgtgccaccccccgtccccccacccccgtccagcgaggccctcaatggcacaatccttgaccccttagaccagtggcagcccagcagctcccgattcatccaccagcagcctcagtcctcatcacctgtgtacggctccagtgccaaaacttccagtgtctccaaccctcaggacagtgttggctctccgtgctcccgagtgggtgaggaggagcacgtctacagcttccccaacaagcagaaatcagctgagccttcacccaccgtaatgagcacgtccctgggcagcaacctttctgaactcgaccgcctgctgctggaactgaacgctgtacagcataacccgccaggcttccctgcagatgaggccaactcaagccccccgcttcctggggccctgagccccctctatggtgtcccagagactaacagccccttgggaggcaaagctgggcccctgacgaaagagaagcctaagcggaatgggggccggggcctggaggacgtgcggcccagtgtggagagtctcttggatgaactggagagctccgtgcccagccccgtccctgccatcactgtgaaccagggcgagatgagcagcccgcagcgcgtcacctccacccaacagcagacacgcatctcggcctcctctgccaccagggagctggacgagctgatggcttcgctgtcggatttcaagttcatggcccaggggaagacagggagcagctcaccccctggggggcccccgaagcccgggagccagctggacagcatgctggggagcctgcagtctgacctgaacaagctgggggtcgccacagtcgccaaaggagtctgcggggcctgcaagaagcccatcgccgggcaggttgtgaccgccatggggaagacgtggcaccccgagcacttcgtctgcacccactgccaggaggagatcggatcccggaacttcttcgagcgggatggacagccctactgtgaaaaggactaccacaacctcttctccccgcgctgctactactgcaacggccccatcctggataaagtggtgacagcccttgaccggacgtggcaccctgaacacttcttctgtgcacagtgtggagccttctttggtcccgaagggttccacgagaaggacggcaaggcctactgtcgcaaggactacttcgacatgttcgcacccaagtgtggcggctgcgcccgggccatcctggagaactatatctcagccctcaacacgctgtggcatcctgagtgctttgtgtgccgggaatgcttcacgccattcgtgaacggcagcttcttcgagcacgacgggcagccctactgtgaggtgcactaccacgagcggcgcggctcgctgtgttctggctgccagaagcccatcaccggccgctgcatcaccgccatggccaagaagttccaccccgagcacttcgtctgtgccttctgcctcaagcagctcaacaagggcaccttcaaggagcagaacgacaagccttactgtcagaactgcttcctcaagctcttctgctaggtgccctgcccctgtctctgccccccttccccagccagcatccccaactgcgactgtgacctagagacttcacccgggggtgaaggggtaaacccgactgaaactggaacccttgtcctccgctggtgcgggatggacagagggccgtgaggggtccccctgcttgtcttcacccctgccagagcctctgggccccctcctccctcctgtagctctccctaggctgcccactctccatcctccccaggggtagaggctgggggctccaccccagcccatgtacgtccccacgaactggcctggccagcaccccacactggagccatctcttcctcatatttcagcagtgcagccggggggcagggaagggcaggcagggtctgttggggtctctttttatccttattcctcccccgacctaattgtctttgttctgtgattattgggggacacccggctccctccagacaatgccagcataaatccatccatccaaaggcagagaaccaaaggggccatggaaggttctctgtgctcctcctacccttccagtgccctaggcctggcgactgcccctgccttttagacccgccctccccttttatacctgctcttgttctactgagaaaagcctctccagcaataatgttttctagtcacttcctccgtctccgggacggcgtgcctggacactgtaccgactttgatagatttctacactgaggtttgaattcatatcgcctgagttgcttttacttctctatacaaaatgattttgaagagattttaaagacgttcccttttgtattctcttcctcatccaccgccactgggcctgtcactgatggtggctctggtgtgaagtttgctttgtactgagggttggggtggggaagcaatttgtattttattgtttcttagcacaagcaggtgaactgggagcagctctgtgactccccctctttcacttcatagctcaccaggactgttttataaactgctgtatttggaaaccccttctttacttcccaggccagcaagctcttcactgaaactggttgaagggtgttgcacccttttgggcctagaattctgaactttatctgttctgtttctgtgggaggagaaggggaagtatgttttggggggctgcttcctgtctgagtaagccctcaggagcctctgctcccctgtgaacccactgaaccttctgagcccccactgcttctatggggctctctcttctgccttctcaggaaagctggtgtctgattttggccatcaggactctgacgtctctttggtcttgttgatttcctctgggcatatcccttccccagatctgctcctcccctttcacaggtgggatcggcactcagggggtctggaaagaaggtcataagggagcatgataggatttggggcagagggacaggctcctctggggaaaccccccagagctctttaccaaggatgaaagaggagccaggccttgggctcctgatgaggagaaaggggccccaccggggtctaatggtgacagtccaaaccactccactggcctcctggcagaagccgagtgtgctggggtctccgaagagggtccctcctttttgggggaaggtcagcccagcccctccaaaggtctgatgtctccactttcacccgcaggccttaccgctctgtttatagtgacccaccctagatcttccccaagagggactggggtttctggggtccattctctgagtcagtggttatttgaaaatttgattttgattttattttttctctgtaaacttccaagctggcttttcccatttcaattcctgtgatttatgccaataaagtttgcccatgattttca

SEQ ID NO: 3023 - DNA, 1520 bp, Homo sapiens
  source 1..1520: mol_type = genomic DNA
atagacgagcggccccgggacgggcagctagcgcgaccctgagccggcgcccgtggtccggccatggacgacctcgacgccctgctggcggacttggagtctaccacctcccacatctccaaacggcctgtgttcttgtcggaggagaccccctactcatacccaactggaaaccacacataccaggagattgccgggcctggaggacgtgcggcccagtgtggagagtctcttggatgaactggagagctccgtgcccagccccgtccctgccatcactgtgaaccagggcgagatgagcagcccgcagcgcgtcacctccacccaacagcagacacgcatctcggcctcctctgccaccagggagctggacgagctgatggcttcgctgtcggatttcaagttcatggcccaggggaagacagggagcagctcaccccctggggggcccccgaagcccgggagccagctggacagcatgctggggagcctgcagtctgacctgaacaagctgggggtcgccacagtcgccaaaggagtctgcggggcctgcaagaagcccatcgccgggcaggttgtgaccgccatggggaagacgtggcaccccgagcacttcgtctgcacccactgccaggaggagatcggatcccggaacttcttcgagcgggatggacagccctactgtgaaaaggactaccacaacctcttctccccgcgctgctactactgcaacggccccatcctggataaagtggtgacagcccttgaccggacgtggcaccctgaacacttcttctgtgcacagtgtggagccttctttggtcccgaagggttccacgagaaggacggcaaggcctactgtcgcaaggactacttcgacatgttcgcacccaagtgtggcggctgcgcccgggccatcctggagaactatatctcagccctcaacacgctgtggcatcctgagtgctttgtgtgccgggaatgcttcacgccattcgtgaacggcagcttcttcgagcacgacgggcagccctactgtgaggtgcactaccacgagcggcgcggctcgctgtgttctggctgccagaagcccatcaccggccgctgcatcaccgccatggccaagaagttccaccccgagcacttcgtctgtgccttctgcctcaagcagctcaacaagggcaccttcaaggagcagaacgacaagccttactgtcagaactgcttcctcaagctcttctgctaggtgccctgcccctgtctctgccccccttccccagccagcatccccaactgcgactgtgacctagagacttcacccgggggtgaaggggtaaacccgactgaaactggaacccttgtcctccgctggtgcgggatggacagagggccgtgaggggtccccctgcttgtcttcacccctgccagagcctctgggccccctcctccctcctgtagctctccctaggctgcccactctccatcctccccaggggtagaggctgggggctccaccccag

SEQ ID NO: 3024 - DNA, 2282 bp, Homo sapiens
  source 1..2282: mol_type = genomic DNA
gctgcggcggcggcggctcctcctcagagtccggctcaggctccggctgcggctccagcccgcgatgccccattccgtgaccctgcgcgggccttcgccctggggcttccgcctggtgggcggccgggacttcagcgcgcccctcaccatctcacgggtccatgctggcagcaaggctgcattggctgccctgtgcccaggagacctgatccaggccatcaatggtgagagcacagagctcatgacacacctggaggcacagaaccgcatcaagggctgccacgatcacctcacactgtctgtgagcaggcctgagggtaggagctggcccagtgcccctgatgacagcaaggctcaggcacacaggatccacatcgatcctgagatccaggacggcagcccaacaaccagcaggcggccctcaggcaccgggactgggccagaagatggcagaccaagcctgggatctccatatggacaaccccctcgctttccagtccctcacaatggcagcagcgaggccaccctgccagcccagatgagcaccctgcatgtgtctccaccccccagcgctgacccagccagaggcctcccgcggagccgggactgcagagtcgacctgggctccgaggtgtacaggatgctgcgggagccagccgagcccgtggccgcggagcccaagcagtcaggctccttccgctacttgcagggcatgctagaggccggcgagggcggggattggcccgggcctggcggcccccggaacctcaagcccacggccagcaagctgggcgctccgctgagcggcctgcaggggctgcccgagtgcacgcgctgcggccacggcatcgtgggcaccatcgtcaaggcacgggacaagctctaccatcccgagtgcttcatgtgcagtgactgcggcctgaacctcaagcagcgtggttacttctttctggacgagcggctctactgtgagagccacgccaaggcgcgcgtgaagccgcccgagggctacgacgtggtggcggtgtaccccaatgccaaggtggaactcgtctgagctgggaccctgctcccacgcctgcttcttaaggtccctgctcggccggtgtaaatatgtttcaccctgtccctctaataaagctcctctgctccaccttgaacctgtcacctggcctgccaccctcctgcgcaggccatgcatggctcccgagtacagtagtatctgcttaggtgccaggcatgtcctaggctctgggtgcagtagtgagcaggacgggtaccatgctgccctgaagggggccacagcctgggtggaaggcagacctgaatcacaacgggccagctctagtaatacgaaggtgaggtctgggatgctgcgtgcggcgcgacgacaggaggtatgacctgggtggggtcagggaaagtcttagctgagaactaagagatgagggaggcacaaactctgcacgggggaactgtgtgtgcaaaggtgagctgggggcgagaaaggcctctgtggccgtcatcggcactagcgggttgggggtggtggtggggtgctggcagcctcaggagcgatcgctcccctggagagggtgattgagtgtggagatcaccggggccgccgcgggccgtctgcacttctgttccaggtttttctggcattttctgttccaggtttcttccacccacgagcactttattctcctccgagacccccttttcttccccttcctctctcccccaccagggggcgcgcttaaatttccagacagagaccagaaggaaggtttagaaagaaaagaacacttgcccagggcagctttgccctccaagaggctccctcctgtctctaagtcaattccacccctcctcgaagtcccggcttccacccctctcctcagagtcccggcgtttacctcgtggtgtgtttgccttgggcctttcatgccccggctgcacacatcgtctgtgaattgtggctgttcactcccgaggatgtgtcctagactccgggtcgcgtggatctaccctctagtttacttgctcgggagaagaaactgactcgttttatttagtgcctatttagcgagcccagagtaacgtacatttgtgctgttttcaattttgtgctatcgcaaatcacaaaaaaactgttatcaattcacattcatcatcagcacgagacccatttccttgtgctcctgccagctcaggatattatgtttcttttttcatttttgccagtctgttaagtaaaatgtcatatgcgtttgttttaa

SEQ ID NO: 3025 - DNA, 1006 bp, Homo sapiens
  source 1..1006: mol_type = genomic DNA
caggctccggctgcggctccagcccgcgatgccccattccgtgaccctgcgcgggccttcgccctggggcttccgcctggtgggcggccgggacttcagcgcgcccctcaccatctcacgggtccatgctggcagcaaggctgcattggctgccctgtgcccaggagacctgatccaggccatcaatggtgagagcacagagctcatgacacacctggaggcacagaaccgcatcaagggctgccacgatcacctcacactgtctgtgagcaggcctgagggtaggagctggcccagtgcccctgatgacagcaaggctcaggcacacaggatccacatcgatcctgagatccaggacggcagcccaacaaccagcaggcggccctcaggcaccgggactgggccagaagatggcagaccaagcctgggatctccatatggacaaccccctcgctttccagtccctcacaatggcagcagcgaggccaccctgccagcccagatgagcaccctgcatgtgtctccaccccccagcgctgacccagccagaggcctcccgcggagccgggactgcagagtcgacctgggctccgaggtgtacaggatgctgcgggagccagccgagcccgtggccgcggagcccaagcagtcaggctccttccgctacttgcagggcatgctagaggccggcgagggcggggcaccatcgtcaaggcacgggacaagctctaccatcccgagtgcttcatgtgcagtgactgcggcctgaacctcaagcagcgtggttacttctttctggacgagcggctctactgtgagagccacgccaaggcgcgcgtgaagccgcccgagggctacgacgtggtggcggtgtaccccaatgccaaggtggaactcgtctgagctgggaccctgctcccacgcctgcttcttaaggtccctgctcggccggtgtaaatatgtttcaccctgtccctctaataaagctcctctgctccaccttgaa

SEQ ID NO: 3026 - DNA, 6083 bp, Homo sapiens
  source 1..6083: mol_type = genomic DNA
gttcccgcgggcggtggggacggcgccctcaccgcgagtcacttgtcagcccttgtctgaggcggaggcagccccgcgccgcgccggacccgagcatatttcattttctgtcattggactttgagccattagaaccatgagcaactacagtgtgtcactggttggcccagctccttggggtttccggctgcagggcggtaaggatttcaacatgcctctgacaatctctagtctaaaagatggcggcaaggcagcccaggcaaatgtaagaataggcgatgtggttctcagcattgatggaataaatgcacaaggaatgactcatcttgaagcccagaataagattaagggttgtacaggctctttgaatatgactctgcaaagagcatctgctgcacccaagcctgagccggttcctgttcaaaagggagaacctaaagaagtagttaaacctgtgcccattacatctcctgctgtgtccaaagtcacttccacaaacaacatggcctacaataaggcaccacggccttttggttctgtgtcttcaccaaaagtcacatccatcccatcaccatcgtctgccttcaccccagcccatgcgaccacctcatcacatgcttccccttcacccgtggctgccgtcactcctcccctgttcgctgcatctggactgcatgctaatgccaatcttagtgctgaccagtctccatctgcactgagcgctggtaaaactgcagttaatgtcccacggcagcccacagtcaccagcgtgtgttccgagacttctcaggagctagcagagggacagagaagaggatcccagggtgacagtaaacagcaaaatggcccaccaagaaaacacattgtggagcgctatacagagttttatcatgtacccactcacagtgatgccagcaagaagagactgattgaggatactgaagactggcgtccaaggactggaacaactcagtctcgctctttccgaatccttgcccagatcactgggactgaacatttgaaagaatctgaagccgataatacaaagaaggcaaataactctcaggagccttctccgcagttggcttcctcggtagcttccacacggagcatgcccgagagcctggacagcccaacctctggcagaccaggggttaccagcctcacagctgcagctgccttcaagcctgtaggatccactggcgtcatcaagtcaccaagctggcaacggccaaaccaaggagtaccttccactggaagaatctcaaacagcgctacttactcaggatcagtggcaccagccaactcagctttgggacaaacccagccaagtgaccaggacactttagtgcaaagagctgagcacattccagcagggaaacgaactccgatgtgcgcccattgtaaccaggtcatcagaggaccattcttagtggcactggggaaatcttggcacccagaagaattcaactgcgctcactgcaaaaatacaatggcctacattggatttgtagaggagaaaggagccctgtattgtgagctgtgctatgagaaattctttgcccctgaatgtggtcgatgccaaaggaagatccttggagaagtcatcagtgcgttgaaacaaacttggcatgtttcctgttttgtgtgtgtagcctgtggaaagcccattcggaacaatgtttttcacttggaggatggtgaaccctactgtgagactgattattatgccctctttggtactatatgccatggatgtgaatttcccatagaagctggtgacatgttcctggaagctctgggctacacctggcatgacacttgctttgtatgctcagtgtgttgtgaaagtttggaaggtcagacctttttctccaagaaggacaagcccctgtgtaagaaacatgctcattctgtgaatttttgaaagtcaacagttcaggagaagagaaggaatttgaagagaaaaaggaaaattaaaattactaattaatttttagattcaatatttatatggagttttgaaaaataatagtggccctgaaggaataaattccagctttaaaaaccaagtctgaggaaatatttggcttcataaagtaaagagacggtttggcatttattattactttttcctgtattttatgcccataaaataagctttataaaaaccaatttcctgatggactattaaattcatcttagaataaattagtgaagaatttaattttagaataaataatccaatctgaaataattataccttctttccttgttaggtagttatgagtaaatctgcaaaaggcaatgaaaatgccttaaattttatcaataacagaattattgtatttaaaaaaaaactaatacttatctttaaaatagtaaataggattttaaacagagaattttatcagtaataggtgtcagtttttaaaaaattgcttgtaggctgagcgcggtggctcacgcctgtaatcccagcactttgggaggccaaggtgggtggaccacatgaggtcaggagtttgagatcagcctggccaacatggtgaaaccccatctctactaaaaatacaaaaattagccggacgcagtggcacgcgcctgtaatcccagctactcaagaggctgaggcacgagaatcacttgaacccgggagggagaggttgcagtgagccaagatcgtaccactgcactccagcctgggtgacagagtgagactctgtctccaaaaaaaaactttgcttgtatattatttttgccttacagtggatcattctagtaggaaaggacaataagattttttatcaaaatgtgtcatgccagtaagagatgttatattcttttctcatttcttccccacccaaaaataagctaccatatagcttataagtctcaaatttttgccttttactaaaatgtgattgtttctattcattgtgtatgcttcatcacctatattaggcaaattccatttttttcccttgtgctaaggtaaagatttaattaaataattttggcctctcatagttttctctctctttaaagagaataaatagagggccaggtgtggtggctcacgcctgtgatcccagcactttgggaggccaagacgggcggatcatgaggtcaagagatcaagatcatcctggccaacatggtgaaaccctgtctctactaaaaatacaaaaatgagctgggcatggtggggcgtgcctgtagtcccatgtacttgggaggctgaggcaggaaaattcttgaacccaggagacggaagttgcagtgagctgagatcacaccactgcactccagcctggtgacagagcaagactccggctcttaaaaaaaaaaaaaaaaaaaaaaaaagagagagagagaataaatagaaaagaatgtggctgggaattgtgaatcagaagattataccccccaattgtttttcaatccccttttctcaaataataaattagttaaatcagtttctgagttatgccactggctgatgaagagttgagaggtctctttgcagaatgatctttttgtttcgttttgtttcttcttctgcatttaaaaattaaaagattggtttgaggatgtgatgaaattgagactttttgtggttttctctcaataataagtgaaccaatttcaaatgtgatcacaaagtttggaaagcttttattcacagaggttgggtagtgttgggaggggagtttaattactcagattggcctgttatttgatttcctcctttgggaaaagaattatgtagataccacatggagacagggaaacaattgtggtaaaactgtggatcctgttgctatttgcccagtgagaaaacagattctggtatttgatttggtttttctctttgtttccagaatggatgaaagtccatgaacctcctaagttataatttaaatttgtttggggcaaggtgattttatagtcgagacagagccctaggtccttcctgccccatcactcacttacgacatcacttccattgtgtgcatgtttgttatagaggaggttttaggctacaatatttgtttaacctccctaagaactttcaaggcatctgtcctgaaagctgttaatttatggtctagcagatttatattatatgcagataataattaactggggataaaagaatggcaaggggtgacacaaagtagcaaactgaatacttctccaatagcaaccccaagctacctcctcaccctgcatcttggagggaggcaggaaatttcttttgaaataaagtgctggagctgaattctgcattatttatcgttgctgctgaaaccacctataaaagacttgctggctaatgtgcattgtcatataatgtacactgtcacatctttacagtcttgtatgttatagaatacaaaataagttgatggttttgtttggtgtgagctttttgtttgtttgtttagttttgccttcataggttatatgccaagatagtatttgataagtcaatgacatttggatgttttcttcaaagaattttatttgacccagatttcttataaagttatcttacattaaggatgtcattttcatcagaccttctttctacatattattcatgaagcataatgttgcatttctccaaattttatgcctgaaagggtagtgttgcttcctaaggtatcatgttgtctttgtgctttgtccatctcttccgtggcgaagctttatatctgttcctaaaacagttaatcctgtgaaataaatattgaacataatccagaagaatctctctgtttcccttggggaatgccatatttaattcaccagcagtaatcctttaataactggcagagcactttattcttctggtgagctccctgaatatttatttttctgattataaattttctatattagtagcattttttaattattacttcttcactatagagcatttacttttagtctctagatgtatattttggaatgctgtacttggcataacatagattaaaatcataatgcatgactaaaaactccttggatttatttcccattttaaaatttttagcggtaagttcagatttataatctttctctagacttccatggtctgaatgttgcctgctgaagtagcaacctaaaaagtatcccctgcttatgcttgtccagttggccctccatgtccataggcttcgcatctgtgattcagcccactgtgggtcaaaaatatttggggaaaaaaatggatggttgcgcctttgctgaacatgtacaaacttttttttgtcattaaacaatatagtataacaactatttacaaagcatttacattgtattagctattataggtaatctagagatgatttaaagtgtatggtaggatgtgcataggttatatgcaaatactacaccattttctataagggacttgaacatcatggactttagtatcctagggggttcttggaacccatcacccataggggcaccataggacaactatagtaccgtgtttatttcctattaattcaggttccgtttagagtctaaaactaaaacctaatcatttagtcacagtgtaaaaacaaatggaaataacagctcaaatcttcaaaatattactatagcattatgtttaaaataatctacaacaaaaatgtaccattttcaagcagtactacattaggagcccttttatagaaaataatttcttctttacccccgttccagtgtgaatctagtattctgttaacatttgtgtggcatttggagtttgtcatccccattgaagggagagccttctcagacatgaagcaagggaaacatactgaatagttttacacaaatttgatctggcttccatttgtccccctcatttcccaaatgtttaaatgtattggatttggattctcaatgtataagttgccttatctgttaatgtctatcttctgtctctttaattttgtatatctgctgttttgcttttggatacattttctaattagaagtcacatgataaatataatcagtatagtaataataccataatgtgcacatactcaataaataaatgactgcattgttgtaaa

SEQ ID NO: 3027 - DNA, 1930 bp, Homo sapiens
  source 1..1930: mol_type = genomic DNA
agccaggaggcggaagttcccgcgggcggtggggacggcgccctcaccgcgagtcacttgtcagcccttgtctgaggcggaggcagccccgcgccgcgccggacccgagcatatttcattttctgtcattggactttgagccattagaaccatgagcaactacagtgtgtcactggttggcccagctccttggggtttccggctgcagggcggtaaggatttcaacatgcctctgacaatctctagtctaaaagatggcggcaaggcagcccaggcaaatgtaagaataggcgatgtggttctcagcattgatggaataaatgcacaaggaatgactcatcttgaagcccagaataagattaagggttgtacaggctctttgaatatgactctgcaaagagcatctgctgcacccaagcctgagccggttcctgttcaaaagaaaacacaagtgacaaataaccctggcactgtgaaaatcccacctaaacgcccaccaagaaaacacattgtggagcgctatacagagttttatcatgtacccactcacagtgatgccagcaagaagagactgattgaggatactgaagactggcgtccaaggactggaacaactcagtctcgctctttccgaatccttgcccagatcactgggactgaacatttgaaagaatctgaagccgataatacaaagaaggcaaaggaaaagataccccttcacgtctttagtcccaaatacacaaaattacgtgactggcaccatgaagtttcagcacgtgctcttaacgtacagtgatttatgagccttgccccccaagcagccagcacataccttttcatttactttttttttttcaacttcatagcaaaatctgtattaaatttgccttatgaaaaaatagaactttttctatacttttctaacaatttcctattgttgtgagaaaaggaagatgaacatgttttgtgctagttggtagctcacaaatgtaaaaccaaaaaaaaaaaaaaatagaaaattaagggactagatctatttgtggatttgtatctgtttttgttgtgattagggtagtaatcttggaaaacgaattattttcataagttgaatttggttagttggttggttgaagcagaggataatgagcaaataaagtccttgtctaatttggaaaatactttctttatattattaacatctcccaagattactttttaagttcattattatgttacattcaaagttgattgtaaattattctaaataagtaaatataaggaggcaagaataaacaaagactttattaaagaagagtgcgtgcattgtagatttaggtatcttttaaagtaggtactattcaggatggctctatgaagaggaggaggtccagatttggctcctgaaaaaggaaagaagagaattttacccctatttgcaatggagaaatacagtattctttggtttggttggatttgcaaatcctatttcctatcaaaggaaatatctctagtggatatttttagaatatagacaatttctaggtattaactaataagatatggaaaagatagctttgctttttttaatcagaagaacataaaataaattacaatatgaatgattgtgagacatcagagaaatattttacttagtgacgtaaactactgtgcactgctgctattcctaggaagctgtgttttgggcaatacatggaagctaaatatatgaccagaaatgctttctgccttgtaatatagtgtattatatattagagctaaatttagtaataaatgcattttgaagtttggaaaagtattgtaataaagttgcctttaacttagctttgtacttgttctgtttccttgaggctagacacagtgccatccaggacttattacagtataactgggtaaaataaacaattctctg

SEQ ID NO: 3028 - DNA, 1990 bp, Homo sapiens
  source 1..1990: mol_type = genomic DNA
agccaggaggcggaagttcccgcgggcggtggggacggcgccctcaccgcgagtcacttgtcagcccttgtctgaggcggaggcagccccgcgccgcgccggacccgagcatatttcattttctgtcattggactttgagccattagaaccatgagcaactacagtgtgtcactggttggcccagctccttggggtttccggctgcagggcggtaaggatttcaacatgcctctgacaatctctagtctaaaagatggcggcaaggcagcccaggcaaatgtaagaataggcgatgtggttctcagcattgatggaataaatgcacaaggaatgactcatcttgaagcccagaataagattaagggttgtacaggctctttgaatatgactctgcaaagagcatctgctgcacccaagcctgagccggttcctgttcaaaagcccacagtcaccagcgtgtgttccgagacttctcaggagctagcagagggacagagaagaggatcccagggtgacagtaaacagcaaaatgggaaaatcccacctaaacgcccaccaagaaaacacattgtggagcgctatacagagttttatcatgtacccactcacagtgatgccagcaagaagagactgattgaggatactgaagactggcgtccaaggactggaacaactcagtctcgctctttccgaatccttgcccagatcactgggactgaacatttgaaagaatctgaagccgataatacaaagaaggcaaaggaaaagataccccttcacgtctttagtcccaaatacacaaaattacgtgactggcaccatgaagtttcagcacgtgctcttaacgtacagtgatttatgagccttgccccccaagcagccagcacataccttttcatttactttttttttttcaacttcatagcaaaatctgtattaaatttgccttatgaaaaaatagaactttttctatacttttctaacaatttcctattgttgtgagaaaaggaagatgaacatgttttgtgctagttggtagctcacaaatgtaaaaccaaaaaaaaaaaaaaatagaaaattaagggactagatctatttgtggatttgtatctgtttttgttgtgattagggtagtaatcttggaaaacgaattattttcataagttgaatttggttagttggttggttgaagcagaggataatgagcaaataaagtccttgtctaatttggaaaatactttctttatattattaacatctcccaagattactttttaagttcattattatgttacattcaaagttgattgtaaattattctaaataagtaaatataaggaggcaagaataaacaaagactttattaaagaagagtgcgtgcattgtagatttaggtatcttttaaagtaggtactattcaggatggctctatgaagaggaggaggtccagatttggctcctgaaaaaggaaagaagagaattttacccctatttgcaatggagaaatacagtattctttggtttggttggatttgcaaatcctatttcctatcaaaggaaatatctctagtggatatttttagaatatagacaatttctaggtattaactaataagatatggaaaagatagctttgctttttttaatcagaagaacataaaataaattacaatatgaatgattgtgagacatcagagaaatattttacttagtgacgtaaactactgtgcactgctgctattcctaggaagctgtgttttgggcaatacatggaagctaaatatatgaccagaaatgctttctgccttgtaatatagtgtattatatattagagctaaatttagtaataaatgcattttgaagtttggaaaagtattgtaataaagttgcctttaacttagctttgtacttgttctgtttccttgaggctagacacagtgccatccaggacttattacagtataactgggtaaaataaacaattctctg

SEQ ID NO: 3029 - DNA, 5774 bp, Homo sapiens
  source 1..5774: mol_type = genomic DNA
agccaggaggcggaagttcccgcgggcggtggggacggcgccctcaccgcgagtcacttgtcagcccttgtctgaggcggaggcagccccgcgccgcgccggacccgagcatatttcattttctgtcattggactttgagccattagaaccatgagcaactacagtgtgtcactggttggcccagctccttggggtttccggctgcagggcggtaaggatttcaacatgcctctgacaatctctagtctaaaagatggcggcaaggcagcccaggcaaatgtaagaataggcgatgtggttctcagcattgatggaataaatgcacaaggaatgactcatcttgaagcccagaataagattaagggttgtacaggctctttgaatatgactctgcaaagagcatctgctgcacccaagcctgagccggttcctgttcaaaagcccacagtcaccagcgtgtgttccgagacttctcaggagctagcagagggacagagaagaggatcccagggtgacagtaaacagcaaaatggcccaccaagaaaacacattgtggagcgctatacagagttttatcatgtacccactcacagtgatgccagcaagaagagactgattgaggatactgaagactggcgtccaaggactggaacaactcagtctcgctctttccgaatccttgcccagatcactgggactgaacatttgaaagaatctgaagccgataatacaaagaaggcaaataactctcaggagccttctccgcagttggcttcctcggtagcttccacacggagcatgcccgagagcctggacagcccaacctctggcagaccaggggttaccagcctcacagctgcagctgccttcaagcctgtaggatccactggcgtcatcaagtcaccaagctggcaacggccaaaccaaggagtaccttccactggaagaatctcaaacagcgctacttactcaggatcagtggcaccagccaactcagctttgggacaaacccagccaagtgaccaggacactttagtgcaaagagctgagcacattccagcagggaaacgaactccgatgtgcgcccattgtaaccaggtcatcagaggaccattcttagtggcactggggaaatcttggcacccagaagaattcaactgcgctcactgcaaaaatacaatggcctacattggatttgtagaggagaaaggagccctgtattgtgagctgtgctatgagaaattctttgcccctgaatgtggtcgatgccaaaggaagatccttggagaagtcatcagtgcgttgaaacaaacttggcatgtttcctgttttgtgtgtgtagcctgtggaaagcccattcggaacaatgtttttcacttggaggatggtgaaccctactgtgagactgattattatgccctctttggtactatatgccatggatgtgaatttcccatagaagctggtgacatgttcctggaagctctgggctacacctggcatgacacttgctttgtatgctcagtgtgttgtgaaagtttggaaggtcagacctttttctccaagaaggacaagcccctgtgtaagaaacatgctcattctgtgaatttttgaaagtcaacagttcaggagaagagaaggaatttgaagagaaaaaggaaaattaaaattactaattaatttttagattcaatatttatatggagttttgaaaaataatagtggccctgaaggaataaattccagctttaaaaaccaagtctgaggaaatatttggcttcataaagtaaagagacggtttggcatttattattactttttcctgtattttatgcccataaaataagctttataaaaaccaatttcctgatggactattaaattcatcttagaataaattagtgaagaatttaattttagaataaataatccaatctgaaataattataccttctttccttgttaggtagttatgagtaaatctgcaaaaggcaatgaaaatgccttaaattttatcaataacagaattattgtatttaaaaaaaaactaatacttatctttaaaatagtaaataggattttaaacagagaattttatcagtaataggtgtcagtttttaaaaaattgcttgtaggctgagcgcggtggctcacgcctgtaatcccagcactttgggaggccaaggtgggtggaccacatgaggtcaggagtttgagatcagcctggccaacatggtgaaaccccatctctactaaaaatacaaaaattagccggacgcagtggcacgcgcctgtaatcccagctactcaagaggctgaggcacgagaatcacttgaacccgggagggagaggttgcagtgagccaagatcgtaccactgcactccagcctgggtgacagagtgagactctgtctccaaaaaaaaactttgcttgtatattatttttgccttacagtggatcattctagtaggaaaggacaataagattttttatcaaaatgtgtcatgccagtaagagatgttatattcttttctcatttcttccccacccaaaaataagctaccatatagcttataagtctcaaatttttgccttttactaaaatgtgattgtttctattcattgtgtatgcttcatcacctatattaggcaaattccatttttttcccttgtgctaaggtaaagatttaattaaataattttggcctctcatagttttctctctctttaaagagaataaatagagggccaggtgtggtggctcacgcctgtgatcccagcactttgggaggccaagacgggcggatcatgaggtcaagagatcaagatcatcctggccaacatggtgaaaccctgtctctactaaaaatacaaaaatgagctgggcatggtggggcgtgcctgtagtcccatgtacttgggaggctgaggcaggaaaattcttgaacccaggagacggaagttgcagtgagctgagatcacaccactgcactccagcctggtgacagagcaagactccggctcttaaaaaaaaaaaaaaaaaaaaaaaaagagagagagagaataaatagaaaagaatgtggctgggaattgtgaatcagaagattataccccccaattgtttttcaatccccttttctcaaataataaattagttaaatcagtttctgagttatgccactggctgatgaagagttgagaggtctctttgcagaatgatctttttgtttcgttttgtttcttcttctgcatttaaaaattaaaagattggtttgaggatgtgatgaaattgagactttttgtggttttctctcaataataagtgaaccaatttcaaatgtgatcacaaagtttggaaagcttttattcacagaggttgggtagtgttgggaggggagtttaattactcagattggcctgttatttgatttcctcctttgggaaaagaattatgtagataccacatggagacagggaaacaattgtggtaaaactgtggatcctgttgctatttgcccagtgagaaaacagattctggtatttgatttggtttttctctttgtttccagaatggatgaaagtccatgaacctcctaagttataatttaaatttgtttggggcaaggtgattttatagtcgagacagagccctaggtccttcctgccccatcactcacttacgacatcacttccattgtgtgcatgtttgttatagaggaggttttaggctacaatatttgtttaacctccctaagaactttcaaggcatctgtcctgaaagctgttaatttatggtctagcagatttatattatatgcagataataattaactggggataaaagaatggcaaggggtgacacaaagtagcaaactgaatacttctccaatagcaaccccaagctacctcctcaccctgcatcttggagggaggcaggaaatttcttttgaaataaagtgctggagctgaattctgcattatttatcgttgctgctgaaaccacctataaaagacttgctggctaatgtgcattgtcatataatgtacactgtcacatctttacagtcttgtatgttatagaatacaaaataagttgatggttttgtttggtgtgagctttttgtttgtttgtttagttttgccttcataggttatatgccaagatagtatttgataagtcaatgacatttggatgttttcttcaaagaattttatttgacccagatttcttataaagttatcttacattaaggatgtcattttcatcagaccttctttctacatattattcatgaagcataatgttgcatttctccaaattttatgcctgaaagggtagtgttgcttcctaaggtatcatgttgtctttgtgctttgtccatctcttccgtggcgaagctttatatctgttcctaaaacagttaatcctgtgaaataaatattgaacataatccagaagaatctctctgtttcccttggggaatgccatatttaattcaccagcagtaatcctttaataactggcagagcactttattcttctggtgagctccctgaatatttatttttctgattataaattttctatattagtagcattttttaattattacttcttcactatagagcatttacttttagtctctagatgtatattttggaatgctgtacttggcataacatagattaaaatcataatgcatgactaaaaactccttggatttatttcccattttaaaatttttagcggtaagttcagatttataatctttctctagacttccatggtctgaatgttgcctgctgaagtagcaacctaaaaagtatcccctgcttatgcttgtccagttggccctccatgtccataggcttcgcatctgtgattcagcccactgtgggtcaaaaatatttggggaaaaaaatggatggttgcgcctttgctgaacatgtacaaacttttttttgtcattaaacaatatagtataacaactatttacaaagcatttacattgtattagctattataggtaatctagagatgatttaaagtgtatggtaggatgtgcataggttatatgcaaatactacaccattttctataagggacttgaacatcatggactttagtatcctagggggttcttggaacccatcacccataggggcaccataggacaactatagtaccgtgtttatttcctattaattcaggttccgtttagagtctaaaactaaaacctaatcatttagtcacagtgtaaaaacaaatggaaataacagctcaaatcttcaaaatattactatagcattatgtttaaaataatctacaacaaaaatgtaccattttcaagcagtactacattaggagcccttttatagaaaataatttcttctttacccccgttccagtgtgaatctagtattctgttaacatttgtgtggcatttggagtttgtcatccccattgaagggagagccttctcagacatgaagcaagggaaacatactgaatagttttacacaaatttgatctggcttccatttgtccccctcatttcccaaatgtttaaatgtattggatttggattctcaatgtataagttgccttatctgttaatgtctatcttctgtctctttaattttgtatatctgctgttttgcttttggatacattttctaattagaagtcacatgataaatataatcagtatagtaataataccataatgtgcacatactcaataaataaatgactgcattgttgtaaatga

SEQ ID NO: 3030 - DNA, 856 bp, Homo sapiens
  source 1..856: mol_type = genomic DNA
agccaggaggcggaagttcccgcgggcggtggggacggcgccctcaccgcgagtcacttgtcagcccttgtctgaggcggaggcagccccgcgccgcgccggacccgagcatatttcattttctgtcattggactttgagccattagaaccatgagcaactacagtgtgtcactggttggcccagctccttggggtttccggctgcagggcggtaaggatttcaacatgcctctgacaatctctagtctaaaagatggcggcaaggcagcccaggcaaatgtaagaataggcgatgtggttctcagcattgatggaataaatgcacaaggaatgactcatcttgaagcccagaataagattaagggttgtacaggctctttgaatatgactctgcaaagagcatctgctgcacccaagcctgagccggttcctgttcaaaagcccacagtcaccagcgtgtgttccgagacttctcaggagctagcagagggacagagaagaggatcccagggtgacagtaaacagcaaaatgggccagttcccaggaaaatcccaccaagaaaacacattgtggagcgctatacagagttttatcatgtacccactcacagtgatgccagcaagaagagactgattgaggatactgaagactggcgtccaaggactggaacaactcagtctcgctctttccgaatccttgcccagatcactgggactgaacatttgaaagaatctgaagccgataatacaaagaaggcaaaggaaaagataccccttcacgtctttagtcccaaatacacaaaattacgtgactggcaccatgaagtttcagcacgtgctcttaacgtacagtga

SEQ ID NO: 3031 - DNA, 796 bp, Homo sapiens
  source 1..796: mol_type = genomic DNA
agccaggaggcggaagttcccgcgggcggtggggacggcgccctcaccgcgagtcacttgtcagcccttgtctgaggcggaggcagccccgcgccgcgccggacccgagcatatttcattttctgtcattggactttgagccattagaaccatgagcaactacagtgtgtcactggttggcccagctccttggggtttccggctgcagggcggtaaggatttcaacatgcctctgacaatctctagtctaaaagatggcggcaaggcagcccaggcaaatgtaagaataggcgatgtggttctcagcattgatggaataaatgcacaaggaatgactcatcttgaagcccagaataagattaagggttgtacaggctctttgaatatgactctgcaaagagcatctgctgcacccaagcctgagccggttcctgttcaaaaggtcacccagaagagggagagcaggagctctagaagaacagctcctgggctcccaccaagaaaacacattgtggagcgctatacagagttttatcatgtacccactcacagtgatgccagcaagaagagactgattgaggatactgaagactggcgtccaaggactggaacaactcagtctcgctctttccgaatccttgcccagatcactgggactgaacatttgaaagaatctgaagccgataatacaaagaaggcaaaggaaaagataccccttcacgtctttagtcccaaatacacaaaattacgtgactggcaccatgaagtttcagcacgtgctcttaacgtacagtga

SEQ ID NO: 3032 - DNA, 1853 bp, Homo sapiens
  source 1..1853: mol_type = genomic DNA
cttgtcagcccttgtctgaggcggaggcagccccgcgccgcgccggacccgagcatatttcattttctgtcattggactttgagccattagaaccatgagcaactacagtgtgtcactggttggcccagctccttggggtttccggctgcagggcggtaaggatttcaacatgcctctgacaatctctagtagcatctgctgcacccaagcctgagccggttcctgttcaaaagggagaacctaaagaagtagttaaacctgtgcccattacatctcctgctgtgtccaaagtcacttccacaaacaacatggcctacaataaggcaccacggccttttggttctgtgtcttcaccaaaagtcacatccatcccatcaccatcgtctgccttcaccccagcccatgcgaccacctcatcacatgcttccccttcacccgtggctgccgtcactcctcccctgttcgctgcatctggactgcatgctaatgccaatcttagtgctgaccagtctccatctgcactgagcgctggtaaaactgcagttaatgtcccacggcagcccacagtcaccagcgtgtgttccgagacttctcaggagctagcagagggacagagaagaggatcccagggtgacagtaaacagcaaaatggcccaccaagaaaacacattgtggagcgctatacagagttttatcatgtacccactcacagtgatgccagcaagaagagactgattgaggatactgaagactggcgtccaaggactggaacaactcagtctcgctctttccgaatccttgcccagatcactgggactgaacatttgaaagaatctgaagccgataatacaaagaaggcaaataactctcaggagccttctccgcagttggcttcctcggtagcttccacacggagcatgcccgagagcctggacagcccaacctctggcagaccaggggttaccagcctcacagctgcagctgccttcaagcctgtaggatccactggcgtcatcaagtcaccaagctggcaacggccaaaccaaggagtaccttccactggaagaatctcaaacagcgctacttactcaggatcagtggcaccagccaactcagctttgggacaaacccagccaagtgaccaggacactttagtgcaaagagctgagcacattccagcagggaaacgaactccgatgtgcgcccattgtaaccaggtcatcagaggaccattcttagtggcactggggaaatcttggcacccagaagaattcaactgcgctcactgcaaaaatacaatggcctacattggatttgtagaggagaaaggagccctgtattgtgagctgtgctatgagaaattctttgcccctgaatgtggtcgatgccaaaggaagatccttggagaagtcatcagtgcgttgaaacaaacttggcatgtttcctgttttgtgtgtgtagcctgtggaaagcccattcggaacaatgtttttcacttggaggatggtgaaccctactgtgagactgattattatgccctctttggtactatatgccatggatgtgaatttcccatagaagctggtgacatgttcctggaagctctgggctacacctggcatgacacttgctttgtatgctcagtgtgttgtgaaagtttggaaggtcagacctttttctccaagaaggacaagcccctgtgtaagaaacatgctcattctgtgaatttttgaaagtcaacagttcaggagaagagaaggaatttgaagagaaaaaggaaaattaaaattactaattaatttttagattcaatatttatatggagttttgaaaaataatagtggccctgaag

SEQ ID NO: 3033 - DNA, 1186 bp, Homo sapiens
  source 1..1186: mol_type = genomic DNA
gagccaggaggcggaagttcccgcgggcggtggggacggcgccctcaccgcgagtcacttgtcagcccttgtctgaggcggaggcagccccgcgccgcgccggacccgagcatatttcattttctgtcattggactttgagccattagaaccatgagcaactacagtgtgtcactggttggcccagctccttggggtttccggctgcagggcggtaaggatttcaacatgcctctgacaatctctagtgctggagtgcagtggcgcaatctcggctcaccacaacctccatctcccgagttcaagcgattctcctgcctcagcctcccgagtagctgggattacaggcatgtgccaccacgcctggctaattttgtatttttagtagagaccaagtttccctatgttggtcaggctggtcttgaactcccgacctcaggtgatctgcccacctcggcctcccaaagtgctaagattacaggcgtgagccaccgtgcctggcccacactgttttatactttgcttttttttgcaacaatttaccctgagatcattctctattaatatataaggaggtatgtgtgtttttttaaaacaattgtataattttattttataaggaaagtgacatttaaccaatcccctactgaagagtatttgtggcatttccatattactgttacagtggtacagtgaataccaaatataagtacatacatatatatgtgaatatatgtatctacgtcattttgaaaggttgtgccaatttacacttttgtgcaacgcatgaaaatactatttttgtgccagtcttaccaacaaacttggatatttatcaagtgctgtgaatgcatcatctcatttaattatcataccaacatgcaaaatagtgatattattcccattgtatataactgtgctgtgcgctcacatgactgtatggaagagctggctttccaacagttatgctgtgctgcctctttaataattcactttaccttaaatttagttagttgtttctttaatcagatatttagaagattgtcattttggttaataatatatgtgtatgtataaatatatatacacacacatactctgcatcttgtatgtgtatccaacttcattttgaaagattaaaaataagtttgtaacgcctaaatatccttattaaaatactgcaaatc

SEQ ID NO: 3034 - DNA, 977 bp, Homo sapiens
  source 1..977: mol_type = genomic DNA
ctccctggagcccgacgcagagcagcgccctggccgggccaagcaggagccggcatcatggattccttcaaagtagtgctggaggggccagcaccttggggcttccggctgcaagggggcaaggacttcaatgtgcccctctccatttcccggctcactcctgggggcaaagcggcgcaggccggagtggccgtgggtgactgggtgctgagcatcgatggcgagaatgcgggtagcctcacacacatcgaagctcagaacaagatccgggcctgcggggagcgcctcagcctgggcctcagcagggcccagccggttcagagcaaaccgcagaaggcctccgcccccgccgcggaccctccgcggtacacctttgcacccagcgtctccctcaacaagacggcccggccctttggggcgcccccgcccgctgacagcgccccgcagcagaatggacagccgctccgaccgctggtcccagatgccagcaagcagcggctgatggagaacacagaggactggcggccgcggccggggacaggccagtcgcgttccttccgcatccttgcccacctcacaggcaccgagttcatgcaagacccggatgaggagcacctgaagaaatcaagggaaaagtatgtcctggagctgcagagcccacgctacacccgcctccgggactggcaccaccagcgctctgcccacgtgctcaacgtgcagtcgtagcccggccctctccagccggctgccctctctgcctccctctttctgttcctcctgcccagggcacccccttagtgcctccagcttctgcctacctcaccccccctttcgtgcccctggcctgagcctcctgctggcctggccctggccgcccacctgggttcatctgacactgccttccctctttgccctgtggtactgctgtctgccaggtctgtgctgccttgggcatggaataaacattctcagccctg

SEQ ID NO: 3035 - DNA, 1689 bp, Homo sapiens
  source 1..1689: mol_type = genomic DNA
cccaacgaggctccctggagcccgacgcagagcagcgccctggccgggccaagcaggagccggcatcatggattccttcaaagtagtgctggaggggccagcaccttggggcttccggctgcaagggggcaaggacttcaatgtgcccctctccatttcccggctcactcctgggggcaaagcggcgcaggccggagtggccgtgggtgactgggtgctgagcatcgatggcgagaatgcgggtagcctcacacacatcgaagctcagaacaagatccgggcctgcggggagcgcctcagcctgggcctcagcagggcccagccggttcagagcaaaccgcagaaggcctccgcccccgccgcggaccctccgcggtacacctttgcacccagcgtctccctcaacaagacggcccggccctttggggcgcccccgcccgctgacagcgccccgcagcagaatggacagccgctccgaccgctggtcccagatgccagcaagcagcggctgatggagaacacagaggactggcggccgcggccggggacaggccagtcgcgttccttccgcatccttgcccacctcacaggcaccgagttcatgcaagacccggatgaggagcacctgaagaaatcaagccaggtgcccaggacagaagccccagccccagcctcatctacaccccaggagccctggcctggccctaccgcccccagccctaccagccgcccgccctgggctgtggaccctgcgtttgccgagcgctatgccccggacaaaacgagcacagtgctgacccggcacagccagccggccacgcccacgccgctgcagagccgcacctccattgtgcaggcagctgccggaggggtgccaggagggggcagcaacaacggcaagactcccgtgtgtcaccagtgccacaaggtcatccggggccgctacctggtggcgctgggccacgcgtaccacccggaggagtttgtgtgtagccagtgtgggaaggtcctggaagagggtggcttctttgaggagaagggcgccatcttctgcccaccatgctatgacgtgcgctatgcacccagctgtgccaagtgcaagaagaagattacaggcgagatcatgcacgccctgaagatgacctggcacgtgcactgctttacctgtgctgcctgcaagacgcccatccggaacagggccttctacatggaggagggcgtgccctattgcgagcgagactatgagaagatgtttggcacgaaatgccatggctgtgacttcaagatcgacgctggggaccgcttcctggaggccctgggcttcagctggcatgacacctgcttcgtctgtgcgatatgtcagatcaacctggaaggaaagaccttctactccaagaaggacaggcctctctgcaagagccatgccttctctcatgtgtgagccccttctgcccacagctgccgcggtggcccctagcctgaggggcctggagtcgtggccctgcatttctgggtagggctggcaatggttgccttaaccctggctcctggcccgagcctggggctccctgggccctgccccacccaccttatcctcccaccccactccctccaccaccacagcacaccggtgctggccacaccagccccctttcacctccagtgccacaataaacctgtacccagctg

SEQ ID NO: 3036 - DNA, 1647 bp, Homo sapiens
  source 1..1647: mol_type = genomic DNA
agaacactggcggccgatcccaacgaggctccctggagcccgacgcagagcagcgccctggccgggccaagcaggagccggcatcatggattccttcaaagtagtgctggaggggccagcaccttggggcttccggctgcaagggggcaaggacttcaatgtgcccctctccatttcccggctcactcctgggggcaaagcggcgcaggccggagtggccgtgggtgactgggtgctgagcatcgatggcgagaatgcgggtagcctcacacacatcgaagctcagaacaagatccgggcctgcggggagcgcctcagcctgggcctcagcagggcccagccggttcagagcaaaccgcagaaggcctccgcccccgccgcggaccctccgcggtacacctttgcacccagcgtctccctcaacaagacggcccggccctttggggcgcccccgcccgctgacagcgccccgcagcagaatggacagccgctccgaccgctggtcccagatgccagcaagcagcggctgatggagaacacagaggactggcggccgcggccggggacaggccagtcgcgttccttccgcatccttgcccacctcacaggcaccgagttcatgcaagacccggatgaggagcacctgaagaaatcaaggccctaccgcccccagccctaccagccgcccgccctgggctgtggaccctgcgtttgccgagcgctatgccccggacaaaacgagcacagtgctgacccggcacagccagccggccacgcccacgccgctgcagagccgcacctccattgtgcaggcagctgccggaggggtgccaggagggggcagcaacaacggcaagactcccgtgtgtcaccagtgccacaaggtcatccggggccgctacctggtggcgctgggccacgcgtaccacccggaggagtttgtgtgtagccagtgtgggaaggtcctggaagagggtggcttctttgaggagaagggcgccatcttctgcccaccatgctatgacgtgcgctatgcacccagctgtgccaagtgcaagaagaagattacaggcgagatcatgcacgccctgaagatgacctggcacgtgcactgctttacctgtgctgcctgcaagacgcccatccggaacagggccttctacatggaggagggcgtgccctattgcgagcgagactatgagaagatgtttggcacgaaatgccatggctgtgacttcaagatcgacgctggggaccgcttcctggaggccctgggcttcagctggcatgacacctgcttcgtctgtgcgatatgtcagatcaacctggaaggaaagaccttctactccaagaaggacaggcctctctgcaagagccatgccttctctcatgtgtgagccccttctgcccacagctgccgcggtggcccctagcctgaggggcctggagtcgtggccctgcatttctgggtagggctggcaatggttgccttaaccctggctcctggcccgagcctggggctccctgggccctgccccacccaccttatcctcccaccccactccctccaccaccacagcacaccggtgctggccacaccagccccctttcacctccagtgccacaataaacctgtacccagctgtg

SEQ ID NO: 3037 - DNA, 1567 bp, Homo sapiens
  source 1..1567: mol_type = genomic DNA
cgacgcagagcagcgccctggccgggccaagcaggagccggcatcatggattccttcaaagtagtgctggaggggccagcaccttggggcttccggctgcaagggggcaaggacttcaatgtgcccctctccatttcccggctcactcctgggggcaaagcggcgcaggccggagtggccgtgggtgactgggtgctgagcatcgatggcgagaatgcgggtagcctcacacacatcgaagctcagaacaagatccgggcctgcggggagcgcctcagcctgggcctcagcagggcccagccggttcagagcaaaccgcagaaggtgcagacccctgacaaacagccgctccgaccgctggtcccagatgccagcaagcagcggctgatggagaacacagaggactggcggccgcggccggggacaggccagtcgcgttccttccgcatccttgcccacctcacaggcaccgagttcatgcaagacccggatgaggagcacctgaagaaatcaagccaggtgcccaggacagaagccccagccccagcctcatctacaccccaggagccctggcctggccctaccgcccccagccctaccagccgcccgccctgggctgtggaccctgcgtttgccgagcgctatgccccggacaaaacgagcacagtgctgacccggcacagccagccggccacgcccacgccgctgcagagccgcacctccattgtgcaggcagctgccggaggggtgccaggagggggcagcaacaacggcaagactcccgtgtgtcaccagtgccacaaggtcatccggggccgctacctggtggcgctgggccacgcgtaccacccggaggagtttgtgtgtagccagtgtgggaaggtcctggaagagggtggcttctttgaggagaagggcgccatcttctgcccaccatgctatgacgtgcgctatgcacccagctgtgccaagtgcaagaagaagattacaggcgagatcatgcacgccctgaagatgacctggcacgtgcactgctttacctgtgctgcctgcaagacgcccatccggaacagggccttctacatggaggagggcgtgccctattgcgagcgagactatgagaagatgtttggcacgaaatgccatggctgtgacttcaagatcgacgctggggaccgcttcctggaggccctgggcttcagctggcatgacacctgcttcgtctgtgcgatatgtcagatcaacctggaaggaaagaccttctactccaagaaggacaggcctctctgcaagagccatgccttctctcatgtgtgagccccttctgcccacagctgccgcggtggcccctagcctgaggggcctggagtcgtggccctgcatttctgggtagggctggcaatggttgccttaaccctggctcctggcccgagcctggggctccctgggccctgccccacccaccttatcctcccaccccactccctccaccaccacagcacaccggtgctggccacaccagccccctttcacctccagtgccacaataaacctgtacccagctgtg

SEQ ID NO: 3038 - DNA, 759 bp, Homo sapiens
  source 1..759: mol_type = genomic DNA
ggggaggccgcgccagtttagtccctcggcccacccctggttgcaaagaacctcaagcctggattcaggcacccctcaccgttccagtcccaaggggaggggggctgctcctgtctttccaaagtgaggtccgccagccagcagcccaggccagcctgacaaaatacctgcctcctatggcttgggcgtgctcaggggctgcccgtgcctgcctggcccctgtccaaggagccggcatcatggattccttcaaagtagtgctggaggggccagcaccttggggcttccggctgcaagggggcaaggacttcaatgtgcccctctccatttcccggctcactcctgggggcaaagcggcgcaggccggagtggccgtgggtgactgggtgctgagcatcgatggcgagaatgcgggtagcctcacacacatcgaagctcagaacaagatccgggcctgcggggagcgcctcagcctgggcctcagcagggcccagccggttcagagcaaaccgcagaaggcctccgcccccgccgcggaccctccgcggtacacctttgcacccagcgtctccctcaacaagacggcccggccctttggggcgcccccgcccgctgacagcgccccgcagcagaatggacagccgctccgaccgctggtcccagatgccagcaagcagcggctgatggagaacacagaggactggcggccgcggccggggacaggccagtcgcgttccttccgcatccttgcccacctca

SEQ ID NO: 3039 - DNA, 636 bp, Homo sapiens
  source 1..636: mol_type = genomic DNA
ccggcccctgactcacccggccgcccgaggctccaggctggcttggggggaggccgcgccagtttagtccctcggcccacccctggttgcaaagaacctcaagcctggattcaggcacccctcaccgttccagtcccaaggggaggggggctgctcctgtctttccaaagtgaggtccgccagccagcagcccaggccagcctgacaaaatacctgcctcctatggcttgggcgtgctcaggggctgcccgtgcctgcctggcccctgtccaaggctggtatcctgagctggcccggcctgcctgcctgcccgcccaccatgctggccactcaccttctcttctctcctctcaggagccggcatcatggattccttcaaagtagtgctggaggggccagcaccttggggcttccggctgcaagggggcaaggacttcaatgtgcccctctccatttcccggctcactcctgggggcaaagcggcgcaggccggagtggccgtgggtgactgggtgctgagcatcgatggcgagaatgcgggtagcctcacacacatcgaagctcagaacaagatccgggcctgcggggagcgcctcagcctgggcctcagcagggcccagccggttcagagcaaac

SEQ ID NO: 3040 - DNA, 997 bp, Homo sapiens
  source 1..997: mol_type = genomic DNA
aggcgctgcggcaggagggaagatggcggacgaggagaagctgccgcccggctgggagaagcgcatgagccgcagctcaggccgagtgtactacttcaaccacatcactaacgccagccagtgggagcggcccagcggcaacagcagcagtggtggcaaaaacgggcagggggagcctgccagggtccgctgctcgcacctgctggtgaagcacagccagtcacggcggccctcgtcctggcggcaggagaagatcacccggaccaaggaggaggccctggagctgatcaacggctacatccagaagatcaagtcgggagaggaggactttgagtctctggcctcacagttcagcgactgcagctcagccaaggccaggggagacctgggtgccttcagcagaggtcagatgcagaagccatttgaagacgcctcgtttgcgctgcggacgggggagatgagcgggcccgtgttcacggattccggcatccacatcatcctccgcactgagtgagggtggggagcccaggcctggcctcggggcagggcagggcggctaggccggccagctcccccttgcccgccagccagtggccgaaccccccactccctgccaccgtcacacagtatttattgttcccacaatggctgggagggggcccttccagattgggggccctggggtccccactccctgtccatccccagttggggctgcgaccgccagattctcccttaaggaattgacttcagcaggggtgggaggctcccagacccagggcagtgtggtgggaggggtgttccaaagagaaggcctggtcagcagagccgccccgtgtccccccaggtgctggaggcagactcgagggccgaattgtttctagttaggccacgctcctctgttcagtcgcaaaggtgaacactcatgcggcccagccatgggccctctgagcaactgtgcagcaccctttcacccccaattaaacccagaaccact

SEQ ID NO: 3041 - DNA, 1672 bp, Homo sapiens
  source 1..1672: mol_type = genomic DNA
cgcgtaagcagggctcgagctcgccccttgggcgcggcggcagcgctgcctccctcccatggggtcctggctcttccgcgtcgtccccggggtaacggccccggcccgccctgttgtggggactgcgagcctcaggagccgccgggaagcctgaggaagctgaggcagggggctgggcgggtgagggtccggggagtccggggcgatggccctggccctgccggcccggctgatacctctcggcctaatgcacctgacaccccgggggacgtctctgcaccttgctgggcccgggggcacccctgggagggagacaccccagtaccctgcaaagggcgtagggtgttgcccggcctcgggtccacaacctacccctgctaacacccctactgtgtacacctaatgctgagtctgcgacatcgcccgtgacattctgccagacgatggcccctgtgcttaggcccgatttaagggttagccacaatgataatattgccagtaacagggcatgtttttctctgtgtcaagcgctttaagttctctctgaattgccgcaactctgggagccagatgagaaaactgaggtgcagggagattagagcccattgccaaggttttagagtgagtcagtagctcagctgcatttgcacctggaacccgcgctctcgcccaccctgctctagccctggcctgtggctgggacctccagcataaaccggatgctctgcccagctctgggcccatttctgctgtttctgctcagttcaaccctgatggcttcctttatgggtgacactccatgtcacccaggcgaactgtcagcctttggagtggcacccagtagggtctttacttccagtttcttgttcacagtcttcactccttcatacccctcactccctgggtaacatcgggccaccagtaatgctggttcctagctctgcaacaccatgcacggtgtagtagctaagagcagagctttcgggtgtgaagtacctgagtacagttcctgccttcccctgtgtgtgcctggaacagagtaaacactcaggaagcgttacccactgctgccattcccagagatgcaaaaggccgagtgtactacttcaaccacatcactaacgccagccagtgggagcggcccagcggcaacagcagcagtggtggcaaaaacgggcagggggagcctgccagggtccgctgctcgcacctgctggtgaagcacagccagtcacggcggccctcgtcctggcggcaggagaagatcacccggaccaaggaggaggccctggagctgatcaacggctacatccagaagatcaagtcgggagaggaggactttgagtctctggcctcacagttcagcgactgcagctcagccaaggccaggggagacctgggtgccttcagcagaggtcagatgcagaagccatttgaagacgcctcgtttgcgctgcggacgggggagatgagcgggcccgtgttcacggattccggcatccacatcatcctccgcactgagtgctggaggcagactcgagggccgaattgtttctagttaggccacgctcctctgttcagtcgcaaaggtgaacactcatgcggcccagccatgggccctctgagcaactgtgcagcaccctttcacccccaattaaacccagaaccactg

SEQ ID NO: 3042 - DNA, 1656 bp, Homo sapiens
  source 1..1656: mol_type = genomic DNA
aggcgctgcggcaggagggaagatggcggacgaggagaagctgccgcccggctgggagaagcgcatgagccgcagctcaggccgagtgtactacttcaaccacatcactaacgccagccagtgggagcggcccagcggcaacagcagcagtggtggcaaaaacgggcagggggagcctgccagggtccgctgctcgcacctgctggtgaagcacagccagtcacggcggccctcgtcctggcggcaggagaagatcacccggaccaaggaggaggccctggagctgatcaacggctacatccagaagatcaagtcgggagaggaggactttgagtctctggcctcacagttcagcgactgcagctcagccaaggccaggggagacctgggtgccttcagcagaggtgcgcaaggaatgggcctcaccaggttgggggacccttaccaccctgaggggtagaggccaggagggtctgggcattgggctcccaggtgccacaccggccttcggggtccagcaggtggcagcacagccccttcctcaggcttcagaggctgctctgctgggcagggccagggccacacagggaggggggctgcagcactttcttcctggcatcatctctaccctggggggcatggtctcttgtgtgtctgtgcacgtgtcttagtggggtggggcggcagcatggggccagcagctgcccacctcctccgaggaggctggtgggacagatgacatggcagggctgggaaccaggcccagggagacgagttcactaccgaagtggcccctaaatgcacggcggcggccgtagccctgcctgctatccttcatgctgtcctcgggcttcccagggcctccttaatggccctgccacccccagctgggccgccgctcagcactggcaataaacatggtgacggatgagtgtggacgagtgtgaggctcagcgcaggcaggagccccatctgtcgcggctgccacccgccctgcctcatcctggcctctgccagcccagccctgacacccccaccgcccctcctggctcccaggtcagatgcagaagccatttgaagacgcctcgtttgcgctgcggacgggggagatgagcgggcccgtgttcacggattccggcatccacatcatcctccgcactgagtgagggtggggagcccaggcctggcctcggggcagggcagggcggctaggccggccagctcccccttgcccgccagccagtggccgaaccccccactccctgccaccgtcacacagtatttattgttcccacaatggctgggagggggcccttccagattgggggccctggggtccccactccctgtccatccccagttggggctgcgaccgccagattctcccttaaggaattgacttcagcaggggtgggaggctcccagacccagggcagtgtggtgggaggggtgttccaaagagaaggcctggtcagcagagccgccccgtgtccccccaggtgctggaggcagactcgagggccgaattgtttctagttaggccacgctcctctgttcagtcgcaaaggtgaacactcatgcggcccagccatgggccctctgagcaactgtgcagcaccctttcacccccaattaaacccagaaccactgctctgc

SEQ ID NO: 3043 - DNA, 1329 bp, Homo sapiens
  source 1..1329: mol_type = genomic DNA
atgaccatggttgacacagagatgccattctggcccaccaactttgggatcagctccgtggatctctccgtaatggaagaccactcccactcctttgatatcaagcccttcactactgttgacttctccagcatttctactccacattacgaagacattccattcacaagaacagatccagtggttgcagattacaagtatgacctgaaacttcaagagtaccaaagtgcaatcaaagtggagcctgcatctccaccttattattctgagaagactcagctctacaataagcctcatgaagagccttccaactccctcatggcaattgaatgtcgtgtctgtggagataaagcttctggatttcactatggagttcatgcttgtgaaggatgcaagggtttcttccggagaacaatcagattgaagcttatctatgacagatgtgatcttaactgtcggatccacaaaaaaagtagaaataaatgtcagtactgtcggtttcagaaatgccttgcagtggggatgtctcataatgaggaactacaaaaggatagttattagattgccaaatcctgcagaacctccagcaggcacaagttggtttttctccctcaagaaagagaagtgagccaagcgtggtggtgcatgcctgtggtcccagctactcaggaggctgagccatcaggtttgggcggatgccacaggccgagaaggagaagctgttggcggagatctccagtgatatcgaccagctgaatccagagtccgctgacctccgggccctggcaaaacatttgtatgactcatacataaagtccttcccgctgaccaaagcaaaggcgagggcgatcttgacaggaaagacaacagacaaatcaccattcgttatctatgacatgaattccttaatgatgggagaagataaaatcaagttcaaacacatcacccccctgcaggagcagagcaaagaggtggccatccgcatctttcagggctgccagtttcgctccgtggaggctgtgcaggagatcacagagtatgccaaaagcattcctggttttgtaaatcttgacttgaacgaccaagtaactctcctcaaatatggagtccacgagatcatttacacaatgctggcctccttgatgaataaagatggggttctcatatccgagggccaaggcttcatgacaagggagtttctaaagagcctgcgaaagccttttggtgactttatggagcccaagtttgagtttgctgtgaagttcaatgcactggaattagatgacagcgacttggcaatatttattgctgtcattattctcagtggag

SEQ ID NO: 3044 - DNA, 1988 bp, Homo sapiens
  source 1..1988: mol_type = genomic DNA
ctagtcggctcctcaacgtggagcgatgggaggccttgagaagaagaagtatgaacgaggctcggccaccaactacatcacccggaacaaagcccggaagaagctccagctgagcttggctgactttaggcggctgtgcattctgaagggcatttatccccatgaacccaaacacaagaagaaggttaacaagggttctacagcagcccgaacgttttaccttatcaaagacatcaggtttctcctccacgaacccattgtcaacaagttccgtgaatacaaggtgttcgtccggaagctccggaaggcttatgggaagagcgagtggaacactgtagagcgtttaaaggacaataagcccaactacaaactcgaccacatcatcaaggaacggtatcccacgttcatcgatgccctgcgggacctggacgatgccctctccatgtgcttcctgttttccaccttcccgcggactggcaagtgccacgtgcagaccattcagctgtgccgccggctcactgtggagttcatgcactacattatcgctgcccgtgccctgcgcaaggtcttcctgtccatcaaaggcatttactaccaggccgaggtactggggcagcccatcgtgtggatcactccctatgccttctcccatgaccacccgacagacgtggactacagggtcatggccaccttcaccgagttctacaccacgctgctgggctttgtcaacttccgcctttaccagttgctcaacctccactatcccccgaagctcgagggtcaggcccaagcagaggcaaaggccggtgagggcacctacgcgttggactccgagagttgtatggagaaactggcagccctcagtgccagcctggcccgcgtggtggtgcctgccacagaggaggaggccgaggtggatgagtttcccaccgatggggaggaagaccgcaggaaggagctggaggcgcaggagaagcacaagaagctttttgagggcctgaagttcttcctgaaccgagaggtgccccgtgaggccctggccttcatcatcaggagttttggtggggaagtgtcctgggacaaatctttgtgcattggggccacctatgacgtcacagactcccgcatcacccatcagattgtcgaccggcctgggcagcagacctcagtcattggcaggtgctacgtgcagccccagtgggtgtttgactcagtgaacgccaggctccttctccccgtggcagagtacttctctggggtgcagctgcccccacacctttcaccctttgtgaccgagaaggaaggagattacgttccacctgagaagctgaagctgctggctctgcagcggggagaggacccaggaaacctgaatgagtcagaagaggaggaggaagaggacgacaacaacgaaggtgatggtgatgaagagggagaaaatgaggaggaggaggaagatgcagaggctggttcagaaaaggaggaagaggcccggctggcagccctggaagagcagaggatggaggggaagaagcccagggtgatggcaggcaccttgaagctggaggataagcagcggctggcccaggaggaggagagtgaggccaagcgcctggccattatgatgatgaagaagcgggagaagtacctgtaccagaagatcatgtttggcaagaggcgaaaaatccgagaggccaacaagctggcggagaagcggaaagcccacgatgaggcggtgaggtctgagaagaaggccaagaaggcaaggccggagtgagtgcctgcggcccctcacagggctgaggccagcccctagcagctggatgtggcagaggcaggccagaggacctaagtgtgatggaccagagtcacttctcctcctcctttctccagccagccctgacccctcatgctctctggctgggccagtgggcagccctcgcttcccttggatggagctgccctgctggtgcctggtcagagaagag

SEQ ID NO: 3045 - DNA, 2292 bp, Homo sapiens
  source 1..2292: mol_type = genomic DNA
agacagcgtggggtggggagggtcctcggggtccttggcagggcacgtgcgggaggaagtggagctccctgtacgcgcggccctagtcggctcctcaacgtggagcgatgggaggccttgagaagaagaagtatgaacgaggctcggccaccaactacatcacccggaacaaagcccggaagaagctccagctgagcttggctgactttaggcggctgtgcattctgaagggcatttatccccatgaacccaaacacaagaagaaggttaacaagggttctacagcagcccgaacgttttaccttatcaaagacatcaggtttctcctccacgaacccattgtcaacaagttccgtgaatacaaggtgttcgtccggaagctccggaaggcttatgggaagagcgagtggaacactgtagagcgtttaaaggacaataagcccaactacaaactcgaccacatcatcaaggaacggtatcccacgttcatcgatgccctgcgggacctggacgatgccctctccatgtgcttcctgttttccaccttcccgcggactggcaagtgccacgtgcagaccattcagctgtgccgccggctcactgtggagttcatgcactacattatcgctgcccgtgccctgcgcaaggtcttcctgtccatcaaaggcatttactaccaggccgaggtactggggcagcccatcgtgtggatcactccctatgccttctcccatgaccacccgacagacgtggactacagggtcatggccaccttcaccgagttctacaccacgctgctgggctttgtcaacttccgcctttaccagttgctcaacctccactatcccccgaagctcgagggtcaggcccaagcagaggcaaaggccggtgagggcacctacgcgttggactccgagagttgtatggagaaactggcagccctcagtgccagcctggcccgcgtggtggtgcctgccacagaggaggaggccgaggtggatgagtttcccaccgatggggagatgtcagcgcaggaggaagaccgcaggaaggagctggaggcgcaggagaagcacaagaagctttttgagggcctgaagttcttcctgaaccgagaggtgccccgtgaggccctggccttcatcatcaggagttttggtggggaagtgtcctgggacaaatctttgtgcattggggccacctatgacgtcacagactcccgcatcacccatcagattgtcgaccggcctgggcagcagacctcagtcattggcaggtgctacgtgcagccccagtgggtgtttgactcagtgaacgccaggctccttctccccgtggcagagtacttctctggggtgcagctgcccccacacctttcaccctttgtgaccgagaaggaaggagattacgttccacctgagaagctgaagctgctggctctgcagcggggagaggacccaggaaacctgaatgagtcagaagaggaggaggaagaggacgacaacaacgaaggtgatggtgatgaagagggagaaaatgaggaggaggaggaagatgcagaggctggttcagaaaaggaggaagaggcccggctggcagccctggaagagcagaggatggaggggaagaagcccagggtgatggcaggcaccttgaagctggaggataagcagcggctggcccaggaggaggagagtgaggccaagcgcctggccattatgatgatgaagaagcgggagaagtacctgtaccagaagatcatgtttggcaagaggcgaaaaatccgagaggccaacaagctggcggagaagcggaaagcccacgatgaggcggtgaggtctgagaagaaggccaagaaggcaaggccggagtgagtgcctgcggcccctcacagggctgaggccagcccctagcagctggatgtggcagaggcaggccagaggacctaagtgtgatggaccagagtcacttctcctcctcctttctccagccagccctgacccctcatgctctctggctgggccagtgggcagccctcgcttcccttggatggagctgccctgctggtgcctggtcagagaagaggcctctgtgcccagcctgattctctgctcccaggagccagtgacatgaggtgcagaggcccacccagccccctacctactgcccccattcatcctggctttccacagccccctcccacacagttggacccgtgattctcagggtgctgtgatggggtgagggtagggggagcatttgttattaaatgactggacttttgtgccaatt

SEQ ID NO: 3046 - DNA, 2760 bp, Homo sapiens
  source 1..2760: mol_type = genomic DNA
agggaacaaagggaggaggagggctagtgggaccatgtgagacatcttgaggccattcacgttcctgcttaaagagcccgggaccagcgcagagggcctgatgcctgatctgtcaagtctgtccgaccgtgcctgtctgctgtccccccagctgttccagtggtggattggcaggaccgggtgcctacccggtactccttaccaaaggagcccctggtagtgcccacctagcccaggacaaggagtggaacgggagctgcagctgcagtggtcacgaaggcagcctggaggaggtggccatggaggatagccttcgttatcgtcagcctctgccgcataaccgcgaatgaaccaaagagaacccgaagccggtgggaactcagcgcagtctcaccctgcccctcgggaaccgcttctcagcagcggcagccgaagtctgacgacgcttagcaaccgttaccttgacaacgcaatcctatcgcgcaccatggagtgcggcgcccctctgcatcccagaaggcaccgcgctgtccctaagccttccgcccctctccgtcccaacatgcaacgaggctcacagtcaatgaatcgtcatcaggtatgaacgaggctcggccaccaactacatcacccggaacaaagcccggaagaagctccagctgagcttggctgactttaggcggctgtgcattctgaagggcatttatccccatgaacccaaacacaagaagaaggttaacaagggttctacagcagcccgaacgttttaccttatcaaagacatcaggtttctcctccacgaacccattgtcaacaagttccgtgaatacaaggtgttcgtccggaagctccggaaggcttatgggaagagcgagtggaacactgtagagcgtttaaaggacaataagcccaactacaaactcgaccacatcatcaaggaacggtatcccacgttcatcgatgccctgcgggacctggacgatgccctctccatgtgcttcctgttttccaccttcccgcggactggcaagtgccacgtgcagaccattcagctgtgccgccggctcactgtggagttcatgcactacattatcgctgcccgtgccctgcgcaaggtcttcctgtccatcaaaggcatttactaccaggccgaggtactggggcagcccatcgtgtggatcactccctatgccttctcccatgaccacccgacagacgtggactacagggtcatggccaccttcaccgagttctacaccacgctgctgggctttgtcaacttccgcctttaccagttgctcaacctccactatcccccgaagctcgagggtcaggcccaagcagaggcaaaggccggtgagggcacctacgcgttggactccgagagttgtatggagaaactggcagccctcagtgccagcctggcccgcgtggtggtgcctgccacagaggaggaggccgaggtggatgagtttcccaccgatggggagatgtcagcgcaggaggaagaccgcaggaaggagctggaggcgcaggagaagcacaagaagctttttgagggcctgaagttcttcctgaaccgagaggtgccccgtgaggccctggccttcatcatcaggagttttggtggggaagtgtcctgggacaaatctttgtgcattggggccacctatgacgtcacagactcccgcatcacccatcagattgtcgaccggcctgggcagcagacctcagtcattggcaggtgctacgtgcagccccagtgggtgtttgactcagtgaacgccaggctccttctccccgtggcagagtacttctctggggtgcagctgcccccacacctttcaccctttgtgaccgagaaggaaggagattacgttccacctgagaagctgaagctgctggctctgcagcggggagaggacccaggaaacctgaatgagtcagaagaggaggaggaagaggacgacaacaacgaaggtgatggtgatgaagagggagaaaatgaggaggaggaggaagatgcagaggctggttcagaaaaggaggaagaggcccggctggcagccctggaagagcagaggatggaggggaagaagcccagggtgatggcaggcaccttgaagctggaggataagcagcggctggcccaggaggaggagagtgaggccaagcgcctggccattatgatgatgaagaagcgggagaagtacctgtaccagaagatcatgtttggcaagaggcgaaaaatccgagaggccaacaagctggcggagaagcggaaagcccacgatgaggcggtgaggtctgagaagaaggccaagaaggcaaggccggagtgagtgcctgcggcccctcacagggctgaggccagcccctagcagctggatgtggcagaggcaggccagaggacctaagtgtgatggaccagagtcacttctcctcctcctttctccagccagccctgacccctcatgctctctggctgggccagtgggcagccctcgcttcccttggatggagctgccctgctggtgcctggtcagagaagaggcctctgtgcccagcctgattctctgctcccaggagccagtgacatgaggtgcagaggcccacccagccccctacctactgcccccattcatcctggctttccacagccccctcccacacagttggacccgtgattctcagggtgctgtgatggggtgagggtagggggagcatttgttattaaatgactggacttttgtgccaatt

SEQ ID NO: 3047 - DNA, 2708 bp, Homo sapiens
  source 1..2708: mol_type = genomic DNA
gcctgatgcctgatctgtcaagtctgtccgaccgtgcctgtctgctgtccccccagctgttccagtggtggattggcaggaccgggtgcctacccggtactccttaccaaaggagcccctggtagtgcccacctagcccaggacaaggagtggaacgggagctgcagctgcagtggtcacgaaggcagcctggaggaggtggccatggaggatagccttcgttatcgtcagcctctggtgagaagcagcagcatccttccagagagtcacttctgatccccaagccgcataaccgcgaatgaaccaaagagaacccgaagccggtgggaactcagcgcagtctcaccctgcccctcgggaaccgcttctcagcagcggcagccgaagtctgacgacgcttagcaaccgttaccttgacaacgcaatcctatcgcgcaccatggagtgcggcgcccctctgcatcccagaaggcaccgcgctgtccctaagccttccgcccctctccgtcccaacatgcaacgaggctcacagtcaatgaatcgtcatcaggtatgaacgaggctcggccaccaactacatcacccggaacaaagcccggaagaagctccagctgagcttggctgactttaggcggctgtgcattctgaagggcatttatccccatgaacccaaacacaagaagaaggttaacaagggttctacagcagcccgaacgttttaccttatcaaagacatcaggtttctcctccacgaacccattgtcaacaagttccgtgaatacaaggtgttcgtccggaagctccggaaggcttatgggaagagcgagtggaacactgtagagcgtttaaaggacaataagcccaactacaaactcgaccacatcatcaaggaacggtatcccacgttcatcgatgccctgcgggacctggacgatgccctctccatgtgcttcctgttttccaccttcccgcggactggcaagtgccacgtgcagaccattcagctgtgccgccggctcactgtggagttcatgcactacattatcgctgcccgtgccctgcgcaaggtcttcctgtccatcaaaggcatttactaccaggccgaggtactggggcagcccatcgtgtggatcactccctatgccttctcccatgaccacccgacagacgtggactacagggtcatggccaccttcaccgagttctacaccacgctgctgggctttgtcaacttccgcctttaccagttgctcaacctccactatcccccgaagctcgagggtcaggcccaagcagaggcaaaggccggtgagggcacctacgcgttggactccgagagttgtatggagaaactggcagccctcagtgccagcctggcccgcgtggtggtgcctgccacagaggaggaggccgaggtggatgagtttcccaccgatggggagatgtcagcgcaggaggaagaccgcaggaaggagctggaggcgcaggagaagcacaagaagctttttgagggcctgaagttcttcctgaaccgagaggtgccccgtgaggccctggccttcatcatcaggagttttggtggggaagtgtcctgggacaaatctttgtgcattggggccacctatgacgtcacagactcccgcatcacccatcagattgtcgaccggcctgggcagcagacctcagtcattggcaggtgctacgtgcagccccagtgggtgtttgactcagtgaacgccaggctccttctccccgtggcagagtacttctctggggtgcagctgcccccacacctttcaccctttgtgaccgagaaggaaggagattacgttccacctgagaagctgaagctgctggctctgcagcggggagaggacccaggaaacctgaatgagtcagaagaggaggaggaagaggacgacaacaacgaaggtgatggtgatgaagagggagaaaatgaggaggaggaggaagatgcagaggctggttcagaaaaggaggaagaggcccggctggcagccctggaagagcagaggatggaggggaagaagcccagggtgatggcaggcaccttgaagctggaggataagcagcggctggcccaggaggaggagagtgaggccaagcgcctggccattatgatgatgaagaagcgggagaagtacctgtaccagaagatcatgtttggcaagaggcgaaaaatccgagaggccaacaagctggcggagaagcggaaagcccacgatgaggcggtgaggtctgagaagaaggccaagaaggcaaggccggagtgagtgcctgcggcccctcacagggctgaggccagcccctagcagctggatgtggcagaggcaggccagaggacctaagtgtgatggaccagagtcacttctcctcctcctttctccagccagccctgacccctcatgctctctggctgggccagtgggcagccctcgcttcccttggatggagctgccctgctggtgcctggtcagagaagaggcctctgtgcccagcctgattctctgctcccaggagccagtgacatgaggtgcagaggcccacccagccccctacctactgcccccattcatcctggctttccacagccccctcccacacagttggacccgtgattctcagggtgctgtgatggggtgagggtagggggagcatttgttattaaatgactggacttttgtgcc

SEQ ID NO: 3048 - DNA, 6156 bp, Homo sapiens
  source 1..6156: mol_type = genomic DNA
atggagcccgccgccgcggccacggtacagcgactccccgagctcggcagggaggaccgagcttcggctccggcggccgccgctgcggcagcagcagcagcagcggcggccgcggcggctctggcggcggcggccgggggcggccggagtccggagcccgcgctgaccccggcggccccgagcggcgggaacggcagcggcagcggggcgcgggaagaggccccaggcgaggcgccgccggggccgctgccgggcagagcggggggtgccgggcgcaggaggcggcgcggggcgccccagcccattgccggcggggctgcccccgtacccggggccggcggcggcgccaactccctcctgctgaggagagggcggctgaagaggaatctgtccgcggccgccgcggccgcctcctcgtcgtcgtcgtcctcggccgctgctgcctcgcactcccccggcgctgccggcctccccgcctcctgctcggcctcggcgtcgctgtgcacccggagcctggacaggaagacgctgcttctgaagcaccggcagacgctgcagctgcagccgtcggaccgggactgggtgaggcaccagctccagcgcggctgcgtgcacgtcttcgaccgccacatggcctcgacctacctgcgcccggtgctctgcacactggacaccacggccggcgaggtggccgcccgcctgctgcagctgggccacaaaggcggcggcgtggtgaaggtgctgggccaggggcccggagccgccgccgcccgggagcccgctgaaccgccccccgaggccggcccccggctggcgcccccggagccgcgggactcggaggtaccgcccgcgaggagcgcgccgggtgccttcggggggcctccgcgcgcgccccccgccgacctacccctgcccgtcggcggcccgggcgggtggtcgcgccgcgccagcccagcgccctcggactccagccccggcgagccgttcgttgggggccctgtctcttcgccccgcgccccacggcctgtggtctccgacaccgagagcttcagtctgagtcccagcgccgagagcgtgtctgaccggttggacccctacagcagcggcggcggctcctcgtcgtcgtcggaagagctcgaggccgacgcagcctcggccccgacgggggtcccgggccagccccgccgtcccggccaccccgcgcagcccctcccgcttccccagacggcttcctcgcctcagccgcagcagaaagccccgagggccattgacagcccgggcggggccgtccgcgaggggtcgtgcgaggagaaggcagcggcagccgtggccccgggaggcctccagtctacccccgggaggagcggggtgaccgcggagaaggcgcctccgccgcccccgccgcccaccctgtacgtgcagctccacggagagaccacccggcgcttggaggcggaggagaagccattgcagatccaaaatgactacctcttccaactgggatttggggagctgtggagggtgcaggaggaaggcatggactcggagattggctgcctcatccgcttctatgcaggaaaacctcacagcacgggtagctctgaacggattcagctctcaggaatgtataatgtccgtaaaggcaagatgcagttgccagtgaaccgatggacaagacgccaagtcatcctatgtgggacctgcctgatagtatcatctgtgaaagacagcttgaccggaaagatgcatgttctgccactaattggtggaaaagtagaagaagtgaaaaagcaccaacactgtttagcatttagctcctctggaccccaaagccagacttactacatttgctttgatactttcacagaatacttaaggtggctgcgacaagtctccaaggttgcatcccagcgcattagctcagtggacctctcgtgttgtagcctggaacatctgcctgccaacctcttctacagccaagacctcactcatctcaatttaaaacaaaacttcctaaggcagaaccctagccttccagctgccagggggcttaatgaactgcaaaggttcaccaagttgaagagtcttaacctttccaataatcatttaggggacttcccactggcagtctgcagtattccaaccctggcagagctgaacgtgtcctgcaatgccctgcgatcagtcccggcagccgttggagtgatgcacaacttacagacatttttgttggatggaaactttctccaatcccttcctgctgagttggagaacatgaagcagcttagttatctgggtctttctttcaatgaatttactgacattcccgaagtattggagaaattgactgctgtggataaactttgtatgtctggaaactgtgtggagacccttaggctacaggctttaagaaaaatgcctcacattaaacatgtggatctaaggttgaacgtaattaggaagctgatagcagatgaagtggactttctacagcatgttactcagcttgacctacgagacaataagcttggtgatctagatgctatgattttcaacaacattgaagttttacactgtgaaaggaatcaactggtcacattagacatctgtggctatttcctaaaagcgctctatgcctcttctaatgaacttgttcaacttgatgtttacccagttccaaattatctgtcctacatggatgtttcaaggaaccgcttagaaaatgtgcctgagtgggtatgtgaaagccgaaagctagaagttttggatattggccataatcaaatatgtgaacttcctgcccgcttattttgtaatagcagtctccggaaactactggcaggacacaaccagttggcaaggctgcctgaaaggctagaaagaacctcggtggaggtcttggatgtgcaacacaaccagctccttgagctcccacctaaccttctgatgaaggctgacagcctgagattcctgaacgcctctgcgaacaaactggaaagccttcctccagccacgctttccgaagagacaaacagtatcttacaagagttgtatttgacaaataacagcctcacagacaaatgtgtgcccttgttaacgggacacccccatttgaagatccttcacatggcctataaccgacttcagagttttccagcaagtaaaatggcgaaactggaggaacttgaagaaattgatctcagtgggaataagctgaaagccatcccaacaacgatcatgaattgcaggcgcatgcacaccgtgattgctcactccaactgcatcgaggtctttcccgaagttatgcagctcccagagatcaagtgtgtggacctgagctgtaatgagctaagtgaagtcacattaccagaaaacctgcctcccaaactgcaggagctagacctgactggaaacccgcgccttgtccttgatcacaaaaccctggaactactgaataatatccgctgtttcaagattgatcagccttctacaggagacgcttccggagccccagctgtatggagtcatggttacactgaagcttcgggggtaaaaaacaagttgtgtgtcgcagccctgtcggtgaataacttctgtgacaaccgcgaagccctgtatggtgtgtttgacggagaccggaatgtggaggtgccctaccttctccagtgcactatgagtgacattttggctgaagagctgcaaaaaacaaaaaacgaagaagaatacatggtcaatacattcattgtcatgcaaaggaaacttggaactgctgggcagaagcttggtggtgccgctgtcctttgtcatatcaagcatgaccctgtggatccaggaggatccttcaccttgacctctgctaatgtgggcaagtgccaaacagttctctgtcgaaatggaaagccgctgcctctgtccagatcttacatcatgagctgtgaagaagagctgaagaggattaaacagcacaaggccattatcactgaggatggcaaggtgaacggagtgactgagtccacgcgcatcctgggctacaccttcctccatcccagtgtggtgcctcgcccccacgtgcagtccgtgctcctgactccccaggatgagttcttcatcctaggcagtaaggggttgtgggacagcctgtccgtcgaggaggccgtggaagccgtgcgcaacgtgcccgatgccctggctgctgccaagaagctgtgtaccctggcccagagctacggctgccacgacagcatcagcgctgtggtggtgcagctcagtgtcactgaggacagcttctgctgctgcgagctcagcgccggtggggctgtgccaccacccagtcctggcatctttcctccctcagtgaacatggtgatcaaggatcggccctcagatgggctgggcgtgccgtcctccagcagcggcatggcttccgagattagcagtgagctctccacttctgagatgagcagcgaggtggggtcaacagcctccgatgagcccccgcccggagccctaagcgagaacagccctgcctaccccagtgagcagcgctgcatgctccaccccatctgtctgtccaactccttccagcgccagctatccagcgccacgttctctagcgccttctccgacaacggccttgacagtgacgatgaggagcccatcgagggcgtcttcaccaacggcagccgggtggaggtggaggtggacatccactgcagccgggccaaggagaaggagaaacagcagcacctgcttcaggtgccagcagaggccagtgatgagggcattgtcatcagcgccaacgaggatgagccaggtctgcccaggaaggcagacttctctgccgttgggaccattgggcgccggagggccaatggctctgttgcgccccaggaaaggagccacaatgtgatagaggtggctacagacgcacctcttcgaaagcctggaggctattttgctgccccggctcagccggatcctgatgatcagtttatcatacccccggagctggaagaggaggtcaaagaaatcatgaagcatcaccaggagcaacagcagcagcagcagccgccaccaccccctcagctccagccgcagctgccgcggcactaccagctggaccagctgccagattattacgacacgccactatgacccagccgagctgtttaacaaataaactaaccacaaaagactgagttgcaagagtctcccaggctcacattaaaccaggggttttactccacatccttcccccagacactgttcccaacctgtcatcgcagctaatctgtaggttctctttctttgggttatttttttaagtaatcaccactttcttctagtgatgctttaccaatatgatttacatttgttaacttctccccctaacatatcagatatgtaaagacaaagaacaaaaggtttaatatattacagagaaacagttaatgataatgtaatattttttaaaatggctttttgttgtttgtttggaaggcagggcaggctgccgttgctaaatgatttaataatattgtaattctgtatttctttggggggaaaaggcttttgttttgttttgttttgttttgttttgtttttgtcttgaaaataatagacatttgtagaatatggagactaactcctaggagttgctttactctgtcaggtgacttaagtcactgggattcactaattttctctgagagaacagctgattgagaatttccattgtaaatagctcagtgttgtatagtgaggcttacgatgttttgtagtcttggcgtaaggacacagcccaagtaactgacgtttcccctccccctcccctctgaggagcctgcctgcctcacaactcaccctcacttcactgaatgaggaggctgagcagctgcagtgtttctgtccggaggaaatggatcttaggccactggacaagaacctgcacccaagggccctgaacccattttcctcccctgtcccagccttcccactttgacagacacttttaactgtgttccttactgctgccacaatcagcatggttgtatagtgccccattaggccatttacatacccagagttatactcaagcagaatgcacaaatggacatgtcataatttttgttacaataaatatgaaatttacaagta

SEQ ID NO: 3049 - DNA, 6401 bp, Homo sapiens
  source 1..6401: mol_type = genomic DNA
ccgcgacccgggcggggagggcgtgtgtcgggggggcggtggcggcgaggcgggcgcgcgggatggaacactgagacaccgacggaatgctccgaatcgccacataatcccctggaacggccgcgcacaacgccattggcttctcccttctccgcgcgccgccgccgtctcccacctccgcctcatcgcctccctctccgcccgctgcctccggagctgggggggaaacgcgaagccccactgcaatggagcccgccgccgcggccacggtacagcgactccccgagctcggcagggaggaccgagcttcggctccggcggccgccgctgcggcagcagcagcagcagcggcggccgcggcggctctggcggcggcggccgggggcggccggagtccggagcccgcgctgaccccggcggccccgagcggcgggaacggcagcggcagcggggcgcgggaagaggccccaggcgaggcgccgccggggccgctgccgggcagagcggggggtgccgggcgcaggaggcggcgcggggcgccccagcccattgccggcggggctgcccccgtacccggggccggcggcggcgccaactccctcctgctgaggagagggcggctgaagaggaatctgtccgcggccgccgcggccgcctcctcgtcgtcgtcgtcctcggccgctgctgcctcgcactcccccggcgctgccggcctccccgcctcctgctcggcctcggcgtcgctgtgcacccggagcctggacaggaagacgctgcttctgaagcaccggcagacgctgcagctgcagccgtcggaccgggactgggtgaggcaccagctccagcgcggctgcgtgcacgtcttcgaccgccacatggcctcgacctacctgcgcccggtgctctgcacactggacaccacggccggcgaggtggccgcccgcctgctgcagctgggccacaaaggcggcggcgtggtgaaggtgctgggccaggggcccggagccgccgccgcccgggagcccgctgaaccgccccccgaggccggcccccggctggcgcccccggagccgcgggactcggaggtaccgcccgcgaggagcgcgccgggtgccttcggggggcctccgcgcgcgccccccgccgacctacccctgcccgtcggcggcccgggcgggtggtcgcgccgcgccagcccagcgccctcggactccagccccggcgagccgttcgttgggggccctgtctcttcgccccgcgccccacggcctgtggtctccgacaccgagagcttcagtctgagtcccagcgccgagagcgtgtctgaccggttggacccctacagcagcggcggcggctcctcgtcgtcgtcggaagagctcgaggccgacgcagcctcggccccgacgggggtcccgggccagccccgccgtcccggccaccccgcgcagcccctcccgcttccccagacggcttcctcgcctcagccgcagcagaaagccccgagggccattgacagcccgggcggggccgtccgcgaggggtcgtgcgaggagaaggcagcggcagccgtggccccgggaggcctccagtctacccccgggaggagcggggtgaccgcggagaaggcgcctccgccgcccccgccgcccaccctgtacgtgcagctccacggagagaccacccggcgcttggaggcggaggagaagccattgcagatccaaaatgactacctcttccaactgggatttggggagctgtggagggtgcaggaggaaggcatggactcggagattggctgcctcatccgcttctatgcaggaaaacctcacagcacgggtagctctgaacggattcagctctcaggaatgtataatgtccgtaaaggcaagatgcagttgccagtgaaccgatggacaagacgccaagtcatcctatgtgggacctgcctgatagtatcatctgtgaaagacagcttgaccggaaagatgcatgttctgccactaattggtggaaaagtagaagaagtgaaaaagcaccaacactgtttagcatttagctcctctggaccccaaagccagacttactacatttgctttgatactttcacagaatacttaaggtggctgcgacaagtctccaaggttgcatcccagcgcattagctcagtggacctctcgtgttgtagcctggaacatctgcctgccaacctcttctacagccaagacctcactcatctcaatttaaaacaaaacttcctaaggcagaaccctagccttccagctgccagggggcttaatgaactgcaaaggttcaccaagttgaagagtcttaacctttccaataatcatttaggggacttcccactggcagtctgcagtattccaaccctggcagagctgaacgtgtcctgcaatgccctgcgatcagtcccggcagccgttggagtgatgcacaacttacagacatttttgttggatggaaactttctccaatcccttcctgctgagttggagaacatgaagcagcttagttatctgggtctttctttcaatgaatttactgacattcccgaagtattggagaaattgactgctgtggataaactttgtatgtctggaaactgtgtggagacccttaggctacaggctttaagaaaaatgcctcacattaaacatgtggatctaaggttgaacgtaattaggaagctgatagcagatgaagtggactttctacagcatgttactcagcttgacctacgagacaataagcttggtgatctagatgctatgattttcaacaacattgaagttttacactgtgaaaggaatcaactggtcacattagacatctgtggctatttcctaaaagcgctctatgcctcttctaatgaacttgttcaacttgatgtttacccagttccaaattatctgtcctacatggatgtttcaaggaaccgcttagaaaatgtgcctgagtgggtatgtgaaagccgaaagctagaagttttggatattggccataatcaaatatgtgaacttcctgcccgcttattttgtaatagcagtctccggaaactactggcaggacacaaccagttggcaaggctgcctgaaaggctagaaagaacctcggtggaggtcttggatgtgcaacacaaccagctccttgagctcccacctaaccttctgatgaaggctgacagcctgagattcctgaacgcctctgcgaacaaactggaaagccttcctccagccacgctttccgaagagacaaacagtatcttacaagagttgtatttgacaaataacagcctcacagacaaatgtgtgcccttgttaacgggacacccccatttgaagatccttcacatggcctataaccgacttcagagttttccagcaagtaaaatggcgaaactggaggaacttgaagaaattgatctcagtgggaataagctgaaagccatcccaacaacgatcatgaattgcaggcgcatgcacaccgtgattgctcactccaactgcatcgaggtctttcccgaagttatgcagctcccagagatcaagtgtgtggacctgagctgtaatgagctaagtgaagtcacattaccagaaaacctgcctcccaaactgcaggagctagacctgactggaaacccgcgccttgtccttgatcacaaaaccctggaactactgaataatatccgctgtttcaagattgatcagccttctacaggagacgcttccggagccccagctgtatggagtcatggttacactgaagcttcgggggtaaaaaacaagttgtgtgtcgcagccctgtcggtgaataacttctgtgacaaccgcgaagccctgtatggtgtgtttgacggagaccggaatgtggaggtgccctaccttctccagtgcactatgagtgacattttggctgaagagctgcaaaaaacaaaaaacgaagaagaatacatggtcaatacattcattgtcatgcaaaggaaacttggaactgctgggcagaagcttggtggtgccgctgtcctttgtcatatcaagcatgaccctgtggatccaggaggatccttcaccttgacctctgctaatgtgggcaagtgccaaacagttctctgtcgaaatggaaagccgctgcctctgtccagatcttacatcatgagctgtgaagaagagctgaagaggattaaacagcacaaggccattatcactgaggatggcaaggtgaacggagtgactgagtccacgcgcatcctgggctacaccttcctccatcccagtgtggtgcctcgcccccacgtgcagtccgtgctcctgactccccaggatgagttcttcatcctaggcagtaaggggttgtgggacagcctgtccgtcgaggaggccgtggaagccgtgcgcaacgtgcccgatgccctggctgctgccaagaagctgtgtaccctggcccagagctacggctgccacgacagcatcagcgctgtggtggtgcagctcagtgtcactgaggacagcttctgctgctgcgagctcagcgccggtggggctgtgccaccacccagtcctggcatctttcctccctcagtgaacatggtgatcaaggatcggccctcagatgggctgggcgtgccgtcctccagcagcggcatggcttccgagattagcagtgagctctccacttctgagatgagcagcgaggtggggtcaacagcctccgatgagcccccgcccggagccctaagcgagaacagccctgcctaccccagtgagcagcgctgcatgctccaccccatctgtctgtccaactccttccagcgccagctatccagcgccacgttctctagcgccttctccgacaacggccttgacagtgacgatgaggagcccatcgagggcgtcttcaccaacggcagccgggtggaggtggaggtggacatccactgcagccgggccaaggagaaggagaaacagcagcacctgcttcaggtgccagcagaggccagtgatgagggcattgtcatcagcgccaacgaggatgagccaggtctgcccaggaaggcagacttctctgccgttgggaccattgggcgccggagggccaatggctctgttgcgccccaggaaaggagccacaatgtgatagaggtggctacagacgcacctcttcgaaagcctggaggctattttgctgccccggctcagccggatcctgatgatcagtttatcatacccccggagctggaagaggaggtcaaagaaatcatgaagcatcaccaggagcaacagcagcagcagcagccgccaccaccccctcagctccagccgcagctgccgcggcactaccagctggaccagctgccagattattacgacacgccactatgacccagccgagctgtttaacaaataaactaaccacaaaagactgagttgcaagagtctcccaggctcacattaaaccaggggttttactccacatccttcccccagacactgttcccaacctgtcatcgcagctaatctgtaggttctctttctttgggttatttttttaagtaatcaccactttcttctagtgatgctttaccaatatgatttacatttgttaacttctccccctaacatatcagatatgtaaagacaaagaacaaaaggtttaatatattacagagaaacagttaatgataatgtaatattttttaaaatggctttttgttgtttgtttggaaggcagggcaggctgccgttgctaaatgatttaataatattgtaattctgtatttctttggggggaaaaggcttttgttttgttttgttttgttttgttttgtttttgtcttgaaaataatagacatttgtagaatatggagactaactcctaggagttgctttactctgtcaggtgacttaagtcactgggattcactaattttctctgagagaacagctgattgagaatttccattgtaaatagctcagtgttgtatagtgaggcttacgatgttttgtagtcttggcgtaaggacacagcccaagtaactgacgtttcccctccccctcccctctgaggagcctgcctgcctcacaactcaccctcacttcactgaatgaggaggctgagcagctgcagtgtttctgtccggaggaaatggatcttaggccactggacaagaacctgcacccaagggccctgaacccattttcctcccctgtcccagccttcccactttgacagacacttttaactgtgttccttactgctgccacaatcagcatggttgtatagtgccccattaggccatttacatacccagagttatactcaagcagaatgcacaaatggacatgtcataatttttgttacaataaatatgaaatttacaagta

SEQ ID NO: 3050 - DNA, 2964 bp, Homo sapiens
  source 1..2964: mol_type = genomic DNA
agaaatatgaaacgcaatgggagcagaaattgtttgaataggagaagtaggtttggttctcgagaaagagactggctaagagaagatgtaaagagaggctgtgtttacctttatggagcagacactaccactgccactacaaccaccaccacctcctcttcctcttcctcctcctcctcttcctctgacttacatctcgtcctttgcactgtagagacaccagcatcagaaatatgtgctggagagggaagagaaagtctttatttacagcttcatggagacctggtcaggagactggaacctactgaacgacctcttcagatcgtttatgattacttatccaggctgggatttgatgatcctgtgcgcatacaggaggaggctacaaatcctgacctcggctgtatgattcgattttatggtgaaaaaccatgccacatggatcgtttggatcgaatcctattgtctggcatctataatgtacgcaagggaaagacccagctgcataagtgggctgagcgcctagttgtcctctgtggtacctgccttatcgtttcctcagtgaaggattgtcaaactggaaagatgcacattttgcctctggttggtggaaagatagaagaagtgaagcgacggcaatactcccttgctttcagctcagcaggagcccaagctcagacctatcatgtcagcttcgagactttggccgagtaccagcgatggcaacggcaagcatccaaggtggtgtcccagcgaatcagtaccgtggatctctcgtgttacagcctcgaggaggttcctgagcatctcttctatagtcaagatattacctacctcaacttgcgacacaacttcatgcagttagaaagacccggaggcctcgatacactctacaaattttctcaactgaagggcctgaacttgtcccataataaacttgggttgtttcctatattgttatgcgagatctctaccctgactgagctcaacctttcctgtaatggatttcatgacctaccaagtcaaattggcaatctgctaaatcttcaaaccctctgtcttgatggcaactttctgactactttacctgaagaattgggaaatctacaacagctttcctccttgggaatttccttcaacaactttagtcaaattcctgaggtttatgagaaactcactatgttagatagagtggttatggcaggaaattgcctggaagtcctgaacttaggggtgctgaataggatgaaccatatcaagcatgtggatttaaggatgaaccatttgaaaaccatggttattgaaaatctggagggaaataaacacatcacccacgtggatctgcgggacaaccgactgactgacttggatcttagctccttatgcagcttggaacagctgcactgtgggcggaatcagctgagggagctaacactcagtggcttttcccttcggaccctctatgccagttccaacaggctgacagcagtgaacgtctatccagtacccagcctgctcactttcttggatctctcccgaaacctgctagagtgtgtccctgactgggcctgtgaagcaaagaagatagaagtattagatgtgagctataatcttctcacagaggttcccgtgagaattctgagtagcttgagtcttagaaaactgatgctgggacacaatcatgtgcaaaaccttccaacactggtagagcacatccccctcgaggtgctggatcttcagcataatgcactcacgaggctgccagacaccctcttctccaaggccttaaatctcagatacttgaatgcatctgcaaatagtctggagtctttaccatccgcctgcactggagaggagagtttgagtatgctgcagctgctttatctgaccaacaatctcctgacggatcagtgcatacctgtcctggtagggcacctgcacctgcgaatcttgcaccttgcaaacaatcagttacagacctttcctgcaagcaaactaaataaattggagcaattggaggaactgaacctaagtggcaacaagcttaaaaccattcccacaaccatagcaaactgtaaaaggctgcacacccttgttgcacactccaacaacatcagcattttcccagaaatactgcagttgcctcagatccagtttgtagacctaagttgcaacgacttgacagaaatcctgattccagaggctttgcctgctacattacaagaccttgacctgactggaaatacaaatctggttctggaacacaagacactggacatatttagccatatcacaaccctgaaaattgatcagaaacctttgccaaccacagattctacagttacgtcaaccttctggagccatggactggctgagatggcagggcagagaaataagctgtgtgtctcagcacttgctatggatagctttgcagagggggtgggagctgtgtatggcatgtttgatggagaccgaaatgaggagctcccgcgcctgctgcagtgtacgatggcagatgtgcttttagaagaggtacagcagtcaactaatgacacagttttcatggctaacaccttcttggtatctcacaggaaattaggaatggctggccagaagttgggctcctccgctctcctgtgctacatccgccctgacactgccgatccagcaagtagctttagcttgactgtagccaatgttggcacgtgccaagcagtcctgtgccgaggtgggaagccagtgcccctctctaaagtcttcagcctggagcaggacccagaggaggctcaaagggtgaaggaccaaaaagccatcatcacagaggttccggaagatctcaaagagttccagaccacagatattccggtgcatcactgtaacttccgggctgttctcggctgcctttgtagcgcttctgttctcggtagctacgcagggccagcaccacgctggcgccgtacatga

SEQ ID NO: 3051 - DNA, 7919 bp, Homo sapiens
  source 1..7919: mol_type = genomic DNA
agaaatatgaaacgcaatgggagcagaaattgtttgaataggagaagtaggtttggttctcgagaaagagactggctaagagaagatgtaaagagaggctgtgtttacctttatggagcagacactaccactgccactacaaccaccaccacctcctcttcctcttcctcctcctcctcttcctctgacttacatctcgtcctttgcactgtagagacaccagcatcagaaatatgtgctggagagggaagagaaagtctttatttacagcttcatggagacctggtcaggagactggaacctactgaacgacctcttcagatcgtttatgattacttatccaggctgggatttgatgatcctgtgcgcatacaggaggaggctacaaatcctgacctcggctgtatgattcgattttatggtgaaaaaccatgccacatggatcgtttggatcgaatcctattgtctggcatctataatgtacgcaagggaaagacccagctgcataagtgggctgagcgcctagttgtcctctgtggtacctgccttatcgtttcctcagtgaaggattgtcaaactggaaagatgcacattttgcctctggttggtggaaagatagaagaagtgaagcgacggcaatactcccttgctttcagctcagcaggagcccaagctcagacctatcatgtcagcttcgagactttggccgagtaccagcgatggcaacggcaagcatccaaggtggtgtcccagcgaatcagtaccgtggatctctcgtgttacagcctcgaggaggttcctgagcatctcttctatagtcaagatattacctacctcaacttgcgacacaacttcatgcagttagaaagacccggaggcctcgatacactctacaaattttctcaactgaagggcctgaacttgtcccataataaacttgggttgtttcctatattgttatgcgagatctctaccctgactgagctcaacctttcctgtaatggatttcatgacctaccaagtcaaattggcaatctgctaaatcttcaaaccctctgtcttgatggcaactttctgactactttacctgaagaattgggaaatctacaacagctttcctccttgggaatttccttcaacaactttagtcaaattcctgaggtttatgagaaactcactatgttagatagagtggttatggcaggaaattgcctggaagtcctgaacttaggggtgctgaataggatgaaccatatcaagcatgtggatttaaggatgaaccatttgaaaaccatggttattgaaaatctggagggaaataaacacatcacccacgtggatctgcgggacaaccgactgactgacttggatcttagctccttatgcagcttggaacagctgcactgtgggcggaatcagctgagggagctaacactcagtggcttttcccttcggaccctctatgccagttccaacaggctgacagcagtgaacgtctatccagtacccagcctgctcactttcttggatctctcccgaaacctgctagagtgtgtccctgactgggcctgtgaagcaaagaagatagaagtattagatgtgagctataatcttctcacagaggttcccgtgagaattctgagtagcttgagtcttagaaaactgatgctgggacacaatcatgtgcaaaaccttccaacactggtagagcacatccccctcgaggtgctggatcttcagcataatgcactcacgaggctgccagacaccctcttctccaaggccttaaatctcagatacttgaatgcatctgcaaatagtctggagtctttaccatccgcctgcactggagaggagagtttgagtatgctgcagctgctttatctgaccaacaatctcctgacggatcagtgcatacctgtcctggtagggcacctgcacctgcgaatcttgcaccttgcaaacaatcagttacagacctttcctgcaagcaaactaaataaattggagcaattggaggaactgaacctaagtggcaacaagcttaaaaccattcccacaaccatagcaaactgtaaaaggctgcacacccttgttgcacactccaacaacatcagcattttcccagaaatactgcagttgcctcagatccagtttgtagacctaagttgcaacgacttgacagaaatcctgattccagaggctttgcctgctacattacaagaccttgacctgactggaaatacaaatctggttctggaacacaagacactggacatatttagccatatcacaaccctgaaaattgatcagaaacctttgccaaccacagattctacagttacgtcaaccttctggagccatggactggctgagatggcagggcagagaaataagctgtgtgtctcagcacttgctatggatagctttgcagagggggtgggagctgtgtatggcatgtttgatggagaccgaaatgaggagctcccgcgcctgctgcagtgtacgatggcagatgtgcttttagaagaggtacagcagtcaactaatgacacagttttcatggctaacaccttcttggtatctcacaggaaattaggaatggctggccagaagttgggctcctccgctctcctgtgctacatccgccctgacactgccgatccagcaagtagctttagcttgactgtagccaatgttggcacgtgccaagcagtcctgtgccgaggtgggaagccagtgcccctctctaaagtcttcagcctggagcaggacccagaggaggctcaaagggtgaaggaccaaaaagccatcatcacagaggacaacaaagtgaatggggtaacctgctgtacccggatgctgggctgtacatacctctacccttggatcctccccaagccccacatatcttccactccgctgaccattcaagatgagttgctgattctgggaaacaaagcattgtgggaacacttgtcctacacagaagctgtcaatgctgtacgtcacgtacaagacccattagcagctgctaagaagctgtgcacattagcgcagagctatggctgtcaggacaatgtaggggcgatggtagtttatttgaatattggtgaggaaggctgcacttgtgaaatgaatgggctcaccctcccaggtcctgtgggatttgcttcaaccaccactatcaaggatgcccctaagccagccactccatcctctagcagtgggattgcctctgagttcagcagtgagatgtccacctcagaggtgagcagtgaagtggggtccactgcttctgatgagcataatgctgggggcctggacactgccttgcttccgaggccagagcggcgctgcagcctccacccaacacccacctctgggctgtttcagcgccagccttcttctgctaccttctccagtaaccagtctgacaacggcctggacagtgatgatgaccagcccgttgagggggtcataaccaatggcagcaaggtagaggtggaagtagacatccactgctgcagggggagggatctggagaactcaccccctctcatagagagttctcctaccctgtgttctgaggaacatgctagagggtcgtgttttgggatccgaagacagaacagtgtgaatagtggcatgctcctgccaatgagcaaggacaggatggagttacagaagtctccctccacctcctgcctctatgggaagaaactctccaatggctctattgtgcccctagaggacagcctgaacctcattgaagtggccacagaagtgcccaagaggaaaactggctattttgctgcccccactcagatggaaccagaggaccagtttgttgtgcctcatgacctggaagaagaagtgaaggaacaaatgaaacagcaccaggacagccggctcgagcctgagccccatgaagaggatcggaccgagcccccggaggagttcgacacagcactatgactgccccactgggcacagtgtgggaggaggctgtgcagggttggggtagggacttgctagaggcattctgcctctacatttctttttgtttgttcgttttttttttgtttgtttgttttgagacggagtcttgctcagtcgctcaggctggagtgcaatggtggggtctcgggtcactgcagcctctgtccctgggttcaagccattctcctgtctcagcctcccgagtagctgggattacaggcacctgccattatgcccggctaagttttattttttttttttagagacggggtttcaccatgttggccaggctggtgttgaactcttgacctcaggtgatccaccctcctctgcctcccaaagtgctgtgattacaggcctcagccaccatgcccagccctgcgtctacatttctaaaccatagctgtgtggggttgaactcggagccaaaaagtgtgagagccatcaggggctggctctggataaactggtagccactatcagtgttaagtttcacatttaacctgcattggaattcccaggggtactgggaagaaagcagctgttctgtatcagtcctaccacctgccattaaccctttctctcctaggatcattttgagaatttgcctgcctgggcaggaaagggactatttctgtggaggaaaaaagtgaagattgattctctttactagttgctgctgatggatctctgtgacagagaaatcaccttatctcagactaatggggtgtgatgtgactagtcacatggcttttcattcttctctacgagaatacagcctatcaaaatgatgtctgttggaaatgtagaaccaatcaaacagataatttatgtatgtaatgtaatgagagcacttttcattgactgtgaactttttatttttgaatctgcactcgagccaatcttcttagaggcagcccggcaccttcatccataggcagagagagaactgggtgttggagacttattcgagggtataggaagggccctgtgaagttgatttaacttttggatgtcagactgtgaaagctcctgagaaacttggggtaataggatcttcttttggggatgaaaatggggaaggcgtgaggacctagactacttctccctagatcagaaaaagagaattaccccttgacaaatatgatacctgctaggtatttcccagggaaatttagggattggcgtctttccctagcatgtggaggaattggcagacagcttcctaagggcggggagcgggggcccaaggctgacactgcttgcatccacgtgaccttaagttatggcagatgactctgaaacggactgaggccaatgagaacagatggatggagcactcaggttagacttgttccttctcctatgctggaggagagggatggttctctagaatgttggaggtgagttgagagctcgcctcttgaatgttgaacagtgtactcttctgaaaactgcatattcactttatgtggtttcagaatactgggctcaatactaacataagaaagacacttcattgagaaattcttaagcttacagaaaacctatactctttgcacattccacataaccctagcaaaatgcagtttcttcatacttctgtcactttttccattggaagatttgcttaggaaaattaattcctatttattcccacaaaatgttggcattgcttgattttacccaatggggaatgtgctttgaatttttggaacacttttacaattaaaaataaagtagggccatttttaatttgtttcatcagaaactatgttaaagagagggttaaatataaatatattttcgtgtgtatttttgggaagatttttgttcaaagcaatagtcaaaatcagatgacctgtccataataattatgtgtcttcatcttctcagaggccccatgctcatatgcacgtgtcattgggatacactcttgggggatttggtacactctaatggatgtctaatgttcaacccctcgagaatctgaacttgagtccccagattgtcaaactactggtcagctattgagaattttagaactcaggtctttgatttgaagtagggaacatagtggctcacacagagtttaggtgctgttagaaagatgggaacaagagtgttttgccaccttatttttatatgggaaattttttttaatgaagaaaaaatgaaaatgaaataacaggatgatagtgatgagtgatgtaaaacatcttacttagatggcagaaccttcgggttgtagaatagtgatgtctaaaaattaaagttattttgggaatacaccactttaatagtatagtcttataaaaattattcattatggtgaacccttcttgtctgctattcgtttcccaacctacttattggaaccacctcaaaacccagttctgaaatgaccttaccaaaagtaaatgtatttattttttagtcagcagaactctgtaattccaaatgttgttctgtgtggtagaattttttttcaggaaccattaggttgtattgaaaatctttgttataggcgataccaaaactgattattcttttttgcagtctgctttaattcatgtccttctgcagttgctctgtattaaaacagggtaaaaaggccatagcccattatgaaaaatataatacaaaactctttgacctatgaggtaacttacagacattgtgttttctaaacaggctgtcagtgaaagcccgtatctgtctccaggtgaatgtaatttacttccgagtactttacccagaggatgtgttccccaggtgggcagagtacagttgatctctagcacagacagagattctggcctctgcatattctcaggtctctgtgtgtacctcccattgagtagagaagcttaagataatttctgagagaagaacactgctgattgtgggagcagtttaggagtccatggaagaaagaaaaatacatgtgtcttggcagccatggtgtatttttgtccaaatggattggaaggatatttgaatatttgaatgttggtatgacataaagctgcagtgcactatagagtcaagtcattgaattaccactcctgatacagggctttattgtactactgtgaagtgtatgtgtgcaatacattggtgagttcatttactggtgtacggaagagccagcaggagcagcgtggtcattgctgggtgctattacagttgcttgtagtgagtgctgttttccaggagatggagccagttgggtgtggcagatctactgaatatcaaatgatgctcttcttcccatgtagaccttcagcaaaagccggtacttggaagccacaggctcaccttctctatctatccaataattattaatgaagagacctccataagggagcagctggctgttatcgataaatgtaccaattattaaataattagtctccaagccattcagtgatgtcttcagcatcactataggactgtctagtgtcactttttacttccttctgggtggaggctttccgactcccaatcatgaaggcaagttaatctttccagttagtgacttttgccccatagttggggtaagcacttcctagattgagaaaaagcagctacagtcaatcctgctctgtttgcctcatttggtgatcagtcagtcacacataagttccttgtattctaaatttcatgcacttctcccagatgctatagggttttctctcactgttgccagtggatgtcatccagacagtgggctcatatcttacggttttgtgcaatcattgtcgtattgtagtcttaagactcattatagtgtatttttgatatttttgaaatgtgttaaattttttaattcaataatatgagccagagcatgttgcagcaaatctattgtttgtaaaaataacaataacaataataaataaaataaagtggaa

SEQ ID NO: 3052 - DNA, 2877 bp, Homo sapiens
  source 1..2877: mol_type = genomic DNA
agaaatatgaaacgcaatgggagcagaaattgtttgaataggagaagtaggtttggttctcgagaaagagactggctaagagaagatgtaaagagaggctgtgtttacctttatggagcagacactaccactgccactacaaccaccaccacctcctcttcctcttcctcctcctcctcttcctctgacttacatctcgtcctttgcactgtagagacaccagcatcagaaatatgtgctggagagggaagagaaagtctttatttacagcttcatggagacctggtcaggagactggaacctactgaacgacctcttcagatcgtttatgattacttatccaggctgggatttgatgatcctgtgcgcatacaggaggaggctacaaatcctgacctcggctgtatgattcgattttatggtgaaaaaccatgccacatggatcgtttggatcgaatcctattgtctggcatctataatgtacgcaagggaaagacccagctgcataagtgggctgagcgcctagttgtcctctgtggtacctgccttatcgtttcctcagtgaaggattgtcaaactggaaagatgcacattttgcctctggttggtggaaagatagaagaagtgaagcgacggcaatactcccttgctttcagctcagcaggagcccaagctcagacctatcatgtcagcttcgagactttggccgagtaccagcgatggcaacggcaagcatccaaggtggtgtcccagcgaatcagtaccgtggatctctcgtgttacagcctcgaggaggttcctgagcatctcttctatagtcaagatattacctacctcaacttgcgacacaacttcatgcagttagaaagacccggaggcctcgatacactctacaaattttctcaactgaagggcctgaacttgtcccataataaacttgggttgtttcctatattgttatgcgagatctctaccctgactgagctcaacctttcctgtaatggatttcatgacctaccaagtcaaattggcaatctgctaaatcttcaaaccctctgtcttgatggcaactttctgactactttacctgaagaattgggaaatctacaacagctttcctccttgggaatttccttcaacaactttagtcaaattcctgaggtttatgagaaactcactatgttagatagagtggttatggcaggaaattgcctggaagtcctgaacttaggggtgctgaataggatgaaccatatcaagcatgtggatttaaggatgaaccatttgaaaaccatggttattgaaaatctggagggaaataaacacatcacccacgtggatctgcgggacaaccgactgactgacttggatcttagctccttatgcagcttggaacagctgcactgtgggcggaatcagctgagggagctaacactcagtggcttttcccttcggaccctctatgccagttccaacaggctgacagcagtgaacgtctatccagtacccagcctgctcactttcttggatctctcccgaaacctgctagagtgtgtccctgactgggcctgtgaagcaaagaagatagaagtattagatgtgagctataatcttctcacagaggttcccgtgagaattctgagtagcttgagtcttagaaaactgatgctgggacacaatcatgtgcaaaaccttccaacactggtagagcacatccccctcgaggtgctggatcttcagcataatgcactcacgaggctgccagacaccctcttctccaaggccttaaatctcagatacttgaatgcatctgcaaatagtctggagtctttaccatccgcctgcactggagaggagagtttgagtatgctgcagctgctttatctgaccaacaatctcctgacggatcagtgcatacctgtcctggtagggcacctgcacctgcgaatcttgcaccttgcaaacaatcagttacagacctttcctgcaagcaaactaaataaattggagcaattggaggaactgaacctaagtggcaacaagcttaaaaccattcccacaaccatagcaaactgtaaaaggctgcacacccttgttgcacactccaacaacatcagcattttcccagaaatactgcagttgcctcagatccagtttgtagacctaagttgcaacgacttgacagaaatcctgattccagaggctttgcctgctacattacaagaccttgacctgactggaaatacaaatctggttctggaacacaagacactggacatatttagccatatcacaaccctgaaaattgatcagaaacctttgccaaccacagattctacagttacgtcaaccttctggagccatggactggctgagatggcagggcagagaaataagctgtgtgtctcagcacttgctatggatagctttgcagagggggtgggagctgtgtatggcatgtttgatggagaccgaaatgaggagctcccgcgcctgctgcagtgtacgatggcagatgtgcttttagaagaggtacagcagtcaactaatgacacagttttcatggctaacaccttcttggtatctcacaggaaattaggaatggctggccagaagttgggctcctccgctctcctgtgctacatccgccctgacactgccgatccagcaagtagctttagcttgactgtagccaatgttggcacgtgccaagcagtcctgtgccgaggtgggaagccagtgcccctctctaaagtcttcagcctggagcaggacccagaggaggctcaaagggtgaaggaccaaaaagccatcatcacagagaattgggttcttaaccaaaagcacctgcaggattttcctggggaagataagtga

SEQ ID NO: 3053 - DNA, 7718 bp, Homo sapiens
  source 1..7718: mol_type = genomic DNA
agaaatatgaaacgcaatgggagcagaaattgtttgaataggagaagtaggtttggttctcgagaaagagactggctaagagaagatgtaaagagaggctgtgtttacctttatggagcagacactaccactgccactacaaccaccaccacctcctcttcctcttcctcctcctcctcttcctctgacttacatctcgtcctttgcactgtagagacaccagcatcagaaatatgtgctggagagggaagagaaagtctttatttacagcttcatggagacctggtcaggagactggaacctactgaacgacctcttcagatcgtttatgattacttatccaggctgggatttgatgatcctgtgcgcatacaggaggaggctacaaatcctgacctcggctgtatgattcgattttatggtgaaaaaccatgccacatggatcgtttggatcgaatcctattgtctggcatctataatgtacgcaagggaaagacccagctgcataagtgggctgagcgcctagttgtcctctgtggtacctgccttatcgtttcctcagtgaaggattgtcaaactggaaagatgcacattttgcctctggttggtggaaagatagaagaagtgaagcgacggcaatactcccttgctttcagctcagcaggagcccaagctcagacctatcatgtcagcttcgagactttggccgagtaccagcgatggcaacggcaagcatccaaggtggtgtcccagcgaatcagtaccgtggatctctcgtgttacagcctcgaggaggttcctgagcatctcttctatagtcaagatattacctacctcaacttgcgacacaacttcatgcagttagaaagacccggaggcctcgatacactctacaaattttctcaactgaagggcctgaacttgtcccataataaacttgggttgtttcctatattgttatgcgagatctctaccctgactgagctcaacctttcctgtaatggatttcatgacctaccaagtcaaattggcaatctgctaaatcttcaaaccctctgtcttgatggcaactttctgactactttacctgaagaattgggaaatctacaacagctttcctccttgggaatttccttcaacaactttagtcaaattcctgaggtttatgagaaactcactatgttagatagagtggttatggcaggaaattgcctggaagtcctgaacttaggggtgctgaataggatgaaccatatcaagcatgtggatttaaggatgaaccatttgaaaaccatggttattgaaaatctggagggaaataaacacatcacccacgtggatctgcgggacaaccgactgactgacttggatcttagctccttatgcagcttggaacagctgcactgtgggcggaatcagctgagggagctaacactcagtggcttttcccttcggaccctctatgccagttccaacaggctgacagcagtgaacgtctatccagtacccagcctgctcactttcttggatctctcccgaaacctgctagagtgtgtccctgactgggcctgtgaagcaaagaagatagaagtattagatgtgagctataatcttctcacagaggttcccgtgagaattctgagtagcttgagtcttagaaaactgatgctgggacacaatcatgtgcaaaaccttccaacactggtagagcacatccccctcgaggtgctggatcttcagcataatgcactcacgaggctgccagacaccctcttctccaaggccttaaacaaactaaataaattggagcaattggaggaactgaacctaagtggcaacaagcttaaaaccattcccacaaccatagcaaactgtaaaaggctgcacacccttgttgcacactccaacaacatcagcattttcccagaaatactgcagttgcctcagatccagtttgtagacctaagttgcaacgacttgacagaaatcctgattccagaggctttgcctgctacattacaagaccttgacctgactggaaatacaaatctggttctggaacacaagacactggacatatttagccatatcacaaccctgaaaattgatcagaaacctttgccaaccacagattctacagttacgtcaaccttctggagccatggactggctgagatggcagggcagagaaataagctgtgtgtctcagcacttgctatggatagctttgcagagggggtgggagctgtgtatggcatgtttgatggagaccgaaatgaggagctcccgcgcctgctgcagtgtacgatggcagatgtgcttttagaagaggtacagcagtcaactaatgacacagttttcatggctaacaccttcttggtatctcacaggaaattaggaatggctggccagaagttgggctcctccgctctcctgtgctacatccgccctgacactgccgatccagcaagtagctttagcttgactgtagccaatgttggcacgtgccaagcagtcctgtgccgaggtgggaagccagtgcccctctctaaagtcttcagcctggagcaggacccagaggaggctcaaagggtgaaggaccaaaaagccatcatcacagaggacaacaaagtgaatggggtaacctgctgtacccggatgctgggctgtacatacctctacccttggatcctccccaagccccacatatcttccactccgctgaccattcaagatgagttgctgattctgggaaacaaagcattgtgggaacacttgtcctacacagaagctgtcaatgctgtacgtcacgtacaagacccattagcagctgctaagaagctgtgcacattagcgcagagctatggctgtcaggacaatgtaggggcgatggtagtttatttgaatattggtgaggaaggctgcacttgtgaaatgaatgggctcaccctcccaggtcctgtgggatttgcttcaaccaccactatcaaggatgcccctaagccagccactccatcctctagcagtgggattgcctctgagttcagcagtgagatgtccacctcagaggtgagcagtgaagtggggtccactgcttctgatgagcataatgctgggggcctggacactgccttgcttccgaggccagagcggcgctgcagcctccacccaacacccacctctgggctgtttcagcgccagccttcttctgctaccttctccagtaaccagtctgacaacggcctggacagtgatgatgaccagcccgttgagggggtcataaccaatggcagcaaggtagaggtggaagtagacatccactgctgcagggggagggatctggagaactcaccccctctcatagagagttctcctaccctgtgttctgaggaacatgctagagggtcgtgttttgggatccgaagacagaacagtgtgaatagtggcatgctcctgccaatgagcaaggacaggatggagttacagaagtctccctccacctcctgcctctatgggaagaaactctccaatggctctattgtgcccctagaggacagcctgaacctcattgaagtggccacagaagtgcccaagaggaaaactggctattttgctgcccccactcagatggaaccagaggaccagtttgttgtgcctcatgacctggaagaagaagtgaaggaacaaatgaaacagcaccaggacagccggctcgagcctgagccccatgaagaggatcggaccgagcccccggaggagttcgacacagcactatgactgccccactgggcacagtgtgggaggaggctgtgcagggttggggtagggacttgctagaggcattctgcctctacatttctttttgtttgttcgttttttttttgtttgtttgttttgagacggagtcttgctcagtcgctcaggctggagtgcaatggtggggtctcgggtcactgcagcctctgtccctgggttcaagccattctcctgtctcagcctcccgagtagctgggattacaggcacctgccattatgcccggctaagttttattttttttttttagagacggggtttcaccatgttggccaggctggtgttgaactcttgacctcaggtgatccaccctcctctgcctcccaaagtgctgtgattacaggcctcagccaccatgcccagccctgcgtctacatttctaaaccatagctgtgtggggttgaactcggagccaaaaagtgtgagagccatcaggggctggctctggataaactggtagccactatcagtgttaagtttcacatttaacctgcattggaattcccaggggtactgggaagaaagcagctgttctgtatcagtcctaccacctgccattaaccctttctctcctaggatcattttgagaatttgcctgcctgggcaggaaagggactatttctgtggaggaaaaaagtgaagattgattctctttactagttgctgctgatggatctctgtgacagagaaatcaccttatctcagactaatggggtgtgatgtgactagtcacatggcttttcattcttctctacgagaatacagcctatcaaaatgatgtctgttggaaatgtagaaccaatcaaacagataatttatgtatgtaatgtaatgagagcacttttcattgactgtgaactttttatttttgaatctgcactcgagccaatcttcttagaggcagcccggcaccttcatccataggcagagagagaactgggtgttggagacttattcgagggtataggaagggccctgtgaagttgatttaacttttggatgtcagactgtgaaagctcctgagaaacttggggtaataggatcttcttttggggatgaaaatggggaaggcgtgaggacctagactacttctccctagatcagaaaaagagaattaccccttgacaaatatgatacctgctaggtatttcccagggaaatttagggattggcgtctttccctagcatgtggaggaattggcagacagcttcctaagggcggggagcgggggcccaaggctgacactgcttgcatccacgtgaccttaagttatggcagatgactctgaaacggactgaggccaatgagaacagatggatggagcactcaggttagacttgttccttctcctatgctggaggagagggatggttctctagaatgttggaggtgagttgagagctcgcctcttgaatgttgaacagtgtactcttctgaaaactgcatattcactttatgtggtttcagaatactgggctcaatactaacataagaaagacacttcattgagaaattcttaagcttacagaaaacctatactctttgcacattccacataaccctagcaaaatgcagtttcttcatacttctgtcactttttccattggaagatttgcttaggaaaattaattcctatttattcccacaaaatgttggcattgcttgattttacccaatggggaatgtgctttgaatttttggaacacttttacaattaaaaataaagtagggccatttttaatttgtttcatcagaaactatgttaaagagagggttaaatataaatatattttcgtgtgtatttttgggaagatttttgttcaaagcaatagtcaaaatcagatgacctgtccataataattatgtgtcttcatcttctcagaggccccatgctcatatgcacgtgtcattgggatacactcttgggggatttggtacactctaatggatgtctaatgttcaacccctcgagaatctgaacttgagtccccagattgtcaaactactggtcagctattgagaattttagaactcaggtctttgatttgaagtagggaacatagtggctcacacagagtttaggtgctgttagaaagatgggaacaagagtgttttgccaccttatttttatatgggaaattttttttaatgaagaaaaaatgaaaatgaaataacaggatgatagtgatgagtgatgtaaaacatcttacttagatggcagaaccttcgggttgtagaatagtgatgtctaaaaattaaagttattttgggaatacaccactttaatagtatagtcttataaaaattattcattatggtgaacccttcttgtctgctattcgtttcccaacctacttattggaaccacctcaaaacccagttctgaaatgaccttaccaaaagtaaatgtatttattttttagtcagcagaactctgtaattccaaatgttgttctgtgtggtagaattttttttcaggaaccattaggttgtattgaaaatctttgttataggcgataccaaaactgattattcttttttgcagtctgctttaattcatgtccttctgcagttgctctgtattaaaacagggtaaaaaggccatagcccattatgaaaaatataatacaaaactctttgacctatgaggtaacttacagacattgtgttttctaaacaggctgtcagtgaaagcccgtatctgtctccaggtgaatgtaatttacttccgagtactttacccagaggatgtgttccccaggtgggcagagtacagttgatctctagcacagacagagattctggcctctgcatattctcaggtctctgtgtgtacctcccattgagtagagaagcttaagataatttctgagagaagaacactgctgattgtgggagcagtttaggagtccatggaagaaagaaaaatacatgtgtcttggcagccatggtgtatttttgtccaaatggattggaaggatatttgaatatttgaatgttggtatgacataaagctgcagtgcactatagagtcaagtcattgaattaccactcctgatacagggctttattgtactactgtgaagtgtatgtgtgcaatacattggtgagttcatttactggtgtacggaagagccagcaggagcagcgtggtcattgctgggtgctattacagttgcttgtagtgagtgctgttttccaggagatggagccagttgggtgtggcagatctactgaatatcaaatgatgctcttcttcccatgtagaccttcagcaaaagccggtacttggaagccacaggctcaccttctctatctatccaataattattaatgaagagacctccataagggagcagctggctgttatcgataaatgtaccaattattaaataattagtctccaagccattcagtgatgtcttcagcatcactataggactgtctagtgtcactttttacttccttctgggtggaggctttccgactcccaatcatgaaggcaagttaatctttccagttagtgacttttgccccatagttggggtaagcacttcctagattgagaaaaagcagctacagtcaatcctgctctgtttgcctcatttggtgatcagtcagtcacacataagttccttgtattctaaatttcatgcacttctcccagatgctatagggttttctctcactgttgccagtggatgtcatccagacagtgggctcatatcttacggttttgtgcaatcattgtcgtattgtagtcttaagactcattatagtgtatttttgatatttttgaaatgtgttaaattttttaattcaataatatgagccagagcatgttgcagcaaatctattgtttgtaaaaataacaataacaataataaataaaataaagtggaa

SEQ ID NO: 3054 - DNA, 3485 bp, Homo sapiens
  source 1..3485: mol_type = genomic DNA
aagcgcccgcgagccgccggccgggagggatccgggtcctgaagagaaatatgaaacgcaatgggagcagaaattgtttgaataggagaagtaggtttggttctcgagaaagagactggctaagagaagatgtaaagagaggctgtgtttacctttatggagcagacactaccactgccactacaaccaccaccacctcctcttcctcttcctcctcctcctcttcctctgacttacatctcgtcctttgcactgtagagacaccagcatcagaaatatgtgctggagagggaagagaaagtctttatttacagcttcatggagacctggtcaggagactggaacctactgaacgacctcttcagatcgtttatgattacttatccaggctgggatttgatgatcctgtgcgcatacaggaggaggctacaaatcctgacctcggctgtatgattcgattttatggtgaaaaaccatgccacatggatcgtttggatcgaatcctattgtctggcatctataatgtacgcaagggaaagacccagctgcataagtgggctgagcgcctagttgtcctctgtggtacctgccttatcgtttcctcagtgaaggattgtcaaactggaaagatgcacattttgcctctggttggtggaaagatagaagaagtgaagcgacggcaatactcccttgctttcagctcagcaggagcccaagctcagacctatcatgtcagcttcgagactttggccgagtaccagcgatggcaacggcaagcatccaaggtggtgtcccagcgaatcagtaccgtggatctctcgtgttacagcctcgaggaggttcctgagcatctcttctatagtcaagatattacctacctcaacttgcgacacaacttcatgcagttagaaagacccggaggcctcgatacactctacaaattttctcaactgaagggcctgaacttgtcccataataaacttgggttgtttcctatattgttatgcgagatctctaccctgactgagctcaacctttcctgtaatggatttcatgacctaccaagtcaaattggcaatctgctaaatcttcaaaccctctgtcttgatggcaactttctgactactttacctgaagaattgggaaatctacaacagctttcctccttgggaatttccttcaacaactttagtcaaattcctgaggtttatgagaaactcactatgttagatagagtggttatggcaggaaattgcctggaagtcctgaacttaggggtgctgaataggatgaaccatatcaagcatgtggatttaaggtaaggttattctttaccacaccttcctttaaattgactctggtggacctttatgtcttctgtttatgaagatttgtttaaaacattagggtttttaaaattttgttgttgttttgagacaaggtctcactttgtcacccaagctggcatacagtggcacgatctcggcccactgcagtcttgacctcccgttctcaggcgattctcccacctcagcctcccgagtagttgggacttcaggtgcgcaccacgaggcctggctaatttttttctacttttagtagagatgaggtttcaccatgttgtgcaggcaggtctcgaactcctggactcgagcagtccacccacctcagcctcccaaagtgctgggattacagccaccgcacctggcccataactttaggttttttgaatagtgtagaaatatatgttttcaaaggtatagtaagactttatttatcactcagtagcagagagattaaggatcaggtagttgtaccatgtgatagagactatcaaattgcctttgacaaagattgttctcacttaccctcccatcagtgtatattttttattttaaaaattttttatagagatggggtcttgctgtgttgcccaggctggtcttgaactccctggctcaagtaatcctcctgccttggcctcctaaagtgttgggattacaggtgtgagccagtgtgcccgacccctccaccattttatgagaattcccattttctcatatctttgtcagtattggattttagcatttctttttatttatcatcagtctagtaggttgaaaaaagtatttcattgttttaatcaacgtttatttacatagcagtgaggttgaacatctttttatatgtatattagtagtttgtagatttccataaatgaccatttttctgttgagtcattgggtttcttcttgatacccattgtattacaattaaaatgttaagggtttcattactaagaactttttatgagagttttattttctagtcataatattttcctaaaggaagctggtaaaaagacacctactggatgttctgttatttacagtaagccattgatgtagcttgtaaagacagtaagagagtttttttttttttttaaaccacactggagacttaagagagagatttatagaaatacaggaaagtgagaatagacctgcataaattaaatcatacacctgtgtagaaaaaacccagaggtcattttctataatttgcctttgaactcttccatatatatatatatatatatatatatatatatatatatatgtgcagattatttccttgtctgttaattaattttatgtttgaaccttagctctagagatagagcaggcatagcaacaggaagaagtatggctccatccttatactctggacatggtactgttgtgactgctttgctactcactgactcaaaaggttgtgttcatcttcctgttcctttgtcctacttagtgcccacctgacattattaggtatttggatataagtgtttaactgttcgtagatatggcctcttttttccttctctttattaatttgtatacgtatttgccaatttggattgtctaacttagctgtaccttgagttattcatcaactaattatttatatagtaccttgcaaaatgaggcgagtagtgaaattcttaagttgtttaggaaacagagaaagggggccgggcacggtggctcatgcctgtaatcccagcactttgggaggccgaggcaggcagatcatctgaggttaggagttcaagcctggccaacatggtgaaaccccagctctactaaaaatacaaaaaattagcctggcatggtgggggtgattctaatcccagcaacttgggaggctgaagcaggagaatcgctttaacctgggaggcagaggttgcagtgaaccgagatcacgccattgcactccagcctgcgcaacacagtgaaactccatctcaaaaaaaaaaagtaaacagagaaagggatcatacctgtcctattttttatttttattctggtaagcacatttaatagactcttatttatgattattttcttgtttctgcgtattaaggatgaaccatttgaaaaccatggttattgaaaatctggagggaaataaacacatcacccacg

SEQ ID NO: 3055 - DNA, 2077 bp, Homo sapiens
  source 1..2077: mol_type = genomic DNA
ctgtcctggtagggcacctgcacctgcgaatcttgcaccttgcaaacaatcagttacagacctttcctgcaagcaaactaaataaattggagcaattggaggaactgaacctaagtggcaacaagcttaaaaccattcccacaaccatagcaaactgtaaaaggctgcacacccttgttgcacactccaacaacatcagcattttcccagaaatactgcagttgcctcagatccagtttgtagacctaagttgcaacgacttgacagaaatcctgattccagaggctttgcctgctacattacaagaccttgacctgactggaaatacaaatctggttctggaacacaagacactggacatatttagccatatcacaaccctgaaaattgatcagaaacctttgccaaccacagattctacagttacgtcaaccttctggagccatggactggctgagatggcagggcagagaaataagctgtgtgtctcagcacttgctatggatagctttgcagagggggtgggagctgtgtatggcatgtttgatggagaccgaaatgaggagctcccgcgcctgctgcagtgtacgatggcagatgtgcttttagaagaggtacagcagtcaactaatgacacagttttcatggctaacaccttcttggtatctcacaggaaattaggaatggctggccagaagttgggctcctccgctctcctgtgctacatccgccctgacactgccgatccagcaagtagctttagcttgactgtagccaatgttggcacgtgccaagcagtcctgtgccgaggtgggaagccagtgcccctctctaaagtcttcagcctggagcaggacccagaggaggctcaaagggtgaaggaccaaaaagccatcatcacagagaattgggttcttaaccaaaagcacctgcaggattttcctggggaagataagtgagaacaaacacatgaaaccacattccctgacactgcaaagctatgagttaaggttccggaagatctcaaagagttccagaccacagatattccggtgcatcactgtaacttccgggctgttctcggctgcctttgtagcgcttctgttctcggtagctacgcagggccagcaccacgctggcgccgtacatgatcacgagaagacaagcaaaggtggctgctgctccgtcggtgcctgccagctggcagtccatccaggtgagacccttgcgggcatagagcctctctcttgttttgcaagtgtcggtgctattgatctgcagagccacgtggaggtaaacaccaatgcctgtgcagtagcccactgccgctaggaggctgaaggcggcctccgtgaggagccacttccctgacaacattgttcgactcttggctccttggagtaaaacacccatggtgaggacccccagacccagagaaacagccacgccaccgtatatcaggggcgagcggaggatcgtgtactgctggtccagctgccgaacctgctctagctcagtgccctcgaacgatgttttcagatcagttcctacaagaggagccacattttgttaagtggccttcgacttcattgtatggatggatttgtctattcaaccaggaccttactgatagatatttggactgaaaggaacccacaaatggcacgaggcagaggaagccaacaggccaacagactgaagatcttcttgtccgaggtcagcttttatttgttactgacagaggccccaaatccttcttaggtgtccttctgggagagggtctcctgccattcccgtggtgttcagggatgagcatgaagagaaatacaaatgaaccgagagcaggaccaccaggttcaagtccccgctttttactgccttgtcatcttggccaagccattcagtccttctaagcctcagacaatatgacaaatgaagctaagtctgccaatcttcacccacagggatgtggggaggctcaaatgaaagcaaccgtgtgatactgtgggaagttaacaacaacaacaaaaaagcaagtatgtgaaaatactctaaaaataaaataatgtacaaatgg

SEQ ID NO: 3056 - DNA, 8317 bp, Homo sapiens
  source 1..8317: mol_type = genomic DNA
gcacaggggtatagatctaaagaagggcagaggggagatctggaaacaggctggctgactccaaatttggcccattggcaacaaaactactatcactgcgagaacgaaaagaaaaacaaaacaaagaaaagaaaagaagttaacttttaaaagtttttttctgaatcagccttgcaaataaatcataaaccgggtcacaggccatattactgcttgaagcagagcaccgaattctgataattttgctccaggaggaggcaagggaattaaaacatggctgggaggtgagcggacgttttgtacgaggttgggttgaatttgcttaagaaggtcgcacgcatctctgataaggaagagaaaaggccttgccaagagaaatatgaaacgcaatgggagcagaaattgtttgaataggagaagtaggtttggttctcgagaaagagactggctaagagaagatgtaaagagaggctgtgtttacctttatggagcagacactaccactgccactacaaccaccaccacctcctcttcctcttcctcctcctcctcttcctctgacttacatctcgtcctttgcactgtagagacaccagcatcagaaatatgtgctggagagggaagagaaagtctttatttacagcttcatggagacctggtcaggagactggaacctactgaacgacctcttcagatcgtttatgattacttatccaggctgggatttgatgatcctgtgcgcatacaggaggaggctacaaatcctgacctcggctgtatgattcgattttatggtgaaaaaccatgccacatggatcgtttggatcgaatcctattgtctggcatctataatgtacgcaagggaaagacccagctgcataagtgggctgagcgcctagttgtcctctgtggtacctgccttatcgtttcctcagtgaaggattgtcaaactggaaagatgcacattttgcctctggttggtggaaagatagaagaagtgaagcgacggcaatactcccttgctttcagctcagcaggagcccaagctcagacctatcatgtcagcttcgagactttggccgagtaccagcgatggcaacggcaagcatccaaggtggtgtcccagcgaatcagtaccgtggatctctcgtgttacagcctcgaggaggttcctgagcatctcttctatagtcaagatattacctacctcaacttgcgacacaacttcatgcagttagaaagacccggaggcctcgatacactctacaaattttctcaactgaagggcctgaacttgtcccataataaacttgggttgtttcctatattgttatgcgagatctctaccctgactgagctcaacctttcctgtaatggatttcatgacctaccaagtcaaattggcaatctgctaaatcttcaaaccctctgtcttgatggcaactttctgactactttacctgaagaattgggaaatctacaacagctttcctccttgggaatttccttcaacaactttagtcaaattcctgaggtttatgagaaactcactatgttagatagagtggttatggcaggaaattgcctggaagtcctgaacttaggggtgctgaataggatgaaccatatcaagcatgtggatttaaggatgaaccatttgaaaaccatggttattgaaaatctggagggaaataaacacatcacccacgtggatctgcgggacaaccgactgactgacttggatcttagctccttatgcagcttggaacagctgcactgtgggcggaatcagctgagggagctaacactcagtggcttttcccttcggaccctctatgccagttccaacaggctgacagcagtgaacgtctatccagtacccagcctgctcactttcttggatctctcccgaaacctgctagagtgtgtccctgactgggcctgtgaagcaaagaagatagaagtattagatgtgagctataatcttctcacagaggttcccgtgagaattctgagtagcttgagtcttagaaaactgatgctgggacacaatcatgtgcaaaaccttccaacactggtagagcacatccccctcgaggtgctggatcttcagcataatgcactcacgaggctgccagacaccctcttctccaaggccttaaatctcagatacttgaatgcatctgcaaatagtctggagtctttaccatccgcctgcactggagaggagagtttgagtatgctgcagctgctttatctgaccaacaatctcctgacggatcagtgcatacctgtcctggtagggcacctgcacctgcgaatcttgcaccttgcaaacaatcagttacagacctttcctgcaagcaaactaaataaattggagcaattggaggaactgaacctaagtggcaacaagcttaaaaccattcccacaaccatagcaaactgtaaaaggctgcacacccttgttgcacactccaacaacatcagcattttcccagaaatactgcagttgcctcagatccagtttgtagacctaagttgcaacgacttgacagaaatcctgattccagaggctttgcctgctacattacaagaccttgacctgactggaaatacaaatctggttctggaacacaagacactggacatatttagccatatcacaaccctgaaaattgatcagaaacctttgccaaccacagattctacagttacgtcaaccttctggagccatggactggctgagatggcagggcagagaaataagctgtgtgtctcagcacttgctatggatagctttgcagagggggtgggagctgtgtatggcatgtttgatggagaccgaaatgaggagctcccgcgcctgctgcagtgtacgatggcagatgtgcttttagaagaggtacagcagtcaactaatgacacagttttcatggctaacaccttcttggtatctcacaggaaattaggaatggctggccagaagttgggctcctccgctctcctgtgctacatccgccctgacactgccgatccagcaagtagctttagcttgactgtagccaatgttggcacgtgccaagcagtcctgtgccgaggtgggaagccagtgcccctctctaaagtcttcagcctggagcaggacccagaggaggctcaaagggtgaaggaccaaaaagccatcatcacagaggacaacaaagtgaatggggtaacctgctgtacccggatgctgggctgtacatacctctacccttggatcctccccaagccccacatatcttccactccgctgaccattcaagatgagttgctgattctgggaaacaaagcattgtgggaacacttgtcctacacagaagctgtcaatgctgtacgtcacgtacaagacccattagcagctgctaagaagctgtgcacattagcgcagagctatggctgtcaggacaatgtaggggcgatggtagtttatttgaatattggtgaggaaggctgcacttgtgaaatgaatgggctcaccctcccaggtcctgtgggatttgcttcaaccaccactatcaaggatgcccctaagccagccactccatcctctagcagtgggattgcctctgagttcagcagtgagatgtccacctcagaggtgagcagtgaagtggggtccactgcttctgatgagcataatgctgggggcctggacactgccttgcttccgaggccagagcggcgctgcagcctccacccaacacccacctctgggctgtttcagcgccagccttcttctgctaccttctccagtaaccagtctgacaacggcctggacagtgatgatgaccagcccgttgagggggtcataaccaatggcagcaaggtagaggtggaagtagacatccactgctgcagggggagggatctggagaactcaccccctctcatagagagttctcctaccctgtgttctgaggaacatgctagagggtcgtgttttgggatccgaagacagaacagtgtgaatagtggcatgctcctgccaatgagcaaggacaggatggagttacagaagtctccctccacctcctgcctctatgggaagaaactctccaatggctctattgtgcccctagaggacagcctgaacctcattgaagtggccacagaagtgcccaagaggaaaactggctattttgctgcccccactcagatggaaccagaggaccagtttgttgtgcctcatgacctggaagaagaagtgaaggaacaaatgaaacagcaccaggacagccggctcgagcctgagccccatgaagaggatcggaccgagcccccggaggagttcgacacagcactatgactgccccactgggcacagtgtgggaggaggctgtgcagggttggggtagggacttgctagaggcattctgcctctacatttctttttgtttgttcgttttttttttgtttgtttgttttgagacggagtcttgctcagtcgctcaggctggagtgcaatggtggggtctcgggtcactgcagcctctgtccctgggttcaagccattctcctgtctcagcctcccgagtagctgggattacaggcacctgccattatgcccggctaagttttattttttttttttagagacggggtttcaccatgttggccaggctggtgttgaactcttgacctcaggtgatccaccctcctctgcctcccaaagtgctgtgattacaggcctcagccaccatgcccagccctgcgtctacatttctaaaccatagctgtgtggggttgaactcggagccaaaaagtgtgagagccatcaggggctggctctggataaactggtagccactatcagtgttaagtttcacatttaacctgcattggaattcccaggggtactgggaagaaagcagctgttctgtatcagtcctaccacctgccattaaccctttctctcctaggatcattttgagaatttgcctgcctgggcaggaaagggactatttctgtggaggaaaaaagtgaagattgattctctttactagttgctgctgatggatctctgtgacagagaaatcaccttatctcagactaatggggtgtgatgtgactagtcacatggcttttcattcttctctacgagaatacagcctatcaaaatgatgtctgttggaaatgtagaaccaatcaaacagataatttatgtatgtaatgtaatgagagcacttttcattgactgtgaactttttatttttgaatctgcactcgagccaatcttcttagaggcagcccggcaccttcatccataggcagagagagaactgggtgttggagacttattcgagggtataggaagggccctgtgaagttgatttaacttttggatgtcagactgtgaaagctcctgagaaacttggggtaataggatcttcttttggggatgaaaatggggaaggcgtgaggacctagactacttctccctagatcagaaaaagagaattaccccttgacaaatatgatacctgctaggtatttcccagggaaatttagggattggcgtctttccctagcatgtggaggaattggcagacagcttcctaagggcggggagcgggggcccaaggctgacactgcttgcatccacgtgaccttaagttatggcagatgactctgaaacggactgaggccaatgagaacagatggatggagcactcaggttagacttgttccttctcctatgctggaggagagggatggttctctagaatgttggaggtgagttgagagctcgcctcttgaatgttgaacagtgtactcttctgaaaactgcatattcactttatgtggtttcagaatactgggctcaatactaacataagaaagacacttcattgagaaattcttaagcttacagaaaacctatactctttgcacattccacataaccctagcaaaatgcagtttcttcatacttctgtcactttttccattggaagatttgcttaggaaaattaattcctatttattcccacaaaatgttggcattgcttgattttacccaatggggaatgtgctttgaatttttggaacacttttacaattaaaaataaagtagggccatttttaatttgtttcatcagaaactatgttaaagagagggttaaatataaatatattttcgtgtgtatttttgggaagatttttgttcaaagcaatagtcaaaatcagatgacctgtccataataattatgtgtcttcatcttctcagaggccccatgctcatatgcacgtgtcattgggatacactcttgggggatttggtacactctaatggatgtctaatgttcaacccctcgagaatctgaacttgagtccccagattgtcaaactactggtcagctattgagaattttagaactcaggtctttgatttgaagtagggaacatagtggctcacacagagtttaggtgctgttagaaagatgggaacaagagtgttttgccaccttatttttatatgggaaattttttttaatgaagaaaaaatgaaaatgaaataacaggatgatagtgatgagtgatgtaaaacatcttacttagatggcagaaccttcgggttgtagaatagtgatgtctaaaaattaaagttattttgggaatacaccactttaatagtatagtcttataaaaattattcattatggtgaacccttcttgtctgctattcgtttcccaacctacttattggaaccacctcaaaacccagttctgaaatgaccttaccaaaagtaaatgtatttattttttagtcagcagaactctgtaattccaaatgttgttctgtgtggtagaattttttttcaggaaccattaggttgtattgaaaatctttgttataggcgataccaaaactgattattcttttttgcagtctgctttaattcatgtccttctgcagttgctctgtattaaaacagggtaaaaaggccatagcccattatgaaaaatataatacaaaactctttgacctatgaggtaacttacagacattgtgttttctaaacaggctgtcagtgaaagcccgtatctgtctccaggtgaatgtaatttacttccgagtactttacccagaggatgtgttccccaggtgggcagagtacagttgatctctagcacagacagagattctggcctctgcatattctcaggtctctgtgtgtacctcccattgagtagagaagcttaagataatttctgagagaagaacactgctgattgtgggagcagtttaggagtccatggaagaaagaaaaatacatgtgtcttggcagccatggtgtatttttgtccaaatggattggaaggatatttgaatatttgaatgttggtatgacataaagctgcagtgcactatagagtcaagtcattgaattaccactcctgatacagggctttattgtactactgtgaagtgtatgtgtgcaatacattggtgagttcatttactggtgtacggaagagccagcaggagcagcgtggtcattgctgggtgctattacagttgcttgtagtgagtgctgttttccaggagatggagccagttgggtgtggcagatctactgaatatcaaatgatgctcttcttcccatgtagaccttcagcaaaagccggtacttggaagccacaggctcaccttctctatctatccaataattattaatgaagagacctccataagggagcagctggctgttatcgataaatgtaccaattattaaataattagtctccaagccattcagtgatgtcttcagcatcactataggactgtctagtgtcactttttacttccttctgggtggaggctttccgactcccaatcatgaaggcaagttaatctttccagttagtgacttttgccccatagttggggtaagcacttcctagattgagaaaaagcagctacagtcaatcctgctctgtttgcctcatttggtgatcagtcagtcacacataagttccttgtattctaaatttcatgcacttctcccagatgctatagggttttctctcactgttgccagtggatgtcatccagacagtgggctcatatcttacggttttgtgcaatcattgtcgtattgtagtcttaagactcattatagtgtatttttgatatttttgaaatgtgttaaattttttaattcaataatatgagccagagcatgttgcagcaaatctattgtttgtaaaaataacaataacaataataaataaaataaagtggaatctttttcatggctttgttttaaaa

SEQ ID NO: 3057 - DNA, 9027 bp, Homo sapiens
  source 1..9027: mol_type = genomic DNA
ggtaacctcagactcgagtcagtgacactgctcaacgcacccatctcagctttcatcatcagtcctccacccccgccccacaacagcctaccctgcctccggctgggtttctgggcagaggccgaggcttagctcgttatcctcgcctcgcgttgctgcaaaagccgcagcaagtgcagctgcaggctggcggctgggaaccggcccgagcaagccccaggcagctacactgggcatgctcagtagagcctgcggcttggggactctgcgctcgcacccagagctaccgctctgccccctcctaccgccccctgccctgccctgccctcccctcgcccggcgcggtcccgtccgcctctcgctcgcctcccgcctcccctcggtcttccgaggcgcccgggctcccggcgcggcggcggagggggcgggcaggccggcgggcggtgatgtggcgggactctttatgcgctgcggcaggatacgcgctcggcgctgggacgcgactgcgctcagttctctcctctcggaagctgcagccatgatggaagtttgagagttgagccgctgtgaggcgaggccgggctcaggcgagggagatgagagacggcggcggccgcggcccggagcccctctcagcgcctgtgagcagccgcgggggcagcgccctcggggagccggccggcctgcggcggcggcagcggcggcgtttctcgcctcctcttcgtcttttctaaccgtgcagcctcttcctcggcttctcctgaaagggaaggtggaagccgtgggctcgggcgggagccggctgaggcgcggcggcggcggcggcacctcccgctcctggagcgggggggagaagcggcggcggcggcggccgcggcggctgcagctccagggagggggtctgagtcgcctgtcaccatttccagggctgggaacgccggagagttggtctctccccttctactgcctccaacacggcggcggcggcggctggcacatccagggacccgggccggttttaaacctcccgtgcgccgccgccgcaccccccgtggcccgggctccggaggccgccggcggaggcagccgttcggaggattattcgtcttctccccattccgctgccgccgctgccaggcctctggctgctgaggagaagcaggcccagtcgctgcaaccatccagcagccgccgcagcagccattacccggctgcggtccagagccaagcggcggcagagcgaggggcatcagctaccgccaagtccagagccatttccatcctgcagaagaagccccgccaccagcagcttctgccatctctctcctcctttttcttcagccacaggctcccagacatgacagccatcatcaaagagatcgttagcagaaacaaaaggagatatcaagaggatggattcgacttagacttgacctatatttatccaaacattattgctatgggatttcctgcagaaagacttgaaggcgtatacaggaacaatattgatgatgtagtaaggtttttggattcaaagcataaaaaccattacaagatatacaatctttgtgctgaaagacattatgacaccgccaaatttaattgcagagttgcacaatatccttttgaagaccataacccaccacagctagaacttatcaaacccttttgtgaagatcttgaccaatggctaagtgaagatgacaatcatgttgcagcaattcactgtaaagctggaaagggacgaactggtgtaatgatatgtgcatatttattacatcggggcaaatttttaaaggcacaagaggccctagatttctatggggaagtaaggaccagagacaaaaagggagtaactattcccagtcagaggcgctatgtgtattattatagctacctgttaaagaatcatctggattatagaccagtggcactgttgtttcacaagatgatgtttgaaactattccaatgttcagtggcggaacttgcaatcctcagtttgtggtctgccagctaaaggtgaagatatattcctccaattcaggacccacacgacgggaagacaagttcatgtactttgagttccctcagccgttacctgtgtgtggtgatatcaaagtagagttcttccacaaacagaacaagatgctaaaaaaggacaaaatgtttcacttttgggtaaatacattcttcataccaggaccagaggaaacctcagaaaaagtagaaaatggaagtctatgtgatcaagaaatcgatagcatttgcagtatagagcgtgcagataatgacaaggaatatctagtacttactttaacaaaaaatgatcttgacaaagcaaataaagacaaagccaaccgatacttttctccaaattttaaggtgaagctgtacttcacaaaaacagtagaggagccgtcaaatccagaggctagcagttcaacttctgtaacaccagatgttagtgacaatgaacctgatcattatagatattctgacaccactgactctgatccagagaatgaaccttttgatgaagatcagcatacacaaattacaaaagtctgaatttttttttatcaagagggataaaacaccatgaaaataaacttgaataaactgaaaatggacctttttttttttaatggcaataggacattgtgtcagattaccagttataggaacaattctcttttcctgaccaatcttgttttaccctatacatccacagggttttgacacttgttgtccagttgaaaaaaggttgtgtagctgtgtcatgtatatacctttttgtgtcaaaaggacatttaaaattcaattaggattaataaagatggcactttcccgttttattccagttttataaaaagtggagacagactgatgtgtatacgtaggaattttttccttttgtgttctgtcaccaactgaagtggctaaagagctttgtgatatactggttcacatcctacccctttgcacttgtggcaacagataagtttgcagttggctaagagaggtttccgaagggttttgctacattctaatgcatgtattcgggttaggggaatggagggaatgctcagaaaggaaataattttatgctggactctggaccatataccatctccagctatttacacacacctttctttagcatgctacagttattaatctggacattcgaggaattggccgctgtcactgcttgttgtttgcgcatttttttttaaagcatattggtgctagaaaaggcagctaaaggaagtgaatctgtattggggtacaggaatgaaccttctgcaacatcttaagatccacaaatgaagggatataaaaataatgtcataggtaagaaacacagcaacaatgacttaaccatataaatgtggaggctatcaacaaagaatgggcttgaaacattataaaaattgacaatgatttattaaatatgttttctcaattgtaacgacttctccatctcctgtgtaatcaaggccagtgctaaaattcagatgctgttagtacctacatcagtcaacaacttacacttattttactagttttcaatcataatacctgctgtggatgcttcatgtgctgcctgcaagcttcttttttctcattaaatataaaatattttgtaatgctgcacagaaattttcaatttgagattctacagtaagcgttttttttctttgaagatttatgatgcacttattcaatagctgtcagccgttccacccttttgaccttacacattctattacaatgaattttgcagttttgcacattttttaaatgtcattaactgttagggaattttacttgaatactgaatacatataatgtttatattaaaaaggacatttgtgttaaaaaggaaattagagttgcagtaaactttcaatgctgcacacaaaaaaaagacatttgatttttcagtagaaattgtcctacatgtgctttattgatttgctattgaaagaatagggtttttttttttttttttttttttttttttaaatgtgcagtgttgaatcatttcttcatagtgctcccccgagttgggactagggcttcaatttcacttcttaaaaaaaatcatcatatatttgatatgcccagactgcatacgattttaagcggagtacaactactattgtaaagctaatgtgaagatattattaaaaaggtttttttttccagaaatttggtgtcttcaaattataccttcaccttgacatttgaatatccagccattttgtttcttaatggtataaaattccattttcaataacttattggtgctgaaattgttcactagctgtggtctgacctagttaatttacaaatacagattgaataggacctactagagcagcatttatagagtttgatggcaaatagattaggcagaacttcatctaaaatattcttagtaaataatgttgacacgttttccataccttgtcagtttcattcaacaatttttaaatttttaacaaagctcttaggatttacacatttatatttaaacattgatatatagagtattgattgattgctcataagttaaattggtaaagttagagacaactattctaacacctcaccattgaaatttatatgccaccttgtctttcataaaagctgaaaattgttacctaaaatgaaaatcaacttcatgttttgaagatagttataaatattgttctttgttacaatttcgggcaccgcatattaaaacgtaactttattgttccaatatgtaacatggagggccaggtcataaataatgacattataatgggcttttgcactgttattatttttcctttggaatgtgaaggtctgaatgagggttttgattttgaatgtttcaatgtttttgagaagccttgcttacattttatggtgtagtcattggaaatggaaaaatggcattatatatattatatatataaatatatattatacatactctccttactttatttcagttaccatccccatagaatttgacaagaattgctatgactgaaaggttttcgagtcctaattaaaactttatttatggcagtattcataattagcctgaaatgcattctgtaggtaatctctgagtttctggaatattttcttagactttttggatgtgcagcagcttacatgtctgaagttacttgaaggcatcacttttaagaaagcttacagttgggccctgtaccatcccaagtcctttgtagctcctcttgaacatgtttgccatacttttaaaagggtagttgaataaatagcatcaccattctttgctgtggcacaggttataaacttaagtggagtttaccggcagcatcaaatgtttcagctttaaaaaataaaagtagggtacaagtttaatgtttagttctagaaattttgtgcaatatgttcataacgatggctgtggttgccacaaagtgcctcgtttacctttaaatactgttaatgtgtcatgcatgcagatggaaggggtggaactgtgcactaaagtgggggctttaactgtagtatttggcagagttgccttctacctgccagttcaaaagttcaacctgttttcatatagaatatatatactaaaaaatttcagtctgttaaacagccttactctgattcagcctcttcagatactcttgtgctgtgcagcagtggctctgtgtgtaaatgctatgcactgaggatacacaaaaataccaatatgatgtgtacaggataatgcctcatcccaatcagatgtccatttgttattgtgtttgttaacaaccctttatctcttagtgttataaactccacttaaaactgattaaagtctcattcttgtcattgtgtgggtgttttattaaatgagagtttataattcaaattgcttaagtccattgaagttttaattaatgggcagccaaatgtgaatacaaagttttcagtttttttttttcctgctgtccttcaaagcctactgtttaaaaaaaaaaaaaaaaaaaaacatggcctgagagtagagtatctgtctactcatgtttaattaaggaaaaacacttatttttagggctttagtcatcacttcataaattgtataagcacattaaatagcgttctagtcctgaaaaagtccaagattcttagaaaattgtgcatatttttattatgacagatgtttgaagataattccccagaatggatttgatactttagatttcaattttgtggcttttgtctattattctgtactctgccatcagcatatggaaagcttcatttactcatcatgacttgtgccatataaaaattgatatttcggaatagtctaaaggactttttgtacttgaatttaatcatgttgtttctaatattcttaaaagcttgaagactaaagcatatcctttcaacaaagcatagtaaggtaataagaaagtgtagtttgtacaagtgttaaaaaaataaagtagacaatgttacagtgggacttattatttcaagtttacattttctccatgtaattttttaaaaagtaaatgaaaaaatgtgcaataatgtaaaatatgaagtgtatgtgtacacacattttatttttcggtatcttgggtatacgtatggttgaaaactatactggagtctaaaagtattctaatttataagaagacattttggtgatgtttgaaaaatagaaatgtgctagttttgtttttatatcatgtcctttgtacgttgtaatatgagctggcttggttcagtaaatgccatcaccatttccattgagaatttaaaactcaccagtgtttaatatgcaggcttccaaaggcttatgaaaaaaatcaagacccttaaatctagttaatttgctgctaacatgaaactctttggttcttttatttttgccagataattagacacacatctaaagcttagtcttaaatggcttaagtgtagctattgattagtgctgttgctagttcagaaagaaatgtttgtgaatggaaacaagaatattcagtccaaactgttgtaaggacagtacctgaaaaccaggaaacaggataatggaaaaagtcttttaaagatgaaatgttggagccaactttcttatagaattaattgtatgtggctatagaaagcctaatgattgttgcttatttttgagagcatattattcttttatgaccataatcttgctgtttttccatcttccaaaagatcttccttctaatatgtatatcagaatgtgggtagccagtcagacaaattcatattggttggtagctttaaaaagtttgtaatgtgaagacaggaaaggacaaaatagtttgctttggtggtagtactctggttgttaagctaggtattttgagactacttccccatcacaacaacaataaaataatcactcataatcctatcacctggagacatagccatcgttaatatgttagtgactatacaatcatgttttcttctgtatatccatgtatattctttaaaaatgaaatttatactgtacctgatctcaaagctttttagcttagtatatctgtcatgaatttgtaggatgttccattgcatcagaaaacggacagtgatttgattactttctaatgccacagatgcagattacatgtagttattgagaatcctttcgaattcagtggcttaatcatgaatgtctaaatattgttgacattaggatgatacatgtaaattaaagttacatttgtttagcatagacaagcttaacattgtagatgtttctcttcaaaaatcatcttaaacatttgcatttggaattgtgttaaatagaatgtgtgaaacactgtattagtaaacttcatcacctttctacttccttatagtttgaacttttcagtttttgtagttcccaaacagttgctcaatttagagcaaattaatttaacacctgccaaaaaaaggctgctgttggcttatcagttgtctttaaattcaaatgctcatgtgacttttatcacatcaaaaaatatttcattaatgattcacctttagctctgaaaattaccgcgtttagtaattatagtgggcttataaaaacatgcaactctttttgatagttatttgagaattttggtgaaaaatatttagctgagggcagtatagaacttataaaccaatatattgatatttttaaaacatttttacatataagtaaactgccatctttgagcataactacatttaaaaataaagctgcatatttttaaatcaagtgtttaacaagaatttatattttttattttttaaaattaaaaataatttatatttcctctgttgcatgaggattctcatctgtgcttataatggttagagattttatttgtgtggaatgaagtgaggcttgtagtcatggttctagtgtttcagtttgccaagtctgtttactgcagtgaaattcatcaaatgtttcagtgtggttttctgtagcctatcatttactggctatttttttatgtacacctttaggattttctgcctactctatccagttgtccaaatgatatcctacattttacaaatgccctttcagtttctattttctttttccattaaattgccctcatgtcctaatgtgcagtttgtaagtgtgtgtgtgtgtgtctgtgtgtgtgtgaatttgattttcaagagtgctagacttccaatttgagagattaaataatttaattcaggcaaacatttttcattggaatttcacagttcattgtaatgaaaatgttaatcctggatgacctttgacatacagtaatgaatcttggatattaatgaatttgttagtagcatcttgatgtgtgttttaatgagttattttcaaagttgtgcattaaaccaaagttggcatactggaagtgtttatatcaagttccatttggctactgatggacaaaaaatagaaatgccttcctatggagagtatttttcctttaaaaaattaaaaaggttaattattttgacta

SEQ ID NO: 3058 - DNA, 794 bp, Homo sapiens
  source 1..794: mol_type = genomic DNA
gaggtggccacgtcagcgcagcgtcgctcggagctcgcggccggatggggaaggcggcggcggcggtggcctttggggccgaagtgggcgtgcggctcgcgctgttcgcggccttcctggtgacggagctgctccccccgttccagagactcatccagccggaggagatgtggctctaccggaacccctacgtggaggcggagtatttccccaccaagccgatgtttgttattgcatttctctctccactgtctctgatcttcctggccaaatttctcaagaaggcagacacaagagacagcagacaagcctgcctggctgccagccttgccctggctctgaatggcgtctttaccaacacaataaaactgatcgtagggaggccacgcccagatttcttctaccgctgcttccctgatgggctagcccattctgacttgatgtgtacaggggataaggacgtggtgaatgagggccgaaagagcttccccagtggacattcttcctgtatgaatatcatatggactctaccctatgcttgttttcacatcattgaatttaacctagaaagctagtagggatgggaaaatctgactactcttgtttctacaatttggaaaatccccccttctttagtaactccacagtttaacaagtctgagccttgactatttgggtaaatattacagaacagaaaggtagtttaccttcatgagatttgcacatttaattgttatattatttgcctagatcctgcaatcttgtactagcaataaaaatacctttaacgaaga

SEQ ID NO: 3059 - DNA, 853 bp, Homo sapiens
  source 1..853: mol_type = genomic DNA
gcggccggatggggaaggcggcggcggcggtggcctttggggccgaagtgggcgtgcggctcgcgctgttcgcggccttcctggtgacggagctgctccccccgttccagagactcatccagccggaggagatgtggctctaccggaacccctacgtggaggcggagtatttccccaccaagccgatgtttgttattgcatttctctctccactgtctctgatcttcctggccaaatttctcaagaaggcagacacaagagacagcagacaagcctgcctggctgccagccttgccctggctctgaatggcgtctttaccaacacaataaaactgatcgtagggaggccacgcccagatttcttctaccgctgcttccctgatgggctagcccattctgacttgatgtgtacaggggataaggacgtggtgaatgagggccgaaagagcttccccagtggacattcttcctttgcatttgctggtctggcctttgcgtccttctacctggcagggaagttacactgcttcacaccacaaggccgtgggaaatcttggaggttctgtgcctttctgtcacctctactttttgcagctgtgattgcactgtcccgcacatgtgactacaagcatcactggcaaggaccctttaaatggtgaaaatgggcagatgaatagcaataagtggacctttgttactcttctgagttagaaaaattctaatttagtacactctgaacaaagcttattatacttacttaagatgtgttttgatttggtgttcagaaagcaacctgacaatgataatactgtaactatgataaaattgagaataaaaagattttatttagaaa

SEQ ID NO: 3060 - DNA, 2130 bp, Homo sapiens
  source 1..2130: mol_type = genomic DNA
tcgctcggagctcgcggccggatggggaaggcggcggcggcggtggcctttggggccgaagtgggcgtgcggctcgcgctgttcgcggccttcctggtgacggagctgctccccccgttccagagactcatccagccggaggagatgtggctctaccggaacccctacgtggaggcggagtatttccccaccaagccgatgtttgttattgcatttctctctccactgtctctgatcttcctggccaaatttctcaagaaggcagacacaagagacagcagacaagcctgcctggctgccagccttgccctggctctgaatggcgtctttaccaacacaataaaactgatcgtagggaggccacgcccagatttcttctaccgctgcttccctgatgggctagcccattctgacttgatgtgtacaggggataaggacgtggtgaatgagggccgaaagagcttccccagtggacattcttcctttgcatttgctggtctggcctttgcgtccttctacctggcagggaagttacactgcttcacaccacaaggccgtgggaaatcttggaggttctgtgcctttctgtcacctctactttttgcagctgtgattgcactgtcccgcacatgtgactacaagcatcactggcaagatgtactagttggatccatgattggaatgacatttgcctatgtctgctatcggcagtattatcctcctctgactgatgcagaatgccataaaccatttcaagacaaacttgtactttccactgcacagaagcctggggattcttattgttttgatatttaaaaattgaatctggccgggcgtggtggctcatgcctgtaatcccaacactttgggaggctgaggagggtggatcacctgaggtcaggaccagcctggccaacatggtgaaccctgtctctactaaaaatacaaaaattagccaggagttgtgtgccgtaatcccagctacctgggaggctgaggtaggagaattgcttgaacctgggagctggaggttccagtgagccgagatcgcaccactgcactccagcctaggcaacagagtgagaccccatctcaaaaaaaaaaaaaattgaatctatctcaatagagaacaggtgaactagccctcctaaccggaccatgcacaagacaagaaattctagcctttttttccccttccaaggtgcaagtgaggacataagccacactgtattctgcctccaaatgattacacacttttgcccctgctcatctatcttgaggagttacggttcttttccactactgtatgccacatgttctagtaaaaggatctttcaaaggtgtccaacaccttatgaatctggtctatcagattaatatctgaagatctacagtgtttttacatttaatttaaatgccattcttagaaggatcttgtcacaaagaagcctttacatagccccaccttgtctcagaagctagagttcattatcaaaacttaatttccatttcatatagctcaaaatcttaaaatctagggcatggccaactaaattactttgattctgtttaccttctctgatgacaattccatcaagccttaaataggaaaatgtcgaatctagggtaatttatcacttttgtgtgcatcttatctgagtccagccatctggtactgctgtgcattttgaacaccgtgggcataaacaatttgttgaattactaagtgaaaacaataataaagaagaaaatggtcaggagtgtggtttcagcactactaacagatgactgtttctacctcatttgaccataactgtacttgtgagcttctttccttccattcatgactgaagatctgctcaaatgcaccaacactgccaagtgactaaggtagaaaagaaaaatgacaggtatcgtcatctgaaggacagatgaatctttttctgccccttcttcacaatggaatataaggaacaattatgggatgtcatcagaatggatgccataggacctacagctccctttctctttattgtgattatactttaaatatgacattgtcttttatgtgtatgttcctatattttcaatgtatctttttccttcagtaaacctgatattcaaataaaa

SEQ ID NO: 3061 - DNA, 2473 bp, Homo sapiens
  source 1..2473: mol_type = genomic DNA
attattgacagagatgtcagtgaagtgccagagtgaagtggcactgcctaagaacagagtgtgaaggcactctatctattaagcacaactctaagaattcttgccttaaacacaataagaaaacaatgccattttatgttagctttgggaagggggagtaagggaagaagtgaatgaaaaacttcgagatacagcagacgggacctttttggtacgagatgcgtctactaaaatgcatggtgattatactcttacactaaggaaagggggaaataacaaattaatcaaaatatttcatcgagatgggaaatatggcttctctgacccattaaccttcagttctgtggttgaattaataaaccactaccggaatgaatctctagctcagtataatcccaaattggatgtgaaattactttatccagtatccaaataccaacaggatcaagttgtcaaagaagataatattgaagctgtagggaaaaaattacatgaatataacactcagtttcaagaaaaaagtcgagaatatgatagattatatgaagaatatacccgcacatcccaggaaatccaaatgaaaaggacagctattgaagcatttaatgaaaccataaaaatatttgaagaacagtgccagacccaagagcggtacagcaaagaatacatagaaaagtttaaacgtgaaggcaatgagaaagaaatacaaaggattatgcataattatgataagttgaagtctcgaatcagtgaaattattgacagtagaagaagattggaagaagacttgaagaagcaggcagctgagtatcgagaaattgacaaacgtatgaacagcattaaaccagaccttatccagctgagaaagacgagagaccaatacttgatgtggttgactcaaaaaggtgttcggcaaaagaagttgaacgagtggttgggcaatgaaaacactgaagaccaatattcactggtggaagatgatgaagatttgccccatcatgatgagaagacatggaatgttggaagcagcaaccgaaacaaagctgaaaacctgttgcgagggaagcgagatggcacttttcttgtccgggagagcagtaaacagggctgctatgcctgctctgtagtggtggacggcgaagtaaagcattgtgtcataaacaaaacagcaactggctatggctttgccgagccctataacttgtacagctctctgaaagaactggtgctacattaccaacacacctcccttgtgcagcacaacgactccctcaatgtcacactagcctacccagtatatgcacagcagaggcgatgaagcgcttactctttgatccttctcctgaagttcagccaccctgaggcctctggaaagcaaagggctcctctccagtctgatctgtgaattgagctgcagaaacgaagccatctttctttggatgggactagagctttctttcacaaaaaagaagtaggggaagacatgcagcctaaggctgtatgatgaccacacgttcctaagctggagtgcttatcccttctttttctttttttctttggtttaatttaaagccacaaccacatacaacacaaagagaaaaagaaatgcaaaaatctctgcgtgcagggacaaagaggcctttaaccatggtgcttgttaatgctttctgaagctttaccagctgaaagttgggactctggagagcggaggagagagaggcagaagaaccctggcctgagaaggtttggtccagcctggtttagcctggatgttgctgtgcacggtggacccagacacatcgcactgtggattatttcattttgtaacaaatgaacgatatgtagcagaaaggcacgtccactcacaagggacgctttgggagaatgtcagttcatgtatgttcagaagaaattctgtcatagaaagtgccagaaagtgtttaacttgtcaaaaaacaaaaacccagcaacagaaaaatggagtttggaaaacaggacttaaaatgacattcagtatataaaatatgtacataatattggatgactaactatcaaatagatggatttgtatcaataccaaatagcttctgttttgttttgctgaaggctaaattcacagcgctatgcaattcttaattttcattaagttgttatttcagttttaaatgtaccttcagaataagcttccccaccccagtttttgttgcttgaaaatattgttgtcccggatttttgttaatattcatttttgttatccttttttaaaagtaaatgtacaggatgccagtaaaaaaaaaaaatggcttcagaattaaaactatgaaatattttacagtttttcttgtacagagtacttggctgttagcccaaggttaaaaagttcataacagattttttttggactgttttgttgggcagtgcctgataagcttcaaagctgctttattcaataaaaaaaagaaatgaaaaagat

SEQ ID NO: 3062 - DNA, 9093 bp, Homo sapiens
  source 1..9093: mol_type = genomic DNA
tctccctcggcgccgccgccgccgcccgcggggctgggacccgatgcggttagagccgcggagcctggaagagccccgagcgtttctgctttgggacaaccatacatctaattccttaaagtagttttatatgtaaaacttgcaaagaatcagaacaatgcctccacgaccatcatcaggtgaactgtggggcatccacttgatgcccccaagaatcctagtagaatgtttactaccaaatggaatgatagtgactttagaatgcctccgtgaggctacattaataaccataaagcatgaactatttaaagaagcaagaaaataccccctccatcaacttcttcaagatgaatcttcttacattttcgtaagtgttactcaagaagcagaaagggaagaattttttgatgaaacaagacgactttgtgaccttcggctttttcaaccctttttaaaagtaattgaaccagtaggcaaccgtgaagaaaagatcctcaatcgagaaattggttttgctatcggcatgccagtgtgtgaatttgatatggttaaagatccagaagtacaggacttccgaagaaatattctgaacgtttgtaaagaagctgtggatcttagggacctcaattcacctcatagtagagcaatgtatgtctatcctccaaatgtagaatcttcaccagaattgccaaagcacatatataataaattagataaagggcaaataatagtggtgatctgggtaatagtttctccaaataatgacaagcagaagtatactctgaaaatcaaccatgactgtgtaccagaacaagtaattgctgaagcaatcaggaaaaaaactcgaagtatgttgctatcctctgaacaactaaaactctgtgttttagaatatcagggcaagtatattttaaaagtgtgtggatgtgatgaatacttcctagaaaaatatcctctgagtcagtataagtatataagaagctgtataatgcttgggaggatgcccaatttgatgttgatggctaaagaaagcctttattctcaactgccaatggactgttttacaatgccatcttattccagacgcatttccacagctacaccatatatgaatggagaaacatctacaaaatccctttgggttataaatagtgcactcagaataaaaattctttgtgcaacctacgtgaatgtaaatattcgagacattgataagatctatgttcgaacaggtatctaccatggaggagaacccttatgtgacaatgtgaacactcaaagagtaccttgttccaatcccaggtggaatgaatggctgaattatgatatatacattcctgatcttcctcgtgctgctcgactttgcctttccatttgctctgttaaaggccgaaagggtgctaaagaggaacactgtccattggcatggggaaatataaacttgtttgattacacagacactctagtatctggaaaaatggctttgaatctttggccagtacctcatggattagaagatttgctgaaccctattggtgttactggatcaaatccaaataaagaaactccatgcttagagttggagtttgactggttcagcagtgtggtaaagttcccagatatgtcagtgattgaagagcatgccaattggtctgtatcccgagaagcaggatttagctattcccacgcaggactgagtaacagactagctagagacaatgaattaagggaaaatgacaaagaacagctcaaagcaatttctacacgagatcctctctctgaaatcactgagcaggagaaagattttctatggagtcacagacactattgtgtaactatccccgaaattctacccaaattgcttctgtctgttaaatggaattctagagatgaagtagcccagatgtattgcttggtaaaagattggcctccaatcaaacctgaacaggctatggaacttctggactgtaattacccagatcctatggttcgaggttttgctgttcggtgcttggaaaaatatttaacagatgacaaactttctcagtatttaattcagctagtacaggtcctaaaatatgaacaatatttggataacttgcttgtgagatttttactgaagaaagcattgactaatcaaaggattgggcactttttcttttggcatttaaaatctgagatgcacaataaaacagttagccagaggtttggcctgcttttggagtcctattgtcgtgcatgtgggatgtatttgaagcacctgaataggcaagtcgaggcaatggaaaagctcattaacttaactgacattctcaaacaggagaagaaggatgaaacacaaaaggtacagatgaagtttttagttgagcaaatgaggcgaccagatttcatggatgctctacagggctttctgtctcctctaaaccctgctcatcaactaggaaacctcaggcttgaagagtgtcgaattatgtcctctgcaaaaaggccactgtggttgaattgggagaacccagacatcatgtcagagttactgtttcagaacaatgagatcatctttaaaaatggggatgatttacggcaagatatgctaacacttcaaattattcgtattatggaaaatatctggcaaaatcaaggtcttgatcttcgaatgttaccttatggttgtctgtcaatcggtgactgtgtgggacttattgaggtggtgcgaaattctcacactattatgcaaattcagtgcaaaggcggcttgaaaggtgcactgcagttcaacagccacacactacatcagtggctcaaagacaagaacaaaggagaaatatatgatgcagccattgacctgtttacacgttcatgtgctggatactgtgtagctaccttcattttgggaattggagatcgtcacaatagtaacatcatggtgaaagacgatggacaactgtttcatatagattttggacactttttggatcacaagaagaaaaaatttggttataaacgagaacgtgtgccatttgttttgacacaggatttcttaatagtgattagtaaaggagcccaagaatgcacaaagacaagagaatttgagaggtttcaggagatgtgttacaaggcttatctagctattcgacagcatgccaatctcttcataaatcttttctcaatgatgcttggctctggaatgccagaactacaatcttttgatgacattgcatacattcgaaagaccctagccttagataaaactgagcaagaggctttggagtatttcatgaaacaaatgaatgatgcacatcatggtggctggacaacaaaaatggattggatcttccacacaattaaacagcatgcattgaactgaaaagataactgagaaaatgaaagctcactctggattccacactgcactgttaataactctcagcaggcaaagaccgattgcataggaattgcacaatccatgaacagcattagaatttacagcaagaacagaaataaaatactatataatttaaataatgtaaacgcaaacagggtttgatagcacttaaactagttcatttcaaaattaagctttagaataatgcgcaatttcatgttatgccttaagtccaaaaaggtaaactttgaagattgtttgtatctttttttaaaaaacaaaacaaaacaaaaatccccaaaatatatagaaatgatggagaaggaaaaagtgatggttttttttgtcttgcaaatgttctatgttttgaaatgtggacacaacaaaggctgttattgcattaggtgtaagtaaactggagtttatgttaaattacattgattggaaaagaatgaaaatttcttatttttccattgctgttcaatttatagtttgaagtgggtttttgactgcttgtttaatgaagaaaaatgcttggggtggaagggactcttgagatttcaccagagactttttctttttaataaatcaaaccttttgatgatttgaggttttatctgcagttttggaagcagtcacaaatgagacctgttataaggtggtatttttttttttcttctggacagtatttaaaggatcttattcttatttcccagggaaattctgggctcccacaaagtaaaaaaaaaaaaaaatcatagaaaaagaatgagcaggaatagttcttattccagaattgtacagtattcaccttaagttgattttttttctccttctgcaattgaactgaatacatttttcatgcatgttttccagaaaatagaagtattaatgttattaaaaagattattttttttattaaaggctatttatattatagaaactatcattaatatatattctttatttacatgatctgtcccatagtcatgcattgttttgcaccccaaattttttattgttcatagcagcatggtcagctttcttcttgatctatagatgaggctcaggcactatcccatttataccaataaccagtgtataactacttaaggaaaacataaaaacttcatcttctttccttttatttcttatgtgaatctcccgtcttccattctcttttataattgagaatgtctcaatcatatgaaattagttaccagaattaacacaatttagactatcttcctgattccttaaacccctttactgaagtatactcatgaataatactttaaaatatgggggaatagaaaccatgaactttttacctttttaaactatttatccatatctccaaagtagaacattaaaccattttaagatatgtctcattcccaagtagtcagagctcactctccaactttattaaatactatttgagcacaggacacattcttaaacattttgaaaaacattaacccaagatgtagaggctactgctagtcgtcattctagaatctgatattttactctgtatttgaaatgaatgattaatgtcctaggaaattagctttagcagatgtccaggtgccacatcaaaaaagtgcaataattattgacagttttttagattaggcatattattggaaaacaactttataaagagtgaacattgtatactctagtaaaacagcatcactttaaaaatattcatttatgaaatctgttacctatagttgaagtcttgagtagtgaacaagggactctaataccaatactcttaatatctggctattttagatcccttaaagggcataattattggaaatttaggtatttcactaaagcatgtatataatattgccaacaagaaaagtaaatttgaagattaagggaacttacttctgcaaactgtcttgcgatagttaagcagaatttaaactctgttttaagcaggaaaccagaaagattattttgcagttgtagaagatttcataacttattaaaacttattaacattttgtgttgtttagatataggcagttgatacatactaacatcccagccttttcaatatcagggttaaattataggaaaactcagtaaaatggtacaaatctgaaagtttgatggtagaaactgaagatttaacagagaactgtgttttacccgagtgccaaaaatgctgtgagcctccttgcacaaaatttataccacttttgcatttttatctatcagtccagatagttgtctcccctccttctcccaggacctctccaccattaaaatgcacaaaccacatggccgatttcaccatttacatttattttcaaaagttactacaaccaaattaattctattagaagaaatgtagacaaattctataaagactatagattgtgacctaagaaagaaatgaggcaaagaaccaaacattgaattaaatgctacatgggtgactaagatctgtttcaagtcagtgataatatagccacttctgggtacttcagtatcagagatcagttctcgtggtttagacagttcctatctatagctgactatccttgtccttgaatatggtgtaactgactattggctctacagttttattgggccacttaagaaatatttccttgaataattattttgagaaaaagtctaaaagtaataaaaataattttaaacacactgtagtaagaaatgactgttggaaaattatgctttcactttctaccatattctcagctatacaaaaccatttattttgaagatttttagactactgttaatttgaaatctgttactcttattgtggaatttgtttttttaaaaaagatgtttctaattggatttttaaaagaagaatggaatttggttgctattttacaatagaacctaagctttttgtggttcttagtgtcctatgtaaaacttagtgtcaaagtaatcaactttgagattttcccttctattctgctttatattaaaagcccattagaaaatgggaacctggtgaatatataatgaattgtaaaatattttaatgtgtaactttttcaactgtgaaactgacttgattttttgatgaaaacagctgctgataaagtattttgtgtaaagtgtagttcttattaatcaggaaaatgatgacttgattagactgtatatgccctcttggattttattttaaatggattggtgactttcacataggtaaaacacagtccatctgtattcttttttccatcaaaaatcgagtgatttggaattataaaaaaattgtgagcagcctatttgaaaggcatcatggaaatttcacagcacaataacacggatttgttttttcttaatgatgtaaatccgtttaattcatactttgatcaatagcccatgcttgccaactctgaagaaatttaatttccagcagtattttaaagctagcctgttaactttttctgaatatttaaagttcctcttttttctatgtctgcacaaactgcagacctgggctggacccacatactcaagagtccaccttaagaaattattttgatgtccaagacatcactaaaatatttaagtttaaagataatatgtggtgttaatagattgtggtgcttttactatttaaagacaactttcatacttcagatgtttttgagaagaggggaatgtgaggggagggggcagaacagggaggagttgtttgaatgaattacattctttatatccatcctgctcatttggggcatgtctttaagagaaggctgaaagttgtgagagtatattgtataccgtaagagaatcaactcttcatcatggatgggattgtgaaggctgaactataaaattcagcattgacagcatcctcaattaataattcttggtgacagaataatacagctgggctgttttttaaaatataaacaataccatttttaattattacattaaaaattgtaaatatatctatgtgccatggcctgggaagcctgctttcttttttcataaaaattatttttactgtatgaaaagatcatggggtttagctcaaaatatctgtggtcctgataaaattggattggtaactctacctcagaaggaaaatgggaaaaaaaaatagatgagtcacaattcaatacttcaagctcagaaactgtgcagatcactgaattttagatttataaagtcagagttggcatgccttgtttttaatgatatggaagaccttaagaaaaaaacttggctgaagtttaatcgttggtccagccatttgaaaaaggcaatagtttgaggaggttcccgaattcggcatttgaaattcattttgttctctcttcttcattattagtgcatttggtgtgtgtatacttgcacacaattctgtttgtgtacacactgcttgcttagccctagtcaagaggcatcttttataaaaggtgtaaagaaatatcaaggttctaaaattcggaagagtttagaatttattaggagtttcccaagttgggatgttagtctttaaataaacttcatgcacctattccacttaaggttttgcacctcctttttattagtgcagtgccatttcttctgcttgattttaggtatgttaatattccagccttgctagttagcataaagtgacaggtgtgagccatgaggaaattttctgacttaatttgtacacaactacatataagagttttagtggaggaaaaaaattagtcccttgtgcgtatacagtagttaggtaaatgatttttctaccaacagtatactccattcctcatgtaggtaagtacagaaaaggtttttaaatgtatttttttagccagttaaagtctatgaatctatctgcaaccttatttaatctgtcactataataattttgtggttatgctaagaaccatgtatacttttaggtattcttatttttgtcaatttttctaggttggcaaggaggcagaaaaccttcattgtttcatattaaaatataattagactaaacttaattctagtatgaatttccaaaatcattatctatttatttcatttttatttaattttgtttttatttcatttttaaaagtcccttgttcaatttaacttatgttcctaagagaggttggagaacttggccttcatctgatttcaaaaatgttttgagtttcaaatgaagttaatggtttcagtgtgattcagtcctcagacctaattgggttgaataaaatctaaaagaatatacccttttggagcataacattttaataccttggggaatgtggcactaccaaaagaagactactaacacgtcagatgttcacctggaagctttatcaagaaattcgaaccacccttttggccccattaattgtagcaagtttatttctctatattttgtcattcagtgaattgaagtcctgtggtatactgcattcattagaagaaaaacgtttttaatgtccttttaatgatggcccagaaagcatttgacacagcaagatgcatgtgttactatattgagaatatagaataataacagtatcactaaatttaagacctcttcccagtcttgctgttcctagcaagaagtttggcctgtgactgcacttactgtttatgctcatcagaaactgtcaatgtctgcttttctttaactctgcagtctgtaacatcacgctgtttattaaaaaaaaaaagaaaaatta

SEQ ID NO: 3063 - DNA, 620 bp, Homo sapiens
  source 1..620: mol_type = genomic DNA
ggagcgcaacaagagggtctttctagaaaacagtctgcatattctttaatgaattagagttgtgatttcatcttggtgaagcttcctcattccagcactgcgcctttgtgcacatgcaggacctgggttttcggaacgatgttttgaatcatagtttgtgtggccggggagaaccccttagaatacttgggtttctgctttgggacaaccatacatctaattccttaaagtagttttatatgtaaaacttgcaaagaatcagaacaatgcctccacgaccatcatcaggtgaactgtggggcatccacttgatgcccccaagaatcctagtagaatgtttactaccaaatggaatgatagtgactttagaatgcctccgtgaggctacattaataaccataaagcatgaactatttaaagaagcaagaaaataccccctccatcaacttcttcaagatgaatcttcttacattttcgtaagtgttactcaagaagcagaaagggaagaattttttgatgaaacaagacgactttgtgaccttcggctttttcaaccctttttaaaagtaattgaaccagtaggcaaccgtgaagaaaagatcctcaatcgagaaattggt

SEQ ID NO: 3064 - DNA, 245 bp, Homo sapiens
  source 1..245: mol_type = genomic DNA
ttccgggggattgtaggctctgcccctcctcagctcttaccctcttctgccggaggagggggggggccgagggggtggggaagagttcgttgtttgtttacacgatgtttctgctttgggacaaccatacatctaattccttaaagtagttttatatgtaaaacttgcaaagaatcagaacaatgcctccacgaccatcatcaggtgaactgtggggcatccacttgatgcccccaagaatccta

SEQ ID NO: 3065 - DNA, 3213 bp, Homo sapiens
  source 1..3213: mol_type = genomic DNA
atgtgcttcagtttcataatgcctcctgctatggcagacatccttgacatctgggcggtggattcacagatagcatctgatggctccatacctgtggatttccttttgcccactgggatttatatccagttggaggtacctcgggaagctaccatttcttatattaagcagatgttatggaagcaagttcacaattacccaatgttcaacctccttatggatattgactcctatatgtttgcatgtgtgaatcagactgctgtatatgaggagcttgaagatgaaacacgaagactctgtgatgtcagaccttttcttccagttctcaaattagtgacaagaagttgtgacccaggggaaaaattagactcaaaaattggagtccttataggaaaaggtctgcatgaatttgattccttgaaggatcctgaagtaaatgaatttcgaagaaaaatgcgcaaattcagcgaggaaaaaatcctgtcacttgtgggattgtcttggatggactggctaaaacaaacatatccaccagagcatgaaccatccatccctgaaaacttagaagataaactttatgggggaaagctcatcgtagctgttcattttgaaaactgccaggacgtgtttagctttcaagtgtctcctaatatgaatcctatcaaagtaaatgaattggcaatccaaaaacgtttgactattcatgggaaggaagatgaagttagcccctatgattatgtgttgcaagtcagcgggagagtagaatatgtttttggtgatcatccactaattcagttccagtatatccggaactgtgtgatgaacagagccctgccccattttatacttgtggaatgctgcaagatcaagaaaatgtatgaacaagaaatgattgccatagaggctgccataaatcgaaattcatctaatcttcctcttccattaccaccaaagaaaacacgaattatttctcatgtttgggaaaataacaaccctttccaaattgtcttggttaagggaaataaacttaacacagaggaaactgtaaaagttcatgtcagggctggtctttttcatggtactgagctcctgtgtaaaaccatcgtaagctcagaggtatcagggaaaaatgatcatatttggaatgaaccactggaatttgatattaatatttgtgacttaccaagaatggctcgattatgttttgctgtttatgcagttttggataaagtaaaaacgaagaaatcaacgaaaactattaatccctctaaatatcagaccatcaggaaagctggaaaagtgcattatcctgtagcgtgggtaaatacgatggtttttgactttaaaggacaattgagaactggagacataatattacacagctggtcttcatttcctgatgaactcgaagaaatgttgaatccaatgggaactgttcaaacaaatccatatactgaaaatgcaacagctttgcatgttaaatttccagagaataaaaaacaaccttattattaccctcccttcgataagattattgaaaaggcagctgagattgcaagcagtgatagtgctaatgtgtcaagtcgaggtggaaaaaagtttcttcctgtattgaaagaaatcttggacagggatcccttgtctcaactgtgtgaaaatgaaatggatcttatttggactttgcgacaagactgccgagagattttcccacaatcactgccaaaattactgctgtcaatcaagtggaataaacttgaggatgttgctcagcttcaggcgctgcttcagatttggcctaaactgcccccccgggaggccctagagcttctggatttcaactatccagaccagtacgttcgagaatatgctgtaggctgcctgcgacagatgagtgatgaagaactttctcaatatcttttacaactggtgcaagtgttaaaatatgagccttttcttgattgtgccctctctagattcctattagaaagagcacttggtaatcggaggatagggcagtttctattttggcatcttaggtcagaagtgcacattcctgctgtctcagtacaatttggtgtcatccttgaagcatactgccggggaagtgtggggcacatgaaagtgctttctaagcaggttgaagcactcaataagttaaaaactttaaatagtttaatcaaactgaatgccgtgaagttaaacagagccaaagggaaggaggccatgcatacctgtttaaaacagagtgcttaccgggaagccctctctgacctgcagtcacccctgaacccatgtgttatcctctcagaactctatgttgaaaagtgcaaatacatggattccaaaatgaagcctttgtggctggtatacaataacaaggtatttggtgaggattcagttggagtgatttttaaaaatggtgatgatttacgacaggatatgttgacactccaaatgttgcgcttgatggatttactctggaaagaagctggtttggatcttcggatgttgccttatggctgtttagcaacaggagatcgctctggcctcattgaagttgtgagcacctctgaaacaattgctgacattcagctgaacagtagcaatgtggctgctgcagcagccttcaacaaagatgcccttctgaactggcttaaagaatacaactctggggatgacctggaccgagccattgaggaatttacactgtcctgtgctggctactgtgtagcttcttatgtccttgggattggtgacagacatagtgacaacatcatggtcaaaaaaactggccagctcttccacattgactttggacatattcttggaaatttcaaatctaagtttggcattaaaagggagcgagtgccttttattcttacctatgatttcatccatgtcattcaacaaggaaaaacaggaaatacagaaaagtttggccggttccgccagtgttgtgaggatgcatatctgattttacgacggcatgggaatctcttcatcactctctttgcgctgatgttgactgcagggcttcctgaactcacatcagtcaaagatatacagtatcttaaggactctcttgcattagggaagagtgaagaagaagcactcaaacagtttaagcaaaaatttgatgaggcgctcagggaaagctggactactaaagtgaactggatggcccacacagttcggaaagactacagatcttaa

SEQ ID NO: 3066 - DNA, 667 bp, Homo sapiens
  source 1..667: mol_type = genomic DNA
tggcgcgcgcgcacacgggcgcgggttcggcggcggcgcgcgcgtgctctgtcggcctgtgcggcgctgcggcggagcgggccatggcagtggggagggggcgagtgtagtgctgcgcggggcaggcgggaggtgatcgagagaggcagggatgggggcgccggagtggagcggttgcggcggcctgggctgctgactgcgcacttggaatagtagcaggcggcggcggcggaacgccaggcagtgtatgttttaactggaaaaagtcttccatgaaaacgtcacttttaaaaaataagtaatgccatctgttttcctaaaagactgaaatgggggcgaccattcttagggccccgtggttatgaatgtgcttcagtttcataatgcctcctgctatggcagacatccttgacatctgggcggtggattcacagatagcatctgatggctccatacctgtggatttccttttgcccactgggatttatatccagttggaggtacctcgggaagctaccatttcttatattaagcagatgttatggaagcaagttcacaattacccaatgttcaacctccttatggatattgactcctatatgtttgcatgtgtgaatcagactgctgtatatgaggagcttgaagatgaaacacgaagactctgtga

SEQ ID NO: 3067 - DNA, 690 bp, Homo sapiens
  source 1..690: mol_type = genomic DNA
tgtattttttagtagagatggggtttcactgtgttagccaggatggtcacgatctcctgacctcgtgatccgtccacctcagccccccagagtgctgggattacaggcatgagccactgtgcccggccaaaaaaaatctctttttaaatatctcctatgattttggttgaatttgttcacctatagaacaaatttatgttgttttctgcttatcattagatgtaaaggagtaaagtccagtgggttctgctggcacattggtggggaagctgagaacttttaaactctttcccctttctccagtgaacaatcgacaggatatgggttatagttacagttaaagggtttattgaactaattgtcactgctgaagttcctgtgccctctgatagcttccttgaaaagttttcatagtttaaaaactctgcttgtccttagcctttgatctcttgctttgatgctcaaacagaagaatgatacaagactgaggatcttgccaggcaagggccccgtggttatgaatgtgcttcagtttcataatgcctcctgctatggcagacatccttgacatctgggcggtggattcacagatagcatctgatggctccatacctgtggatttccttttgcccactgggatttatatccagttggaggtacctcgggaagctaccatttcttatattaagc

SEQ ID NO: 3068 - DNA, 4658 bp, Homo sapiens
  source 1..4658: mol_type = genomic DNA
gggctgctgactgcgcacttggaatagtagcaggcggcggcggcggaacgccaggcagggccccgtggttatgaatgtgcttcagtttcataatgcctcctgctatggcagacatccttgacatctgggcggtggattcacagatagcatctgatggctccatacctgtggatttccttttgcccactgggatttatatccagttggaggtacctcgggaagctaccatttcttatattaagcagatgttatggaagcaagttcacaattacccaatgttcaacctccttatggatattgactcctatatgtttgcatgtgtgaatcagactgctgtatatgaggagcttgaagatgaaacacgaagactctgtgatgtcagaccttttcttccagttctcaaattagtgacaagaagttgtgacccaggggaaaaattagactcaaaaattggagtccttataggaaaaggtctgcatgaatttgattccttgaaggatcctgaagtaaatgaatttcgaagaaaaatgcgcaaattcagcgaggaaaaaatcctgtcacttgtgggattgtcttggatggactggctaaaacaaacatatccaccagagcatgaaccatccatccctgaaaacttagaagataaactttatgggggaaagctcatcgtagctgttcattttgaaaactgccaggacgtgtttagctttcaagtgtctcctaatatgaatcctatcaaagtaaatgaattggcaatccaaaaacgtttgactattcatgggaaggaagatgaagttagcccctatgattatgtgttgcaagtcagcgggagagtagaatatgtttttggtgatcatccactaattcagttccagtatatccggaactgtgtgatgaacagagccctgccccattttatacttgtggaatgctgcaagatcaagaaaatgtatgaacaagaaatgattgccatagaggctgccataaatcgaaattcatctaatcttcctcttccattaccaccaaagaaaacacgaattatttctcatgtttgggaaaataacaaccctttccaaattgtcttggttaagggaaataaacttaacacagaggaaactgtaaaagttcatgtcagggctggtctttttcatggtactgagctcctgtgtaaaaccatcgtaagctcagaggtatcagggaaaaatgatcatatttggaatgaaccactggaatttgatattaatatttgtgacttaccaagaatggctcgattatgttttgctgtttatgcagttttggataaagtaaaaacgaagaaatcaacgaaaactattaatccctctaaatatcagaccatcaggaaagctggaaaagtgcattatcctgtagcgtgggtaaatacgatggtttttgactttaaaggacaattgagaactggagacataatattacacagctggtcttcatttcctgatgaactcgaagaaatgttgaatccaatgggaactgttcaaacaaatccatatactgaaaatgcaacagctttgcatgttaaatttccagagaataaaaaacaaccttattattaccctcccttcgataagattattgaaaaggcagctgagattgcaagcagtgatagtgctaatgtgtcaagtcgaggtggaaaaaagtttcttcctgtattgaaagaaatcttggacagggatcccttgtctcaactgtgtgaaaatgaaatggatcttatttggactttgcgacaagactgccgagagattttcccacaatcactgccaaaattactgctgtcaatcaagtggaataaacttgaggatgttgctcagcttcaggcgctgcttcagatttggcctaaactgcccccccgggaggccctagagcttctggatttcaactatccagaccagtacgttcgagaatatgctgtaggctgcctgcgacagatgagtgatgaagaactttctcaatatcttttacaactggtgcaagtgttaaaatatgagccttttcttgattgtgccctctctagattcctattagaaagagcacttggtaatcggaggatagggcagtttctattttggcatcttaggtcagaagtgcacattcctgctgtctcagtacaatttggtgtcatccttgaagcatactgccggggaagtgtggggcacatgaaagtgctttctaagcaggttgaagcactcaataagttaaaaactttaaatagtttaatcaaactgaatgccgtgaagttaaacagagccaaagggaaggaggccatgcatacctgtttaaaacagagtgcttaccgggaagccctctctgacctgcagtcacccctgaacccatgtgttatcctctcagaactctatgttgaaaagtgcaaatacatggattccaaaatgaagcctttgtggctggtatacaataacaaggtatttggtgaggattcagttggagtgatttttaaaaatggtgatgatttacgacaggatatgttgacactccaaatgttgcgcttgatggatttactctggaaagaagctggtttggatcttcggatgttgccttatggctgtttagcaacaggagatcgctctggcctcattgaagttgtgagcacctctgaaacaattgctgacattcagctgaacagtagcaatgtggctgctgcagcagccttcaacaaagatgcccttctgaactggcttaaagaatacaactctggggatgacctggaccgagccattgaggaatttacactgtcctgtgctggctactgtgtagcttcttatgtccttgggattggtgacagacatagtgacaacatcatggtcaaaaaaactggccagctcttccacattgactttggacatattcttggaaatttcaaatctaagtttggcattaaaagggagcgagtgccttttattcttacctatgatttcatccatgtcattcaacaaggaaaaacaggaaatacagaaaagtttggccggttccgccagtgttgtgaggatgcatatctgattttacgacggcatgggaatctcttcatcactctctttgcgctgatgttgactgcagggcttcctgaactcacatcagtcaaagatatacagtatcttaaggactctcttgcattagggaagagtgaagaagaagcactcaaacagtttaagcaaaaatttgatgaggcgctcagggaaagctggactactaaagtgaactggatggcccacacagttcggaaagactacagatcttaacgatcagccttcgctcctaatgtatttgttggtttcatttcattttcattttgcacttgcactaaattgaacatgaccctgttagagatgttataaagggaatgaaatcctggaactcagagttaaattaagaacaaggcatcccacagaacctaatctgaacaatccccgatgattccctctgctttttgaatgcttccaagacttatcatgaaaactgtcaatggataatcatttcctgctgactttgcacgccaaggaatgctactagggattgtttccgtttttgtttgttttttctaatatttggtacttcccagaatggtgtaaatacttcttttcaatgttgtgaccaagtattgtcactcagccaacaacttttccacacctgggggttggtggctgttcttactgtccaaatgaagctaaaaagaaaggcatctttcttcccttttaaaattgtgtaaactgcaaattataatataatttgaatttatgattattttccagaagaaatcttgtaaacctgtggatactcattaattcttttgttaatatttatttccatgatagcatcattccagccagacttgctgaaaatctactggtgaggcaaatataatatatataaatatgctacatatatatttataaaatttctagtgggagttctatataaatgtttctttggtattcttcagcctgtgatttaaagttttacaaaaagcagagctttttcctaagttacttttcagttaggtaactgtgtgatccagttcttccagctgcttctataatgaggcacatattaatacagtttttatatggtatctatgaaagagttcacttcatagagaataatacttgagcaaatgtatccaagaaagcaagcaaatgaaaagaaacctatttatggaataaactccagatctgaaattcagtattttagaaaaatgccagctcttcttactgtatttattaaaacttgtaataatgtgatttttttcaaggatattagttcaaattgaaatggtttcacgccacacggaaatctttaagttatttgttgaggtaccatatatttagggtgctaggggcaagtaatgttaatatgtgcaataggaactactggtttgaatgtgtaaatgggtgatctctctgagtcctggcaacatccagcaaaactactgcttattctccaaagaatattgggagctctcaatcctcggtgatatgggaaagagaactgagtatttgccctatgactgagctttctataggaattttattaaagaatgtttaattttgttgtccttcttaatgttctcagtcaaataaatgagtgagctggtttcggctgctcttggaatg

SEQ ID NO: 3069 - DNA, 721 bp, Homo sapiens
  source 1..721: mol_type = genomic DNA
tgtagtgctgcgcggggcaggcgggaggtgatcgagagaggcagggatgggggcgccggagtggagcggttgcggcggcctgggctgctgactgcgcacttggaatagtagcaggcggcggcggcggaacgccaggcagtgtatgttttaactggaaaaagtcttccatgaaaacgtcacttttaaaaaataagtaatgccatctgttttcctaaaagactgaaatgggggcgaccattcttagcctttgatctcttgctttgatgctcaaacagaagaatgatacaagactgaggatcttgccaggcaagggccccgtggttatgaatgtgcttcagtttcataatgcctcctgctatggcagacatccttgacatctgggcggtggattcacagatagcatctgatggctccatacctgtggatttccttttgcccactgggatttatatccagttggaggtacctcgggaagctaccatttcttatattaagcagatgttatggaagcaagttcacaattacccaatgttcaacctccttatggatattgactcctatatgtttgcatgtgtgaatcagactgctgtatatgaggagcttgaagatgaaacacgaagactctgtgatgtcagaccttttcttccagttctcaaattagtgacaagaagttgtgacccaggggaaaaattagactcaaaaattggagtccttataggaa

SEQ ID NO: 3070 - DNA, 2347 bp, Homo sapiens
  source 1..2347: mol_type = genomic DNA
atgtcagggctggtctttttcatggtactgagctcctgtgtaaaaccatcgtaagctcagaggtatcagggaaaaatgatcatatttggaatgaaccactggaatttgatattaatatttgtgacttaccaagaatggctcgattatgttttgctgtttatgcagttttggataaagtaaaaacgaagaaatcaacgaaaactattaatccctctaaatatcagaccatcaggaaagctggaaaagtgcattatcctgtagcgtgggtaaatacgatggtttttgactttaaaggacaattgagaactggagacataatattacacagctggtcttcatttcctgatgaactcgaagaaatgttgaatccaatgggaactgttcaaacaaatccatatactgaaaatgcaacagctttgcatgttaaatttccagagaataaaaaacaaccttattattaccctcccttcgataagagtcgaggtggaaaaaagtttcttcctgtattgaaagaaatcttggacagggatcccttgtctcaactgtgtgaaaatgaaatggatcttatttggactttgcgacaagactgccgagagattttcccacaatcactgccaaaattactgctgtcaatcaagtggaataaacttgaggatgttgctcagcttcaggcgctgcttcagatttggcctaaactgcccccccgggaggccctagagcttctggatttcaactatccagaccagtacgttcgagaatatgctgtaggctgcctgcgacagatgagtgatgaagaactttctcaatatcttttacaactggtgcaagtgttaaaatatgagccttttcttgattgtgccctctctagattcctattagaaagagcacttggtaatcggaggatagggcagtttctattttggcatcttaggtcagaagtgcacattcctgctgtctcagtacaatttggtgtcatccttgaagcatactgccggggaagtgtggggcacatgaaagtgctttctaagcaggttgaagcactcaataagttaaaaactttaaatagtttaatcaaactgaatgccgtgaagttaaacagagccaaagggaaggaggccatgcatacctgtttaaaacagagtgcttaccgggaagccctctctgacctgcagtcacccctgaacccatgtgttatcctctcagaactctatgttgaaaagtgcaaatacatggattccaaaatgaagcctttgtggctggtatacaataacaaggtatttggtgaggattcagttggagtgatttttaaaaatggtgatgatttacgacaggatatgttgacactccaaatgttgcgcttgatggatttactctggaaagaagctggtttggatcttcggatgttgccttatggctgtttagcaacaggagatcgctctggcctcattgaagttgtgagcacctctgaaacaattgctgacattcagctgaacagtagcaatgtggctgctgcagcagccttcaacaaagatgcccttctgaactggcttaaagaatacaactctggggatgacctggaccgagccattgaggaatttacactgtcctgtgctggctactgtgtagcttcttatgtccttgggattggtgacagacatagtgacaacatcatggtcaaaaaaactggccagctcttccacattgactttggacatattcttggaaatttcaaatctaagtttggcattaaaagggagcgagtgccttttattcttacctatgatttcatccatgtcattcaacaaggaaaaacaggaaatacagaaaagtttggccggttccgccagtgttgtgaggatgcatatctgattttacgacggcatgggaatctcttcatcactctctttgcgctgatgttgactgcagggcttcctgaactcacatcagtcaaagatatacagtatcttaaggactctcttgcattagggaagagtgaagaagaagcactcaaacagtttaagcaaaaatttgatgaggcgctcagggaaagctggactactaaagtgaactggatggcccacacagttcggaaagactacagatcttaacgatcagccttcgctcctaatgtatttgttggtttcatttcattttcattttgcacttgcactaaattgaacatgaccctgttagagatgttataaagggaatgaaatcctggaactcagagttaaattaagaacaaggcatcccacagaacctaatctgaacaatccccgatgattccctctgctttttgaatgcttccaagacttatcatgaaaactgtcaatggataatcatttcc

SEQ ID NO: 3071 - DNA, 3181 bp, Homo sapiens
  source 1..3181: mol_type = genomic DNA
caggaaagctggaaaagtgcattatcctgtagcgtgggtaaatacgatggtttttgactttaaaggacaattgagaactggagacataatattacacagctggtcttcatttcctgattattgaaaaggcagctgagattgcaagcagtgatagtgctaatgtgtcaagtcgaggtggaaaaaagtttcttcctgtattgaaagaaatcttggacagggatcccttgtctcaactgtgtgaaaatgaaatggatcttatttggactttgcgacaagactgccgagagattttcccacaatcactgccaaaattactgctgtcaatcaagtggaataaacttgaggatgttgctcagcttcaggcgctgcttcagatttggcctaaactgcccccccgggaggccctagagcttctggatttcaactatccagaccagtacgttcgagaatatgctgtaggctgcctgcgacagatgagtgatgaagaactttctcaatatcttttacaactggtgcaagtgttaaaatatgagccttttcttgattgtgccctctctagattcctattagaaagagcacttggtaatcggaggatagggcagtttctattttggcatcttaggtcagaagtgcacattcctgctgtctcagtacaatttggtgtcatccttgaagcatactgccggggaagtgtggggcacatgaaagtgctttctaagcaggttgaagcactcaataagttaaaaactttaaatagtttaatcaaactgaatgccgtgaagttaaacagagccaaagggaaggaggccatgcatacctgtttaaaacagagtgcttaccgggaagccctctctgacctgcagtcacccctgaacccatgtgttatcctctcagaactctatgttgaaaagtgcaaatacatggattccaaaatgaagcctttgtggctggtatacaataacaaggtatttggtgaggattcagttggagtgatttttaaaaatggtgatgtttgttttcccttagatttacgacaggatatgttgacactccaaatgttgcgcttgatggatttactctggaaagaagctggtttggatcttcggatgttgccttatggctgtttagcaacaggagatcgctctggcctcattgaagttgtgagcacctctgaaacaattgctgacattcagctgaacagtagcaatgtggctgctgcagcagccttcaacaaagatgcccttctgaactggcttaaagaatacaactctggggatgacctggaccgagccattgaggaatttacactgtcctgtgctggctactgtgtagcttcttatgtccttgggattggtgacagacatagtgacaacatcatggtcaaaaaaactggccagctcttccacattgactttggacatattcttggaaatttcaaatctaagtttggcattaaaagggagcgagtgccttttattcttacctatgatttcatccatgtcattcaacaaggaaaaacaggaaatacagaaaagtttggccggttccgccagtgttgtgaggatgcatatctgattttacgacggcatgggaatctcttcatcactctctttgcgctgatgttgactgcagggcttcctgaactcacatcagtcaaagatatacagtatcttaaggactctcttgcattagggaagagtgaagaagaagcactcaaacagtttaagcaaaaatttgatgaggcgctcagggaaagctggactactaaagtgaactggatggcccacacagttcggaaagactacagatcttaacgatcagccttcgctcctaatgtatttgttggtttcatttcattttcattttgcacttgcactaaattgaacatgaccctgttagagatgttataaagggaatgaaatcctggaactcagagttaaattaagaacaaggcatcccacagaacctaatctgaacaatccccgatgattccctctgctttttgaatgcttccaagacttatcatgaaaactgtcaatggataatcatttcctgctgactttgcacgccaaggaatgctactagggattgtttccgtttttgtttgttttttctaatatttggtacttcccagaatggtgtaaatacttcttttcaatgttgtgaccaagtattgtcactcagccaacaacttttccacacctgggggttggtggctgttcttactgtccaaatgaagctaaaaagaaaggcatctttcttcccttttaaaattgtgtaaactgcaaattataatataatttgaatttatgattattttccagaagaaatcttgtaaacctgtggatactcattaattcttttgttaatatttatttccatgatagcatcattccagccagacttgctgaaaatctactggtgaggcaaatataatatatataaatatgctacatatatatttataaaatttctagtgggagttctatataaatgtttctttggtattcttcagcctgtgatttaaagttttacaaaaagcagagctttttcctaagttacttttcagttaggtaactgtgtgatccagttcttccagctgcttctataatgaggcacatattaatacagtttttatatggtatctatgaaagagttcacttcatagagaataatacttgagcaaatgtatccaagaaagcaagcaaatgaaaagaaacctatttatggaataaactccagatctgaaattcagtattttagaaaaatgccagctcttcttactgtatttattaaaacttgtaataatgtgatttttttcaaggatattagttcaaattgaaatggtttcacgccacacggaaatctttaagttatttgttgaggtaccatatatttagggtgctaggggcaagtaatgttaatatgtgcaataggaactactggtttgaatgtgtaaatgggtgatctctctgagtcctggcaacatccagcaaaactactgcttattctccaaagaatattgggagctctcaatcctcggtgatatgggaaagagaactgagtatttgccctatgactgagctttctataggaattttattaaagaatgtttaattttgttgtccttcttaatgttctcagtcaaataaatgagtgagctggtttcggctgctcttgg

SEQ ID NO: 3072 - DNA, 3503 bp, Homo sapiens
  source 1..3503: mol_type = genomic DNA
cctgggagaagaggcagctgaggccgtggcccggagtagtaggagccacaagccaccctgggcaggacgaggccctgagggaggacaactgtcatctgggaagtaacaacgcaggatgccccctggggtggactgccccatggaattctggaccaaggaggagaatcagagcgttgtggttgacttcctgctgcccacaggggtctacctgaacttccctgtgtcccgcaatgccaacctcagcaccatcaagcagctgctgtggcaccgcgcccagtatgagccgctcttccacatgctcagtggccccgaggcctatgtgttcacctgcatcaaccagacagcggagcagcaagagctggaggacgagcaacggcgtctgtgtgacgtgcagcccttcctgcccgtcctgcgcctggtggcccgtgagggcgaccgcgtgaagaagctcatcaactcacagatcagcctcctcatcggcaaaggcctccacgagtttgactccttgtgcgacccagaagtgaacgactttcgcgccaagatgtgccaattctgcgaggaggcggccgcccgccggcagcagctgggctgggaggcctggctgcagtacagtttccccctgcagctggagccctcggctcaaacctgggggcctggtaccctgcggctcccgaaccgggcccttctggtcaacgttaagtttgagggcagcgaggagagcttcaccttccaggtgtccaccaaggacgtgccgctggcgctgatggcctgtgccctgcggaagaaggccacagtgttccggcagccgctggtggagcagccggaagactacacgctgcaggtgaacggcaggcatgagtacctgtatggcagctacccgctctgccagttccaggtccagaaaccgcgtgccaaaccacctcccattcctgcgaagaagccttcctctgtgtccctgtggtccctggagcagccgttccgcatcgagctcatccagggcagcaaagtgaacgccgacgagcggatgaagctggtggtgcaggccgggcttttccacggcaacgagatgctgtgcaagacggtgtccagctcggaggtgagcgtgtgctcggagcccgtgtggaagcagcggctggagttcgacatcaacatctgcgacctgccccgcatggcccgtctctgctttgcgctgtacgccgtgatcgagaaagccaagaaggctcgctccaccaagaagaagtccaagaaggcggactgccccattgcctgggccaacctcatgctgtttgactacaaggaccagcttaagaccggggaacgctgcctctacatgtggccctccgtcccagatgagaagggcgagctgctgaaccccacgggcactgtgcgcagtaaccccaacacggatagcgccgctgccctgctcatctgcctgcccgaggtggccccgcaccccgtgtactaccccgccctggagaagctgccaggagggatgctcttggcatctcgtgagtggaggccagagctgctgtggatgcgcctccatgcagaggacagcgccccctcaaggatgattggggtggcaatgcccggcctgggggtcctgcccgggctggtccaggcccctggggacgctgagtgcagccgtttgttgcagatcttggagctggggcgacacagcgagtgtgtgcatgtcaccgaggaggagcagctgcagctgcgggaaatcctggagcggcgggggtctggggagctgtatgagcacgagaaggacctggtgtggaagctgcggcatgaagtccaggagcacttcccggaggcgctagcccggctgctgctggtcaccaagtggaacaagcatgaggatgtggcccaagatgctctacctgctgtgtcctggccggagctgcccgtcctgagcgccctggagctgctagacttcagcttccccgattgccacgtaggctccttcgccatcaagtcgctgcggaaactgacggacgatgagctgttccagtacctgctgcagctggtgcaggtgctcaagtacgagtcctacctggactgcgagctgaccaaattcctgctggaccgggccctggccaaccgcaagatcggccacttccttttctggcacctccgctccgagatgcacgtgccgtcggtggccctgcgcttcggcctcatcctggaggcctactgcaggggcagcacccaccacatgaaggtgctgatgaagcagggggaagcactgagcaaactgaaggccctgaatgacttcgtcaagctgagctctcagaagacccccaagccccagaccaaggagctgatgcacttgtgcatgcggcaggaggcctacctagaggccctctcccacctgcagtccccactcgaccccagcaccctgctggctgaagtctgcgtggagcagtgcaccttcatggactccaagatgaagcccctgtggatcatgtacagcaacgaggaggcaggcagcggcggcagcgtgggcatcatctttaagaacggggatgacctccggcaggacatgctgaccctgcagatgatccagctcatggacgtcctgtggaagcaggaggggctggacctgaggatgaccccctatggctgcctccccaccggggaccgcacaggcctcattgaggtggtactccgttcagacaccatcgccaacatccaactcaacaagagcaacatggcagccacagccgccttcaacaaggatgccctgctcaactggctgaagtccaagaacccgggggaggccctggatcgagccattgaggagttcaccctctcctgtgctggctattgtgtggccacatatgtgctgggcattggcgatcggcacagcgacaacatcatgatccgagagagtgggcagctgttccacattgattttggccactttctggggaatttcaagaccaagtttggaatcaaccgcgagcgtgtcccattcatcctcacctacgactttgtccatgtgattcagcaggggaagactaataatagtgagaaatttgaacggttccggggctactgtgaaagggcctacaccatcctgcggcgccacgggcttctcttcctccacctctttgccctgatgcgggcggcaggcctgcctgagctcagctgctccaaagacatccagtatctcaaggactccctggcactggggaaaacagaggaggaggcactgaagcacttccgagtgaagtttaacgaagccctccgtgagagctggaaaaccaaagtgaactggctggcccacaacgtgtccaaagacaacaggcagtagtggctcctcccagccctgggcccaagaggaggcggctgcgggtcgtggggaccaagcacattggtcctaaaggggctgaagagcctgaactgcacctaacgggaaagaaccgacatggctgccttttgtttacactggttatttatttatgacttgaaatagtttaaggagctaaacagcc

SEQ ID NO: 3073 - DNA, 3508 bp, Homo sapiens
  source 1..3508: mol_type = genomic DNA
cctgggagaagaggcagctgaggccgtggcccggagtagtaggagccacaagccaccctgggcaggacgaggccctgagggaggacaactgtcatctgggaagtaacaacgcaggatgccccctggggtggactgccccatggaattctggaccaaggaggagaatcagagcgttgtggttgacttcctgctgcccacaggggtctacctgaacttccctgtgtcccgcaatgccaacctcagcaccatcaagcagctgctgtggcaccgcgcccagtatgagccgctcttccacatgctcagtggccccgaggcctatgtgttcacctgcatcaaccagacagcggagcagcaagagctggaggacgagcaacggcgtctgtgtgacgtgcagcccttcctgcccgtcctgcgcctggtggcccgtgagggcgaccgcgtgaagaagctcatcaactcacagatcagcctcctcatcggcaaaggcctccacgagtttgactccttgtgcgacccagaagtgaacgactttcgcgccaagatgtgccaattctgcgaggaggcggccgcccgccggcagcagctgggctgggaggcctggctgcagtacagtttccccctgcagctggagccctcggctcaaacctgggggcctggtaccctgcggctcccgaaccgggcccttctggtcaacgttaagtttgagggcagcgaggagagcttcaccttccaggtgtccaccaaggacgtgccgctggcgctgatggcctgtgccctgcggaagaaggccacagtgttccggcagccgctggtggagcagccggaagactacacgctgcaggtgaacggcaggcatgagtacctgtatggcagctacccgctctgccagttccaggtccagaaaccgcgtgccaaaccacctcccattcctgcgaagaagccttcctctgtgtccctgtggtccctggagcagccgttccgcatcgagctcatccagggcagcaaagtgaacgccgacgagcggatgaagctggtggtgcaggccgggcttttccacggcaacgagatgctgtgcaagacggtgtccagctcggaggtgagcgtgtgctcggagcccgtgtggaagcagcggctggagttcgacatcaacatctgcgacctgccccgcatggcccgtctctgctttgcgctgtacgccgtgatcgagaaagccaagaaggctcgctccaccaagaagaagtccaagaaggcggactgccccattgcctgggccaacctcatgctgtttgactacaaggaccagcttaagaccggggaacgctgcctctacatgtggccctccgtcccagatgagaagggcgagctgctgaaccccacgggcactgtgcgcagtaaccccaacacggatagcgccgctgccctgctcatctgcctgcccgaggtggccccgcaccccgtgtactaccccgccctggagaagctgccaggagggatgctcttggcatctcgtgagtggaggccagagctgctgtggatgcgcctccatgcagaggacagcgccccctcaaggatgattggggtggcaatgcccggcctgggggtcctgcccgggctggtccaggcccctggggacgctgagtgcagccgtttgttgcagatcttggagctggggcgacacagcgagtgtgtgcatgtcaccgaggaggagcagctgcagctgcgggaaatcctggagcggcgggggtctggggagctgtatgagcacgagaaggacctggtgtggaagctgcggcatgaagtccaggagcacttcccggaggcgctagcccggctgctgctggtcaccaagtggaacaagcatgaggatgtggcccagatgctctacctgctgtgctcctggccggagctgcccgtcctgagcgccctggagctgctagacttcagcttccccgattgccacgtaggctccttcgccatcaagtcgctgcggaaactgacggacgatgagctgttccagtacctgctgcagctggtgcaggtgctcaagtacgagtcctacctggactgcgagctgaccaaattcctgctggaccgggccctggccaaccgcaagatcggccacttccttttctggcacctccgctccgagatgcacgtgccgtcggtggccctgcgcttcggcctcatcctggaggcctactgcaggggcagcacccaccacatgaaggtgctgatgaagcagggggaagcactgagcaaactgaaggccctgaatgacttcgtcaagctgagctctcagaagacccccaagccccagaccaaggagctgatgcacttgtgcatgcggcaggaggcctacctagaggccctctcccacctgcagtccccactcgaccccagcaccctgctggctgaagtctgcgtggagcagtgcaccttcatggactccaagatgaagcccctgtggatcatgtacagcaacgaggaggcaggcagcggcggcagcgtgggcatcatctttaagaacggggatgacctccggcaggacatgctgaccctgcagatgatccagctcatggacgtcctgtggaagcaggaggggctggacctgaggatgaccccctatggctgcctccccaccggggaccgcacaggcctcattgaggtggtactccgttcagacaccatcgccaacatccaactcaacaagagcaacatggcagccacagccgccttcaacaaggatgccctgctcaactggctgaagtccaagaacccgggggaggccctggatcgagccattgaggagttcaccctctcctgtgctggctattgtgtggccacatatgtgctgggcattggcgatcggcacagcgacaacatcatgatccgagagagtgggcagctgttccacattgattttggccactttctggggaatttcaagaccaagtttggaatcaaccgcgagcgtgtcccattcatcctcacctacgactttgtccatgtgattcagcaggggaagactaataatagtgagaaatttgaacggttccggggctactgtgaaagggcctacaccatcctgcggcgccacgggcttctcttcctccacctctttgccctgatgcgggcggcaggcctgcctgagctcagctgctccaaagacatccagtatctcaaggactccctggcactggggaaaacagaggaggaggcactgaagcacttccgagtgaagtttaacgaagccctccgtgagagctggaaaaccaaagtgaactggctggcccacaacgtgtccaaagacaacaggcagtagtggctcctcccagccctgggcccaagaggaggcggctgcgggtcgtggggaccaagcacattggtcctaaaggggctgaagagcctgaactgcacctaacgggaaagaaccgacatggctgccttttgtttacactggttatttatttatgacttgaaatagtttaaggagctaaacagccataaa

SEQ ID NO: 3074 - DNA, 5203 bp, Homo sapiens
  source 1..5203: mol_type = genomic DNA
cagtcgctccgagcggccgcgagcagagccgcccagccctgccagctgcgccgggacgataaggagtcaggccagggcgggatgacactcattgattctaaagcatctttaatctgccaggcggagggggctttgctggtctttcttggactattccagagaggacaactgtcatctgggaagtaacaacgcaggatgccccctggggtggactgccccatggaattctggaccaaggaggagaatcagagcgttgtggttgacttcctgctgcccacaggggtctacctgaacttccctgtgtcccgcaatgccaacctcagcaccatcaagcagctgctgtggcaccgcgcccagtatgagccgctcttccacatgctcagtggccccgaggcctatgtgttcacctgcatcaaccagacagcggagcagcaagagctggaggacgagcaacggcgtctgtgtgacgtgcagcccttcctgcccgtcctgcgcctggtggcccgtgagggcgaccgcgtgaagaagctcatcaactcacagatcagcctcctcatcggcaaaggcctccacgagtttgactccttgtgcgacccagaagtgaacgactttcgcgccaagatgtgccaattctgcgaggaggcggccgcccgccggcagcagctgggctgggaggcctggctgcagtacagtttccccctgcagctggagccctcggctcaaacctgggggcctggtaccctgcggctcccgaaccgggcccttctggtcaacgttaagtttgagggcagcgaggagagcttcaccttccaggtgtccaccaaggacgtgccgctggcgctgatggcctgtgccctgcggaagaaggccacagtgttccggcagccgctggtggagcagccggaagactacacgctgcaggtgaacggcaggcatgagtacctgtatggcagctacccgctctgccagttccagtacatctgcagctgcctgcacagtgggttgacccctcacctgaccatggtccattcctcctccatcctcgccatgcgggatgagcagagcaaccctgccccccaggtccagaaaccgcgtgccaaaccacctcccattcctgcgaagaagccttcctctgtgtccctgtggtccctggagcagccgttccgcatcgagctcatccagggcagcaaagtgaacgccgacgagcggatgaagctggtggtgcaggccgggcttttccacggcaacgagatgctgtgcaagacggtgtccagctcggaggtgagcgtgtgctcggagcccgtgtggaagcagcggctggagttcgacatcaacatctgcgacctgccccgcatggcccgtctctgctttgcgctgtacgccgtgatcgagaaagccaagaaggctcgctccaccaagaagaagtccaagaaggcggactgccccattgcctgggccaacctcatgctgtttgactacaaggaccagcttaagaccggggaacgctgcctctacatgtggccctccgtcccagatgagaagggcgagctgctgaaccccacgggcactgtgcgcagtaaccccaacacggatagcgccgctgccctgctcatctgcctgcccgaggtggccccgcaccccgtgtactaccccgccctggagaagatcttggagctggggcgacacagcgagtgtgtgcatgtcaccgaggaggagcagctgcagctgcgggaaatcctggagcggcgggggtctggggagctgtatgagcacgagaaggacctggtgtggaagctgcggcatgaagtccaggagcacttcccggaggcgctagcccggctgctgctggtcaccaagtggaacaagcatgaggatgtggcccagatgctctacctgctgtgctcctggccggagctgcccgtcctgagcgccctggagctgctagacttcagcttccccgattgccacgtaggctccttcgccatcaagtcgctgcggaaactgacggacgatgagctgttccagtacctgctgcagctggtgcaggtgctcaagtacgagtcctacctggactgcgagctgaccaaattcctgctggaccgggccctggccaaccgcaagatcggccacttccttttctggcacctccgctccgagatgcacgtgccgtcggtggccctgcgcttcggcctcatcctggaggcctactgcaggggcagcacccaccacatgaaggtgctgatgaagcagggggaagcactgagcaaactgaaggccctgaatgacttcgtcaagctgagctctcagaagacccccaagccccagaccaaggagctgatgcacttgtgcatgcggcaggaggcctacctagaggccctctcccacctgcagtccccactcgaccccagcaccctgctggctgaagtctgcgtggagcagtgcaccttcatggactccaagatgaagcccctgtggatcatgtacagcaacgaggaggcaggcagcggcggcagcgtgggcatcatctttaagaacggggatgacctccggcaggacatgctgaccctgcagatgatccagctcatggacgtcctgtggaagcaggaggggctggacctgaggatgaccccctatggctgcctccccaccggggaccgcacaggcctcattgaggtggtactccgttcagacaccatcgccaacatccaactcaacaagagcaacatggcagccacagccgccttcaacaaggatgccctgctcaactggctgaagtccaagaacccgggggaggccctggatcgagccattgaggagttcaccctctcctgtgctggctattgtgtggccacatatgtgctgggcattggcgatcggcacagcgacaacatcatgatccgagagagtgggcagctgttccacattgattttggccactttctggggaatttcaagaccaagtttggaatcaaccgcgagcgtgtcccattcatcctcacctacgactttgtccatgtgattcagcaggggaagactaataatagtgagaaatttgaacggttccggggctactgtgaaagggcctacaccatcctgcggcgccacgggcttctcttcctccacctctttgccctgatgcgggcggcaggcctgcctgagctcagctgctccaaagacatccagtatctcaaggactccctggcactggggaaaacagaggaggaggcactgaagcacttccgagtgaagtttaacgaagccctccgtgagagctggaaaaccaaagtgaactggctggcccacaacgtgtccaaagacaacaggcagtagtggctcctcccagccctgggcccaagaggaggcggctgcgggtcgtggggaccaagcacattggtcctaaaggggctgaagagcctgaactgcacctaacgggaaagaaccgacatggctgccttttgtttacactggttatttatttatgacttgaaatagtttaaggagctaaacagccataaacggaaacgcctccttcatgcagcggcggtgctgggccccccgaggctgcacctggctctcggctgaggattgtcaccccaagtcttccagctggtggatctgggcccagcaaagactgttctcctcccgagggaaccttcttcccaggcctcccgccagactgcctgggtcctggcgcctggcggtcacctggtgcctactgtccgacaggatgccttgatcctcgtgcgacccaccctgtgtatcctccctagactgagttctggcagctccccgaggcagccggggtaccctctagattcagggatgcttgctctccacttttcaagtgggtcttgggtacgagaattccctcatctttctctactgtaaagtgattttgtttgcaggtaagaaaataatagatgactcaccacacctctacggctggggagatcaggcccagccccataaaggagaatctacgctggtcctcaggacgtgttaaagagatctgggcctcatgtagctcaccccggtcacgcatgaaggcaaaagcaggtcagaagcgaatactctgccattatctcaaaaatcttttttttttttttgagatggggtcttcctctgttgcccaggctggagtgcagtggtgcaatcttggctcactgtaacctccgcctcccaggttcaagtgattcttctgcctcagcctcctgagtagctgggattacaggtgtgcaccaccgtacccagctaatttttgtattttagtagagacgggggtttcaccatgttggctgggctggtctcgaactcctgacctcaggtgatccacccgcctgagcctcccaaagtgctgggattacaggcatgagccaccgcgcccggcccactctgccattgtctaagccacctctgaaagcaggttttaacaaaaggatgaggccagaactcttccagaaccatcacctttgggaacctgctgtgagagtgctgaggtaccagaagtgtgagaacgagggggcgtgctgggatctttctctctgactatacttagtttgaaatggtgcaggcttagtcttaagcctccaaaggcctggatttgagcagctttagaaatgcaggttctagggcttctcccagccttcagaagccaactaactctgcagatggggctaggactgtgggcttttagcagcccacaggtgatcctaacatatcaggccatggactcaggacctgcccggtgatgctgttgatttctcaaaggtcttccaaaactcaacagagccagaagtagccgcccgctcagcggctcaggtgccagctctgttctgattcaccaggggtccgtcagtagtcattgccacccgcggggcacctccctggccacacgcctgttcccagcaagtgctgaaactcactagaccgtctgcctgtttcgaaatggggaaagccgtgcgtgcgcgttatttatttaagtgcgcctgtgtgcgcgggtgtgggagcacactttgcaaagccacagcgtttctggttttgggtgtacagtcttgtgtgcctggcgagaagaatattttctatttttttaagtcatttcatgtttctgtctggggaaggcaagttagttaagtatcactgatgtgggttgagaccagcactctgtgaaaccttgaaatgagaagtaaaggcagatgaaaagaaa

SEQ ID NO: 3075 - DNA, 5483 bp, Homo sapiens
  source 1..5483: mol_type = genomic DNA
ctcgcgcccagcgcagtcgctccgagcggccgcgagcagagccgcccagccctgccagctgcgccgggacgataaggagtcaggccagggcgggatgacactcattgattctaaagcatctttaatctgccaggcggagggggctttgctggtctttcttggactattccagagaggacaactgtcatctgggaagtaacaacgcaggatgccccctggggtggactgccccatggaattctggaccaaggaggagaatcagagcgttgtggttgacttcctgctgcccacaggggtctacctgaacttccctgtgtcccgcaatgccaacctcagcaccatcaagcagctgctgtggcaccgcgcccagtatgagccgctcttccacatgctcagtggccccgaggcctatgtgttcacctgcatcaaccagacagcggagcagcaagagctggaggacgagcaacggcgtctgtgtgacgtgcagcccttcctgcccgtcctgcgcctggtggcccgtgagggcgaccgcgtgaagaagctcatcaactcacagatcagcctcctcatcggcaaaggcctccacgagtttgactccttgtgcgacccagaagtgaacgactttcgcgccaagatgtgccaattctgcgaggaggcggccgcccgccggcagcagctgggctgggaggcctggctgcagtacagtttccccctgcagctggagccctcggctcaaacctgggggcctggtaccctgcggctcccgaaccgggcccttctggtcaacgttaagtttgagggcagcgaggagagcttcaccttccaggtgtccaccaaggacgtgccgctggcgctgatggcctgtgccctgcggaagaaggccacagtgttccggcagccgctggtggagcagccggaagactacacgctgcaggtgaacggcaggcatgagtacctgtatggcagctacccgctctgccagttccaggtccagaaaccgcgtgccaaaccacctcccattcctgcgaagaagccttcctctgtgtccctgtggtccctggagcagccgttccgcatcgagctcatccagggcagcaaagtgaacgccgacgagcggatgaagctggtggtgcaggccgggcttttccacggcaacgagatgctgtgcaagacggtgtccagctcggaggtgagcgtgtgctcggagcccgtgtggaagcagcggctggagttcgacatcaacatctgcgacctgccccgcatggcccgtctctgctttgcgctgtacgccgtgatcgagaaagccaagaaggctcgctccaccaagaagaagtccaagaaggcggactgccccattgcctgggccaacctcatgctgtttgactacaaggaccagcttaagaccggggaacgctgcctctacatgtggccctccgtcccagatgagaagggcgagctgctgaaccccacgggcactgtgcgcagtaaccccaacacggatagcgccgctgccctgctcatctgcctgcccgaggtggccccgcaccccgtgtactaccccgccctggagaagctgccaggagggatgctcttggcatctcgtgagtggaggccagagctgctgtggatgcgcctccatgcagaggacagcgccccctcaaggatgattggggtggcaatgcccggcctgggggtcctgcccgggctggtccaggcccctggggacgctgagtgcagccgtttgttgcagatcttggagctggggcgacacagcgagtgtgtgcatgtcaccgaggaggagcagctgcagctgcgggaaatcctggagcggcgggggtctggggagctgtatgagcacgagaaggacctggtgtggaagctgcggcatgaagtccaggagcacttcccggaggcgctagcccggctgctgctggtcaccaagtggaacaagcatgaggatgtggcccagatgctctacctgctgtgctcctggccggagctgcccgtcctgagcgccctggagctgctagacttcagcttccccgattgccacgtaggctccttcgccatcaagtcgctgcggaaactgacggacgatgagctgttccagtacctgctgcagctggtgcaggtgctcaagtacgagtcctacctggactgcgagctgaccaaattcctgctggaccgggccctggccaaccgcaagatcggccacttccttttctggcacctccgctccgagatgcacgtgccgtcggtggccctgcgcttcggcctcatcctggaggcctactgcaggggcagcacccaccacatgaaggtgctgatgaagcagggggaagcactgagcaaactgaaggccctgaatgacttcgtcaagctgagctctcagaagacccccaagccccagaccaaggagctgatgcacttgtgcatgcggcaggaggcctacctagaggccctctcccacctgcagtccccactcgaccccagcaccctgctggctgaagtctgcgtggagcagtgcaccttcatggactccaagatgaagcccctgtggatcatgtacagcaacgaggaggcaggcagcggcggcagcgtgggcatcatctttaagaacggggatgacctccggcaggacatgctgaccctgcagatgatccagctcatggacgtcctgtggaagcaggaggggctggacctgaggatgaccccctatggctgcctccccaccggggaccgcacaggcctcattgaggtggtactccgttcagacaccatcgccaacatccaactcaacaagagcaacatggcagccacagccgccttcaacaaggatgccctgctcaactggctgaagtccaagaacccgggggaggccctggatcgagccattgaggagttcaccctctcctgtgctggctattgtgtggccacatatgtgctgggcattggcgatcggcacagcgacaacatcatgatccgagagagtgggcagctgttccacattgattttggccactttctggggaatttcaagaccaagtttggaatcaaccgcgagcgtgtcccattcatcctcacctacgactttgtccatgtgattcagcaggggaagactaataatagtgagaaatttgaacggttccggggctactgtgaaagggcctacaccatcctgcggcgccacgggcttctcttcctccacctctttgccctgatgcgggcggcaggcctgcctgagctcagctgctccaaagacatccagtatctcaaggactccctggcactggggaaaacagaggaggaggcactgaagcacttccgagtgaagtttaacgaagccctccgtgagagctggaaaaccaaagtgaactggctggcccacaacgtgtccaaagacaacaggcagtagtggctcctcccagccctgggcccaagaggaggcggctgcgggtcgtggggaccaagcacattggtcctaaaggggctgaagagcctgaactgcacctaacgggaaagaaccgacatggctgccttttgtttacactggttatttatttatgacttgaaatagtttaaggagctaaacagccataaacggaaacgcctccttcatgcagcggcggtgctgggccccccgaggctgcacctggctctcggctgaggattgtcaccccaagtcttccagctggtggatctgggcccagcaaagactgttctcctcccgagggaaccttcttcccaggcctcccgccagactgcctgggtcctggcgcctggcggtcacctggtgcctactgtccgacaggatgccttgatcctcgtgcgacccaccctgtgtatcctccctagactgagttctggcagctccccgaggcagccggggtaccctctagattcagggatgcttgctctccacttttcaagtgggtcttgggtacgagaattccctcatctttctctactgtaaagtgattttgtttgcaggtaagaaaataatagatgactcaccacacctctacggctggggagatcaggcccagccccataaaggagaatctacgctggtcctcaggacgtgttaaagagatctgggcctcatgtagctcaccccggtcacgcatgaaggcaaaagcaggtcagaagcgaatactctgccattatctcaaaaatcttttttttttttttgagatggggtcttcctctgttgcccaggctggagtgcagtggtgcaatcttggctcactgtaacctccgcctcccaggttcaagtgattcttctgcctcagcctcctgagtagctgggattacaggtgtgcaccaccgtacccagctaatttttgtattttagtagagacgggggtttcaccatgttggctgggctggtctcgaactcctgacctcaggtgatccacccgcctgagcctcccaaagtgctgggattacaggcatgagccaccgcgcccggcccactctgccattgtctaagccacctctgaaagcaggttttaacaaaaggatgaggccagaactcttccagaaccatcacctttgggaacctgctgtgagagtgctgaggtaccagaagtgtgagaacgagggggcgtgctgggatctttctctctgactatacttagtttgaaatggtgcaggcttagtcttaagcctccaaaggcctggatttgagcagctttagaaatgcaggttctagggcttctcccagccttcagaagccaactaactctgcagatggggctaggactgtgggcttttagcagcccacaggtgatcctaacatatcaggccatggactcaggacctgcccggtgatgctgttgatttctcaaaggtcttccaaaactcaacagagccagaagtagccgcccgctcagcggctcaggtgccagctctgttctgattcaccaggggtccgtcagtagtcattgccacccgcggggcacctccctggccacacgcctgttcccagcaagtgctgaaactcactagaccgtctgcctgtttcgaaatggggaaagccgtgcgtgcgcgttatttatttaagtgcgcctgtgtgcgcgggtgtgggagcacactttgcaaagccacagcgtttctggttttgggtgtacagtcttgtgtgcctggcgagaagaatattttctatttttttaagtcatttcatgtttctgtctggggaaggcaagttagttaagtatcactgatgtgggttgagaccagcactctgtgaaaccttgaaatgagaagtaaaggcagatgaaaagaaagaaaaagcctttttatgttcttttatgttctcggctcaaaaagaaacaagggagtgtaggtttaaaaccaaaacaggagagaagacaaaccccgctccggctggagttagttagaaccagaactttattgtagcggatacactttctgacctatcatgagtatacacatctgcgaagggaaaccgcgcggcgaca

SEQ ID NO: 3076 - DNA, 1458 bp, Homo sapiens
  source 1..1458: mol_type = genomic DNA
tcttaacactttcacacgctccatcgcaacagcctgcagtcatgggctttattgtcctgtttgctggacatgatacctgagtcctcagagctggtggtgcaggccgggcttttccacggcaacgagatgctgtgcaagacggtgtccagctcggaggtgagcgtgtgctcggagcccgtgtggaagcagcggctggagttcgacatcaacatctgcgacctgccccgcatggcccgtctctgctttgcgctgtacgccgtgatcgagaaagccaagaaggctcgctccaccaagaagaagtccaagaaggcggactgccccattgcctgggccaacctcatgctgtttgactacaaggaccagcttaagaccggggaacgctgcctctacatgtggccctccgtcccagatgagaagggcgagctgctgaaccccacgggcactgtgcgcagtaaccccaacacggatagcgccgctgccctgctcatctgcctgcccgaggtggccccgcaccccgtgtactaccccgccctggagaagatcttggagctggggcgacacagcgagtgtgtgcatgtcaccgaggaggagcagctgcagctgcgggaaatcctggagcggcgggggtctggggagctgtatgagcacgagaaggacctggtgtggaagctgcggcatgaagtccaggagcacttcccggaggcgctagcccggctgctgctggtcaccaagtggaacaagcatgaggatgtggcccagatgctctacctgctgtgctcctggccggagctgcccgtcctgagcgccctggagctgctagacttcagcttccccgattgccacgtaggctccttcgccatcaagtcgctgcggaaactgacggacgatgagctgttccagtacctgctgcagctggtgcaggtgctcaagtacgagtcctacctggactgcgagctgaccaaattcctgctggaccgggccctggccaaccgcaagatcggccacttccttttctggcacctccggtagcgggacttgccccagccgttctgtgggaatcccagcccctgagtctccctggaaggccactggggacgtttccagcaggcctgggtgtcctggcctcgctaggtcctgctgggcgggaggggctgcgtggtgctgcctggtgaggctcagccctcccttcaccttccagctccgagatgcacgtgccgtcggtggccctgcgcttcggcctcatcctggaggcctactgcaggggcagcacccaccacatgaaggtgctgatgaagcagggggaagcactgagcaaactgaaggccctgaatgacttcgtcaagctgagctctcagaagacccccaagccccagaccaaggagctgatgcacttgtgcatgcggcaggaggcctacctagaggccctctcccacctgcagtccccactcgaccccagca

SEQ ID NO: 3077 - DNA, 5377 bp, Homo sapiens
  source 1..5377: mol_type = genomic DNA
gcacttccttctcggctagattatctgaaactgttgtcggttcttgagatgatactaccaccgaatgtctgtgtttcattgtctagtccaacctgtattgtggatatctacaacgttccggcaatagttttgcaggtgcatcacatttttgtttttgttttgggaggaaaagggagggcacggcagccaggcttcatattcctacaagtgcatgcttcaagattactgtacttacagtgtttccaacatcttctcataaaaggggaaagcttcatagcctcaaccatgaaggaaaccagtcgcatagggcatggagctggagaactataaacagcccgtggtgctgagagaggacaactgccgaaggcgccggaggatgaagccgcgcagtgctgcggccagcctgtcctccatggagctcatccccatcgagttcgtgctgcccaccagccagcgcaaatgcaagagccccgaaacggcgctgctgcacgtggccggccacggcaacgtggagcagatgaaggcccaggtgtggctgcgagcgctggagaccagcgtggcggcggacttctaccaccggctgggaccgcatcacttcctcctgctctatcagaagaaggggcagtggtacgagatctacgacaagtaccaggtggtgcagactctggactgcctgcgctactggaaggccacgcaccggagcccgggccagatccacctggtgcagcggcacccgccctccgaggagtcccaagccttccagcggcagctcacggcgctgattggctatgacgtcactgacgtcagcaacgtgcacgacgatgagctggagttcacgcgccgtggcttggtgaccccgcgcatggcggaggtggccagccgcgaccccaagctctacgccatgcacccgtgggtgacgtccaagcccctcccggagtacctgtggaagaagattgccaacaactgcatcttcatcgtcattcaccgcagcaccaccagccagaccattaaggtctcacccgacgacacccccggcgccatcctgcagagcttcttcaccaagatggccaagaagaaatctctgatggatattcccgaaagccaaagcgaacaggattttgtgctgcgcgtctgtggccgggatgagtacctggtgggcgaaacgcccatcaaaaacttccagtgggtgaggcactgcctcaagaacggagaagagattcacgtggtactggacacgcctccagacccggccctagacgaggtgaggaaggaagagtggccactggtggatgactgcacgggagtcaccggctaccatgagcagcttaccatccacggcaaggaccacgagagtgtgttcaccgtgtccctgtgggactgcgaccgcaagttcagggtcaagatcagaggcattgatatccccgtcctgcctcggaacaccgacctcacagtttttgtagaggcaaacatccagcatgggcaacaagtcctttgccaaaggagaaccagccccaaacccttcacagaggaggtgctgtggaatgtgtggcttgagttcagtatcaaaatcaaagacttgcccaaaggggctctactgaacctccagatctactgcggtaaagctccagcactgtccagcaaggcctctgcagagtcccccagttctgagtccaagggcaaagttcagcttctctattatgtgaacctgctgctgatagaccaccgtttcctcctgcgccgtggagaatacgtcctccacatgtggcagatatctgggaagggagaagaccaaggaagcttcaatgctgacaaactcacgtctgcaactaacccagacaaggagaactcaatgtccatctccattcttctggacaattactgccacccgatagccctgcctaagcatcagcccacccctgacccggaaggggaccgggttcgagcagaaatgcccaaccagcttcgcaagcaattggaggcgatcatagccactgatccacttaaccctctcacagcagaggacaaagaattgctctggcattttagatacgaaagccttaagcacccaaaagcatatcctaagctatttagttcagtgaaatggggacagcaagaaattgtggccaaaacataccaattgttggccagaagggaagtctgggatcaaagtgctttggatgttgggttaacaatgcagctcctggactgcaacttctcagatgaaaatgtaagagccattgcagttcagaaactggagagcttggaggacgatgatgttctgcattaccttctacaattggtccaggctgtgaaatttgaaccataccatgatagcgcccttgccagatttctgctgaagcgtggtttaagaaacaaaagaattggtcactttttgttttggttcttgagaagtgagatagcccagtccagacactatcagcagaggttcgctgtgattctggaagcctatctgaggggctgtggcacagccatgctgcacgactttacccaacaagtccaagtaatcgagatgttacaaaaagtcacccttgatattaaatcgctctctgctgaaaagtatgacgtcagttcccaagttatttcacaacttaaacaaaagcttgaaaacctgcagaattctcaactccccgaaagctttagagttccatatgatcctggactgaaagcaggagcgctggcaattgaaaaatgtaaagtaatggcctccaagaaaaaaccactatggcttgagtttaaatgtgccgatcctacagccctatcaaatgaaacaattggaattatctttaaacatggtgatgatctgcgccaagacatgcttattttacagattctacgaatcatggagtctatttgggagactgaatctttggatctatgcctcctgccatatggttgcatttcaactggtgacaaaataggaatgatcgagattgtgaaagacgccacgacaattgccaaaattcagcaaagcacagtgggcaacacgggagcatttaaagatgaagtcctgaatcactggctcaaagaaaaatcccctactgaagaaaagtttcaggcagcagtggagagatttgtttattcctgtgcaggctactgtgtggcaacctttgttcttggaataggcgacagacacaatgacaatattatgatcaccgagacaggaaacctatttcatattgacttcgggcacattcttgggaattacaaaagtttcctgggcattaataaagagagagtgccatttgtgctaacccctgacttcctctttgtgatgggaacttctggaaagaagacaagcccacacttccagaaatttcaggacatctgtgttaaggcttatctagcccttcgtcatcacacaaacctactgatcatcctgttctccatgatgctgatgacaggaatgccccagttaacaagcaaagaagacattgaatatatccgggatgccctcacagtggggaaaaatgaggaggatgctaaaaagtattttcttgatcagatcgaagtttgcagagacaaaggatggactgtgcagtttaattggtttctacatcttgttcttggcatcaaacaaggagagaaacattcagcctaatactttaggctagaatcaaaaacaagttagtgttctatggtttaaattagcatagcaatcatcgaacttggatttcaaatgcaatagacattgtgaaagctggcatttcagaagtatagctcttttcctacctgaactcttccctggagaaaagatgttggcattgctgattgtttggttaagcaatgtccagtgctaggattatttgcaggtttggttttttctcatttgtctgtggcattggagaatattctcggtttaaacagactaatgacttccttattgtccctgatattttgactatcttactattgagtgcttctggaaattctttggaataattgatgacatctattttcatctgggtttagtctcaattttggttatctttgtgttcctcaagctctttaaagaaaaagatgtaatcgttgtaacctttgtctcattccttaaatgatgcttccaaacatctccttagtgtctgcaggtgttagtggtgtgctaaaagcaaggaaagcgagttagtcttttcagtgtcttttgcaattcaattcttttgtcatgtataactgagacacacaaacacagcaggagaaatctaaaccgttgtgccttgaccttcctctgctggtcttgttccagggttatgaatatgaaaaaatagagatgagactttttgtgtcaactctgtccacaagagtgagttatctagtatgattagtatagctttctccagcatggcagcaggaagtaactacagggcctcttttatgcctgacatttcttcccttcctttttccctgcctccctttttcatcaattgcgatgctcccacaactctttacagacttgtgaaatcttcaagaacacctttactctataactcaaaaattagttgaaaaataattacttctcaaggattattagaatcttaggtacttatttgtaaagatgtttagtgacttttttttcaagtatcttattaaaggaggcattctagaaaatatgaattagtttccaaatgccttaattttaaactttggcctgaacagttttttctttttcttaatggaagaagatatttaatatcttaaaaatattccaagttaggaagaacactacttgccttatccatttcccatttaaaggacttttaaactttgacacatccttcagatttcctgaaaataattgaaatatcttactttaaaaatattttcatctctgaaatatctcgttatttattggaggtattgtttaaccttagagagaccattaaattatttataaaatattttgtaattacctgtagctaatacattacatagaaaaaaactatgttaacagtgtctctgtttaagtataatcagatataaatatatacttaattttttaattttaaaaatagatacctgtttgactttgaggtagtccagaccttttctttttttttttttttttaatgtgtgcaaaagcccaaaggttcctaagcctggctgcaaagaagaatcaacagggacactttttaaaaacactcttatcagcctgggcaacacagtgagactccatctcttaaaaaaaaaattagctgggtatagtggtatgtgcctgtagtcccaggtactcaggaggctgaggcaggaggattgcctgagcccaggaggtggaaactgcagagagtcatgatcatgtccttacactccagcctggataacagagcgagaccctgtctcaaaaaaataaaataaaaaataaaaa

SEQ ID NO: 3078 - DNA, 3828 bp, Homo sapiens
  source 1..3828: mol_type = genomic DNA
aactgcaacacttcctctgcatctggatatgaagggagccccagaaaagcggaagaatttagacgcacactgggtcgcatagggcatggagctggagaactataaacagcccgtggtgctgagagaggacaactgccgaaggcgccggaggatgaagccgcgcagtgctgcggccagcctgtcctccatggagctcatccccatcgagttcgtgctgcccaccagccagcgcaaatgcaagagccccgaaacggcgctgctgcacgtggccggccacggcaacgtggagcagatgaaggcccaggtgtggctgcgagcgctggagaccagcgtggcggcggacttctaccaccggctgggaccgcatcacttcctcctgctctatcagaagaaggggcagtggtacgagatctacgacaagtaccaggtggtgcagactctggactgcctgcgctactggaaggccacgcaccggagcccgggccagatccacctggtgcagcggcacccgccctccgaggagtcccaagccttccagcggcagctcacggcgctgattggctatgacgtcactgacgtcagcaacgtgcacgacgatgagctggagttcacgcgccgtggcttggtgaccccgcgcatggcggaggtggccagccgcgaccccaagctctacgccatgcacccgtgggtgacgtccaagcccctcccggagtacctgtggaagaagattgccaacaactgcatcttcatcgtcattcaccgcagcaccaccagccagaccattaaggtctcacccgacgacacccccggcgccatcctgcagagcttcttcaccaagatggccaagaagaaatctctgatggatattcccgaaagccaaagcgaacaggattttgtgctgcgcgtctgtggccgggatgagtacctggtgggcgaaacgcccatcaaaaacttccagtgggtgaggcactgcctcaagaacggagaagagattcacgtggtactggacacgcctccagacccggccctagacgaggtgaggaaggaagagtggccactggtggatgactgcacgggagtcaccggctaccatgagcagcttaccatccacggcaaggaccacgagagtgtgttcaccgtgtccctgtgggactgcgaccgcaagttcagggtcaagatcagaggcattgatatccccgtcctgcctcggaacaccgacctcacagtttttgtagaggcaaacatccagcatgggcaacaagtcctttgccaaaggagaaccagccccaaacccttcacagaggaggtgctgtggaatgtgtggcttgagttcagtatcaaaatcaaagacttgcccaaaggggctctactgaacctccagatctactgcggtaaagctccagcactgtccagcaaggcctctgcagagtcccccagttctgagtccaagggcaaagttcagcttctctattatgtgaacctgctgctgatagaccaccgtttcctcctgcgccgtggagaatacgtcctccacatgtggcagatatctgggaagggagaagaccaaggaagcttcaatgctgacaaactcacgtctgcaactaacccagacaaggagaactcaatgtccatctccattcttctggacaattactgccacccgatagccctgcctaagcatcagcccacccctgacccggaaggggaccgggttcgagcagaaatgcccaaccagcttcgcaagcaattggaggcgatcatagccactgatccacttaaccctctcacagcagaggacaaagaattgctctggcattttagatacgaaagccttaagcacccaaaagcatatcctaagctatttagttcagtgaaatggggacagcaagaaattgtggccaaaacataccaattgttggccagaagggaagtctgggatcaaagtgctttggatgttgggttaacaatgcagctcctggactgcaacttctcagatgaaaatgtaagagccattgcagttcagaaactggagagcttggaggacgatgatgttctgcattaccttctacaattggtccaggctgtgaaatttgaaccataccatgatagcgcccttgccagatttctgctgaagcgtggtttaagaaacaaaagaattggtcactttttgttttggttcttgagaagtgagatagcccagtccagacactatcagcagaggttcgctgtgattctggaagcctatctgaggggctgtggcacagccatgctgcacgactttacccaacaagtccaagtaatcgagatgttacaaaaagtcacccttgatattaaatcgctctctgctgaaaagtatgacgtcagttcccaagttatttcacaacttaaacaaaagcttgaaaacctgcagaattctcaactccccgaaagctttagagttccatatgatcctggactgaaagcaggagcgctggcaattgaaaaatgtaaagtaatggcctccaagaaaaaaccactatggcttgagtttaaatgtgccgatcctacagccctatcaaatgaaacaattggaattatctttaaacatggtgatgatctgcgccaagacatgcttattttacagattctacgaatcatggagtctatttgggagactgaatctttggatctatgcctcctgccatatggttgcatttcaactggtgacaaaataggaatgatcgagattgtgaaagacgccacgacaattgccaaaattcagcaaagcacagtgggcaacacgggagcatttaaagatgaagtcctgaatcactggctcaaagaaaaatcccctactgaagaaaagtttcaggcagcagtggagagatttgtttattcctgtgcaggctactgtgtggcaacctttgttcttggaataggcgacagacacaatgacaatattatgatcaccgagacaggaaacctatttcatattgacttcgggcacattcttgggaattacaaaagtttcctgggcattaataaagagagagtgccatttgtgctaacccctgacttcctctttgtgatgggaacttctggaaagaagacaagcccacacttccagaaatttcaggacatctgtgttaaggcttatctagcccttcgtcatcacacaaacctactgatcatcctgttctccatgatgctgatgacaggaatgccccagttaacaagcaaagaagacattgaatatatccgggatgccctcacagtggggaaaaatgaggaggatgctaaaaagtattttcttgatcagatcgaagtttgcagagacaaaggatggactgtgcagtttaattggtttctacatcttgttcttggcatcaaacaaggagagaaacattcagcctaatactttaggctagaatcaaaaacaagttagtgttctatggtttaaattagcatagcaatcatcgaacttggatttcaaatgcaatagacattgtgaaagctggcatttcagaagtatagctcttttcctacctgaactcttccctggagaaaagatgttggcattgctgattgtttggttaagcaatgtccagtgctaggattatttgcaggtttggttttttctcatttgtctgtggcattggagaatattctcggtttaaacagactaatgacttccttattgtccctgatattttgactatcttactattgagtgcttctggaaattctttggaataattgatgacatctattttcatctgggtttagtctcaattttggttatctttgtgttcctcaagctctttaaagaaaaagatgtaatcgttgtaa

SEQ ID NO: 3079 - DNA, 5197 bp, Homo sapiens
  source 1..5197: mol_type = genomic DNA
gcatctggatatgaagggagccccagaaaagcggaagaatttagacgcacactgggtaggtttgaatttgttttgttttcaaaaattaaacaaatgatccttcagcatcatcgcctccgctgctttatcaggtcgcatagggcatggagctggagaactataaacagcccgtggtgctgagagaggacaactgccgaaggcgccggaggatgaagccgcgcagtgctgcggccagcctgtcctccatggagctcatccccatcgagttcgtgctgcccaccagccagcgcaaatgcaagagccccgaaacggcgctgctgcacgtggccggccacggcaacgtggagcagatgaaggcccaggtgtggctgcgagcgctggagaccagcgtggcggcggacttctaccaccggctgggaccgcatcacttcctcctgctctatcagaagaaggggcagtggtacgagatctacgacaagtaccaggtggtgcagactctggactgcctgcgctactggaaggccacgcaccggagcccgggccagatccacctggtgcagcggcacccgccctccgaggagtcccaagccttccagcggcagctcacggcgctgattggctatgacgtcactgacgtcagcaacgtgcacgacgatgagctggagttcacgcgccgtggcttggtgaccccgcgcatggcggaggtggccagccgcgaccccaagctctacgccatgcacccgtgggtgacgtccaagcccctcccggagtacctgtggaagaagattgccaacaactgcatcttcatcgtcattcaccgcagcaccaccagccagaccattaaggtctcacccgacgacacccccggcgccatcctgcagagcttcttcaccaagatggccaagaagaaatctctgatggatattcccgaaagccaaagcgaacaggattttgtgctgcgcgtctgtggccgggatgagtacctggtgggcgaaacgcccatcaaaaacttccagtgggtgaggcactgcctcaagaacggagaagagattcacgtggtactggacacgcctccagacccggccctagacgaggtgaggaaggaagagtggccactggtggatgactgcacgggagtcaccggctaccatgagcagcttaccatccacggcaaggaccacgagagtgtgttcaccgtgtccctgtgggactgcgaccgcaagttcagggtcaagatcagaggcattgatatccccgtcctgcctcggaacaccgacctcacagtttttgtagaggcaaacatccagcatgggcaacaagtcctttgccaaaggagaaccagccccaaacccttcacagaggaggtgctgtggaatgtgtggcttgagttcagtatcaaaatcaaagacttgcccaaaggggctctactgaacctccagatctactgcggtaaagctccagcactgtccagcaaggcctctgcagagtcccccagttctgagtccaagggcaaagttcagcttctctattatgtgaacctgctgctgatagaccaccgtttcctcctgcgccgtggagaatacgtcctccacatgtggcagatatctgggaagggagaagaccaaggaagcttcaatgctgacaaactcacgtctgcaactaacccagacaaggagaactcaatgtccatctccattcttctggacaattactgccacccgatagccctgcctaagcatcagcccacccctgacccggaaggggaccgggttcgagcagaaatgcccaaccagcttcgcaagcaattggaggcgatcatagccactgatccacttaaccctctcacagcagaggacaaagaattgctctggcattttagatacgaaagccttaagcacccaaaagcatatcctaagctatttagttcagtgaaatggggacagcaagaaattgtggccaaaacataccaattgttggccagaagggaagtctgggatcaaagtgctttggatgttgggttaacaatgcagctcctggactgcaacttctcagatgaaaatgtaagagccattgcagttcagaaactggagagcttggaggacgatgatgttctgcattaccttctacaattggtccaggctgtgaaatttgaaccataccatgatagcgcccttgccagatttctgctgaagcgtggtttaagaaacaaaagaattggtcactttttgttttggttcttgagaagtgagatagcccagtccagacactatcagcagaggttcgctgtgattctggaagcctatctgaggggctgtggcacagccatgctgcacgactttacccaacaagtccaagtaatcgagatgttacaaaaagtcacccttgatattaaatcgctctctgctgaaaagtatgacgtcagttcccaagttatttcacaacttaaacaaaagcttgaaaacctgcagaattctcaactccccgaaagctttagagttccatatgatcctggactgaaagcaggagcgctggcaattgaaaaatgtaaagtaatggcctccaagaaaaaaccactatggcttgagtttaaatgtgccgatcctacagccctatcaaatgaaacaattggaattatctttaaacatggtgatgatctgcgccaagacatgcttattttacagattctacgaatcatggagtctatttgggagactgaatctttggatctatgcctcctgccatatggttgcatttcaactggtgacaaaataggaatgatcgagattgtgaaagacgccacgacaattgccaaaattcagcaaagcacagtgggcaacacgggagcatttaaagatgaagtcctgaatcactggctcaaagaaaaatcccctactgaagaaaagtttcaggcagcagtggagagatttgtttattcctgtgcaggctactgtgtggcaacctttgttcttggaataggcgacagacacaatgacaatattatgatcaccgagacaggaaacctatttcatattgacttcgggcacattcttgggaattacaaaagtttcctgggcattaataaagagagagtgccatttgtgctaacccctgacttcctctttgtgatgggaacttctggaaagaagacaagcccacacttccagaaatttcaggacatctgtgttaaggcttatctagcccttcgtcatcacacaaacctactgatcatcctgttctccatgatgctgatgacaggaatgccccagttaacaagcaaagaagacattgaatatatccgggatgccctcacagtggggaaaaatgaggaggatgctaaaaagtattttcttgatcagatcgaagtttgcagagacaaaggatggactgtgcagtttaattggtttctacatcttgttcttggcatcaaacaaggagagaaacattcagcctaatactttaggctagaatcaaaaacaagttagtgttctatggtttaaattagcatagcaatcatcgaacttggatttcaaatgcaatagacattgtgaaagctggcatttcagaagtatagctcttttcctacctgaactcttccctggagaaaagatgttggcattgctgattgtttggttaagcaatgtccagtgctaggattatttgcaggtttggttttttctcatttgtctgtggcattggagaatattctcggtttaaacagactaatgacttccttattgtccctgatattttgactatcttactattgagtgcttctggaaattctttggaataattgatgacatctattttcatctgggtttagtctcaattttggttatctttgtgttcctcaagctctttaaagaaaaagatgtaatcgttgtaacctttgtctcattccttaaatgatgcttccaaacatctccttagtgtctgcaggtgttagtggtgtgctaaaagcaaggaaagcgagttagtcttttcagtgtcttttgcaattcaattcttttgtcatgtataactgagacacacaaacacagcaggagaaatctaaaccgttgtgccttgaccttcctctgctggtcttgttccagggttatgaatatgaaaaaatagagatgagactttttgtgtcaactctgtccacaagagtgagttatctagtatgattagtatagctttctccagcatggcagcaggaagtaactacagggcctcttttatgcctgacatttcttcccttcctttttccctgcctccctttttcatcaattgcgatgctcccacaactctttacagacttgtgaaatcttcaagaacacctttactctataactcaaaaattagttgaaaaataattacttctcaaggattattagaatcttaggtacttatttgtaaagatgtttagtgacttttttttcaagtatcttattaaaggaggcattctagaaaatatgaattagtttccaaatgccttaattttaaactttggcctgaacagttttttctttttcttaatggaagaagatatttaatatcttaaaaatattccaagttaggaagaacactacttgccttatccatttcccatttaaaggacttttaaactttgacacatccttcagatttcctgaaaataattgaaatatcttactttaaaaatattttcatctctgaaatatctcgttatttattggaggtattgtttaaccttagagagaccattaaattatttataaaatattttgtaattacctgtagctaatacattacatagaaaaaaactatgttaacagtgtctctgtttaagtataatcagatataaatatatacttaattttttaattttaaaaatagatacctgtttgactttgaggtagtccagaccttttctttttttttttttttttaatgtgtgcaaaagcccaaaggttcctaagcctggctgcaaagaagaatcaacagggacactttttaaaaacactcttatcagcctgggcaacacagtgagactccatctcttaaaaaaaaaattagctgggtatagtggtatgtgcctgtagtcccaggtactcaggaggctgaggcaggaggattgcctgagcccaggaggtggaaactgcagagagtcatgatcatgtccttacactccagcctggataacagagcgagaccctgtctcaaaaaaataaaa

SEQ ID NO: 3080 - DNA, 8227 bp, Homo sapiens
  source 1..8227: mol_type = genomic DNA
atggctcagatatctagcaacagcggatttaaagaatgtccatcttcacatccggaaccaacaagagcaaaagatgtggacaaagaagaagcattacagatggaagcagaggctttagcaaaactgcaaaaggatagacaagtgactgacaatcagagaggctttgagttgtcaagcagcaccagaaaaaaagcacaggtttataacaagcaggattatgatctcatggtgtttcctgaatcagattcccaaaaaagagcattagatattgatgtagaaaagctcacccaagctgaacttgagaaactattgctggatgacagtttcgagactaaaaaaacacctgtattaccagttactcctattctgagcccttccttttcagcacagctctattttagacctactattcagagaggacagtggccacctggattacctgggccttccacttatgctttaccttctatttatccttctacttacagtaaacaggctgcattccaaaatggcttcaatccaagaatgcccacttttccatctacagaacctatatatttaagtcttccgggacaatctccatatttctcatatcctttgacacctgccacaccctttcatccacaaggaagcttacctatctatcgtccagtagtcagtactgacatggcaaaactatttgacaaaatagctagtacatcagaatttttaaaaaatgggaaagcaaggactgatttggagataacagattcaaaagtcagcaatctacaggtatctccaaagtctgaggatatcagtaaatttgactggttagacttggatcctctaagtaagcctaaggtggataatgtggaggtattagaccatgaggaagagaaaaatgtttcaagtttgctagcaaaggatccttgggatgctgttcttcttgaagagagatcgacagcaaattgtcatcttgaaagaaaggtgaatggaaaatccctttctgtggcaactgttacaagaagccagtctttaaatattcgaacaactcagcttgcaaaagcccagggccatatatctcagaaagacccaaatgggaccagtagtttgccaactggaagttctcttcttcaagaagttgaagtacagaatgaggagatggcagctttttgtcgatccattacaaaattgaagaccaaatttccatataccaatcaccgcacaaacccaggctatttgttaagtccagtcacagcacaaagaaacatatgcggagaaaatgctagtgtgaaggtctccattgacattgaaggatttcagctaccagttacttttacgtgtgatgtgagttctactgtagaaatcattataatgcaagccctttgctgggtacatgatgacttgaatcaagtagatgttggcagctatgttctaaaagtttgtggtcaagaggaagtgctgcagaataatcattgccttggaagtcatgagcatattcaaaactgtcgaaaatgggacacagaaattagactacaactcttgaccttcagtgcaatgtgtcaaaatctggcccgaacagcagaagatgatgaaacacccgtggatttaaacaaacacctgtatcaaatagaaaaaccttgcaaagaagccatgacgagacaccctgttgaagaactcttagattcttatcacaaccaagtagaactggctcttcaaattgaaaaccaacaccgagcagtagatcaagtaattaaagctgtaagaaaaatctgtagtgctttagatggtgtcgagactcttgccattacagaatcagtaaagaagctaaagagagcagttaatcttccaaggagtaaaactgctgatgtgacttctttgtttggaggagaagacactagcaggagttcaactaggggctcacttaatcctgaaaatcctgttcaagtaagcataaaccaattaactgcagcaatttatgatcttctcagactccatgcaaattctggtaggagtcctacagactgtgcccaaagtagcaagagtgtcaaggaagcatggactacaacagagcagctccagtttactatttttgctgctcatggaatttcaagtaattgggtatcaaattatgaaaaatactacttgatatgttcactgtctcacaatggaaaggatctttttaaacctattcaatcaaagaaggttggcacttacaagaatttcttctatcttattaaatgggatgaactaatcatttttcctatccagatatcacaattgccattagaatcagttcttcaccttactctttttggaattttaaatcagagcagtggaagttcccctgattctaataagcagagaaagggaccagaagctttgggcaaagtttctttacctctttttgactttaaacggtttttaacatgtggaactaaacttctatatctttggacttcatcacatacaaattctgttcctggaacagttaccaaaaaaggatatgtcatggaaagaatagtgctacaggttgattttccttctcctgcatttgatattatttatacaactcctcaagttgacagaagcattatacagcaacataacttagaaacactagagaatgatataaaagggaaacttcttgatattcttcataaagactcatcacttggactttctaaagaagataaagcttttttatgggagaaacgttattattgcttcaaacacccaaattgtcttcctaaaatattagcaagcgccccaaactggaaatgggttaatcttgccaaaacttactcattgcttcaccagtggcctgcattgtacccactaattgcattggaacttcttgattcaaaatttgctgatcaggaagtaagatccctagctgtgacctggattgaggccattagtgatgatgagctaacagatcttcttccacagtttgtacaagctttgaaatatgaaatttacttgaatagttcattagtgcaattccttttgtccagggcattgggaaatatccagatagcacacaatttatattggcttctcaaagatgccctgcatgatgtacagtttagtacccgatacgaacatgttttgggtgctctcctgtcagtaggaggaaaacgacttagagaagaacttctaaaacagacgaaacttgtacagcttttaggaggagtagcagaaaaagtaaggcaggctagtggatcagccagacaggttgttctccaaagaagtatggaacgagtacagtccttttttcagaaaaataaatgccgtctccctctcaagccaagtctagtggcaaaagaattaaatattaagtcgtgttccttcttcagttctaatgctgtccccctaaaagtcacaatggtgaatgctgaccctatgggagaagaaattaatgtcatgtttaaggttggtgaagatcttcggcaagatatgttagctttacagatgataaagattatggataagatctggcttaaagaaggactagatctgaggatggtaattttcaaatgtctctcaactggcagagatcgaggcatggtggagctggttcctgcttccgataccctcaggaaaatccaagtggaatatggtgtgacaggatcctttaaagataaaccacttgcagagtggctaaggaaatacaatccctctgaagaagaatatgaaaaggcttcagagaactttatctattcctgtgctggatgctgtgtagccacctatgttttaggcatctgtgatcgacacaatgacaatataatgcttcgaagcacgggacacatgtttcacattgactttggaaagtttttgggacatgcacagatgtttggcagcttcaaaagggatcgggctccttttgtgctgacctctgatatggcatatgtcattaatgggggtgaaaagcccaccattcgttttcagttgtttgtggacctctgctgtcaggcctacaacttgataagaaagcagacaaacctttttcttaacctcctttcactgatgattccttcagggttaccagaacttacaagtattcaagatttgaaatacgttagagatgcacttcaaccccaaactacagacgcagaagctacaattttctttactaggcttattgaatcaagtttgggaagcattgccacaaagtttaacttcttcattcacaaccttgctcagcttcgtttttctggtcttccttctaatgatgagcccatcctttcattttcacctaaaacatactcctttagacaagatggtcgaatcaaggaagtctctgtttttacatatcataagaaatacaacccagataaacattatatttatgtagtccgaattttgagggaaggacagattgaaccatcatttgtcttccgaacatttgacgaatttcaggaacttcacaataagctcagtattatttttccactttggaagttaccaggctttcctaataggatggttctaggaagaacacacataaaagatgtagcagccaaaaggaaaattgagttaaacagttacttacagagtttgatgaatgcttcaacggatgtagcagagtgtgatcttgtttgtactttcttccaccctttacttcgtgatgagaaagctgaagggatagctaggtctgcagatgcaggttccttcagtcctactccaggccaaataggaggagctgtgaaattatccatctcttaccgaaatggtactcttttcatcatggtgatgcatatcaaagatcttgttactgaagatggagctgacccaaatccatatgtcaaaacatacctacttccagataaccacaaaacatccaaacgtaaaaccaaaatttcacgaaaaacgaggaatccgacattcaatgaaatgcttgtatacagtggatatagcaaagaaaccctaagacagcgagaacttcaactaagtgtactcagtgcagaatctctgcgggagaattttttcttgggtggagtaaccctgcctttgaaagatttcaacttgagcaaagagacggttaaatggtatcagctgactgcggcaacatacttgtaaactagtgaatgtttgagctttggaagcatgaacagttataaacgtgcatgcatacatgcacacacacacagacacacacacacacacttgttaattttgtatagtatttttatacttggacagaacttataaagttaaatatacttgctgcatttcaacacatctgttggaccaacagtcacataactaacctttttgaatttttggaagccattgctgttttaaagtcattatgtagaatgctacaaaccctaaacttaatatatactaattcctgaaaaagactttgagacagtactatgtcagttcagccacctattttgcattgttttctataaggaggcaaagcatatgtgttttcctgttatgcaccttttatagcctttaccactgtgtaatgttcacaaacaccaaagtaaaggaaaaatgcaggatgttaccgtaaaatccagctgctattcatggagctgaaaaacaaagcacaaataatagatagctaagttaagaactactaagtagtttatagaagtagggaaaaacgtaatactgctttttattcatgtctttaaagcctttttcagaataagtgccaatcactgatgttgtaaataatggtgccttaactttatatgcttccctggcacttcgtttctgatttttttcctgatttgataaataattagtacatagttttcactcacttgcagcttactaaagacaagaaattatgtacatgtactaatgtttttcccacaaaaaaatcctttacttctgatgtatgaattagttatctaaatagttaagcctaatacctgaataagactcaccaatgtgattgtacaataaattctatcattccattaaaatcctacatttattcccaggaatggtaatttcacctccctacatctatactccactccctcagtaaataagtgaaaattgttaacccatgtgcccattcctgagtagggcagactcttcacaagaggcccatgacaagaattctagggtccagattgaactttaatatagacctttgtctgtgtagaccagtttgtcttgtaaactgtcttacttatgtgtgtaaacattttacattcacatgaaaagttattttcctttatataattggattcagaatcataagggacaggactgaaattattctacagtaaccagtaagaataagattcggccgggcacggtggctcctgcctgtaatcccaacactttgggaggccaaggtgggcggatcacctgaggtcaggagtttgagaccagcctggccaacatggtgaaaccccgtctctacacaaaaattagccaggcgtggtagcgggcatctgtaatcccagctacttggggggctgaggcaggagaatcgcttgaacccaggaggcggaggttgcagtgagccgagatcacgccactgcactcccgcctgggtgacaagagcaaaactccatcttaaaaaaaaagaaaaaaagagtaagattcatttttattagttactcaacttcagacacaattttgttaatttggatatatacatatatataataagaactcatggttagaatagaaatacagatactttaaaaatggtaatagaaattgtaccaatcaggttgctgtgagaaaactgacaaaatatgcaataaagaataccaagagagaaaggacaatcgccaattcagtttcccagaacagaatttttatgaactgcacaaatgtttaatgtaaatggtgatacctacagggaagaaatagaagagttgataatatatcactgggacggggtgggggaaagacttgaaatttttggtgcctaacactaatggtccatatgtagttaaacccatgagtatggtatatgaatgtcttttttaaatgttaaaatgtgttgtctatttaatgttaattaaaatgcagatcaaagcaccaccatttgctttttccacagatcattaacatttccttaaagtatgtaagtacctttgcaaatgcaaatgtactagtaattttcacttaagcttttgagaccgaattccattccaccagttatcacttagccactgtaatttaaaaacaaacaaacaaacaaaaactgtcttggtagaggtcgttaattagactcaacatgtactgcctttttgcagtctattatgacagtgtcttttagcacaaataatagagctaaaaaatgtcctgtcacttccattataagaaatctggattcatatctaagtgtatattataatactgtacagttaagagttcagaacaagtggtaatgttttctcttaatttaactcattttgtgccttctttactcattcaaacacacatacattttacatatagtttatttctttatgaaatgctaatcttcagcccgtaccaaaaagtagagtggagcctctttgcactactactatcaataaattttaaatcagttggatttttaagcattttttaaaagctgacattaaagtaaatctaaaaaaagtttaacaaactggccaagacactaatttttatgtataatcacaatattttatactcacctttattgactaaaaataattatgctacatgttgtcctgcatcagaagaattatttcttcttgccagtgttttgggatttgaagataatggttcactcaaagaacctattattttctctactgaggaacccaatgtagaacttgcactgatatttttattactgcctttatatgaatctataggtatctaaatgttaaggcatgtatgatctttgatcatttcttttttcaaattaaagttgtataaaagtttcaatatcttgccttaaattagttgcctattctttctaggattcaaatattgtgacatttaaaaaagaaaacattcacttttgaaacttagacttcagatcaaaaaggactgaacccccactatcataatccatacattcatttccatgttgtttgactagcagtgcatatatgaatgaatatggtaattaatcttacctataagaaccaaatactttaattatattaagatagtgaataaagatgtataatatttttattaataccttgaatatattcagtggattgaatgtgacttcataactgtactacgattgtattaaaatatttctggaataaaagaa

SEQ ID NO: 3081 - DNA, 584 bp, Homo sapiens
  source 1..584: mol_type = genomic DNA
agctttcggcggcggctgagccagctgaggggaaaaatggctcggactgtggcggcttcggcggctcaggttgtggtagaggcggaggctcaggcagcttgaggtttatttgtacaaatagcacaggaggccttgctattttggaagctacaagaaaaaaatagaggaaggaaggtttggtctttttagtggacatggctcagatatctagcaacagcggatttaaagaatgtccatcttcacatccggaaccaacaagagcaaaagatgtggacaaagaagaagcattacagatggaagcagaggctttagcaaaactgcaaaaggatagacaagtgactgacaatcagagaggctttgagttgtcaagcagcaccagaaaaaaagcacaggtttataacaagcaggattatgatctcatggtgtttcctgaatcagattcccaaaaaagagcattagatattgatgtagaaaagctcacccaagctgaacttgagaaactattgctggatgacagtttcgagactaaaaaaacacctgtattaccagttactcctattctgagcccttccttttcagcacag

SEQ ID NO: 3082 - DNA, 2101 bp, Homo sapiens
  source 1..2101: mol_type = genomic DNA
tttcggcggcggctgagccagctgaggggaaaaatggctcggactgtggcggcttcggcggctcaggttgtggtagaggcggaggctcaggcagcttgaggccttgctattttggaagctacaagaaaaaaatagaggaaggaaggtttggtctttttagtggacatggctcagatatctagcaacagcggatttaaagaatgtccatcttcacatccggaaccaacaagagcaaaagatgtggacaaagaagaagcattacagatggaagcagaggctttagcaaaactgcaaaaggatagacaagtgactgacaatcagagaggctttgagttgtcaagcagcaccagaaaaaaagcacaggtttataacaagcaggattatgatctcatggtgtttcctgaatcagattcccaaaaaagagcattagatattgatgtagaaaagctcacccaagctgaacttgagaaactattgctggatgacagtttcgagactaaaaaaacacctgtattaccagttactcctattctgagcccttccttttcagcacagctctattttagacctactattcagagaggacagtggccacctggattacctgggccttccacttatgctttaccttctatttatccttctacttacagtaaacaggctgcattccaaaatggcttcaatccaagaatgcccacttttccatctacagaacctatatatttaagtcttccgggacaatctccatatttctcatatcctttgacacctgccacaccctttcatccacaaggaagcttacctatctatcgtccagtagtcagtactgacatggcaaaactatttgacaaaatagctagtacatcagaatttttaaaaaatgggaaagcaaggactgatttggagataacagattcaaaagtcagcaatctacaggtatctccaaagtctgaggatatcagtaaatttgactggttagacttggatcctctaagtaagcctaaggtggataatgtggaggtattagaccatgaggaagagaaaaatgtttcaagtttgctagcaaaggatccttgggatgctgttcttcttgaagagagatcgacagcaaattgtcatcttgaaagaaaggtgaatggaaaatccctttctgtggcaactgttacaagaagccagtctttaaatattcgaacaactcagcttgcaaaagcccagggccatatatctcagaaagacccaaatgggaccagtagtttgccaactggaagttctcttcttcaagaagttgaagtacagaatgaggagatggcagctttttgtcgatccattacaaaattgaagaccaaatttccatataccaatcaccgcacaaacccaggctatttgttaagtccagtcacagcacaaagaaacatatgcggagaaaatgctagtgtgaaggtctccattgacattgaaggatttcagctaccagttacttttacgtgtgatgtgagttctactgtagaaatcattataatgcaagccctttgctgggtacatgatgacttgaatcaagtagatgttggcagctatgttctaaaagtttgtggtcaagaggaagtgctgcagaagtaagtttatttaactactgagcaacatccttggaaatttcatttttaatggtttaatctagaaaaatttcaagttaaatttataatgcagaaatacattggatcctattgaattgatttattgaatcaataaacttttattgaaatatataatgtctaagatgtcatgtctaagacagtggtggggtttcagagataagtgagacattgtattcccttaaggagcttgtagtctttacaggaagagtttcaggcagttggttaataagtgatataatgggtctttcttactgtaaagagtcaatagtcacatcattatagactatattcctcttgcaacatgcactgttactttatgcacagtagtcagctgtgatttccttttagttgcctgaaataatcattatatgaatctttttcttacccaggagaattggttgaaaccgggaggcagaggttgcagtgagctgagatcacactgctgcagt

SEQ ID NO: 3083 - DNA, 4550 bp, Homo sapiens
  source 1..4550: mol_type = genomic DNA
gtgctgcgcttggctggctgtggagtcggccgaagctttcggcggcggctgagccagctgaggggaaaaatggctcggactgtggcggcttcggcggctcaggttgtggtagaggcggaggctcaggcagcttgagaaagacccaaatgggaccagtagtttgccaactggaagttctcttcttcaagaagttgaagtacagaatgaggagatggcagctttttgtcgatccattacaaaattgaagaccaaatttccatataccaatcaccgcacaaacccaggctatttgttaagtccagtcacagcacaaagaaacatatgcggagaaaatgctagtgtgaaggtctccattgacattgaaggatttcagctaccagttacttttacgtgtgatgtgagttctactgtagaaatcattataatgcaagccctttgctgggtacatgatgacttgaatcaagtagatgttggcagctatgttctaaaagtttgtggtcaagaggaagtgctgcagaataatcattgccttggaagtcatgagcatattcaaaactgtcgaaaatgggacacagaaattagactacaactcttgaccttcagtgcaatgtgtcaaaatctggcccgaacagcagaagatgatgaaacacccgtggatttaaacaaacacctgtatcaaatagaaaaaccttgcaaagaagccatgacgagacaccctgttgaagaactcttagattcttatcacaaccaagtagaactggctcttcaaattgaaaaccaacaccgagcagtagatcaagtaattaaagctgtaagaaaaatctgtagtgctttagatggtgtcgagactcttgccattacagaatcagtaaagaagctaaagagagcagttaatcttccaaggagtaaaactgctgatgtgacttctttgtttggaggagaagacactagcaggagttcaactaggggctcacttaatcctgaaaatcctgttcaagtaagcataaaccaattaactgcagcaatttatgatcttctcagactccatgcaaattctggtaggagtcctacagactgtgcccaaagtagcaagagtgtcaaggaagcatggactacaacagagcagctccagtttactatttttgctgctcatggaatttcaagtaattgggtatcaaattatgaaaaatactacttgatatgttcactgtctcacaatggaaaggatctttttaaacctattcaatcaaagaaggttggcacttacaagaatttcttctatcttattaaatgggatgaactaatcatttttcctatccagatatcacaattgccattagaatcagttcttcaccttactctttttggaattttaaatcagagcagtggaagttcccctgattctaataagcagagaaagggaccagaagctttgggcaaagtttctttacctctttttgactttaaacggtttttaacatgtggaactaaacttctatatctttggacttcatcacatacaaattctgttcctggaacagttaccaaaaaaggatatgtcatggaaagaatagtgctacaggttgattttccttctcctgcatttgatattatttatacaactcctcaagttgacagaagcattatacagcaacataacttagaaacactagagaatgatataaaagggaaacttcttgatattcttcataaagactcatcacttggactttctaaagaagataaagcttttttatgggagaaacgttattattgcttcaaacacccaaattgtcttcctaaaatattagcaagcgccccaaactggaaatgggttaatcttgccaaaacttactcattgcttcaccagtggcctgcattgtacccactaattgcattggaacttcttgattcaaaatttgctgatcaggaagtaagatccctagctgtgacctggattgaggccattagtgatgatgagctaacagatcttcttccacagtttgtacaagctttgaaatatgaaatttacttgaatagttcattagtgcaattccttttgtccagggcattgggaaatatccagatagcacacaatttatattggcttctcaaagatgccctgcatgatgtacagtttagtacccgatacgaacatgttttgggtgctctcctgtcagtaggaggaaaacgacttagagaagaacttctaaaacagacgaaacttgtacagcttttaggaggagtagcagaaaaagtaaggcaggctagtggatcagccagacaggttgttctccaaagaagtatggaacgagtacagtccttttttcagaaaaataaatgccgtctccctctcaagccaagtctagtggcaaaagaattaaatattaagtcgtgttccttcttcagttctaatgctgtccccctaaaagtcacaatggtgaatgctgaccctatgggagaagaaattaatgtcatgtttaaggttggtgaagatcttcggcaagatatgttagctttacagatgataaagattatggataagatctggcttaaagaaggactagatctgaggatggtaattttcaaatgtctctcaactggcagagatcgaggcatggtggagctggttcctgcttccgataccctcaggaaaatccaagtggaatatggtgtgacaggatcctttaaagataaaccacttgcagagtggctaaggaaatacaatccctctgaagaagaatatgaaaaggcttcagagaactttatctattcctgtgctggatgctgtgtagccacctatgttttaggcatctgtgatcgacacaatgacaatataatgcttcgaagcacgggacacatgtttcacattgactttggaaagtttttgggacatgcacagatgtttggcagcttcaaaagggatcgggctccttttgtgctgacctctgatatggcatatgtcattaatgggggtgaaaagcccaccattcgttttcagttgtttgtggacctctgctgtcaggcctacaacttgataagaaagcagacaaacctttttcttaacctcctttcactgatgattccttcagggttaccagaacttacaagtattcaagatttgaaatacgttagagatgcacttcaaccccaaactacagacgcagaagctacaattttctttactaggcttattgaatcaagtttgggaagcattgccacaaagtttaacttcttcattcacaaccttgctcagcttcgtttttctggtcttccttctaatgatgagcccatcctttcattttcacctaaaacatactcctttagacaagatggtcgaatcaaggaagtctctgtttttacatatcataagaaatacaacccagataaacattatatttatgtagtccgaattttgagggaaggacagattgaaccatcatttgtcttccgaacatttgacgaatttcaggaacttcacaataagctcagtattatttttccactttggaagttaccaggctttcctaataggatggttctaggaagaacacacataaaagatgtagcagccaaaaggaaaattgagttaaacagttacttacagagtttgatgaatgcttcaacggatgtagcagagtgtgatcttgtttgtactttcttccaccctttacttcgtgatgagaaagctgaagggatagctaggtctgcagatgcaggttccttcagtcctactccaggccaaataggaggagctgtgaaattatccatctcttaccgaaatggtactcttttcatcatggtgatgcatatcaaagatcttgttactgaagatggagctgacccaaatccatatgtcaaaacatacctacttccagataaccacaaaacatccaaacgtaaaaccaaaatttcacgaaaaacgaggaatccgacattcaatgaaatgcttgtatacagtggatatagcaaagaaaccctaagacagcgagaacttcaactaagtgtactcagtgcagaatctctgcgggagaattttttcttgggtggagtaaccctgcctttgaaagatttcaacttgagcaaagagacggttaaatggtatcagctgactgcggcaacatacttgtaaactagtgaatgtttgagctttggaagcatgaacagttataaacgtgcatgcatacatgcacacacacacagacacacacacacacacttgttaattttgtatagtatttttatacttggacagaacttataaagttaaatatacttgctgcatttcaacacatctgttggaccaacagtcacataactaacctttttgaatttttggaagccattgctgttttaaagtcattatgtagaatgctacaaaccctaaacttaatatatactaattcctgaaaaagactttgagacagtactatgtcagttcagccacctattttgcattgttttctataaggaggcaaagcatatgtgttttcctgttatgcaccttttatagcctttaccactgtgtaatgttcacaaacaccaaagta

SEQ ID NO: 3084 - DNA, 2090 bp, Homo sapiens
  source 1..2090: mol_type = genomic DNA
agctgaggggaaaaatggctcggactgtggcggcttcggcggctcaggttgtggtagaggcggaggctcaggcagcttgaggccttgctattttggaagctacaagaaaaaaatagaggaaggaaggtttggtctttttagtggacatggctcagatatctagcaacagcggatttaaagaatgtccatcttcacatccggaaccaacaagagcaaaagatgtggacaaagaagaagcattacagatggaagcagaggctttagcaaaactgcaaaaggatagacaagtgactgacaatcagagaggctttgagttgtcaagcagcaccagaaaaaaagcacaggtttataacaagcaggattatgatctcatggtgtttcctgaatcagattcccaaaaaagagcattagatattgatgtagaaaagctcacccaagctgaacttgagaaactattgctggatgacagtttcgagactaaaaaaacacctgtattaccagttactcctattctgagcccttccttttcagcacagctctattttagacctactattcagagaggacagtggccacctggattacctgggccttccacttatgctttaccttctatttatccttctacttacagtaaacaggctgcattccaaaatggcttcaatccaagaatgcccacttttccatctacagaacctatatatttaagtcttccgggacaatctccatatttctcatatcctttgacacctgccacaccctttcatccacaaggaagcttacctatctatcgtccagtagtcagtactgacatggcaaaactatttgacaaaatagctagtacatcagaatttttaaaaaatgggaaagcaaggactgatttggagataacagattcaaaagtcagcaatctacaggtatctccaaagtctgaggatatcagtaaatttgactggttagacttggatcctctaagtaagcctaaggtggataatgtggaggtattagaccatgaggaagagaaaaatgtttcaagtttgctagcaaaggatccttgggatgctgttcttcttgaagagagatcgacagcaaattgtcatcttgaaagaaaggtgaatggaaaatccctttctgtggcaactgttacaagaagccagtctttaaatattcgaacaactcagcttgcaaaagcccagggccatatatctcagaaagacccaaatgggaccagtagtttgccaactggaagttctcttcttcaagaagttgaagtacagaatgaggagatggcagctttttgtcgatccattacaaaattgaagaccaaatttccatataccaatcaccgcacaaacccaggctatttgttaagtccagtcacagcacaaagaaacatatgcggagaaaatgctagtgtgaaggtctccattgacattgaaggatttcagctaccagttacttttacgtgtgatgtgagttctactgtagaaatcattataatgcaagccctttgctgggtacatgatgacttgaatcaagtagatgttggcagctatgttctaaaagtttgtggtcaagaggaagtgctgcagaataatcattgccttggaagtcatgagcatattcaaaactgtcgaaaatgggacacagaaattagactacaactcttgaccttcagtgcaatgtgtcaaaatctggcccgaacagcagaagatgatgaaacacccgtggatttaaacaaacacctgtatcaaatagaaaaaccttgcaaagaagccatgacgagacaccctgttgaagaactcttagattcttatcacaaccaagtagaactggctcttcaaattgaaaaccaacaccgagcagtagatcaagtaattaaagctgtaagaaaaatctgtagtgctttagatggtgtcgagactcttgccattacagaatcagtaaagaagctaaagagagcagttaatcttccaaggagtaaaactgctgatgtgacttctttgtttggaggagaagacactagcaggagttcaactaggggctcacttaatcctgaaaatcctgttcaagtaagcataaaccaatta

SEQ ID NO: 3085 - DNA, 9443 bp, Homo sapiens
  source 1..9443: mol_type = genomic DNA
cgtgttgtggggctcagctggttcatttatgttgtttttcctgtacctaagttcccgctgtaggtggtacctttgcagacggtgcgatgggggaagcagagaagtttcactacatctatagttgtgacctggatatcaacgtccagcttaagataggaagcttggaagggaagagagaacaaaagagttataaagctgtcctggaagacccaatgttgaagttctcaggactatatcaagagacatgctctgatctttatgttacttgtcaagtttttgcagaagggaagcctttggccttgccagtgagaacatcctacaaagcatttagtacaagatggaactggaatgaatggctgaaactaccagtaaaataccctgacctgcccaggaatgcccaagtggccctcaccatatgggatgtgtatggtcccggaaaagcagtgcctgtaggaggaacaacggtttcgctctttggaaaatacggcatgtttcgccaagggatgcatgacttgaaagtctggcctaatgtagaagcagatggatcagaacccacaaaaactcctggcagaacaagtagcactctctcagaagatcagatgagccgtcttgccaagctcaccaaagctcatcgacaaggacacatggtgaaagtagattggctggatagattgacatttagagaaatagaaatgataaatgagagtgaaaaacgaagttctaatttcatgtacctgatggttgaatttcgatgtgtcaagtgtgatgataaggaatatggtattgtttattatgaaaaggacggtgatgaatcatctccaattttaacaagttttgaattagtgaaagttcctgacccccagatgtctatggagaatttagttgagagcaaacaccacaagcttgcccggagtttaagaagtggaccttctgaccacgatctgaaacccaatgctgccacgagagatcagttaaatattattgtgagttatccaccaaccaagcaacttacatatgaagaacaagatcttgtttggaagtttagatattatcttacgaatcaagaaaaagccttgacaaaattcttgaaatgtgttaattgggatctacctcaagaggccaaacaggccttggaacttctgggaaaatggaagccgatggatgtagaggactccttggagctgttatcctctcattacaccaacccaactgtgaggcgttatgctgttgcccggttgcgacaggccgatgatgaggatttgttgatgtacctattacaattggtccaggctctcaaatatgaaaattttgatgatataaagaatggattggaacctaccaagaaggatagtcagagttcagtgtcagaaaatgtgtcaaattctggaataaattctgcagaaatagatagctcccaaattataaccagcccccttccttcagtctcttcacctcctcctgcatcaaaaacaaaagaagttccagatggcgaaaatctggaacaagatctctgtaccttcttgatatcgagagcctgcaaaaactcaacactggctaattatttatactggtatgtgatagtggaatgtgaagatcaagatactcagcagagagatccaaagacccatgagatgtacttgaacgtaatgagaagattcagccaagcattgttgaagggtgataagtctgtcagagttatgcgttctttgctggctgcacaacagacatttgtagatcggttggtgcatctaatgaaggcagtacaacgcgaaagtggaaatcgtaagaaaaagaatgagagactacaggcattgcttggagataatgaaaagatgaatttgtcagatgtggaacttatcccgttgcctttagaaccccaagtgaaaattagaggaataattccggaaacagctacactgtttaaaagtgcccttatgcctgcacagttgttttttaagacggaagatggaggcaaatatccagttatatttaagcatggagatgatttacgtcaagatcaacttattcttcaaatcatttcactcatggacaagctgttacggaaagaaaatctggacttgaaattgacaccttataaggtgttagccaccagtacaaaacatggcttcatgcagtttatccagtcagttcctgtggctgaagttcttgatacagagggaagcattcagaacttttttagaaaatatgcaccaagtgagaatgggccaaatgggattagtgctgaggtcatggacacttacgttaaaagctgtgctggatattgcgtgatcacctatatacttggagttggagacaggcacctggataaccttttgctaacaaaaacaggcaaactcttccacatagactttggatatattttgggtcgggatccaaagcctcttcctccaccaatgaagctgaataaagaaatggtagaaggaatggggggcacacagagtgagcagtaccaagagttccgtaaacagtgttacacggctttcctccacctgcgaaggtattctaatctgattttgaacttgttttccttgatggttgatgcaaacattccagatattgcacttgaaccagataaaactgtgaaaaaggttcaggataaattccgcttagacctgtcggatgaagaggctgtgcattacatgcagagtctgattgatgagagtgtccatgctctttttgctgcagtggtggaacagattcacaagtttgcccagtactggagaaaatgaaactgggattgacccatcaagatgcttggctcaataagaaaaccacgttaggagcaacctttgtatattggagacttcagagtaaccagcaaggaagagaaatcttaatcttcaagttaccatattttccaaatattacatggtacctgagttctgcttccttggatgtcattgcttaaatatagtcttgaagggcttgttttgaaatattgtatatattttttcaaatgtatacattgttaataaattaagaaatgagaaacattcttatttatgtacatgttatgagagttctggaggaagtaatatgttgaaatagtaaaacattttagtttttgagtttaaaatgttattttttcctcttatatcttcatatcaggacagcagtaacctgaatttagattgtcacagtttacaagtttttgtttgttccttctttcctctctcttctcccactcacttttgtgtgttgtttgtttttgcctaatttacatgtttaaagttctacttaaaatttttcttcaagttttacatgtgatggctcattcttctgcagttcaagaattgcttatatttttagaagatactcattttctcttacaaataattaattttttgtaaactacagttaatagttcttctagcttgtaagtgtgtaaagtagaatatgaaaatgtggctatttagataactggccaaaaggtcatatgaccaccagttttagtattgagcataagatatttttacatattcatgtaagacaatgtaaattgtctttctgcaataaattttttggatgcaaatttagatttcaaaagctttttgatgttataaaggagttgaggaacaaaaagctctttgaaatagctcacctagacctgttaatgtaatatattctttctgaattaagcaaaattttttttgtcttttaagactagaactaatccctctagcttttttactggaactttggggaaaaagaacaaatacaaatatacaaatgatatgaacaatatggtaataatcttttgcaacttaatatgttacatagtcatatgacttggtcttggaagaaaaagaattgttttggtgctgaataaatattagaaatcaagtgacagagaagatgaaggtaaaattgtggcacagtttcagagaatgccgttaatgataacgtgttatttgtctcaaattcttagccctgggcttgcctcttcagagtggggttaccggcgagagggcaagcatgtaattaagagacactctagaggcatatggaatatagtttgtataaaacatacctgctgattagaaaaatggtaaaaatgaaaatacctttgtacatcatcttaagagagcttatatataaactaaatgggcaggctccatcgtctacctttctttttcttttcttcacatgtttatgtcttttttgttattagtcagacatttttagccctctgtatgctcattcttgtagttctatttctattgaaacttcctccaaaacttttctctgaattacccttgttgaaactgacctttcttccgtgtgaactcctacacttgcatctcctatttcaggatttggcatactttttctttaatgggctaagaaagtaaatatcttcagctttggggggcatatgatcccaatagcatcaacttaactctgctaactggaaggcaaaagtgtatcatcttactcgtctttataaactccacagcactctgcatagatatgaccatgtttataaggaactcaataaataattttgacacaaacatgaaattctagaagggcagacactgacaactagtaaggaagttgatcatgagtaactttgtattcagtgccaccttaacaagaattgtaaagaggataaacctttctaggaaggttgatgcgtgttgggtgaggaaggagcatctctcaggagggtaaacagtagctgtggttttgctgagagattttggctgtgagtgacaagcctatatcaaaaagaaaagtggcttatcaatctcagtttttattgctcaaagcaattctttactcctattttttccaaattccattgtttttactctttagagctctatcctcagagtgtagtctgcatatttctttattatcattgccatgtgacttctttggtgacaagttcagtgatatttcaagcatgatgttttgagtttgagaaatgtatttgtgaggacacatcactttaattaaaaaagtgtgagtactatggtcattaagttattcagagtgagatttctgagaggagaagagagaatgtagatggcagttattgagagtggggctataggacaaaaagaagaaaagtatggttaacattgccaaataaagggtcatacagccttgctttttgctggagttagcaaaaatcattctccatatgatagttttagatgttccccagctcatttgtattattgagttttcagctgggtatatattataataacagtcaacatgatgtaggggctcagtattacatggcagggctatactaattgcttcatatgccttatctcattattctgtgagatagaattgtctcctcattttttagttgaaataactgaagtttaaagcaattgaatcatctgcccaaggataagctgctggtgagagcagagttgggatttgaagtcgagttagaccccagtgatcacagtcttgacgattaaattcttccagctttcatttttcactgagataatggtagtgatagtactgacctctaatgtgtgcatttgtgggtatgtggtccattcagctttaatccccagaagacaaggcttattccttttcttatttttggtcatgttttatttttccattgcttttaacaggattaccaaaggcacactcagtagtcagtaaacacatttctaggaaaggtgttgtgtcatcatgccacatattcatactttccttgggttggaaaatagatcattcagtaaaaacatacaggaaaaatgaatcttgccaatgcaattgttaacctacaaccataatataccttaagtatatttttgcacataagtataacattgcgatttaaaacaataaaccagattgagattctaaggagcattttgtaagtaattactaatgtttattttagagagatcacacaacttcaaataaaaactgacatagattgaacaccttgagaataaactttagtgccaaatggaaaataattttttacaagtaaatttgaagaacaatgtgaactttctataattatatacagaaaatatactgatttgccaaaatgagtaattttgatatattaatatttcacttataagaatgcataccacctgatccaggatgggatccaggaacagaaaaagaacattaggtaaaaatgacagaaatctgaatatagtatagagtagctaaaaacaaaccaaaaaaaaaaaaaaaaaaaaaggaaaaacagaataagcctcagaagatagtgagcatcccacctgggtgaccacttagagaagctgaggtgggacccctgcatccgataagtggctgcactagaccacaggaaccagactccactgtaagaactagagtgggaatggacatgtcaaaacctcctgggaaccttattaaatgtgcacattcccaatccccactcctgagcagccaaatcaatctgcaggtgggccttgtgagttttcccaggggattccgatgcctgctagatttaaccagtagatgagatgttaagttatcctgtagtccagagattccacaggccagtgtcagggaacaggggccagggctgggaaggcataagaacagaagataaatttgaggctctgttacgctggtcatccaacccaaccaggtatctcttgttatatgctaacttcattttccctttcttgtccatagtgggaaaaaataatttttaactggctatgtagttaaaaaacctaacaaaaagcacttttctatataatgagtggtttatattaagaataggtacaatgtaaatactggtaagtgaaagttcattttgttcagtgctatgggctggtacattgcatttcaacactagttttttacttttatctaccctgagggtagataacccatattccaaaatacagtattattttcatttgctgtaacattttaagaaatatgtagtttctaaaacttcatatactttatatggaatatgaacaactttaatatgaataaatagtctagaaaaaaatttaggaaaaattgccatgaaatcatgagctaagtcaatggttattttaaaccacttaattttgagactagtatttcatacagaaaaagctaatactgatatcacacactaattgtgtataaaacactaggaatgtcaaaatagaacataagaaaatgagtctagtggacccactgcatagtgtaactttgggatgaatttaaaagaatatttaagtcacagtcaattttctgttggtctaattttaccaaataaccccctaaataagaagtctgatttatctaaaatagaagttaacatagcatcccagtattgccattctaaaactctggcatgtaaatgggagaaatggaaataagctcaaaatgggtagagtaacccatttctgcatgaaccatagaatttaactagaatttggctggctcatgcctgtaatgccagcactttgggaggccaaggcaggcagatcacttgagcccaggagtttgagaccagcccgggcaacatggtgaaactccatctcttcaaaaatatatatttgtgtgtgtgtgtgtgtgtatgtgcgtgcacaaaaattagctgagtgtggtggttcacacttgtaatcacagctacctgggaggctgaggcaggaggattgcttgagcctgggaggcagaggttgcagtgagctgagattgcaccattgcactgcagcctgggtaatagagcgagacaactctatctcaaaaaaaagaatttcactagaatttatatcttcagtgtttgcattagattgtcaccagcactatctgccttgtgactgtcaggactaatccttatatcatttatcttatgtcctttacctcagtttatgtctgtcaccacaagaaacccagacctccctaatcataccatatgccctggtcttacccacatacagctcggtacaactgcatttccccaaacctcagaactccttgggccatcactgtcagagacatttgaactagagcaactccatcttgagtagggactgggtataatgaagctgagacccactgggctgcattcccaggaagttaggcattcttagtcacaggatgagataggagattggctcaagataaggtcacaaagaccttgctgataaaacagtctgtggtaaagaagccagccaaaacccaccaaaaccaagacgggaatgaaagtgacctccggtcatcctcactgctcattatacgctagttataatgcattgacatgctaagagacactcccaccagcaccatgacagtttacaaatgccataacaacatcaggaagttaccctatatggtctaaaaaggggaggaaccctcagttctgagaatttccttgaaaattcatgaataatccaccccttgtttagcatatgatcaagaaataatcattaaaaaatagccaaccagcagctcatgctgctggtctgcctatggagtagccatcctttctttattaacctgctttcactttatggactcccctgaattcttctgcaggagatccaagaaccctctcttggagtcttaaccaggatccctttccagtaacttcagcaggatctgtgagtgccagtttccttctgtggtgcaaaactaggtgctaagtacactttttcccccctttcctctatttttaaaagaactttcagcccttttgaagtgggtacattgtctggagtacataccctggggttcattgttataggagaatttaggacacagacacacgaggagtttaggagcagaggtttaataggtagaagagaagggaaagagaaacagcttcctctatagatgtctgcactgacaccgtggctttaaggcatggcccatgatgtgtctccgagtggaaaagactggttggtggtgaatgcgccaaattttatagtccggtttgaggaggtggtttctgattggttgcatcatgtatgacgtttgcaaggtgcatgtggaaggctggtcgccccaccctaatcttatgcaaatgggctttccagttgattgggtccatcttgtgtaacacgtggctggcagagaagggaagatgaagccaccatcttgaaaatgtctagtccttagtttctgctggcattcacccatgcaagctgccagcttgtctatgtctgcagctcaactttacaggctgctctttgttagcaaatgatttggagcttcttttcattaaagaaaaaagccttaccgaggactcccatacccttgctttctgcttaagtgatttcttcttaactcctatgtcaattttatacagcatgaaataatgatgtatctataaatgagcctttgcaagattaccatttatcaaagaaaaccagtgatgtttagttaactgtttgtaaaaataaatggttagtagaatgtctaattcaataaatgtttcataaatgagtaaa

SEQ ID NO: 3086 - DNA, 2778 bp, Homo sapiens
  source 1..2778: mol_type = genomic DNA
aagttcccgctgtaggtggtacctttgcagacggtgcgatgggggaagcagagaagtttcactacatctatagttgtgacctggatatcaacgtccagcttaagatctggaatgaatggctgaaactaccagtaaaataccctgacctgcccaggaatgcccaagtggccctcaccatatgggatgtgtatggtcccggaaaagcagtgcctgtaggaggaacaacggtttcgctctttggaaaatacggcatgtttcgccaagggatgcatgacttgaaagtctggcctaatgtagaagcagatggatcagaacccacaaaaactcctggcagaacaagtagcactctctcagaagatcagatgagccgtcttgccaagctcaccaaagctcatcgacaaggacacatggtgaaagtagattggctggatagattgacatttagagaaatagaaatgataaatgagagtgaaaaacgaagttctaatttcatgtacctgatggttgaatttcgatgtgtcaagtgtgatgataaggaatatggtattgtttattatgaaaaggacggtgatgaatcatctccaattttaacaagttttgaattagtgaaagttcctgacccccagatgtctatggagaatttagttgagagcaaacaccacaagcttgcccggagtttaagaagtggaccttctgaccacgatctgaaacccaatgctgccacgagagatcagttaaatattattgtgagttatccaccaaccaagcaacttacatatgaagaacaagatcttgtttggaagtttagatattatcttacgaatcaagaaaaagccttgacaaaattcttgaaatgtgttaattgggatctacctcaagaggccaaacaggccttggaacttctgggaaaatggaagccgatggatgtagaggactccttggagctgttatcctctcattacaccaacccaactgtgaggcgttatgctgttgcccggttgcgacaggccgatgatgaggatttgttgatgtacctattacaattggtccaggctctcaaatatgaaaattttgatgatataaagaatggattggaacctaccaagaaggatagtcagagttcagtgtcagaaaatgtgtcaaattctggaataaattctgcagaaatagatagctcccaaattataaccagcccccttccttcagtctcttcacctcctcctgcatcaaaaacaaaagaagttccagatggcgaaaatctggaacaagatctctgtaccttcttgatatcgagagcctgcaaaaactcaacactggctaattatttatactggtatgtgatagtggaatgtgaagatcaagatactcagcagagagatccaaagacccatgagatgtacttgaacgtaatgagaagattcagccaagcattgttgaagggtgataagtctgtcagagttatgcgttctttgctggctgcacaacagacatttgtagatcggttggtgcatctaatgaaggcagtacaacgcgaaagtggaaatcgtaagaaaaagaatgagagactacaggcattgcttggagataatgaaaagatgaatttgtcagatgtggaacttatcccgttgcctttagaaccccaagtgaaaattagaggaataattccggaaacagctacactgtttaaaagtgcccttatgcctgcacagttgttttttaagacggaagatggaggcaaatatccagttatatttaagcatggagatgatttacgtcaagatcaacttattcttcaaatcatttcactcatggacaagctgttacggaaagaaaatctggacttgaaattgacaccttataaggtgttagccaccagtacaaaacatggcttcatgcagtttatccagtcagttcctgtggctgaagttcttgatacagagggaagcattcagaacttttttagaaaatatgcaccaagtgagaatgggccaaatgggattagtgctgaggtcatggacacttacgttaaaagctgtgctggatattgcgtgatcacctatatacttggagttggagacaggcacctggataaccttttgctaacaaaaacaggcaaactcttccacatagactttggatatattttgggtcgggatccaaagcctcttcctccaccaatgaagctgaataaagaaatggtagaaggaatggggggcacacagagtgagcagtaccaagagttccgtaaacagtgttacacggctttcctccacctgcgaaggtattctaatctgattttgaacttgttttccttgatggttgatgcaaacattccagatattgcacttgaaccagataaaactgtgaaaaaggttcaggataaattccgcttagacctgtcggatgaagaggctgtgcattacatgcagagtctgattgatgagagtgtccatgctctttttgctgcagtggtggaacagattcacaagtttgcccagtactggagaaaatgaaactgggattgacccatcaagatgcttggctcaataagaaaaccacgttaggagcaacctttgtatattggagacttcagagtaaccagcaaggaagagaaatcttaatcttcaagttaccatattttccaaatattacatggtacctgagttctgcttccttggatgtcattgcttaaatatagtcttgaagggcttgttttgaaatattgtatatattttttcaaatgtatacattgttaataaattaagaaatgagaaacat

SEQ ID NO: 3087 - DNA, 6435 bp, Homo sapiens
  source 1..6435: mol_type = genomic DNA
tacaaccaggctcaactgttgcatggtagcagatttgcaaacatgagtgctgaggggtaccagtacagagcgctgtatgattataaaaaggaaagagaagaagatattgacttgcacttgggtgacatattgactgtgaataaagggtccttagtagctcttggattcagtgatggacaggaagccaggcctgaagaaattggctggttaaatggctataatgaaaccacaggggaaaggggggactttccgggaacttacgtagaatatattggaaggaaaaaaatctcgcctcccacaccaaagccccggccacctcggcctcttcctgttgcaccaggttcttcgaaaactgaagcagatgttgaacaacaagctttgactctcccggatcttgcagagcagtttgcccctcctgacattgccccgcctcttcttatcaagctcgtggaagccattgaaaagaaaggtctggaatgttcaactctatacagaacacagagctccagcaacctggcagaattacgacagcttcttgattgtgatacaccctccgtggacttggaaatgatcgatgtgcacgttttggctgacgctttcaaacgctatctcctggacttaccaaatcctgtcattccagcagccgtttacagtgaaatgatttctttagctccagaagtacaaagctccgaagaatatattcagctattgaagaagcttattaggtcgcctagcatacctcatcagtattggcttacgcttcagtatttgttaaaacatttcttcaagctctctcaaacctccagcaaaaatctgttgaatgcaagagtactctctgaaattttcagccctatgcttttcagattctcagcagccagctctgataatactgaaaacctcataaaagttatagaaattttaatctcaactgaatggaatgaacgacagcctgcaccagcactgcctcctaaaccaccaaaacctactactgtagccaacaacggtatgaataacaatatgtccttacaagatgctgaatggtactggggagatatctcgagggaagaagtgaatgaaaaacttcgagatacagcagacgggacctttttggtacgagatgcgtctactaaaatgcatggtgattatactcttacactaaggaaagggggaaataacaaattaatcaaaatatttcatcgagatgggaaatatggcttctctgacccattaaccttcagttctgtggttgaattaataaaccactaccggaatgaatctctagctcagtataatcccaaattggatgtgaaattactttatccagtatccaaataccaacaggatcaagttgtcaaagaagataatattgaagctgtagggaaaaaattacatgaatataacactcagtttcaagaaaaaagtcgagaatatgatagattatatgaagaatatacccgcacatcccaggaaatccaaatgaaaaggacagctattgaagcatttaatgaaaccataaaaatatttgaagaacagtgccagacccaagagcggtacagcaaagaatacatagaaaagtttaaacgtgaaggcaatgagaaagaaatacaaaggattatgcataattatgataagttgaagtctcgaatcagtgaaattattgacagtagaagaagattggaagaagacttgaagaagcaggcagctgagtatcgagaaattgacaaacgtatgaacagcattaaaccagaccttatccagctgagaaagacgagagaccaatacttgatgtggttgactcaaaaaggtgttcggcaaaagaagttgaacgagtggttgggcaatgaaaacactgaagaccaatattcactggtggaagatgatgaagatttgccccatcatgatgagaagacatggaatgttggaagcagcaaccgaaacaaagctgaaaacctgttgcgagggaagcgagatggcacttttcttgtccgggagagcagtaaacagggctgctatgcctgctctgtagtggtggacggcgaagtaaagcattgtgtcataaacaaaacagcaactggctatggctttgccgagccctataacttgtacagctctctgaaagaactggtgctacattaccaacacacctcccttgtgcagcacaacgactccctcaatgtcacactagcctacccagtatatgcacagcagaggcgatgaagcgcttactctttgatccttctcctgaagttcagccaccctgaggcctctggaaagcaaagggctcctctccagtctgatctgtgaattgagctgcagaaacgaagccatctttctttggatgggactagagctttctttcacaaaaaagaagtaggggaagacatgcagcctaaggctgtatgatgaccacacgttcctaagctggagtgcttatcccttctttttctttttttctttggtttaatttaaagccacaaccacatacaacacaaagagaaaaagaaatgcaaaaatctctgcgtgcagggacaaagaggcctttaaccatggtgcttgttaatgctttctgaagctttaccagctgaaagttgggactctggagagcggaggagagagaggcagaagaaccctggcctgagaaggtttggtccagcctggtttagcctggatgttgctgtgcacggtggacccagacacatcgcactgtggattatttcattttgtaacaaatgaacgatatgtagcagaaaggcacgtccactcacaagggacgctttgggagaatgtcagttcatgtatgttcagaagaaattctgtcatagaaagtgccagaaagtgtttaacttgtcaaaaaacaaaaacccagcaacagaaaaatggagtttggaaaacaggacttaaaatgacattcagtatataaaatatgtacataatattggatgactaactatcaaatagatggatttgtatcaataccaaatagcttctgttttgttttgctgaaggctaaattcacagcgctatgcaattcttaattttcattaagttgttatttcagttttaaatgtaccttcagaataagcttccccaccccagtttttgttgcttgaaaatattgttgtcccggatttttgttaatattcatttttgttatccttttttaaaagtaaatgtacaggatgccagtaaaaaaaaaaaatggcttcagaattaaaactatgaaatattttacagtttttcttgtacagagtacttggctgttagcccaaggttaaaaagttcataacagattttttttggactgttttgttgggcagtgcctgataagcttcaaagctgctttattcaataaaaaaaagaaatgaaaaagatatatgaatatgacaaagtattgctgagtccaacaatgttgttttaagactcttaaaatacggtacctggcaatgtttatttcataaagaattgtgaacttcttgaatctagggagggggaatgtagtgaagggatgtatcaagtggggtggtgggagggggaggcaaggttatatgcactttctcatgatttacagagaagtgaataactgcaaagtgaagttgcttcttctacttcagtcttctctcactttgatttgctagttgttatcaattaatgacaattacaaacctactgtatctctaatacagtgtgactggtcaggtatttcagttcttaggaaggaagtgccaagtttgtttttgggttcctggaacagcgctcacctttgtttagaacactggtttaaagggataatcatctctgtcacattagactatccatcatgaccagcaaatactcattttaggaaaaaaaaaagcatgatctgaaaaatacttttggtggtatgttggttaccctcctagctttccatttggtttagaacataaagcaaatagacacagtcatactgtcactgctctggactgtgtggagctcgctaaagtcatggtcattgcaggaatccaagtggcagtccttctcattcattctaatcattgtatgtgcttcactacgggggggagaaggaaacgttagcatcatgtttcccatttagggcaggagtgagaggtctctcttcctgatttagatatgcaaaagctggtatgttcagtaggaactgtacatgtgttgggaggcataaagactaattagcaaccataatatggtcactaccctaatagactaaatgaaatcttgcaatttcaaattactctttctccatattagatttacccacagctatatttctgtttaagtactagggtgagggttttctgttactttgttttttaatgttgttccttttgaaagaatcagtcttgcagctgagtgaaaaatctgtggaatgtattatttgtcctctttacatgaaactactcatacttaagcaaaagtcagtcttatagcaagactgttagccctcaaacttgactctactgatctgaccatttccctctcatcgccagacaactgacgatttccctggttttagtctgcgtctctgctttaaagttattgtgatatccttctagatcatacacaagtctaacagttaattagttaacagtttttaaactaggtttgtgggtatttttttggtagcacatgtatgctattacatacaaatttttatttctaaaatataagatctgagattgaatattttcattaaaagctacagttttgtgaatctttgtgcttcaacattctttgcaagatgatacggtatttaggcatttgccttatttttgcatctcacaaacataagtgcaatagatcttttcattgaacagcaaagtaggattcatcattccatatgacttgagttacaccagacctgttctgcccaatgcctttttgattacagtgtagcttgcccaccgcatttgtcgttttagatactttgctagccggccactttggatttcatcagacagtcctaacaatattgtctgaacggctgaatatgaatagatacagcagaggcactcctgatatatgatttttatccatgcgtcagtttttcccacccagtgtagcatcctaaagataaagccagaagctaagctgcagtgaggctgtgattgggcgtagaagtgggagcattgggacctcacattacacacacgagagatcataaccatgtgaaaaggcaaaaagcatgtgtttgcaacatctgataacttcatggcctttgataaatgtatatatgtatatgtgcatggactgtgtttccagtacacctttcagccaaaacagatccacagtagttgttgagttcaagtacataaagtacataacaagcgaacgtctagtacaattcttacttatgtgtatgggatttttccctttgaggttgctttgttttgtcttacaaaggtgaaaattgtttgtaagtgaagtgagaagttcatatttctttggcttttttgtgtttttaaaagttactccttttagggagctggtctgatgacttgcttagcttggaaatccttgttttcagtgtgtcgagtcaaaatgtgtttatgtgagctgtcactgtggggaaccaattgctttgtcatatagctggttatgaactagtaacatgtttgggaagtcctactgatgttcctttggaagaaaaaatctgctggttttaacaactgtgcttttgctatgtatggtatccaagttagttgaaacgcagacactgagatctgtttgagtttagggtcatttttagaaaggggcagtttaaagcacaatgtctcacatgggacaaagttccaaaatgccaaattcttattttttaaaaagctagttctataaaatactggtattatgggtggggaggaaatagaattgagtcaattggaaagactatccaacttaacatgaaacttgtcaccatgagatagcattagctgcccaggatgctgctatatatatatatatatatatatatgtgtgtgtgtgtgtgtgtgtgtgtgtatatatatatatatatatatatatatatatatatatatatgtgtgtgtatatatatatatatgtgtatatatatatgtatatacatatatgtatatatatgcacatatatatatgtatttaaaaaaatcaaaacaaaaaaaaactcatttatacctgtgtattttttaaagctacaatctgttcaatgtttttaaaaatctgtttatatgacattgttaaaataaagttggtcttttgacgagagggaggatgtcacggtcagttgtaactttgccttcacaaggcaactggggtggggggtgggggtagtgtgcctccttgacatttcgttcaagttatagattcaatggagctatgtcttgttttaagttgctttaatgcattgtattagatcttcaaacagaataaaggttgttttgaaactg

SEQ ID NO: 3088 - DNA, 2625 bp, Homo sapiens
  source 1..2625: mol_type = genomic DNA
atctttatctaagggagacgtgcgagcgcctgggctcctttcctccccgatacagtagcgaaatccagttggcttctcaatgaggagccggcagtgagcggcggtggcccggacgcactgccgggcggggcgtggggcggagggacgagccgagccgagccaagcggagctgggccactgtgcacgcccggagggtcctggcggcgcccccgctcctgcgcgcactctcggcgccggacacgagcactgcctgccgggaacaggctggggggaggtgcgggggcttggcccacttggtggaagaacagctttggggattttttttttttcattgtcggatacaggcatttcaaagggaaaccgttgaaatgcataacctgcaaacactgcctcctaaaccaccaaaacctactactgtagccaacaacggtatgaataacaatatgtccttacaagatgctgaatggtactggggagatatctcgagggaagaagtgaatgaaaaacttcgagatacagcagacgggacctttttggtacgagatgcgtctactaaaatgcatggtgattatactcttacactaaggaaagggggaaataacaaattaatcaaaatatttcatcgagatgggaaatatggcttctctgacccattaaccttcagttctgtggttgaattaataaaccactaccggaatgaatctctagctcagtataatcccaaattggatgtgaaattactttatccagtatccaaataccaacaggatcaagttgtcaaagaagataatattgaagctgtagggaaaaaattacatgaatataacactcagtttcaagaaaaaagtcgagaatatgatagattatatgaagaatatacccgcacatcccaggaaatccaaatgaaaaggacagctattgaagcatttaatgaaaccataaaaatatttgaagaacagtgccagacccaagagcggtacagcaaagaatacatagaaaagtttaaacgtgaaggcaatgagaaagaaatacaaaggattatgcataattatgataagttgaagtctcgaatcagtgaaattattgacagtagaagaagattggaagaagacttgaagaagcaggcagctgagtatcgagaaattgacaaacgtatgaacagcattaaaccagaccttatccagctgagaaagacgagagaccaatacttgatgtggttgactcaaaaaggtgttcggcaaaagaagttgaacgagtggttgggcaatgaaaacactgaagaccaatattcactggtggaagatgatgaagatttgccccatcatgatgagaagacatggaatgttggaagcagcaaccgaaacaaagctgaaaacctgttgcgagggaagcgagatggcacttttcttgtccgggagagcagtaaacagggctgctatgcctgctctgtagtggtggacggcgaagtaaagcattgtgtcataaacaaaacagcaactggctatggctttgccgagccctataacttgtacagctctctgaaagaactggtgctacattaccaacacacctcccttgtgcagcacaacgactccctcaatgtcacactagcctacccagtatatgcacagcagaggcgatgaagcgcttactctttgatccttctcctgaagttcagccaccctgaggcctctggaaagcaaagggctcctctccagtctgatctgtgaattgagctgcagaaacgaagccatctttctttggatgggactagagctttctttcacaaaaaagaagtaggggaagacatgcagcctaaggctgtatgatgaccacacgttcctaagctggagtgcttatcccttctttttctttttttctttggtttaatttaaagccacaaccacatacaacacaaagagaaaaagaaatgcaaaaatctctgcgtgcagggacaaagaggcctttaaccatggtgcttgttaatgctttctgaagctttaccagctgaaagttgggactctggagagcggaggagagagaggcagaagaaccctggcctgagaaggtttggtccagcctggtttagcctggatgttgctgtgcacggtggacccagacacatcgcactgtggattatttcattttgtaacaaatgaacgatatgtagcagaaaggcacgtccactcacaagggacgctttgggagaatgtcagttcatgtatgttcagaagaaattctgtcatagaaagtgccagaaagtgtttaacttgtcaaaaaacaaaaacccagcaacagaaaaatggagtttggaaaacaggacttaaaatgacattcagtatataaaatatgtacataatattggatgactaactatcaaatagatggatttgtatcaataccaaatagcttctgttttgttttgctgaaggctaaattcacagcgctatgcaattcttaattttcattaagttgttatttcagttttaaatgtaccttcagaataagcttccccaccccagtttttgttgcttgaaaatattgttgtcccggatttttgttaatattcatttttgttatccttttttaaaagtaaatgtacaggatgccagtaaaaaaaaaaaa

SEQ ID NO: 3089 - DNA, 2439 bp, Homo sapiens
  source 1..2439: mol_type = genomic DNA
tataggttttaaaatgaattccaagacaccattacaaagaaagccggactcttttcttataactgagctcagccaaggaaactcttgcacaaatgtacaatactgtttggaatatggaagacctggatttagaatatgccaagacagatataaattgtggcacagacttgatgttttatatagaaatggacccaccagcactgcctcctaaaccaccaaaacctactactgtagccaacaacggtatgaataacaatatgtccttacaagatgctgaatggtactggggagatatctcgagggaagaagtgaatgaaaaacttcgagatacagcagacgggacctttttggtacgagatgcgtctactaaaatgcatggtgattatactcttacactaaggaaagggggaaataacaaattaatcaaaatatttcatcgagatgggaaatatggcttctctgacccattaaccttcagttctgtggttgaattaataaaccactaccggaatgaatctctagctcagtataatcccaaattggatgtgaaattactttatccagtatccaaataccaacaggatcaagttgtcaaagaagataatattgaagctgtagggaaaaaattacatgaatataacactcagtttcaagaaaaaagtcgagaatatgatagattatatgaagaatatacccgcacatcccaggaaatccaaatgaaaaggacagctattgaagcatttaatgaaaccataaaaatatttgaagaacagtgccagacccaagagcggtacagcaaagaatacatagaaaagtttaaacgtgaaggcaatgagaaagaaatacaaaggattatgcataattatgataagttgaagtctcgaatcagtgaaattattgacagtagaagaagattggaagaagacttgaagaagcaggcagctgagtatcgagaaattgacaaacgtatgaacagcattaaaccagaccttatccagctgagaaagacgagagaccaatacttgatgtggttgactcaaaaaggtgttcggcaaaagaagttgaacgagtggttgggcaatgaaaacactgaagaccaatattcactggtggaagatgatgaagatttgccccatcatgatgagaagacatggaatgttggaagcagcaaccgaaacaaagctgaaaacctgttgcgagggaagcgagatggcacttttcttgtccgggagagcagtaaacagggctgctatgcctgctctgtagtggtggacggcgaagtaaagcattgtgtcataaacaaaacagcaactggctatggctttgccgagccctataacttgtacagctctctgaaagaactggtgctacattaccaacacacctcccttgtgcagcacaacgactccctcaatgtcacactagcctacccagtatatgcacagcagaggcgatgaagcgcttactctttgatccttctcctgaagttcagccaccctgaggcctctggaaagcaaagggctcctctccagtctgatctgtgaattgagctgcagaaacgaagccatctttctttggatgggactagagctttctttcacaaaaaagaagtaggggaagacatgcagcctaaggctgtatgatgaccacacgttcctaagctggagtgcttatcccttctttttctttttttctttggtttaatttaaagccacaaccacatacaacacaaagagaaaaagaaatgcaaaaatctctgcgtgcagggacaaagaggcctttaaccatggtgcttgttaatgctttctgaagctttaccagctgaaagttgggactctggagagcggaggagagagaggcagaagaaccctggcctgagaaggtttggtccagcctggtttagcctggatgttgctgtgcacggtggacccagacacatcgcactgtggattatttcattttgtaacaaatgaacgatatgtagcagaaaggcacgtccactcacaagggacgctttgggagaatgtcagttcatgtatgttcagaagaaattctgtcatagaaagtgccagaaagtgtttaacttgtcaaaaaacaaaaacccagcaacagaaaaatggagtttggaaaacaggacttaaaatgacattcagtatataaaatatgtacataatattggatgactaactatcaaatagatggatttgtatcaataccaaatagcttctgttttgttttgctgaaggctaaattcacagcgctatgcaattcttaattttcattaagttgttatttcagttttaaatgtaccttcagaataagcttccccaccccagtttttgttgcttgaaaatattgttgtcccggatttttgttaatattcatttttgttatccttttttaaaagtaaatgtacaggatgccagtaaaaaaaaaaaa

SEQ ID NO: 3090 - DNA, 6459 bp, Homo sapiens
  source 1..6459: mol_type = genomic DNA
tacaaccaggctcaactgttgcatggtagcagatttgcaaacatgagtgctgaggggtaccagtacagagcgctgtatgattataaaaaggaaagagaagaagatattgacttgcacttgggtgacatattgactgtgaataaagggtccttagtagctcttggattcagtgatggacaggaagccaggcctgaagaaattggctggttaaatggctataatgaaaccacaggggaaaggggggactttccgggaacttacgtagaatatattggaaggaaaaaaatctcgcctcccacaccaaagccccggccacctcggcctcttcctgttgcaccaggttcttcgaaaactgaagcagatgttgaacaacaagctttgactctcccggatcttgcagagcagtttgcccctcctgacattgccccgcctcttcttatcaagctcgtggaagccattgaaaagaaaggtctggaatgttcaactctatacagaacacagagctccagcaacctggcagaattacgacagcttcttgattgtgatacaccctccgtggacttggaaatgatcgatgtgcacgttttggctgacgctttcaaacgctatctcctggacttaccaaatcctgtcattccagcagccgtttacagtgaaatgatttctttagctccagaagtacaaagctccgaagaatatattcagctattgaagaagcttattaggtcgcctagcatacctcatcagtattggcttacgcttcagtatttgttaaaacatttcttcaagctctctcaaacctccagcaaaaatctgttgaatgcaagagtactctctgaaattttcagccctatgcttttcagattctcagcagccagctctgataatactgaaaacctcataaaagttatagaaattttaatctcaactgaatggaatgaacgacagcctgcaccagcactgcctcctaaaccaccaaaacctactactgtagccaacaacggtatgaataacaatatgtccttacaagatgctgaatggtactggggagatatctcgagggaagaagtgaatgaaaaacttcgagatacagcagacgggacctttttggtacgagatgcgtctactaaaatgcatggtgattatactcttacactaaggaaagggggaaataacaaattaatcaaaatatttcatcgagatgggaaatatggcttctctgacccattaaccttcagttctgtggttgaattaataaaccactaccggaatgaatctctagctcagtataatcccaaattggatgtgaaattactttatccagtatccaaataccaacaggatcaagttgtcaaagaagataatattgaagctgtagggaaaaaattacatgaatataacactcagtttcaagaaaaaagtcgagaatatgatagattatatgaagaatatacccgcacatcccaggaaatccaaatgaaaaggacagctattgaagcatttaatgaaaccataaaaatatttgaagaacagtgccagacccaagagcggtacagcaaagaatacatagaaaagtttaaacgtgaaggcaatgagaaagaaatacaaaggattatgcataattatgataagttgaagtctcgaatcagtgaaattattgacagtagaagaagattggaagaagacttgaagaagcaggcagctgagtatcgagaaattgacaaacgtatgaacagcattaaaccagaccttatccagctgagaaagacgagagaccaatacttgatgtggttgactcaaaaaggtgttcggcaaaagaagttgaacgagtggttgggcaatgaaaacactgaagaaaactttctgtcctgcctgcctagccaatattcactggtggaagatgatgaagatttgccccatcatgatgagaagacatggaatgttggaagcagcaaccgaaacaaagctgaaaacctgttgcgagggaagcgagatggcacttttcttgtccgggagagcagtaaacagggctgctatgcctgctctgtagtggtggacggcgaagtaaagcattgtgtcataaacaaaacagcaactggctatggctttgccgagccctataacttgtacagctctctgaaagaactggtgctacattaccaacacacctcccttgtgcagcacaacgactccctcaatgtcacactagcctacccagtatatgcacagcagaggcgatgaagcgcttactctttgatccttctcctgaagttcagccaccctgaggcctctggaaagcaaagggctcctctccagtctgatctgtgaattgagctgcagaaacgaagccatctttctttggatgggactagagctttctttcacaaaaaagaagtaggggaagacatgcagcctaaggctgtatgatgaccacacgttcctaagctggagtgcttatcccttctttttctttttttctttggtttaatttaaagccacaaccacatacaacacaaagagaaaaagaaatgcaaaaatctctgcgtgcagggacaaagaggcctttaaccatggtgcttgttaatgctttctgaagctttaccagctgaaagttgggactctggagagcggaggagagagaggcagaagaaccctggcctgagaaggtttggtccagcctggtttagcctggatgttgctgtgcacggtggacccagacacatcgcactgtggattatttcattttgtaacaaatgaacgatatgtagcagaaaggcacgtccactcacaagggacgctttgggagaatgtcagttcatgtatgttcagaagaaattctgtcatagaaagtgccagaaagtgtttaacttgtcaaaaaacaaaaacccagcaacagaaaaatggagtttggaaaacaggacttaaaatgacattcagtatataaaatatgtacataatattggatgactaactatcaaatagatggatttgtatcaataccaaatagcttctgttttgttttgctgaaggctaaattcacagcgctatgcaattcttaattttcattaagttgttatttcagttttaaatgtaccttcagaataagcttccccaccccagtttttgttgcttgaaaatattgttgtcccggatttttgttaatattcatttttgttatccttttttaaaagtaaatgtacaggatgccagtaaaaaaaaaaaatggcttcagaattaaaactatgaaatattttacagtttttcttgtacagagtacttggctgttagcccaaggttaaaaagttcataacagattttttttggactgttttgttgggcagtgcctgataagcttcaaagctgctttattcaataaaaaaaagaaatgaaaaagatatatgaatatgacaaagtattgctgagtccaacaatgttgttttaagactcttaaaatacggtacctggcaatgtttatttcataaagaattgtgaacttcttgaatctagggagggggaatgtagtgaagggatgtatcaagtggggtggtgggagggggaggcaaggttatatgcactttctcatgatttacagagaagtgaataactgcaaagtgaagttgcttcttctacttcagtcttctctcactttgatttgctagttgttatcaattaatgacaattacaaacctactgtatctctaatacagtgtgactggtcaggtatttcagttcttaggaaggaagtgccaagtttgtttttgggttcctggaacagcgctcacctttgtttagaacactggtttaaagggataatcatctctgtcacattagactatccatcatgaccagcaaatactcattttaggaaaaaaaaaagcatgatctgaaaaatacttttggtggtatgttggttaccctcctagctttccatttggtttagaacataaagcaaatagacacagtcatactgtcactgctctggactgtgtggagctcgctaaagtcatggtcattgcaggaatccaagtggcagtccttctcattcattctaatcattgtatgtgcttcactacgggggggagaaggaaacgttagcatcatgtttcccatttagggcaggagtgagaggtctctcttcctgatttagatatgcaaaagctggtatgttcagtaggaactgtacatgtgttgggaggcataaagactaattagcaaccataatatggtcactaccctaatagactaaatgaaatcttgcaatttcaaattactctttctccatattagatttacccacagctatatttctgtttaagtactagggtgagggttttctgttactttgttttttaatgttgttccttttgaaagaatcagtcttgcagctgagtgaaaaatctgtggaatgtattatttgtcctctttacatgaaactactcatacttaagcaaaagtcagtcttatagcaagactgttagccctcaaacttgactctactgatctgaccatttccctctcatcgccagacaactgacgatttccctggttttagtctgcgtctctgctttaaagttattgtgatatccttctagatcatacacaagtctaacagttaattagttaacagtttttaaactaggtttgtgggtatttttttggtagcacatgtatgctattacatacaaatttttatttctaaaatataagatctgagattgaatattttcattaaaagctacagttttgtgaatctttgtgcttcaacattctttgcaagatgatacggtatttaggcatttgccttatttttgcatctcacaaacataagtgcaatagatcttttcattgaacagcaaagtaggattcatcattccatatgacttgagttacaccagacctgttctgcccaatgcctttttgattacagtgtagcttgcccaccgcatttgtcgttttagatactttgctagccggccactttggatttcatcagacagtcctaacaatattgtctgaacggctgaatatgaatagatacagcagaggcactcctgatatatgatttttatccatgcgtcagtttttcccacccagtgtagcatcctaaagataaagccagaagctaagctgcagtgaggctgtgattgggcgtagaagtgggagcattgggacctcacattacacacacgagagatcataaccatgtgaaaaggcaaaaagcatgtgtttgcaacatctgataacttcatggcctttgataaatgtatatatgtatatgtgcatggactgtgtttccagtacacctttcagccaaaacagatccacagtagttgttgagttcaagtacataaagtacataacaagcgaacgtctagtacaattcttacttatgtgtatgggatttttccctttgaggttgctttgttttgtcttacaaaggtgaaaattgtttgtaagtgaagtgagaagttcatatttctttggcttttttgtgtttttaaaagttactccttttagggagctggtctgatgacttgcttagcttggaaatccttgttttcagtgtgtcgagtcaaaatgtgtttatgtgagctgtcactgtggggaaccaattgctttgtcatatagctggttatgaactagtaacatgtttgggaagtcctactgatgttcctttggaagaaaaaatctgctggttttaacaactgtgcttttgctatgtatggtatccaagttagttgaaacgcagacactgagatctgtttgagtttagggtcatttttagaaaggggcagtttaaagcacaatgtctcacatgggacaaagttccaaaatgccaaattcttattttttaaaaagctagttctataaaatactggtattatgggtggggaggaaatagaattgagtcaattggaaagactatccaacttaacatgaaacttgtcaccatgagatagcattagctgcccaggatgctgctatatatatatatatatatatatatgtgtgtgtgtgtgtgtgtgtgtgtgtatatatatatatatatatatatatatatatatatatatatgtgtgtgtatatatatatatatgtgtatatatatatgtatatacatatatgtatatatatgcacatatatatatgtatttaaaaaaatcaaaacaaaaaaaaactcatttatacctgtgtattttttaaagctacaatctgttcaatgtttttaaaaatctgtttatatgacattgttaaaataaagttggtcttttgacgagagggaggatgtcacggtcagttgtaactttgccttcacaaggcaactggggtggggggtgggggtagtgtgcctccttgacatttcgttcaagttatagattcaatggagctatgtcttgttttaagttgctttaatgcattgtattagatcttcaaacagaataaaggttgttttgaaactg

SEQ ID NO: 3091 - DNA, 7011 bp, Homo sapiens
  source 1..7011: mol_type = genomic DNA
gcgccgggcgctggagctgcgggcgcacggagaggagtcgccagcagctggagcggagttggaggaagcagcggcagcggcgagggcggcaggctagctgtcggagacggcaagcacggatcgggcacggccggcgggtcgcagccgggctggaggccggtcggaaccgagcgggcaggaggccaccgctgcagcgcgggccccgcagaggaaggaagccggcgggcggggtgaagctcgtgtgtggagtgccacggtacaatcagacgacagatggacagtgtgacaaaagtgtcagaaaggattgggcctcgctgtgagagtcagcctggattcaaagtgttgacaagttgctgaaaaggaagccagtgagaggactgtggcacgcagaggaagtggagccctgtcttcggtcacaccattgatggaggacagatggacagccgtatggccagtcacctctcctcttaaacctttggagagtggtcctttgtcctctgctggacacataataggaattctaacacattctctgaattcacttttcataaaaacgtaaaatcagactgctctgtacaaccaggctcaactgttgcatggtagcagatttgcaaacatgagtgctgaggggtaccagtacagagcgctgtatgattataaaaaggaaagagaagaagatattgacttgcacttgggtgacatattgactgtgaataaagggtccttagtagctcttggattcagtgatggacaggaagccaggcctgaagaaattggctggttaaatggctataatgaaaccacaggggaaaggggggactttccgggaacttacgtagaatatattggaaggaaaaaaatctcgcctcccacaccaaagccccggccacctcggcctcttcctgttgcaccaggttcttcgaaaactgaagcagatgttgaacaacaagctttgactctcccggatcttgcagagcagtttgcccctcctgacattgccccgcctcttcttatcaagctcgtggaagccattgaaaagaaaggtctggaatgttcaactctatacagaacacagagctccagcaacctggcagaattacgacagcttcttgattgtgatacaccctccgtggacttggaaatgatcgatgtgcacgttttggctgacgctttcaaacgctatctcctggacttaccaaatcctgtcattccagcagccgtttacagtgaaatgatttctttagctccagaagtacaaagctccgaagaatatattcagctattgaagaagcttattaggtcgcctagcatacctcatcagtattggcttacgcttcagtatttgttaaaacatttcttcaagctctctcaaacctccagcaaaaatctgttgaatgcaagagtactctctgaaattttcagccctatgcttttcagattctcagcagccagctctgataatactgaaaacctcataaaagttatagaaattttaatctcaactgaatggaatgaacgacagcctgcaccagcactgcctcctaaaccaccaaaacctactactgtagccaacaacggtatgaataacaatatgtccttacaagatgctgaatggtactggggagatatctcgagggaagaagtgaatgaaaaacttcgagatacagcagacgggacctttttggtacgagatgcgtctactaaaatgcatggtgattatactcttacactaaggaaagggggaaataacaaattaatcaaaatatttcatcgagatgggaaatatggcttctctgacccattaaccttcagttctgtggttgaattaataaaccactaccggaatgaatctctagctcagtataatcccaaattggatgtgaaattactttatccagtatccaaataccaacaggatcaagttgtcaaagaagataatattgaagctgtagggaaaaaattacatgaatataacactcagtttcaagaaaaaagtcgagaatatgatagattatatgaagaatatacccgcacatcccaggaaatccaaatgaaaaggacagctattgaagcatttaatgaaaccataaaaatatttgaagaacagtgccagacccaagagcggtacagcaaagaatacatagaaaagtttaaacgtgaaggcaatgagaaagaaatacaaaggattatgcataattatgataagttgaagtctcgaatcagtgaaattattgacagtagaagaagattggaagaagacttgaagaagcaggcagctgagtatcgagaaattgacaaacgtatgaacagcattaaaccagaccttatccagctgagaaagacgagagaccaatacttgatgtggttgactcaaaaaggtgttcggcaaaagaagttgaacgagtggttgggcaatgaaaacactgaagaccaatattcactggtggaagatgatgaagatttgccccatcatgatgagaagacatggaatgttggaagcagcaaccgaaacaaagctgaaaacctgttgcgagggaagcgagatggcacttttcttgtccgggagagcagtaaacagggctgctatgcctgctctgtagtggtggacggcgaagtaaagcattgtgtcataaacaaaacagcaactggctatggctttgccgagccctataacttgtacagctctctgaaagaactggtgctacattaccaacacacctcccttgtgcagcacaacgactccctcaatgtcacactagcctacccagtatatgcacagcagaggcgatgaagcgcttactctttgatccttctcctgaagttcagccaccctgaggcctctggaaagcaaagggctcctctccagtctgatctgtgaattgagctgcagaaacgaagccatctttctttggatgggactagagctttctttcacaaaaaagaagtaggggaagacatgcagcctaaggctgtatgatgaccacacgttcctaagctggagtgcttatcccttctttttctttttttctttggtttaatttaaagccacaaccacatacaacacaaagagaaaaagaaatgcaaaaatctctgcgtgcagggacaaagaggcctttaaccatggtgcttgttaatgctttctgaagctttaccagctgaaagttgggactctggagagcggaggagagagaggcagaagaaccctggcctgagaaggtttggtccagcctggtttagcctggatgttgctgtgcacggtggacccagacacatcgcactgtggattatttcattttgtaacaaatgaacgatatgtagcagaaaggcacgtccactcacaagggacgctttgggagaatgtcagttcatgtatgttcagaagaaattctgtcatagaaagtgccagaaagtgtttaacttgtcaaaaaacaaaaacccagcaacagaaaaatggagtttggaaaacaggacttaaaatgacattcagtatataaaatatgtacataatattggatgactaactatcaaatagatggatttgtatcaataccaaatagcttctgttttgttttgctgaaggctaaattcacagcgctatgcaattcttaattttcattaagttgttatttcagttttaaatgtaccttcagaataagcttccccaccccagtttttgttgcttgaaaatattgttgtcccggatttttgttaatattcatttttgttatccttttttaaaagtaaatgtacaggatgccagtaaaaaaaaaaaatggcttcagaattaaaactatgaaatattttacagtttttcttgtacagagtacttggctgttagcccaaggttaaaaagttcataacagattttttttggactgttttgttgggcagtgcctgataagcttcaaagctgctttattcaataaaaaaaagaaatgaaaaagatatatgaatatgacaaagtattgctgagtccaacaatgttgttttaagactcttaaaatacggtacctggcaatgtttatttcataaagaattgtgaacttcttgaatctagggagggggaatgtagtgaagggatgtatcaagtggggtggtgggagggggaggcaaggttatatgcactttctcatgatttacagagaagtgaataactgcaaagtgaagttgcttcttctacttcagtcttctctcactttgatttgctagttgttatcaattaatgacaattacaaacctactgtatctctaatacagtgtgactggtcaggtatttcagttcttaggaaggaagtgccaagtttgtttttgggttcctggaacagcgctcacctttgtttagaacactggtttaaagggataatcatctctgtcacattagactatccatcatgaccagcaaatactcattttaggaaaaaaaaaagcatgatctgaaaaatacttttggtggtatgttggttaccctcctagctttccatttggtttagaacataaagcaaatagacacagtcatactgtcactgctctggactgtgtggagctcgctaaagtcatggtcattgcaggaatccaagtggcagtccttctcattcattctaatcattgtatgtgcttcactacgggggggagaaggaaacgttagcatcatgtttcccatttagggcaggagtgagaggtctctcttcctgatttagatatgcaaaagctggtatgttcagtaggaactgtacatgtgttgggaggcataaagactaattagcaaccataatatggtcactaccctaatagactaaatgaaatcttgcaatttcaaattactctttctccatattagatttacccacagctatatttctgtttaagtactagggtgagggttttctgttactttgttttttaatgttgttccttttgaaagaatcagtcttgcagctgagtgaaaaatctgtggaatgtattatttgtcctctttacatgaaactactcatacttaagcaaaagtcagtcttatagcaagactgttagccctcaaacttgactctactgatctgaccatttccctctcatcgccagacaactgacgatttccctggttttagtctgcgtctctgctttaaagttattgtgatatccttctagatcatacacaagtctaacagttaattagttaacagtttttaaactaggtttgtgggtatttttttggtagcacatgtatgctattacatacaaatttttatttctaaaatataagatctgagattgaatattttcattaaaagctacagttttgtgaatctttgtgcttcaacattctttgcaagatgatacggtatttaggcatttgccttatttttgcatctcacaaacataagtgcaatagatcttttcattgaacagcaaagtaggattcatcattccatatgacttgagttacaccagacctgttctgcccaatgcctttttgattacagtgtagcttgcccaccgcatttgtcgttttagatactttgctagccggccactttggatttcatcagacagtcctaacaatattgtctgaacggctgaatatgaatagatacagcagaggcactcctgatatatgatttttatccatgcgtcagtttttcccacccagtgtagcatcctaaagataaagccagaagctaagctgcagtgaggctgtgattgggcgtagaagtgggagcattgggacctcacattacacacacgagagatcataaccatgtgaaaaggcaaaaagcatgtgtttgcaacatctgataacttcatggcctttgataaatgtatatatgtatatgtgcatggactgtgtttccagtacacctttcagccaaaacagatccacagtagttgttgagttcaagtacataaagtacataacaagcgaacgtctagtacaattcttacttatgtgtatgggatttttccctttgaggttgctttgttttgtcttacaaaggtgaaaattgtttgtaagtgaagtgagaagttcatatttctttggcttttttgtgtttttaaaagttactccttttagggagctggtctgatgacttgcttagcttggaaatccttgttttcagtgtgtcgagtcaaaatgtgtttatgtgagctgtcactgtggggaaccaattgctttgtcatatagctggttatgaactagtaacatgtttgggaagtcctactgatgttcctttggaagaaaaaatctgctggttttaacaactgtgcttttgctatgtatggtatccaagttagttgaaacgcagacactgagatctgtttgagtttagggtcatttttagaaaggggcagtttaaagcacaatgtctcacatgggacaaagttccaaaatgccaaattcttattttttaaaaagctagttctataaaatactggtattatgggtggggaggaaatagaattgagtcaattggaaagactatccaacttaacatgaaacttgtcaccatgagatagcattagctgcccaggatgctgctatatatatatatatatatatatatgtgtgtgtgtgtgtgtgtgtgtgtgtatatatatatatatatatatatatatatatatatatatatgtgtgtgtatatatatatatatgtgtatatatatatgtatatacatatatgtatatatatgcacatatatatatgtatttaaaaaaatcaaaacaaaaaaaaactcatttatacctgtgtattttttaaagctacaatctgttcaatgtttttaaaaatctgtttatatgacattgttaaaataaagttggtcttttgacgagagggaggatgtcacggtcagttgtaactttgccttcacaaggcaactggggtggggggtgggggtagtgtgcctccttgacatttcgttcaagttatagattcaatggagctatgtcttgttttaagttgctttaatgcattgtattagatcttcaaacagaataaaggttgttttgaaactgaa

SEQ ID NO: 3092 - DNA, 540 bp, Homo sapiens
  source 1..540: mol_type = genomic DNA
ttcattgtcggatacaggcatttcaaagggaaaccgttgaaatgcataacctgcaaaggaagaagtgaatgaaaaacttcgagatacagcagacgggacctttttggtacgagatgcgtctactaaaatgcatggtgattatactcttacactaaggaaagggggaaataacaaattaatcaaaatatttcatcgagatgggaaatatggcttctctgacccattaaccttcagttctgtggttgaattaataaaccactaccggaatgaatctctagctcagtataatcccaaattggatgtgaaattactttatccagtatccaaataccaacaggatcaagttgtcaaagaagataatattgaagctgtagggaaaaaattacatgaatataacactcagtttcaagaaaaaagtcgagaatatgatagattatatgaagaatatacccgcacatcccaggaaatccaaatgaaaaggacagctattgaagcatttaatgaaaccataaaaatatttgaagaacagtgccagaccca

SEQ ID NO: 3093 - DNA, 3891 bp, Homo sapiens
  source 1..3891: mol_type = genomic DNA
agttggaggaagcagcggcagcggcgagggcggcaggctagctgtcggagacggcaagcacggatcgggcacggccggcgggtcgcagccgggctggaggccggtcggaaccgagcgggcaggaggccaccgctgcagcgcgggccccgcagaggaaggaagccggcgggcggggtaggtgaagctcgtgtgtggagtgccacggtacaatcagacgacagatggacagtgtgacaaaagtgtcagaaaggattgggcctcgctgtgagagtcagcctggattcaaagtgttgacaagttgctgaaaaggaagccagtgagaggactgtggcacgcagaggaagtggagccctgtcttcggtcacaccattgatggaggacagatggacagccgtatggccagtcacctctcctcttaaacctttggagagtggtcctttgtcctctgctggacacataataggaattctaacacattctctgaattcacttttcataaaaacgtaaaatcagactgctctgtacaaccaggctcaactgttgcatggtagcagatttgcaaacatgagtgctgaggggtaccagtacagagcgctgtatgattataaaaaggaaagagaagaagatattgacttgcacttgggtgacatattgactgtgaataaagggtccttagtagctcttggattcagtgatggacaggaagccaggcctgaagaaattggctggttaaatggctataatgaaaccacaggggaaaggggggactttccgggaacttacgtagaatatattggaaggaaaaaaatctcgcctcccacaccaaagccccggccacctcggcctcttcctgttgcaccaggttcttcgaaaactgaagcagatgttgaacaacaagctttgactctcccggatcttgcagagcagtttgcccctcctgacattgccccgcctcttcttatcaagctcgtggaagccattgaaaagaaaggtctggaatgttcaactctatacagaacacagagctccagcaacctggcagaattacgacagcttcttgattgtgatacaccctccgtggacttggaaatgatcgatgtgcacgttttggctgacgctttcaaacgctatctcctggacttaccaaatcctgtcattccagcagccgtttacagtgaaatgatttctttagctccagaagtacaaagctccgaagaatatattcagctattgaagaagcttattaggtcgcctagcatacctcatcagtattggcttacgcttcagtatttgttaaaacatttcttcaagctctctcaaacctccagcaaaaatctgttgaatgcaagagtactctctgaaattttcagccctatgcttttcagattctcagcagccagctctgataatactgaaaacctcataaaagttatagaaattttaatctcaactgaatggaatgaacgacagcctgcaccagcactgcctcctaaaccaccaaaacctactactgtagccaacaacggtatgaataacaatatgtccttacaagatgctgaatggtactggggagatatctcgagggaagaagtgaatgaaaaacttcgagatacagcagacgggacctttttggtacgagatgcgtctactaaaatgcatggtgattatactcttacactaaggaaagggggaaataacaaattaatcaaaatatttcatcgagatgggaaatatggcttctctgacccattaaccttcagttctgtggttgaattaataaaccactaccggaatgaatctctagctcagtataatcccaaattggatgtgaaattactttatccagtatccaaataccaacaggatcaagttgtcaaagaagataatattgaagctgtagggaaaaaattacatgaatataacactcagtttcaagaaaaaagtcgagaatatgatagattatatgaagaatatacccgcacatcccaggaaatccaaatgaaaaggacagctattgaagcatttaatgaaaccataaaaatatttgaagaacagtgccagacccaagagcggtacagcaaagaatacatagaaaagtttaaacgtgaaggcaatgagaaagaaatacaaaggattatgcataattatgataagttgaagtctcgaatcagtgaaattattgacagtagaagaagattggaagaagacttgaagaagcaggcagctgagtatcgagaaattgacaaacgtatgaacagcattaaaccagaccttatccagctgagaaagacgagagaccaatacttgatgtggttgactcaaaaaggtgttcggcaaaagaagttgaacgagtggttgggcaatgaaaacactgaagaccaatattcactggtggaagatgatgaagatttgccccatcatgatgagaagacatggaatgttggaagcagcaaccgaaacaaagctgaaaacctgttgcgagggaagcgagatggcacttttcttgtccgggagagcagtaaacagggctgctatgcctgctctgtagtggtggacggcgaagtaaagcattgtgtcataaacaaaacagcaactggctatggctttgccgagccctataacttgtacagctctctgaaagaactggtgctacattaccaacacacctcccttgtgcagcacaacgactccctcaatgtcacactagcctacccagtatatgcacagcagaggcgatgaagcgcttactctttgatccttctcctgaagttcagccaccctgaggcctctggaaagcaaagggctcctctccagtctgatctgtgaattgagctgcagaaacgaagccatctttctttggatgggactagagctttctttcacaaaaaagaagtaggggaagacatgcagcctaaggctgtatgatgaccacacgttcctaagctggagtgcttatcccttctttttctttttttctttggtttaatttaaagccacaaccacatacaacacaaagagaaaaagaaatgcaaaaatctctgcgtgcagggacaaagaggcctttaaccatggtgcttgttaatgctttctgaagctttaccagctgaaagttgggactctggagagcggaggagagagaggcagaagaaccctggcctgagaaggtttggtccagcctggtttagcctggatgttgctgtgcacggtggacccagacacatcgcactgtggattatttcattttgtaacaaatgaacgatatgtagcagaaaggcacgtccactcacaagggacgctttgggagaatgtcagttcatgtatgttcagaagaaattctgtcatagaaagtgccagaaagtgtttaacttgtcaaaaaacaaaaacccagcaacagaaaaatggagtttggaaaacaggacttaaaatgacattcagtatataaaatatgtacataatattggatgactaactatcaaatagatggatttgtatcaataccaaatagcttctgttttgttttgctgaaggctaaattcacagcgctatgcaattcttaattttcattaagttgttatttcagttttaaatgtaccttcagaataagcttccccaccccagtttttgttgcttgaaaatattgttgtcccggatttttgttaatattcatttttgttatccttttttaaaagtaaatgtacaggatgccagtaaaaaaaaaaaatggcttcagaattaaaactatgaaatattttacagtttttcttgtacagagtacttggctgttagcccaaggttaaaaagttcataacagattttttttggactgttttgttgggcagtgcctgataagcttcaaagctgctttattcaataaaaaaaagaaatgaaaaa

SEQ ID NO: 3094 - DNA, 4026 bp, Homo sapiens
  source 1..4026: mol_type = genomic DNA
ccgcccggctcgaatgcgctcgggcatttccgccgggggcgggccaggccgctcggaaccgtggcggcggcggaggcggggatcccgcggctgcggcgacggtggccgcggtggagccacggggcgggcttggcttggtgtgacggcggctgcggcggcggtggcggccgcgaccaggtcggcgtcctcagctggccgagcatggtggcagcctgcacccttggctcccttgtctggtgcagccagcagagccgccagccttgggcgcccatggccctccgtgtgagggcgtgagcggcctgccccagcctcacctgctgatggaggactcaatggcccagtgacctgacaccacaccaccaactccctcccaccagctgacgaatggtggacccagtgacgagtggcccttgtaagggtcatggaataatttgaagcgaggcatgagcggcccctgtggtcgcctgtgactgctggagatagaggtcccagcaccccaagccaacccagcggaccctcccagccctgcttcaaccaatggggccagtggggctccaagcagccacctaaccatccagaccccaccccactcacgcggccatggcgggccctgagggcttccagtaccgcgctctgtacccgttccgccgggagcggccggaggacctggagctgctgcccggcgacgtgctggtagtgagccgggcggccttgcaggcgctgggcgtggccgagggtggcgagcgctgcccacagagcgtgggctggatgcccggcctcaacgagcgcacacggcagcgaggtgacttccctggcacctatgtggagttcctggggcccgtggccctggcccggcccggccctcgcccacggggcccccgcccactgcccgccaggccccgtgatggggcccctgagccaggcctcacactccccgacttgcccgagcagttctccccacctgatgtggctccccctcttctggtgaagcttgtggaggccattgaaaggacagggctggacagcgaatctcactaccgcccggagctgcccgcaccgcgtacagactggtccctgagcgacgtggatcagtgggacacggcagccctggctgacggcattaagagcttcctgctggcactgcccgcgccgctcgtgacccccgaggcctcggccgaggcgcgccgggccctgcgggaggccgcggggcccgtggggccggcgctggagccaccgacgctgccgctgcaccgcgcgctcacgctgcgcttcctgctccagcacctgggccgcgtggccagccgcgccccggccctgggtcccgcggtccgggccctgggcgccacctttgggccgctgctgctgcgcgcgccgccgccgccgtcctcgccgccgccagggggcgctcccgacgggagtgagcccagccctgacttcccggcgctgctggtggagaagctgcttcaggaacacttggaagagcaggaggttgcgcccccagcgctgccgcctaaaccccccaaggcaaagccggcctccacagtcctggccaatggagggagcccaccctccctgcaggatgctgagtggtactggggggacatttcaagggaggaggtgaacgagaaactccgggacactcccgatggcaccttcctagtccgagatgcttctagcaagatccagggcgagtacacgctgaccctcaggaaaggcgggaacaataagctgatcaaggtcttccaccgagatgggcactatggcttctcagagccactcaccttctgctccgttgtggacctcatcaatcactaccgccacgagtctctggcccagtacaatgccaagctggacacacggctcctctaccctgtgtccaaataccagcaggaccagattgtcaaggaggacagcgtggaggcagtgggcgcccagcttaaggtctatcaccagcagtaccaggacaagagccgcgagtatgaccagctttatgaagagtacacacggacctcccaggagctgcagatgaagcgtactgcaattgaggccttcaatgagactatcaagatctttgaagagcagggccagactcaagagaaatgcagcaaggaatacctggagcgcttccggcgtgagggcaacgagaaagagatgcaaaggatcctgctgaactccgagcggctcaagtcccgcattgccgagatccatgagagccgcacgaagctggagcagcagctgcgggcccaggcctcggacaacagagagatcgacaagcgcatgaacagcctcaagccggacctcatgcagctgcgcaagatccgagaccagtacctcgtgtggctcacccagaaaggcgcccggcagaagaaaatcaacgagtggctggggattaaaaatgagactgaggaccagtacgcactcatggaggacgaggacgatctcccgcaccacgaggaacgcacttggtacgtgggcaagatcaaccgcacgcaggcagaggagatgctgagtggcaagcgggatggcaccttcctcatccgcgagagcagccagcggggctgctacgcctgctccgtggtagtggacggcgacaccaagcactgcgtcatctaccgcacggccaccggcttcggcttcgcggagccctacaacctgtacgggtcgctgaaggagctggtgctgcactaccagcacgcctcgctggtgcagcacaacgacgcgctcaccgtcaccctggcgcacccagtgcgcgccccgggccccggcccgccgcctgccgcccgctgagcaccgaggacccgccccaagcagagccgcccctgggcccgtctgcgccggaggctgcggcggcgggagccacggaccagaccagccacatccaggggtcctcatttctccggctctggctcttgtttggggttctctcaccctctttctctttccttccctcccccattctccagatctccctctgtctccttttctctgtctttcttggcccctgtctctctccatgttgggggtcctaactcccccaccccatatctacgtgtcctccgggcattgccctctccatggctctggtcaccctgaccctctgccctgcccaccgcaggtcccccggggtcccggaagccccttctggctgcacctgccatgtttacagagggcccctgggctgcgcggccccagcctgggcaccctgatttttaagccatagacctggggtcagggcaggaaggaacttcactctgctgcttccgagaacctcggccgtgacattcggggccgggcgggacccgccccacagactccaacttcccctccaaaccccgaagtgaaacccgccaccgggttacccccacaagggggccgctgcgagaagttcacccacccccgaaaaaataattaaactcgcaggccaggcacggtggctcatgcctgtaatcccagcactttgggaggccaagacgggcggatcttttgaggtcgggagttggaggccagcctggccaaaatggcaaaaccccgcatctactaaaatacaaaaattagccgggcgtggtggcggccgcctgtaatcccagctacttgggaggctgaggcgtgagaatctcttgaacccaggagatggaggttgcagtgagcagagatcgtgccactgcactccagcctgggtaacagagggagactcctccgtctcaaaaaaataaataaataaacttgtgagctggccccaacccctcctaggaatcacagctccccgtactggtgccgccgcagtggccaagttgcgacactgcccacggcccctccctctgatgcagattcagggcttctcttcgatcatgttgggttttgattctgtttttccttgactgcaaaaccctctttcctctcctcttttgggacaagagccctggttttctacgctgcccttggccaccacactgcctgccccacgagctgggaggcaggttttgtacggtacgttgttattgatatgatataaaacatcaaacgtcg

SEQ ID NO: 3095 - DNA, 5609 bp, Homo sapiens
  source 1..5609: mol_type = genomic DNA
gtggctggagtccgggcagagcttgagggcagttggtgcggtcgggttggttcttacaccccggcgggagcgcccagacaagccgagctgactggacttctccggccggccccattcccgaggctgcggcagcttcggttccgagaccgaccggagaggagcccgagtcccggcctctgggggattcgctctctgcagaccagtgggaccccgaaacttgaacgcaatctccagcccccttttttgccttcctttgtcacttgcccgggtttctcccaacgtgttcttttttttcctcttcattctccctccttcgaaggacacaaaagtggcttccgcggaaagatttggaggcggtgggagcttttctccccggagagcgactgtgtagaaaggatttttgggaagccgctttttaacacctctgctctccgtcccccaagcctctgtgtaatcctctgaggagaaaagcccatagcttgaaagttcgggggcattttgttgtgttctgtaggagagagggggaggaccctgttcgggtagtttggccggactggtactggccgttggaaaacccgaagtacatttccgtgtggaacttttgcagatatatatttttagatttttaaataccagataaaaaatatatgccttctatatatctcctggcgacctgcccctgacagcgcgatgtacaatacggtgtggagtatggaccgcgatgacgcagactggagggaggtgatgatgccctattcgacagaactgatattttatattgaaatggatcctccagctcttccaccaaagccacctaagccaatgacttcagcagttccaaatggaatgaaggacagttctgtttctcttcaggatgcagaatggtactggggggatatttcaagggaggaggtaaatgacaaattgcgggatatgccagatgggaccttcttggtccgagatgcctcaacaaaaatgcagggagattatactttgactttgcggaagggaggcaataataagttaataaagatctatcaccgggatggtaaatatggcttttctgatcctctgacatttaattccgtggtggagctcattaaccactatcaccatgaatctcttgctcagtacaatcccaaacttgatgtgaagctgatgtacccagtgtccagataccaacaggatcagttggtaaaagaagataatattgatgcagtaggtaaaaaactgcaagaataccactctcagtatcaggagaagagtaaagagtatgataggctgtatgaagaatatactagaacatcccaggaaatacagatgaagaggactgcaatagaagcttttaatgaaacaattaaaatatttgaagagcagtgtcacacacaagaacaacatagcaaagaatatattgagcgatttcgcagagaggggaatgaaaaggagattgaacgaattatgatgaattatgataaattgaaatcacgtctgggtgagattcatgatagcaaaatgcgtctagagcaggatttgaagaatcaagctttggacaaccgagaaatagataaaaaaatgaatagcatcaaacctgacctgatccagctgcgaaagatccgagatcaacaccttgtatggctcaatcacaaaggagtgagacagaaacgcctgaatgtctggctgggaattaagaatgaggatgctgatgagaactattttatcaatgaggaagatgaaaacctgccccattatgatgagaaaacctggtttgttgaggatatcaatcgagtacaagcagaggacttgctttatgggaaacctgatggtgcattcttaattcgtgagagtagcaagaaaggatgctatgcttgctctgtggtggccgatggggaagtgaagcactgtgtgatctacagcactgctcggggctatggctttgcagagccctacaacctgtacagctctctgaaggagctagtgctccattaccagcagacatccttggttcagcacaacgactccctcaacgtcaggcttgcctaccctgttcatgcacagatgccctcgctttgcagataaagaggaagtgggaagagaggtggttctctggcatttttttctacagtttttattagactacgatgagggcattctttctacatagactgcttgttttgcacaagaagtgattttgtgaatgtgaagtggagaggccgagcagcagccggccgggatgggggcattagaggcctgaggttctctaggactcagccatgccgctgcactgacatactaagctggaagcagatgttttttttgaaagtctgtttcattggggtttttgttttgtttagccagacaccctcaacagaatattaggcttgatggttatagcgggtggggttgtatttggaagcctctgaagagaccatgtctttttaaaatctaactcttgagagtgcagcaggggcatggctctgctgggagttgtgttttgctttggcagtctctcttccccccacgaagaaggctgtttaggttttgtgatagaatgggatttgatgaaaaagacaaccaaaggaaaatggggaggcttgggatttcatttaaataatctaagccaagatgataaaaaaaaccttcaactgaaggtattttgtttcttaccaacataatttaggcttcagcatctcaccagcccctccctctgaagaagtattatgttcagaagccaacaaaacagtttgttgccagaccaatgtttgatgggaaaacgtggcactcatagttgaatgtatacttctgtaccaaaacttgaacataaaaagactagaatttgtgagttttagcaaacgctaaaattgatcactgtaactaaccccttctgtccttcctgcctgtttctctgagatgaggaatagcattctttttgtggggatggtgagctttgaatcataaaatgaagttggtgcttgtatggtgtttccttagcctaaagaatgatctgttgtttgaaacctttgtaacttgtttgtatgagtaaagaaaaggtgcaatgcagtgcttttagatggcttgatataccaaataacaatatagaacaacattattatatgtgcttccccaagtttaaaggccctgcagaaatagtaaacatggtttaatttcccttcatttccccctcctttgctggatggggttttgggagctataggttgctaaggaggggagtcagattgtggtcaggtgcctcagtaaatcacagacccaggggccctgtggtccagggtgagagtcacaccacattacacatgtgcttccatacagtggtttctgaagcttttgcagggagagaagatggcttagtgtttagactgttagtagaagccatctggaagcttttctctttgcctttttttgtgatcctgccattaaggctatgtgcagtctgccctcctgctccagtggccttgattttaggccaggaatcttctgctccatgtggcttaagccttccagctgagtgaagctaggcaaatggagtgggggcaggcatctattcctgcccccatcatgccccacacccatcagtcaacactcatttgacaaatagagtccagctgcctctgagccaatcctgggaccataataggctcagagtgagtcagctgtttgaacccaaagctgtgcagtcaggcaccctggctgagctagagaagccagtacctgcatcttggtttataaggcttacagctaggaaagctctagttctgggggtgaaagaaaaatattagtttacctgagcacttatttccatgacagggtctaaaatatggaccatgatgtagacacagatttttaattttggaaaaacctccagttactagtgacgaggatagaaagggaagtgcttctctttggctttttcttggttacactgcagtttcaggattgggtgagacagagacaaatgaacccccctctaaagtcatttaactaatagccagcacatcccttccccaaactgtcaattgaaatcttaactgaaagttttactgaataataccaagctaattgctgttgggcacacctggatggctttgcacctggtgttgaacctgctgaagcaggtggatgctcaagattacgtgcaaggaatccctcccatctggtactaaaatttcagtgtgttctgagtgtcttttaaaccaaaatggaaatacagatacagggctgtagtattcagtaatgtgtctgctccttgttgggcagacaccagcggtgtgcagggagagaccaagtaccatctttatctacacttgggctggcttgtggagaagggctgctttttttcagtcctacattccttcattttttttttcattcttgaattcattgttttgtgggatctaagacccaggggtcatttgagaggtttgacagtatcttttctgaccagttgccacatgacttgcttgaccctgagcctgtggaaatggcatagggaccagtctactacccactgggcctggtgtgtagagggggagagggtagcaaggtgcttctctacgcccatgacttgggagcaggtcttggcctccttcatgagagtctagtgccatgtcctgtcccatgatctggaccctgggactgtcttggcatcttaactgcagtttcaatgaggcagagggcaaagagagaccaagatcagaggggttcattatacccctggctagagaacccagctactgacatgcaagcagcttggggctggctggacacaggtactaggcccattgtttccaggtgaagctttcatcacagaacagtgttgtctccacctggccttagatggcacgccatgattcgggcctggatagactgcctgcgtccttaccactgatctggccaagaatgaggccctcccaacactttcactccctctccaagccttgatgggacctccacttatttaggcctcatgtgctttgaagaagctttgagagccaatgtgtcttccacgggtctcttttttgctacaagtaatcagccccatgtgttctcttaaactgagaattgcacctgggcaattcctgttttctaaggtggtctctgctgctatttaacaacccagagtaggcctctgtgaggcttcagtggcctcagaaaccagagggtccagatagggggcctgcttgggccctctgctgccaactgctcaaacctgctttagctccagccacttgtggcaaacaacctcgtttccttacaaattccagcatgtgactttggtgccgttacttgtgaaaaatctattctgttgtctttgatgtgtccaagaaaattcgtgtagtttacgtaaaaatatctgactcacaagaaagccaactgtatgtcttgtgatgggacagttcataatgtagttgctagaccactttacaaattgttcttgtcaccagatgtgttcagacattgctgtgcaattgttggggagggtagggggaaaggcgagaggagatacttattggtctttttgtttaataccttccccaagaggggacagtctggccaacttgctccagtaatgcaataaagacattgcaataaagtaa

SEQ ID NO: 3096 - DNA, 4889 bp, Homo sapiens
  source 1..4889: mol_type = genomic DNA
aaccggcctcagccaatcaccacccaccttgcctctcttccctcgccccactccctcctcgcctggctcgcgtgctcccggcactgactcctggagtgcggccagcgcccggatcgtaccattctgattgaggctgggggagagcgcggatggctgattggggagccgaagcctagagagcggtggggagacgtgaaagtcgagatggagagcagctttttgaacatgttctcaggcacttgacagaatcccgcgcgatgtacaatacggtgtggagtatggaccgcgatgacgcagactggagggaggtgatgatgccctattcgacagaactgatattttatattgaaatggatcctccagctgcggaggtaaatgacaaattgcgggatatgccagatgggaccttcttggtccgagatgcctcaacaaaaatgcagggagattatactttgactttgcggaagggaggcaataataagttaataaagatctatcaccgggatggtaaatatggcttttctgatcctctgacatttaattccgtggtggagctcattaaccactatcaccatgaatctcttgctcagtacaatcccaaacttgatgtgaagctgatgtacccagtgtccagataccaacaggatcagttggtaaaagaagataatattgatgcagtaggtaaaaaactgcaagaataccactctcagtatcaggagaagagtaaagagtatgataggctgtatgaagaatatactagaacatcccaggaaatacagatgaagaggactgcaatagaagcttttaatgaaacaattaaaatatttgaagagcagtgtcacacacaagaacaacatagcaaagaatatattgagcgatttcgcagagaggggaatgaaaaggagattgaacgatggctcaatcacaaaggagtgagacagaaacgcctgaatgtctggctgggaattaagaatgaggatgctgatgagaactattttatcaatgaggaagatgaaaacctgccccattatgatgagaaaacctggtttgttgaggatatcaatcgagtacaagcagaggacttgctttatgggaaacctgatggtgcattcttaattcgtgagagtagcaagaaaggatgctatgcttgctctgtggtggccgatggggaagtgaagcactgtgtgatctacagcactgctcggggctatggctttgcagagccctacaacctgtacagctctctgaaggagctagtgctccattaccagcagacatccttggttcagcacaacgactccctcaacgtcaggcttgcctaccctgttcatgcacagatgccctcgctttgcagataaagaggaagtgggaagagaggtggttctctggcatttttttctacagtttttattagactacgatgagggcattctttctacatagactgcttgttttgcacaagaagtgattttgtgaatgtgaagtggagaggccgagcagcagccggccgggatgggggcattagaggcctgaggttctctaggactcagccatgccgctgcactgacatactaagctggaagcagatgttttttttgaaagtctgtttcattggggtttttgttttgtttagccagacaccctcaacagaatattaggcttgatggttatagcgggtggggttgtatttggaagcctctgaagagaccatgtctttttaaaatctaactcttgagagtgcagcaggggcatggctctgctgggagttgtgttttgctttggcagtctctcttccccccacgaagaaggctgtttaggttttgtgatagaatgggatttgatgaaaaagacaaccaaaggaaaatggggaggcttgggatttcatttaaataatctaagccaagatgataaaaaaaaccttcaactgaaggtattttgtttcttaccaacataatttaggcttcagcatctcaccagcccctccctctgaagaagtattatgttcagaagccaacaaaacagtttgttgccagaccaatgtttgatgggaaaacgtggcactcatagttgaatgtatacttctgtaccaaaacttgaacataaaaagactagaatttgtgagttttagcaaacgctaaaattgatcactgtaactaaccccttctgtccttcctgcctgtttctctgagatgaggaatagcattctttttgtggggatggtgagctttgaatcataaaatgaagttggtgcttgtatggtgtttccttagcctaaagaatgatctgttgtttgaaacctttgtaacttgtttgtatgagtaaagaaaaggtgcaatgcagtgcttttagatggcttgatataccaaataacaatatagaacaacattattatatgtgcttccccaagtttaaaggccctgcagaaatagtaaacatggtttaatttcccttcatttccccctcctttgctggatggggttttgggagctataggttgctaaggaggggagtcagattgtggtcaggtgcctcagtaaatcacagacccaggggccctgtggtccagggtgagagtcacaccacattacacatgtgcttccatacagtggtttctgaagcttttgcagggagagaagatggcttagtgtttagactgttagtagaagccatctggaagcttttctctttgcctttttttgtgatcctgccattaaggctatgtgcagtctgccctcctgctccagtggccttgattttaggccaggaatcttctgctccatgtggcttaagccttccagctgagtgaagctaggcaaatggagtgggggcaggcatctattcctgcccccatcatgccccacacccatcagtcaacactcatttgacaaatagagtccagctgcctctgagccaatcctgggaccataataggctcagagtgagtcagctgtttgaacccaaagctgtgcagtcaggcaccctggctgagctagagaagccagtacctgcatcttggtttataaggcttacagctaggaaagctctagttctgggggtgaaagaaaaatattagtttacctgagcacttatttccatgacagggtctaaaatatggaccatgatgtagacacagatttttaattttggaaaaacctccagttactagtgacgaggatagaaagggaagtgcttctctttggctttttcttggttacactgcagtttcaggattgggtgagacagagacaaatgaacccccctctaaagtcatttaactaatagccagcacatcccttccccaaactgtcaattgaaatcttaactgaaagttttactgaataataccaagctaattgctgttgggcacacctggatggctttgcacctggtgttgaacctgctgaagcaggtggatgctcaagattacgtgcaaggaatccctcccatctggtactaaaatttcagtgtgttctgagtgtcttttaaaccaaaatggaaatacagatacagggctgtagtattcagtaatgtgtctgctccttgttgggcagacaccagcggtgtgcagggagagaccaagtaccatctttatctacacttgggctggcttgtggagaagggctgctttttttcagtcctacattccttcattttttttttcattcttgaattcattgttttgtgggatctaagacccaggggtcatttgagaggtttgacagtatcttttctgaccagttgccacatgacttgcttgaccctgagcctgtggaaatggcatagggaccagtctactacccactgggcctggtgtgtagagggggagagggtagcaaggtgcttctctacgcccatgacttgggagcaggtcttggcctccttcatgagagtctagtgccatgtcctgtcccatgatctggaccctgggactgtcttggcatcttaactgcagtttcaatgaggcagagggcaaagagagaccaagatcagaggggttcattatacccctggctagagaacccagctactgacatgcaagcagcttggggctggctggacacaggtactaggcccattgtttccaggtgaagctttcatcacagaacagtgttgtctccacctggccttagatggcacgccatgattcgggcctggatagactgcctgcgtccttaccactgatctggccaagaatgaggccctcccaacactttcactccctctccaagccttgatgggacctccacttatttaggcctcatgtgctttgaagaagctttgagagccaatgtgtcttccacgggtctcttttttgctacaagtaatcagccccatgtgttctcttaaactgagaattgcacctgggcaattcctgttttctaaggtggtctctgctgctatttaacaacccagagtaggcctctgtgaggcttcagtggcctcagaaaccagagggtccagatagggggcctgcttgggccctctgctgccaactgctcaaacctgctttagctccagccacttgtggcaaacaacctcgtttccttacaaattccagcatgtgactttggtgccgttacttgtgaaaaatctattctgttgtctttgatgtgtccaagaaaattcgtgtagtttacgtaaaaatatctgactcacaagaaagccaactgtatgtcttgtgatgggacagttcataatgtagttgctagaccactttacaaattgttcttgtcaccagatgtgttcagacattgctgtgcaattgttggggagggtagggggaaaggcgagaggagatacttattggtctttttgtttaataccttccccaagaggggacagtctggccaacttgctccagtaatgcaataaagacattgcaataaagt

SEQ ID NO: 3097 - DNA, 4997 bp, Homo sapiens
  source 1..4997: mol_type = genomic DNA
aaccggcctcagccaatcaccacccaccttgcctctcttccctcgccccactccctcctcgcctggctcgcgtgctcccggcactgactcctggagtgcggccagcgcccggatcgtaccattctgattgaggctgggggagagcgcggatggctgattggggagccgaagcctagagagcggtggggagacgtgaaagtcgagatggagagcagctttttgaacatgttctcaggcacttgacagaatcccgcgcgatgtacaatacggtgtggagtatggaccgcgatgacgcagactggagggaggtgatgatgccctattcgacagaactgatattttatattgaaatggatcctccagctcttccaccaaagccacctaagccaatgacttcagcagttccaaatggaatgaaggacagttctgtttctcttcaggatgcagaatggtactggggggatatttcaagggaggaggtaaatgacaaattgcgggatatgccagatgggaccttcttggtccgagatgcctcaacaaaaatgcagggagattatactttgactttgcggaagggaggcaataataagttaataaagatctatcaccgggatggtaaatatggcttttctgatcctctgacatttaattccgtggtggagctcattaaccactatcaccatgaatctcttgctcagtacaatcccaaacttgatgtgaagctgatgtacccagtgtccagataccaacaggatcagttggtaaaagaagataatattgatgcagtaggtaaaaaactgcaagaataccactctcagtatcaggagaagagtaaagagtatgataggctgtatgaagaatatactagaacatcccaggaaatacagatgaagaggactgcaatagaagcttttaatgaaacaattaaaatatttgaagagcagtgtcacacacaagaacaacatagcaaagaatatattgagcgatttcgcagagaggggaatgaaaaggagattgaacgatggctcaatcacaaaggagtgagacagaaacgcctgaatgtctggctgggaattaagaatgaggatgctgatgagaactattttatcaatgaggaagatgaaaacctgccccattatgatgagaaaacctggtttgttgaggatatcaatcgagtacaagcagaggacttgctttatgggaaacctgatggtgcattcttaattcgtgagagtagcaagaaaggatgctatgcttgctctgtggtggccgatggggaagtgaagcactgtgtgatctacagcactgctcggggctatggctttgcagagccctacaacctgtacagctctctgaaggagctagtgctccattaccagcagacatccttggttcagcacaacgactccctcaacgtcaggcttgcctaccctgttcatgcacagatgccctcgctttgcagataaagaggaagtgggaagagaggtggttctctggcatttttttctacagtttttattagactacgatgagggcattctttctacatagactgcttgttttgcacaagaagtgattttgtgaatgtgaagtggagaggccgagcagcagccggccgggatgggggcattagaggcctgaggttctctaggactcagccatgccgctgcactgacatactaagctggaagcagatgttttttttgaaagtctgtttcattggggtttttgttttgtttagccagacaccctcaacagaatattaggcttgatggttatagcgggtggggttgtatttggaagcctctgaagagaccatgtctttttaaaatctaactcttgagagtgcagcaggggcatggctctgctgggagttgtgttttgctttggcagtctctcttccccccacgaagaaggctgtttaggttttgtgatagaatgggatttgatgaaaaagacaaccaaaggaaaatggggaggcttgggatttcatttaaataatctaagccaagatgataaaaaaaaccttcaactgaaggtattttgtttcttaccaacataatttaggcttcagcatctcaccagcccctccctctgaagaagtattatgttcagaagccaacaaaacagtttgttgccagaccaatgtttgatgggaaaacgtggcactcatagttgaatgtatacttctgtaccaaaacttgaacataaaaagactagaatttgtgagttttagcaaacgctaaaattgatcactgtaactaaccccttctgtccttcctgcctgtttctctgagatgaggaatagcattctttttgtggggatggtgagctttgaatcataaaatgaagttggtgcttgtatggtgtttccttagcctaaagaatgatctgttgtttgaaacctttgtaacttgtttgtatgagtaaagaaaaggtgcaatgcagtgcttttagatggcttgatataccaaataacaatatagaacaacattattatatgtgcttccccaagtttaaaggccctgcagaaatagtaaacatggtttaatttcccttcatttccccctcctttgctggatggggttttgggagctataggttgctaaggaggggagtcagattgtggtcaggtgcctcagtaaatcacagacccaggggccctgtggtccagggtgagagtcacaccacattacacatgtgcttccatacagtggtttctgaagcttttgcagggagagaagatggcttagtgtttagactgttagtagaagccatctggaagcttttctctttgcctttttttgtgatcctgccattaaggctatgtgcagtctgccctcctgctccagtggccttgattttaggccaggaatcttctgctccatgtggcttaagccttccagctgagtgaagctaggcaaatggagtgggggcaggcatctattcctgcccccatcatgccccacacccatcagtcaacactcatttgacaaatagagtccagctgcctctgagccaatcctgggaccataataggctcagagtgagtcagctgtttgaacccaaagctgtgcagtcaggcaccctggctgagctagagaagccagtacctgcatcttggtttataaggcttacagctaggaaagctctagttctgggggtgaaagaaaaatattagtttacctgagcacttatttccatgacagggtctaaaatatggaccatgatgtagacacagatttttaattttggaaaaacctccagttactagtgacgaggatagaaagggaagtgcttctctttggctttttcttggttacactgcagtttcaggattgggtgagacagagacaaatgaacccccctctaaagtcatttaactaatagccagcacatcccttccccaaactgtcaattgaaatcttaactgaaagttttactgaataataccaagctaattgctgttgggcacacctggatggctttgcacctggtgttgaacctgctgaagcaggtggatgctcaagattacgtgcaaggaatccctcccatctggtactaaaatttcagtgtgttctgagtgtcttttaaaccaaaatggaaatacagatacagggctgtagtattcagtaatgtgtctgctccttgttgggcagacaccagcggtgtgcagggagagaccaagtaccatctttatctacacttgggctggcttgtggagaagggctgctttttttcagtcctacattccttcattttttttttcattcttgaattcattgttttgtgggatctaagacccaggggtcatttgagaggtttgacagtatcttttctgaccagttgccacatgacttgcttgaccctgagcctgtggaaatggcatagggaccagtctactacccactgggcctggtgtgtagagggggagagggtagcaaggtgcttctctacgcccatgacttgggagcaggtcttggcctccttcatgagagtctagtgccatgtcctgtcccatgatctggaccctgggactgtcttggcatcttaactgcagtttcaatgaggcagagggcaaagagagaccaagatcagaggggttcattatacccctggctagagaacccagctactgacatgcaagcagcttggggctggctggacacaggtactaggcccattgtttccaggtgaagctttcatcacagaacagtgttgtctccacctggccttagatggcacgccatgattcgggcctggatagactgcctgcgtccttaccactgatctggccaagaatgaggccctcccaacactttcactccctctccaagccttgatgggacctccacttatttaggcctcatgtgctttgaagaagctttgagagccaatgtgtcttccacgggtctcttttttgctacaagtaatcagccccatgtgttctcttaaactgagaattgcacctgggcaattcctgttttctaaggtggtctctgctgctatttaacaacccagagtaggcctctgtgaggcttcagtggcctcagaaaccagagggtccagatagggggcctgcttgggccctctgctgccaactgctcaaacctgctttagctccagccacttgtggcaaacaacctcgtttccttacaaattccagcatgtgactttggtgccgttacttgtgaaaaatctattctgttgtctttgatgtgtccaagaaaattcgtgtagtttacgtaaaaatatctgactcacaagaaagccaactgtatgtcttgtgatgggacagttcataatgtagttgctagaccactttacaaattgttcttgtcaccagatgtgttcagacattgctgtgcaattgttggggagggtagggggaaaggcgagaggagatacttattggtctttttgtttaataccttccccaagaggggacagtctggccaacttgctccagtaatgcaataaagacattgcaataaagt

SEQ ID NO: 3098 - DNA, 5019 bp, Homo sapiens
  source 1..5019: mol_type = genomic DNA
acagaatcccggtacatcgaggcgggacggcgtggaaggggcggtggtgatgcctgctgtcccccctcccggcgcggttgggtggcgcctcagcggcgcgatgtacaatacggtgtggagtatggaccgcgatgacgcagactggagggaggtgatgatgccctattcgacagaactgatattttatattgaaatggatcctccagctcttccaccaaagccacctaagccaatgacttcagcagttccaaatggaatgaaggacagttctgtttctcttcaggatgcagaatggtactggggggatatttcaagggaggaggtaaatgacaaattgcgggatatgccagatgggaccttcttggtccgagatgcctcaacaaaaatgcagggagattatactttgactttgcggaagggaggcaataataagttaataaagatctatcaccgggatggtaaatatggcttttctgatcctctgacatttaattccgtggtggagctcattaaccactatcaccatgaatctcttgctcagtacaatcccaaacttgatgtgaagctgatgtacccagtgtccagataccaacaggatcagttggtaaaagaagataatattgatgcagtaggtaaaaaactgcaagaataccactctcagtatcaggagaagagtaaagagtatgataggctgtatgaagaatatactagaacatcccaggaaatacagatgaagaggactgcaatagaagcttttaatgaaacaattaaaatatttgaagagcagtgtcacacacaagaacaacatagcaaagaatatattgagcgatttcgcagagaggggaatgaaaaggagattgaacgaattatgatgaattatgataaattgaaatcacgtctgggtgagattcatgatagcaaaatgcgtctagagcaggatttgaagaatcaagctttggacaaccgagaaatagataaaaaaatgaatagcatcaaacctgacctgatccagctgcgaaagatccgagatcaacaccttgtatggctcaatcacaaaggagtgagacagaaacgcctgaatgtctggctgggaattaagaatgaggatgctgatgagaactattttatcaatgaggaagatgaaaacctgccccattatgatgagaaaacctggtttgttgaggatatcaatcgagtacaagcagaggacttgctttatgggaaacctgatggtgcattcttaattcgtgagagtagcaagaaaggatgctatgcttgctctgtggtggccgatggggaagtgaagcactgtgtgatctacagcactgctcggggctatggctttgcagagccctacaacctgtacagctctctgaaggagctagtgctccattaccagcagacatccttggttcagcacaacgactccctcaacgtcaggcttgcctaccctgttcatgcacagatgccctcgctttgcagataaagaggaagtgggaagagaggtggttctctggcatttttttctacagtttttattagactacgatgagggcattctttctacatagactgcttgttttgcacaagaagtgattttgtgaatgtgaagtggagaggccgagcagcagccggccgggatgggggcattagaggcctgaggttctctaggactcagccatgccgctgcactgacatactaagctggaagcagatgttttttttgaaagtctgtttcattggggtttttgttttgtttagccagacaccctcaacagaatattaggcttgatggttatagcgggtggggttgtatttggaagcctctgaagagaccatgtctttttaaaatctaactcttgagagtgcagcaggggcatggctctgctgggagttgtgttttgctttggcagtctctcttccccccacgaagaaggctgtttaggttttgtgatagaatgggatttgatgaaaaagacaaccaaaggaaaatggggaggcttgggatttcatttaaataatctaagccaagatgataaaaaaaaccttcaactgaaggtattttgtttcttaccaacataatttaggcttcagcatctcaccagcccctccctctgaagaagtattatgttcagaagccaacaaaacagtttgttgccagaccaatgtttgatgggaaaacgtggcactcatagttgaatgtatacttctgtaccaaaacttgaacataaaaagactagaatttgtgagttttagcaaacgctaaaattgatcactgtaactaaccccttctgtccttcctgcctgtttctctgagatgaggaatagcattctttttgtggggatggtgagctttgaatcataaaatgaagttggtgcttgtatggtgtttccttagcctaaagaatgatctgttgtttgaaacctttgtaacttgtttgtatgagtaaagaaaaggtgcaatgcagtgcttttagatggcttgatataccaaataacaatatagaacaacattattatatgtgcttccccaagtttaaaggccctgcagaaatagtaaacatggtttaatttcccttcatttccccctcctttgctggatggggttttgggagctataggttgctaaggaggggagtcagattgtggtcaggtgcctcagtaaatcacagacccaggggccctgtggtccagggtgagagtcacaccacattacacatgtgcttccatacagtggtttctgaagcttttgcagggagagaagatggcttagtgtttagactgttagtagaagccatctggaagcttttctctttgcctttttttgtgatcctgccattaaggctatgtgcagtctgccctcctgctccagtggccttgattttaggccaggaatcttctgctccatgtggcttaagccttccagctgagtgaagctaggcaaatggagtgggggcaggcatctattcctgcccccatcatgccccacacccatcagtcaacactcatttgacaaatagagtccagctgcctctgagccaatcctgggaccataataggctcagagtgagtcagctgtttgaacccaaagctgtgcagtcaggcaccctggctgagctagagaagccagtacctgcatcttggtttataaggcttacagctaggaaagctctagttctgggggtgaaagaaaaatattagtttacctgagcacttatttccatgacagggtctaaaatatggaccatgatgtagacacagatttttaattttggaaaaacctccagttactagtgacgaggatagaaagggaagtgcttctctttggctttttcttggttacactgcagtttcaggattgggtgagacagagacaaatgaacccccctctaaagtcatttaactaatagccagcacatcccttccccaaactgtcaattgaaatcttaactgaaagttttactgaataataccaagctaattgctgttgggcacacctggatggctttgcacctggtgttgaacctgctgaagcaggtggatgctcaagattacgtgcaaggaatccctcccatctggtactaaaatttcagtgtgttctgagtgtcttttaaaccaaaatggaaatacagatacagggctgtagtattcagtaatgtgtctgctccttgttgggcagacaccagcggtgtgcagggagagaccaagtaccatctttatctacacttgggctggcttgtggagaagggctgctttttttcagtcctacattccttcattttttttttcattcttgaattcattgttttgtgggatctaagacccaggggtcatttgagaggtttgacagtatcttttctgaccagttgccacatgacttgcttgaccctgagcctgtggaaatggcatagggaccagtctactacccactgggcctggtgtgtagagggggagagggtagcaaggtgcttctctacgcccatgacttgggagcaggtcttggcctccttcatgagagtctagtgccatgtcctgtcccatgatctggaccctgggactgtcttggcatcttaactgcagtttcaatgaggcagagggcaaagagagaccaagatcagaggggttcattatacccctggctagagaacccagctactgacatgcaagcagcttggggctggctggacacaggtactaggcccattgtttccaggtgaagctttcatcacagaacagtgttgtctccacctggccttagatggcacgccatgattcgggcctggatagactgcctgcgtccttaccactgatctggccaagaatgaggccctcccaacactttcactccctctccaagccttgatgggacctccacttatttaggcctcatgtgctttgaagaagctttgagagccaatgtgtcttccacgggtctcttttttgctacaagtaatcagccccatgtgttctcttaaactgagaattgcacctgggcaattcctgttttctaaggtggtctctgctgctatttaacaacccagagtaggcctctgtgaggcttcagtggcctcagaaaccagagggtccagatagggggcctgcttgggccctctgctgccaactgctcaaacctgctttagctccagccacttgtggcaaacaacctcgtttccttacaaattccagcatgtgactttggtgccgttacttgtgaaaaatctattctgttgtctttgatgtgtccaagaaaattcgtgtagtttacgtaaaaatatctgactcacaagaaagccaactgtatgtcttgtgatgggacagttcataatgtagttgctagaccactttacaaattgttcttgtcaccagatgtgttcagacattgctgtgcaattgttggggagggtagggggaaaggcgagaggagatacttattggtctttttgtttaataccttccccaagaggggacagtctggccaacttgctccagtaatgcaataaagacattgcaataaagtaa

SEQ ID NO: 3099 - DNA, 5174 bp, Homo sapiens
  source 1..5174: mol_type = genomic DNA
aaccggcctcagccaatcaccacccaccttgcctctcttccctcgccccactccctcctcgcctggctcgcgtgctcccggcactgactcctggagtgcggccagcgcccggatcgtaccattctgattgaggctgggggagagcgcggatggctgattggggagccgaagcctagagagcggtggggagacgtgaaagtcgagatggagagcagctttttgaacatgttctcaggcacttgacagaatcccgcgcgatgtacaatacggtgtggagtatggaccgcgatgacgcagactggagggaggtgatgatgccctattcgacagaactgatattttatattgaaatggatcctccagctcttccaccaaagccacctaagccaatgacttcagcagttccaaatggaatgaaggacagttctgtttctcttcaggatgcagaatggtactggggggatatttcaagggaggaggtaaatgacaaattgcgggatatgccagatgggaccttcttggtccgagatgcctcaacaaaaatgcagggagattatactttgactttgcggaagggaggcaataataagttaataaagatctatcaccgggatggtaaatatggcttttctgatcctctgacatttaattccgtggtggagctcattaaccactatcaccatgaatctcttgctcagtacaatcccaaacttgatgtgaagctgatgtacccagtgtccagataccaacaggatcagttggtaaaagaagataatattgatgcagtaggtaaaaaactgcaagaataccactctcagtatcaggagaagagtaaagagtatgataggctgtatgaagaatatactagaacatcccaggaaatacagatgaagaggactgcaatagaagcttttaatgaaacaattaaaatatttgaagagcagtgtcacacacaagaacaacatagcaaagaatatattgagcgatttcgcagagaggggaatgaaaaggagattgaacgaattatgatgaattatgataaattgaaatcacgtctgggtgagattcatgatagcaaaatgcgtctagagcaggatttgaagaatcaagctttggacaaccgagaaatagataaaaaaatgaatagcatcaaacctgacctgatccagctgcgaaagatccgagatcaacaccttgtatggctcaatcacaaaggagtgagacagaaacgcctgaatgtctggctgggaattaagaatgaggatgctgatgagaactattttatcaatgaggaagatgaaaacctgccccattatgatgagaaaacctggtttgttgaggatatcaatcgagtacaagcagaggacttgctttatgggaaacctgatggtgcattcttaattcgtgagagtagcaagaaaggatgctatgcttgctctgtggtggccgatggggaagtgaagcactgtgtgatctacagcactgctcggggctatggctttgcagagccctacaacctgtacagctctctgaaggagctagtgctccattaccagcagacatccttggttcagcacaacgactccctcaacgtcaggcttgcctaccctgttcatgcacagatgccctcgctttgcagataaagaggaagtgggaagagaggtggttctctggcatttttttctacagtttttattagactacgatgagggcattctttctacatagactgcttgttttgcacaagaagtgattttgtgaatgtgaagtggagaggccgagcagcagccggccgggatgggggcattagaggcctgaggttctctaggactcagccatgccgctgcactgacatactaagctggaagcagatgttttttttgaaagtctgtttcattggggtttttgttttgtttagccagacaccctcaacagaatattaggcttgatggttatagcgggtggggttgtatttggaagcctctgaagagaccatgtctttttaaaatctaactcttgagagtgcagcaggggcatggctctgctgggagttgtgttttgctttggcagtctctcttccccccacgaagaaggctgtttaggttttgtgatagaatgggatttgatgaaaaagacaaccaaaggaaaatggggaggcttgggatttcatttaaataatctaagccaagatgataaaaaaaaccttcaactgaaggtattttgtttcttaccaacataatttaggcttcagcatctcaccagcccctccctctgaagaagtattatgttcagaagccaacaaaacagtttgttgccagaccaatgtttgatgggaaaacgtggcactcatagttgaatgtatacttctgtaccaaaacttgaacataaaaagactagaatttgtgagttttagcaaacgctaaaattgatcactgtaactaaccccttctgtccttcctgcctgtttctctgagatgaggaatagcattctttttgtggggatggtgagctttgaatcataaaatgaagttggtgcttgtatggtgtttccttagcctaaagaatgatctgttgtttgaaacctttgtaacttgtttgtatgagtaaagaaaaggtgcaatgcagtgcttttagatggcttgatataccaaataacaatatagaacaacattattatatgtgcttccccaagtttaaaggccctgcagaaatagtaaacatggtttaatttcccttcatttccccctcctttgctggatggggttttgggagctataggttgctaaggaggggagtcagattgtggtcaggtgcctcagtaaatcacagacccaggggccctgtggtccagggtgagagtcacaccacattacacatgtgcttccatacagtggtttctgaagcttttgcagggagagaagatggcttagtgtttagactgttagtagaagccatctggaagcttttctctttgcctttttttgtgatcctgccattaaggctatgtgcagtctgccctcctgctccagtggccttgattttaggccaggaatcttctgctccatgtggcttaagccttccagctgagtgaagctaggcaaatggagtgggggcaggcatctattcctgcccccatcatgccccacacccatcagtcaacactcatttgacaaatagagtccagctgcctctgagccaatcctgggaccataataggctcagagtgagtcagctgtttgaacccaaagctgtgcagtcaggcaccctggctgagctagagaagccagtacctgcatcttggtttataaggcttacagctaggaaagctctagttctgggggtgaaagaaaaatattagtttacctgagcacttatttccatgacagggtctaaaatatggaccatgatgtagacacagatttttaattttggaaaaacctccagttactagtgacgaggatagaaagggaagtgcttctctttggctttttcttggttacactgcagtttcaggattgggtgagacagagacaaatgaacccccctctaaagtcatttaactaatagccagcacatcccttccccaaactgtcaattgaaatcttaactgaaagttttactgaataataccaagctaattgctgttgggcacacctggatggctttgcacctggtgttgaacctgctgaagcaggtggatgctcaagattacgtgcaaggaatccctcccatctggtactaaaatttcagtgtgttctgagtgtcttttaaaccaaaatggaaatacagatacagggctgtagtattcagtaatgtgtctgctccttgttgggcagacaccagcggtgtgcagggagagaccaagtaccatctttatctacacttgggctggcttgtggagaagggctgctttttttcagtcctacattccttcattttttttttcattcttgaattcattgttttgtgggatctaagacccaggggtcatttgagaggtttgacagtatcttttctgaccagttgccacatgacttgcttgaccctgagcctgtggaaatggcatagggaccagtctactacccactgggcctggtgtgtagagggggagagggtagcaaggtgcttctctacgcccatgacttgggagcaggtcttggcctccttcatgagagtctagtgccatgtcctgtcccatgatctggaccctgggactgtcttggcatcttaactgcagtttcaatgaggcagagggcaaagagagaccaagatcagaggggttcattatacccctggctagagaacccagctactgacatgcaagcagcttggggctggctggacacaggtactaggcccattgtttccaggtgaagctttcatcacagaacagtgttgtctccacctggccttagatggcacgccatgattcgggcctggatagactgcctgcgtccttaccactgatctggccaagaatgaggccctcccaacactttcactccctctccaagccttgatgggacctccacttatttaggcctcatgtgctttgaagaagctttgagagccaatgtgtcttccacgggtctcttttttgctacaagtaatcagccccatgtgttctcttaaactgagaattgcacctgggcaattcctgttttctaaggtggtctctgctgctatttaacaacccagagtaggcctctgtgaggcttcagtggcctcagaaaccagagggtccagatagggggcctgcttgggccctctgctgccaactgctcaaacctgctttagctccagccacttgtggcaaacaacctcgtttccttacaaattccagcatgtgactttggtgccgttacttgtgaaaaatctattctgttgtctttgatgtgtccaagaaaattcgtgtagtttacgtaaaaatatctgactcacaagaaagccaactgtatgtcttgtgatgggacagttcataatgtagttgctagaccactttacaaattgttcttgtcaccagatgtgttcagacattgctgtgcaattgttggggagggtagggggaaaggcgagaggagatacttattggtctttttgtttaataccttccccaagaggggacagtctggccaacttgctccagtaatgcaataaagacattgcaataaagt

SEQ ID NO: 3100 - DNA, 1884 bp, Homo sapiens
  source 1..1884: mol_type = genomic DNA
gggcagttggtgcggtcgggttggttcttacaccccggcgggagcgcccagacaagccgagctgactggacttctccggccggccccattcccgaggctgcggcagcttcggttccgagaccgaccggagaggagcccgagtcccggcctctgggggattcgctctctgcagaccagtgggaccccgaaacttgaacgcaatctccagcccccttttttgccttcctttgtcacttgcccgggtttctcccaacgtgttcttttttttcctcttcattctccctccttcgaaggacacaaaagtggcttccgcggaaagatttggaggcggtgggagcttttctccccggagagcgactgtgtagaaaggatttttgggaagccgctttttaacacctctgctctccgtcccccaagcctctgtgtaatcctctgaggagaaaagcccatagcttgaaagttcgggggcattttgttgtgttctgtaggagagagggggaggaccctgttcgggtagtttggccggactggtactggccgttggaaaacccgaagtacatttccgtgtggaacttttgcagatatatatttttagatttttaaataccagataaaaaatatatgccttctatatatctcctggcgacctgcccctgacagcgcgatgtacaatacggtgtggagtatggaccgcgatgacgcagactggagggaggtgatgatgccctattcgacagaactgatattttatattgaaatggatcctccagctcttccaccaaagccacctaagccaatgacttcagcagttccaaatggaatgaaggacagttctgtttctcttcaggatgcagaatggtactggggggatatttcaagggaggaggtaaatgacaaattgcgggatatgccagatgggaccttcttggtccgagatgcctcaacaaaaatgcagggagattatactttgactttgcggaagggaggcaataataagttaataaagatctatcaccgggatggtaaatatggcttttctgatcctctgacatttaattccgtggtggagctcattaaccactatcaccatgaatctcttgctcagtacaatcccaaacttgatgtgaagctgatgtacccagtgtccagataccaacaggatcagttggtaaaagaagataatattgatgcagtaggtaaaaaactgcaagaataccactctcagtatcaggagaagagtaaagagtatgataggctgtatgaagaatatactagaacatcccaggaaatacagatgaagaggactgcaatagaagcttttaatgaaacaattaaaatatttgaagagcagtgtcacacacaagaacaacatagcaaagaatatattgagcgatttcgcagagaggggaatgaaaaggagattgaacgatggctcaatcacaaaggagtgagacagaaacgcctgaatgtctggctgggaattaagaatgaggatgctgatgagaactattttatcaatgaggaagatgaaaacctgccccattatgatgagaaaacctggtttgttgaggatatcaatcgagtacaagcagaggacttgctttatgggaaacctgatggtgcattcttaattcgtgagagtagcaagaaaggatgctatgcttgctctgtggtggccgatggggaagtgaagcactgtgtgatctacagcactgctcggggctatggctttgcagagccctacaacctgtacagctctctgaaggagctagtgctccattaccagcagacatccttggttcagcacaacgactccctcaacgtcaggcttgcctaccctgttcatgcacagatgccctcgctttgcagataaagaggaagtgg

SEQ ID NO: 3101 - DNA, 753 bp, Homo sapiens
  source 1..753: mol_type = genomic DNA
ctgattgaggctgggggagagcgcggatggctgattggggagccgaagcctagagagcggtggggagacgtgaaagtcgagatggagagcagctttttgaacatgttctcaggcacttgacagaatcccgcgcgatgtacaatacggtgtggagtatggaccgcgatgacgcagactggagggaggtgatgatgccctattcgacagaactgatattttatattgaaatggatcctccagctcttccaccaaagccacctaagccaatgacttcagcagttccaaatggaatgaaggacagttctgtttctcttcaggatgcagaatggtactggggggatatttcaagggaggaggtaaatgacaaattgcgggatatgccagatgggaccttcttggtccgagatgcctcaacaaaaatgcagggagattatactttgactttgcggaagggaggcaataataagttaataaagatctatcaccgggatggtaaatatggcttttctgatcctctgacatttaattccgtggtggagctcattaaccactatcaccatgaatctcttgctcagtacaatcccaaacttgatgtgaagctgatgtacccagtgtccagataccaacaggatcagttggtaaaagaagataatattgatgcagtaggtaaaaaactgcaagaataccactctcagtatcaggagaagagtaaagagtatgataggctgtatgaagaatatactagaacatccc

SEQ ID NO: 3102 - DNA, 1553 bp, Homo sapiens
  source 1..1553: mol_type = genomic DNA
agaagctccctgtgcccatggggccatctcggcttgtccgtggccctcggccccagggcatgcgttccccctaccgcaggccaggtatgggctggcccaggccccgatttcccaggatgttcaagtgtagccgcagaagatatcaacagggtctccgaggtcgaactgccagcagtgcagccatcaatcctgccaccagggccatgggtatcaacaacacccacactgacaccaccatagtgtggatcttcccacctcaagctcttccaccaaagccacctaagccaatgacttcagcagttccaaatggaatgaaggacagttctgtttctcttcaggatgcagaatggtactggggggatatttcaagggaggaggtaaatgacaaattgcgggatatgccagatgggaccttcttggtccgagatgcctcaacaaaaatgcagggagattatactttgactttgcggaagggaggcaataataagttaataaagatctatcaccgggatggtaaatatggcttttctgatcctctgacatttaattccgtggtggagctcattaaccactatcaccatgaatctcttgctcagtacaatcccaaacttgatgtgaagctgatgtacccagtgtccagataccaacaggatcagttggtaaaagaagataatattgatgcagtaggtaaaaaactgcaagaataccactctcagtatcaggagaagagtaaagagtatgataggctgtatgaagaatatactagaacatcccaggaaatacagatgaagaggactgcaatagaagcttttaatgaaacaattaaaatatttgaagagcagtgtcacacacaagaacaacatagcaaagaatatattgagcgatttcgcagagaggggaatgaaaaggagattgaacgaattatgatgaattatgataaattgaaatcacgtctgggtgagattcatgatagcaaaatgcgtctagagcaggatttgaagaatcaagctttggacaaccgagaaatagataaaaaaatgaatagcatcaaacctgacctgatccagctgcgaaagatccgagatcaacaccttgtatggctcaatcacaaaggagtgagacagaaacgcctgaatgtctggctgggaattaagaatgaggatgctgatgagaactattttatcaatgaggaagatgaaaacctgccccattatgatgagaaaacctggtttgttgaggatatcaatcgagtacaagcagaggacttgctttatgggaaacctgatggtgcattcttaattcgtgagagtagcaagaaaggatgctatgcttgctctgtggtggccgatggggaagtgaagcactgtgtgatctacagcactgctcggggctatggctttgcagagccctacaacctgtacagctctctgaaggagctagtgctccattaccagcagacatccttggttcagcacaacgactccctcaacgtcaggcttgcctaccctgttcatgcacagatgccctcgctttgcagataaagaggaagtggg

SEQ ID NO: 3103 - DNA, 4438 bp, Homo sapiens
  source 1..4438: mol_type = genomic DNA
aagcttactcagcgcatctgctacagcattttatcttcccaagagccccatgaggcgatgacccaggatgcagccaggggccacgacatgcacggaggaccgcatccagcatgccctggaacgctgcctgcatggactcagcctcagccgccgctccacctcctggtcagctgggctgtgtctgaactgctggagcctgcaggagctggtcagcagggacccgggccacttccttatcctccttgagcagatcctgcagaagacccgagaggtccaggagaagggcacctacgacctgctcaccccgctggccctgctcttctattccactgttctttgtacaccacacttcccaccagactcggatctccttctgaaggcagccagcacctaccaccggttcctgacctggcctgttccttactgcagcatctgccaggagctgctcaccttcattgatgctgaactcaaggccccagggatctcctaccagagactggtgagggctgagcagggcctgcccatcaggagtcaccgcagctccaccgtcaccgtgctgctgctgaacccagtggaagtgcaggccgagttccttgctgtagccaataagctgagtacgcccggacactcgcctcacagtgcctacaccaccctgctcctgcacgccttccaggccacctttggggcccactgtgacgtcccgggcctgcactgcaggctacaggccaagaccctggcagagcttgaggacatcttcacggagaccgcagaggcacaggagctggcatctggcatcggggatgctgcagaggcccggcggtggctcaggaccaagctgcaggcggtgggagaaaaagctggcttccctggggtgttagacactgcaaaaccagggaagctccacaccatccccatccctgtcgccaggtgctacacctacagctggagccaggacagctttgacatcctgcaggaaatcctgctcaaggaacaggagctactccagccagggatcctgggagatgatgaagaggaggaagaggaggaggaggaggtggaggaggacttggaaactgacgggcactgtgccgagagagattccctgctctccaccagctctttggcgtcccatgactccaccttgtcccttgcatcctcccaggcctcggggccggccctctcgcgccatctgctgacttcctttgtctcaggcctctctgatggcatggacagcggctacgtggaggacagcgaggagagctcctccgagtggccttggaggcgtggcagccaggaacgccgaggccaccgcaggcctgggcagaagttcatcaggatctataaactcttcaagagcaccagccagctggtactgcggagggactctcggagcctggagggcagctcggacacggccctgcccctgaggcgggcagggagcctctgcagccccctggacgaaccagtatcacccccttcccgggcccagcgctcccgctccctgccccagcccaaactcggtacccagctgcccagctggcttctggcccctgcttcacgcccccagcgccgccgccccttcctgagtggagatgaggatcccaaggcttccacgctacgtgttgtggtctttggctccgatcggatttcagggaaggtggctcgggcgtacagcaaccttcggcggctggagaacaatcgcccactcctcacacggttcttcaaacttcagttcttctacgtgcctgtgaagcgaagtcatgggaccagccctggtgcctgtccaccccctcggagccagacgccctcacccccgacagactcccctaggcacgccagccctggagagctgggcaccaccccatgggaggagagcaccaatgacatctcccactacctcggcatgctggacccctggtatgagcgcaatgtactgggcctcatgcacctgccccctgaagtcctgtgccagcagtccctgaaggctgaagcccaggccctggagggctccccaacccagctgcccatcctggctgacatgctactctactactgccgctttgccgccagaccggtgctgctgcaagtctatcagaccgagctgaccttcatcactggggagaagacgacagagatcttcatccactccttggagctgggtcactccgctgccacacgtgccatcaaggcgtcaggtcctggcagcaagcggctgggcatcgatggcgaccgggaggctgttcctctaacactacagattatttacagcaagggggccatcagtggacgaagtcgctggagcaacctggagaaggtctgtacctccgtgaacctcaacaaggcctgccggaagcaggaggagctggattccagcatggaggccctgacgctaaacctgacagaagtggtgaaaaggcagaactccaaatccaagaagggctttaaccagattagcacatcgcagatcaaagtggacaaggtgcagatcatcggctccaacagctgcccctttgctgtgtgcctggaccaggatgagagaaagatcctgcagagtgtagtcagatgtgaggtctcaccgtgctacaagccagagaagagcgacctctcctcaccaccccagacgcctcctgacctgccggcccaggccgcacctgatctctgctcccttctctgcctgcccatcatgactttcagtggagctctgccctagtgtgggcccagcgccagactggacagaagccctggggcaacctcctcggccacccctccaggacagtccctctctgtggagaactgaatggccctgtgcagagccatagtcccactgtgggtcctgcaatgagcaggggctgggagtagagggtttctggggcctcagggttctgggaaagcaacagctatcagagagagaagggccagaccccatagcctcttagattcctggcagtagaaggagaaggatgggtaaattgacctctgaagtccctgaccattagcatggtctaggatcctttctagaaggaagatctgaggctctggtgctcagggggatggcttgggccttttctctcaaccttggctgagcctaccccttactttgccaaagacttgaggaccctgtatgtctggagttcagtcccctcctctgtggggctcaggtgattgaaatgtggatgaaacatttctctacttcaagaccacctctccctgcaaacaccacacacacatggcatgcatgtacgcacatgcgcacacacacacgcacacacctcaataatttctctcaagtttcctgagtctccagaaaaacagcactaacgctggacctgtctactctcagaacccggcacagattctctcttgatctccttttggaatctgagattcttagaagacaggatagggttaaatttagtagcagctcagttctagctaaatcactagaggaagttaattaactttaagccttcatttctccagcactaaaatggagtggagagttggggtggaaataagacatccttaaaaggttaaattgtctgcaaagcacctagcccagtgccgagctcccagtaggtgttcagtaaagcttagtgcctgactttctgaacactgattcctcctgtttggagtcactgggatactctcattgccgttgggatgttcctcactccttcccagttcgtggctgaggcagaacccagactgaagagggaagagacattccagaggaggattgccttcgtcagggtaaggggtgggctgctcaggggccctacccttcacccccttctgtatcagattggccctcccactcccatctcactctgcgtgtacaatcttccatatccgcaagttcactggcactcttctggcacctgggcaagatcccagaacagaggatggagtgactggcctcacagagcttagtgcccgactcaggggaaatgggactggtgcatgggaaatggtcagcctaggataggacacgagagtctgaaattcaaagcaaccagcttgaagtggtttgagaagctggaagcaaacatgggctagagagatagggcagaagtcaagacgaggatctggactgatgtggagaaagtagccacggaagcatgaactgtatcctgcacaaagtccctcttccccgcctcctaattcattatgcccaaaaggccttacgtgaaattccagcccagagtactcatgacttgagagacgtggacagagccagcttctaccttgcctggccgtctctcccctgtcttaatgtctgctcttgctctaagctccagaagagtggcgggccatgtatcttcaatatgtttttgctgtatgggcaggttgtcttattatgtgatcaacagatgtccaggaactaatgagtggaatttaatattattgtcaaataaaacttgatttgtcctatatttaa

SEQ ID NO: 3104 - DNA, 4488 bp, Homo sapiens
  source 1..4488: mol_type = genomic DNA
agatgctgcggctcgccgcgcggctccagctggggcgcggtggtcccgacggtcacccgaatcgcagggagtcgccgctggagaggggctcggcgcccggcggggactgcaggcgatgacccaggatgcagccaggggccacgacatgcacggaggaccgcatccagcatgccctggaacgctgcctgcatggactcagcctcagccgccgctccacctcctggtcagctgggctgtgtctgaactgctggagcctgcaggagctggtcagcagggacccgggccacttccttatcctccttgagcagatcctgcagaagacccgagaggtccaggagaagggcacctacgacctgctcaccccgctggccctgctcttctattccactgttctttgtacaccacacttcccaccagactcggatctccttctgaaggcagccagcacctaccaccggttcctgacctggcctgttccttactgcagcatctgccaggagctgctcaccttcattgatgctgaactcaaggccccagggatctcctaccagagactggtgagggctgagcagggcctgcccatcaggagtcaccgcagctccaccgtcaccgtgctgctgctgaacccagtggaagtgcaggccgagttccttgctgtagccaataagctgagtacgcccggacactcgcctcacagtgcctacaccaccctgctcctgcacgccttccaggccacctttggggcccactgtgacgtcccgggcctgcactgcaggctacaggccaagaccctggcagagcttgaggacatcttcacggagaccgcagaggcacaggagctggcatctggcatcggggatgctgcagaggcccggcggtggctcaggaccaagctgcaggcggtgggagaaaaagctggcttccctggggtgttagacactgcaaaaccagggaagctccacaccatccccatccctgtcgccaggtgctacacctacagctggagccaggacagctttgacatcctgcaggaaatcctgctcaaggaacaggagctactccagccagggatcctgggagatgatgaagaggaggaagaggaggaggaggaggtggaggaggacttggaaactgacgggcactgtgccgagagagattccctgctctccaccagctctttggcgtcccatgactccaccttgtcccttgcatcctcccaggcctcggggccggccctctcgcgccatctgctgacttcctttgtctcaggcctctctgatggcatggacagcggctacgtggaggacagcgaggagagctcctccgagtggccttggaggcgtggcagccaggaacgccgaggccaccgcaggcctgggcagaagttcatcaggatctataaactcttcaagagcaccagccagctggtactgcggagggactctcggagcctggagggcagctcggacacggccctgcccctgaggcgggcagggagcctctgcagccccctggacgaaccagtatcacccccttcccgggcccagcgctcccgctccctgccccagcccaaactcggtacccagctgcccagctggcttctggcccctgcttcacgcccccagcgccgccgccccttcctgagtggagatgaggatcccaaggcttccacgctacgtgttgtggtctttggctccgatcggatttcagggaaggtggctcgggcgtacagcaaccttcggcggctggagaacaatcgcccactcctcacacggttcttcaaacttcagttcttctacgtgcctgtgaagcgaagtcatgggaccagccctggtgcctgtccaccccctcggagccagacgccctcacccccgacagactcccctaggcacgccagccctggagagctgggcaccaccccatgggaggagagcaccaatgacatctcccactacctcggcatgctggacccctggtatgagcgcaatgtactgggcctcatgcacctgccccctgaagtcctgtgccagcagtccctgaaggctgaagcccaggccctggagggctccccaacccagctgcccatcctggctgacatgctactctactactgccgctttgccgccagaccggtgctgctgcaagtctatcagaccgagctgaccttcatcactggggagaagacgacagagatcttcatccactccttggagctgggtcactccgctgccacacgtgccatcaaggcgtcaggtcctggcagcaagcggctgggcatcgatggcgaccgggaggctgttcctctaacactacagattatttacagcaagggggccatcagtggacgaagtcgctggagcaacctggagaaggtctgtacctccgtgaacctcaacaaggcctgccggaagcaggaggagctggattccagcatggaggccctgacgctaaacctgacagaagtggtgaaaaggcagaactccaaatccaagaagggctttaaccagattagcacatcgcagatcaaagtggacaaggtgcagatcatcggctccaacagctgcccctttgctgtgtgcctggaccaggatgagagaaagatcctgcagagtgtagtcagatgtgaggtctcaccgtgctacaagccagagaagagcgacctctcctcaccaccccagacgcctcctgacctgccggcccaggccgcacctgatctctgctcccttctctgcctgcccatcatgactttcagtggagctctgccctagtgtgggcccagcgccagactggacagaagccctggggcaacctcctcggccacccctccaggacagtccctctctgtggagaactgaatggccctgtgcagagccatagtcccactgtgggtcctgcaatgagcaggggctgggagtagagggtttctggggcctcagggttctgggaaagcaacagctatcagagagagaagggccagaccccatagcctcttagattcctggcagtagaaggagaaggatgggtaaattgacctctgaagtccctgaccattagcatggtctaggatcctttctagaaggaagatctgaggctctggtgctcagggggatggcttgggccttttctctcaaccttggctgagcctaccccttactttgccaaagacttgaggaccctgtatgtctggagttcagtcccctcctctgtggggctcaggtgattgaaatgtggatgaaacatttctctacttcaagaccacctctccctgcaaacaccacacacacatggcatgcatgtacgcacatgcgcacacacacacgcacacacctcaataatttctctcaagtttcctgagtctccagaaaaacagcactaacgctggacctgtctactctcagaacccggcacagattctctcttgatctccttttggaatctgagattcttagaagacaggatagggttaaatttagtagcagctcagttctagctaaatcactagaggaagttaattaactttaagccttcatttctccagcactaaaatggagtggagagttggggtggaaataagacatccttaaaaggttaaattgtctgcaaagcacctagcccagtgccgagctcccagtaggtgttcagtaaagcttagtgcctgactttctgaacactgattcctcctgtttggagtcactgggatactctcattgccgttgggatgttcctcactccttcccagttcgtggctgaggcagaacccagactgaagagggaagagacattccagaggaggattgccttcgtcagggtaaggggtgggctgctcaggggccctacccttcacccccttctgtatcagattggccctcccactcccatctcactctgcgtgtacaatcttccatatccgcaagttcactggcactcttctggcacctgggcaagatcccagaacagaggatggagtgactggcctcacagagcttagtgcccgactcaggggaaatgggactggtgcatgggaaatggtcagcctaggataggacacgagagtctgaaattcaaagcaaccagcttgaagtggtttgagaagctggaagcaaacatgggctagagagatagggcagaagtcaagacgaggatctggactgatgtggagaaagtagccacggaagcatgaactgtatcctgcacaaagtccctcttccccgcctcctaattcattatgcccaaaaggccttacgtgaaattccagcccagagtactcatgacttgagagacgtggacagagccagcttctaccttgcctggccgtctctcccctgtcttaatgtctgctcttgctctaagctccagaagagtggcgggccatgtatcttcaatatgtttttgctgtatgggcaggttgtcttattatgtgatcaacagatgtccaggaactaatgagtggaatttaatattattgtcaaataaaacttgatttgtcct

SEQ ID NO: 3105 - DNA, 565 bp, Homo sapiens
  source 1..565: mol_type = genomic DNA
tggtcatctcagttcttttctcaccttgactgcaagatgaaactccttgtgctagctgtgctgctcacagtggccgccgccgacagcggcatcagccctcgggccgtgtggcagttccgcaaaatgatcaagtgcgtgatcccggggagtgaccccttcttggaatacaacaactacggctgctactgtggcttggggggctcaggcacccccgtggatgaactggacaagtgctgccagacacatgacaactgctatgaccaggccaagaagctggacagctgtaaatttctgctggacaacccgtacacccacacctattcatactcgtgctctggctcggcaatcacctgtagcagcaaaaacaaagagtgtgaggccttcatttgcaactgcgaccgcaacgctgccatctgcttttcaaaagctccatataacaaggcacacaagaacctggacaccaagaagtattgtcagagttgaatatcacctctcaaaagcatcacctctatctgcctcatctcacactgtactctccaataaagcaccttgttgaaagacctca

SEQ ID NO: 3106 - DNA, 970 bp, Homo sapiens
  source 1..970: mol_type = genomic DNA
gaaggaaaaagagcaacagatccagggagcattcacctgccctgtctccaaacagccttgtgcctcacctacccccaacctcccagagggagcagctatttaaggggagcaggagtgcagaacaaacaagacggcctggggatacaactctggagtcctctgagagagccaccaaggaggagcaggggagcgacggccggggcagaagttgagaccacccagcagaggagctaggccagtccatctgcatttgtcacccaagaactcttaccatgaagaccctcctactgttggcagtgatcatgatctttggcctactgcaggcccatgggaatttggtgaatttccacagaatgatcaagttgacgacaggaaaggaagccgcactcagttatggcttctacggctgccactgtggcgtgggtggcagaggatcccccaaggatgcaacggatcgctgctgtgtcactcatgactgttgctacaaacgtctggagaaacgtggatgtggcaccaaatttctgagctacaagtttagcaactcggggagcagaatcacctgtgcaaaacaggactcctgcagaagtcaactgtgtgagtgtgataaggctgctgccacctgttttgctagaaacaagacgacctacaataaaaagtaccagtactattccaataaacactgcagagggagcacccctcgttgctgagtcccctcttccctggaaaccttccacccagtgctgaatttccctctctcataccctccctccctaccctaaccaagttccttggccatgcagaaagcatccctcacccatcctagaggccaggcaggagcccttctatacccacccagaatgagacatccagcagatttccagccttctactgctctcctccacctcaactccgtgcttaaccaaagaagctgtactccggggggtctcttctgaataaagcaattagcaaa

SEQ ID NO: 3107 - DNA, 888 bp, Homo sapiens
  source 1..888: mol_type = genomic DNA
gagtcagtgtcagcccgaaggctgaaggaaaaagagcaacagatccagggagcattcacctgccctgtctccaaacagagccaccaaggaggagcaggggagcgacggccggggcagaagttgagaccacccagcagaggagctaggccagtccatctgcatttgtcacccaagaactcttaccatgaagaccctcctactgttggcagtgatcatgatctttggcctactgcaggcccatgggaatttggtgaatttccacagaatgatcaagttgacgacaggaaaggaagccgcactcagttatggcttctacggctgccactgtggcgtgggtggcagaggatcccccaaggatgcaacggatcgctgctgtgtcactcatgactgttgctacaaacgtctggagaaacgtggatgtggcaccaaatttctgagctacaagtttagcaactcggggagcagaatcacctgtgcaaaacaggactcctgcagaagtcaactgtgtgagtgtgataaggctgctgccacctgttttgctagaaacaagacgacctacaataaaaagtaccagtactattccaataaacactgcagagggagcacccctcgttgctgagtcccctcttccctggaaaccttccacccagtgctgaatttccctctctcataccctccctccctaccctaaccaagttccttggccatgcagaaagcatccctcacccatcctagaggccaggcaggagcccttctatacccacccagaatgagacatccagcagatttccagccttctactgctctcctccacctcaactccgtgcttaaccaaagaagctgtactccggggggtctcttctgaataaagcaattagcaaatcatgt

SEQ ID NO: 3108 - DNA, 2672 bp, Homo sapiens
  source 1..2672: mol_type = genomic DNA
gggcagcctgcatggaaagggactgccagcatctgcctccactgctctgtgctgggatcatggaacttgcactgctgtgtgggctggtggtgatggctggtgtgattccaatccagggcgggatcctgaacctgaacaagatggtcaagcaagtgactgggaaaatgcccatcctctcctactggccctacggctgtcactgcggactaggtggcagaggccaacccaaagatgccacggactggtgctgccagacccatgactgctgctatgaccacctgaagacccaggggtgcagcatctacaaggactattacagatacaacttttcccaggggaacatccactgctctgacaagggaagctggtgtgagcagcagctgtgtgcctgtgacaaggaggtggccttctgcctgaagcgcaacctggacacctaccagaagcgactgcgtttctactggcggccccactgccgggggcagacccctgggtgctagaagcccacaccctctaccctgttcctcagcatggagctctggcatccccacctcagtatctaacctgaaccagcctggcttttcaaacactccggggggaggtagtcccagcctcccccggaaccctctaccaatgccttctgaccttctgaagctttccgaatcctcccagttgaggcagtagctgtgtcctctgagggtggatgggaatcttgggagaagcccaagcaagggagccctcagaggtggtgtttggaccaaagcatcggggtgggggaggggtctgccgctgtcccccacctgctggcccccttgtccttcctcaccccctccaatatagtctcggagctacaaccgcagcagccactataaagggcaatattgatctttctgtccatgtggctctatcttttaaaacctcaaggccctccactgtcctaagataaagcctctcataggcactggggaccctgcacagtctggccatgtgaccctctccccaggcaagctctgaagtccctgcaggtggaggccatgcctgtcttaaactcagttgcatccctggtgcccaaagcaacaccagaaccaagaaggagctccataaatccttcttgggtgaagcctagacaaagccgccaggtcttgtggctccaggcaccagagccttgagtactttctcctgcctccaggcattggctcagggtgaattacaaggggctactgaatggctattactttcatcacgactgatccccacctcctcagggtcaaagggctactttctggaagtctccccaggctgactccttctccctgactgcaagggctcactccctcctccaagctcccacaatgcttcatggctctgccgcttacctagcttggcctagagtggcaaatggaacttctctgatctcccccaactagactggagcccccgaaggatggagaccatgtctgtgccatctctgtttcccctgttttcccacatactaggtgctcaattcatgcctgtgaatggcgtgagcccataatggatacacagaggttgcagcagatggtgtgggtacctcacccagatatcatccaggcccaaggcccctctccctgagtgaggccaggtgttggcagccaactgctccaatctgcctccttcccctaaatactgccctggtctagtgggagctgccttccccctgccccacctctcccaccaagaggccacctgtcactcatggccaggagagtgacaccatggagggtacaattgccagctcccccgtgtctgtgcaggattgtctgggttgaatgacactctcaaattgttcctgggatcgggctgaggccaggcctctcctggaaccacctctctgcttggtctgaccccttggcctatccagttttcctggttccctcacaggtttctccagaaagtactccctcagtaaagcatttgcacaagaatccttgtctcaggctctgcttctaaggaaagagactgaagagggacaactttttcctatgaggactcccaatctgccatttgtgtgtggctagctgtttccagccagggggctgaggcacctgcagtcacccacactctgggcctgtggcaccatctgtgcctcagctgactgagcagttctgagatgtggtgactcatgtgaagtggtgtcataggaatgaaggactgtgggcgctgggttcaaattccagttctatgcaccactccaggtagggatacccatgggggcagctgtgcctgtgtgggggaacagggtagggaaatctccataccttctcaattttgctgtgaacctaaaactgccatataaagataaagtctaggccaggcatggtggctcatgcctgtaatcccaacacttagggtggctgaggcaggcagatcacctggggtcaggagttcaagaccagcctgcccaacatggcaaaacctcgtctctactaaaaatacaaaaattagccaggcatcgtggtgggtgcctgtaatcccagctattcaggaggctgaggcaggagaatcacttggacctgggaggcagaggtttcagtgagcccagatcgcgacactgcactccagcctgggcaacagagtgacactctgtctcaaaaaataaaataaaataaaataaaataaaataaaataaaataaaa

SEQ ID NO: 3109 - DNA, 785 bp, Homo sapiens
  source 1..785: mol_type = genomic DNA
ctgctttcttctgctgccttttatgctccttgtgcacctcccttccccccaacctgggatgaaatctccccacgtgctggtgttcctttgcctcctggtggctctggtcaccgggaacctggttcagtttggggtgatgatcgagaagatgacaggcaagtccgccctgcagtacaacgactatggctgttactgcggcatcggtggctcccactggccggtggaccagactgactggtgctgccacgcccacgactgctgctacgggcgtctggagaagctgggctgtgagcccaaactggaaaagtatcttttctctgtcagcgaacgtggcattttctgcgccggcaggaccacctgccagcggctgacctgcgagtgtgacaagagggctgccctctgctttcgccgcaacctgggcacctacaaccgcaaatatgcccattatcccaacaagctgtgcaccgggcccaccccgccctgctgaggctatgctcggcctcccccccgtccctggaggtcccgcctcgggctgctgtagtcccaggcctggggaacattggcaccaaaggccctccctttggaaaattcctttcctgcaaactcatccctccttgagagctcagagatatgtcctggaccatcactagcctcccaggctaccccttctctgtagaaagaaccctgccccaggagccatggacccttcagcacccagaagactgtcactagcttctgggatctcagctccctcttctgaataagtgaataatgttttcccataa

SEQ ID NO: 3110 - DNA, 2723 bp, Homo sapiens
  source 1..2723: mol_type = genomic DNA
agtgtgcgaggcagcgtgaagctggggcctgctccccgcagcctctggagcgcatctcagaccttctgagacctatgttgctggccccccagaacccgcaacatggcagatggggcaaaggccaaccccaaagggttcaaaaagaaggtgctggatagatgcttctctgggtggaggggcccacgcttcggggcctcctgtccttcaagaacctccaggtctagcctgggtatgaagaagttcttcaccgtggccatccttgctggcagcgttctgtccacagctcacggcagcctgctcaacctgaaggccatggtggaggccgtcacagggaggagcgccatcctgtccttcgtgggctacggttgctactgtgggctggggggccgtggccagcccaaggatgaggtggactggtgctgccacgcccacgactgctgctaccaggaactctttgaccaaggctgtcacccctatgtggaccactatgatcacaccatcgagaacaacactgagatagtctgcagtgacctcaacaagacagagtgtgacaagcagacatgcatgtgtgacaagaacatggttctgtgcctcatgaaccagacgtaccgagaggagtaccgtggcttcctcaatgtctactgccagggccccacgcccaactgcagcatctatgaaccgccccctgaggaggtcacctgcagtcaccaatccccagcgccccccgcccctccctagagcctctgaggtttgagagagagagcgggaggagggtctggcttggggaccagacgaggtgcagggagggtaggagccaggccaggagcctgagggttgctggttgcctcctccctggagctctccagtgagggctcagctctcagaggactcaggaaggcctgggtcctgactcccccagcccagccccaggcatgggtgcctcctgctgctggttctggactgggtgggaggcacggagcttataggggtctctcctgagggtggccggggagacctgagagagaggaggaggggcctctgagtggggcctctgttgctggcgccagtttaactccccggagccttagaaagtctgagccttagaaagtctgggcctgagcatccaggcccagagctggatgcatcctcggcccaagatcacaggaaggcagattgctggtcacaaagcatgggttccgggagcccctcagctgatcccacaggatggcctggggtggtggctactttgggcttgaagctctctagagccccattcacagagcaggtgccccaccccagccctcactgaggtggccatgagtccaggttcagaccctaggggatgtgcagtgctgagtgtcccagccctgaagtctagcctcagagcaggctcctgggcactgacagagccacacacccaggtacaccccccaggctaatatggggacacacaaaaatatggccttcaacacctacaagtcttctctgtgtcccccatcgacccatgcacatcaccccaaccctgctctgccacaccacgtgggtctgaggagcactcctaccccccggctccgggtccctgacagacactgccctcctggcctgcacctggaatggcagccagaacactggagggggacccacaccctctctccctgggctgtggatgggtgttgcaagtcccatccctcctggcctgcacctggaacagcagccagaacaccggagggggacccacaccctctctccctgggctgtgggcaggcgtcacaagtcccattggtggggaagaggctgagggctgagacccacctcagtgaagagggaaacgtaagcagggagagcatcaaggcgggaggcagcctggaaacttctagaagagggtcaaggtaggaggctacatggaagcttctagaaggcagtaaggaacagggtggtgaaggagaggggagaagatgggagcatggagagacgaggtgagtgacagccaccagcagggacgggcctccaggcaacacagaggagctgggggccagggccttacggggctgggttcctgtgtggggcgtggagctggggctgaagtggaggggacggccctgcggcccccagcactgttgtttctccaggtgcaccttaccttcctccttacctgcccgagcctcaactcagggtcagcagcctccacggagccagccccacctgcccgaaaaccactgaagccaccctccgcccggactcaacagccgccagcaagctcgcctggcagtgcccctggagcaccattgtcgctggggagggagagccgggaagggtggagaaggaggcagaagggacatgtatgaaaaaaggacaggaaacctgaccagaggcggtttccagagccccagccttggagacaaggacactgccacccagcgccacagtcagtctgggaggggcccacgccccccaccccccatgccacactgccgcctcttgctggccatggttctccggcttgggggaacgcaggttcccagctgcgcccctcccccgcgcacacacaccctcccctgtccctcggaaagactaggccagggtctggggatgggattctgctgccaggggtcctgcctgcccccactcaccccagacgcttcggatgctgcagctcctggataatctccacaggactcggcttcctctcctcaaatgaataaaggcctcctacctcaactccc

SEQ ID NO: 3111 - DNA, 2697 bp, Homo sapiens
  source 1..2697: mol_type = genomic DNA
atgggggcgtgggccctggcaagtgcactcctcagccaatcagcgtcctgcccggctggtggattcggttacaagcccaagatcaccccatactccagcctctttcctcctcctcccgcagctccattcattggtcccgccgcaccgggcctgctgggctccgcttccgttccactgctcagctgccgcctggtggggccaccaagggcaggcatcccaggggctttgtctgactggactgggccagtgcagaatgggggttcaggcagggctgtttgggatgctgggcttcctgggggtggccctggggggctcccctgccctccgctggtacaggacctcctgccacttgaccaaggccgtccctggcaacccactggggtacctgagcttcctggccaaggatgctcagggactggccctgatccatgcccgctgggatgcgcataggaggctgcagtcatgtagctgggaggatgagccggagctcaccgcagcctacggtgctctctgtgctcatgagactgcctggggctccttcatccacacccccggacccgagctgcagagagcactggccactcttcagagtcagtgggaggcatgccgagcgcttgaggagagtccagcaggggccaggaagaagcgagcagcagggcagagtggagtccctggtggagggcaccagcgagagaagagaggatggaccatgcctggcacactgtggtgtggagttggagattctgctgggaactcctcggagctgggggtcttccagggacctgatctctgttgccgggaacatgaccgctgcccacagaacatctcacccttgcagtacaactatggcatccgaaactaccgattccacaccatctcccactgtgactgtgacaccaggtttcagcaatgcctacagaatcagcacgactccatctcggacatcgtgggcgtggccttcttcaacgtgctggagatcccctgctttgtgctggaggagcaggaggcgtgtgtggcgtggtactggtggggcgggtgtaggatgtacggcacagtgcccctcgctcgcctgcagcccaggaccttctacaatgcctcctggagctcccgggccacctccccaactcccagctcccggagcccagcccctcccaagcctcgacagaagcagcaccttcggaaggggccaccacatcagaaagggtccaagcgccccagcaaagccaacaccacagccctccaggaccctatggtctctcccaggcttgatgtggcccccacaggcctccagggcccacagggtggcctaaaacctcagggtgcccgctgggtctgccgcagcttccgccgccacctggaccagtgtgagcaccagattgggccccgggaaatcgagttccagctgctcaacagcgcccaagagcccctcttccactgcaactgcacgcgccgtctggcacgcttcctgaggctccacagcccacccgaggttaccaacatgctttgggagctgctgggcacaacctgcttcaagctggcccctccactggactgtgtggaaggcaaaaactgttccagagaccctagggccatcagggtgtcagcccggcacttgcggaggcttcagcagaggcgacaccagctccaggataaaggcacagatgagaggcagccatggccttcagagcccctgagaggccccatgtcattctacaaccagtgcctgcagctaacccaggcagccaggagacccgacaggcagcagaagtcctggagccagtgacctcagtttcagctttcctgggcaccagcctggaccttgcccatggctatgccaagccttgggaatctcagcctcccctccgtaggttagactgaagcatggcagaggctgttgtggacaatcaagaggatgaatggggggatctcaaggcccaaatgctggaccacatctcctgctgttctgggtaaccttgagctatgtatgacacaactcttctatgcctggatgtggtgttcaggaagctcattctgatgccctgggctttggccttgccagggaacttcacatacagatgagaatggggaaagggtaacttattgcagcagccccaggcagtaccaggaggaggtacatgtatgtccgtgttgcaaaaataatacatgcctcaaaaacctgcctaggggagccctagtgcctgggtgctgtggcctgaggtagcaggtgggaagttagggatgtcacagaaatgtctgtgtctgaatccaggattggggtgggtgttggagagggctttcagctcccctcctcccaggggggcctctttttttaacggctgccgtgcccttcctggcccagccctaaacctaaattcaaatctcctccatgcctttgcgcaaaggacctccctcttgcactctaagccttagtttcctcctctaaaaaaagggggtctctaaacaggagctacctcatagggttgttgaggattaagtgaaccaatacatatacagtgcttagcacttaataagtattcccccctgcgacacctagctgaactatggtttggtgtctgatcttgagaggttgatgtaaccttttaaaggcctcagttcgctcacctgtgaaatgggtctaagaatagcactgatctcacagggttgtgatgcagattaaaggagatggcatgtgtaatg

SEQ ID NO: 3112 - DNA, 2875 bp, Homo sapiens
  source 1..2875: mol_type = genomic DNA
aggataagactttctctaagtccggagctgaaaaaggatcctgactgaaagctagaggcattgaggagcctgaagattctcaggttttaaagacgctagagtgccaaagaagactttgaagtgtgaaaacatttcctgtaattgaaaccaaaatgtcatttatagatccttaccagcacattatagtggagcaccagtattcccacaagtttacggtagtggtgttacgtgccaccaaagtgacaaagggggcctttggtgacatgcttgatactccagatccctatgtggaactttttatctctacaacccctgacagcaggaagagaacaagacatttcaataatgacataaaccctgtgtggaatgagacctttgaatttattttggatcctaatcaggaaaatgttttggagattacgttaatggatgccaattatgtcatggatgaaactctagggacagcaacatttactgtatcttctatgaaggtgggagaaaagaaagaagttccttttattttcaaccaagtcactgaaatggttctagaaatgtctcttgaagtttgctcatgcccagacctacgatttagtatggctctgtgtgatcaggagaagactttcagacaacagagaaaagaacacataagggagagcatgaagaaactcttgggtccaaagaatagtgaaggattgcattctgcacgtgatgtgcctgtggtagccatattgggttcaggtgggggtttccgagccatggtgggattctctggtgtgatgaaggcattatacgaatcaggaattctggattgtgctacctacgttgctggtctttctggctccacctggtatatgtcaaccttgtattctcaccctgattttccagagaaagggccagaggagattaatgaagaactaatgaaaaatgttagccacaatccccttttacttctcacaccacagaaagttaaaagatatgttgagtctttatggaagaagaaaagctctggacaacctgtcacctttactgatatctttgggatgttaataggagaaacactaattcataatagaatgaatactactctgagcagtttgaaggaaaaagttaatactgcacaatgccctttacctcttttcacctgtcttcatgtcaaacctgacgtttcagagctgatgtttgcagattgggttgaatttagtccatacgaaattggcatggctaaatatggtacttttatggctcccgacttatttggaagcaaattttttatgggaacagtcgttaagaagtatgaagaaaaccccttgcatttcttaatgggtgtctggggcagtgccttttccatattgttcaacagagttttgggcgtttctggttcacaaagcagaggctccacaatggaggaagaattagaaaatattaccacaaagcatattgtgagtaatgatagctcggacagtgatgatgaatcacacgaacccaaaggcactgaaaatgaagatgctggaagtgactatcaaagtgataatcaagcaagttggattcatcgtatgataatggccttggtgagtgattcagctttattcaataccagagaaggacgtgctgggaaggtacacaacttcatgctgggcttgaatctcaatacatcttatccactgtctcctttgagtgactttgccacacaggactcctttgatgatgatgaactggatgcagctgtagcagatcctgatgaatttgagcgaatatatgagcctctggatgtcaaaagtaaaaagattcatgtagtggacagtgggctcacatttaacctgccgtatcccttgatactgagacctcagagaggggttgatctcataatctcctttgacttttctgcaaggccaagtgactctagtcctccgttcaaggaacttctacttgcagaaaagtgggctaaaatgaacaagctcccctttccaaagattgatccttatgtgtttgatcgggaagggctgaaggagtgctatgtctttaaacccaagaatcctgatatggagaaagattgcccaaccatcatccactttgttctggccaacatcaacttcagaaagtacagggctccaggtgttccaagggaaactgaggaagagaaagaaatcgctgactttgatatttttgatgacccagaatcaccattttcaaccttcaattttcaatatccaaatcaagcattcaaaagactacatgatcttatgcacttcaatactctgaacaacattgatgtgataaaagaagccatggttgaaagcattgaatatagaagacagaatccatctcgttgctctgtttcccttagtaatgttgaggcaagaagatttttcaacaaggagtttctaagtaaacccaaagcatagttcatgtactggaaatggcagcagtttctgatgctgaggcagtttgcaatcccatgacaactggatttaaaagtacagtacagatagtcgtactgatcatgagagactggctgatactcaaagttgcagttacttagctgcatgagaataatactattataagttaggttgacaaatgatgttgattatgtaaggatatacttagctacattttcagtcagtatgaacttcctgatacaaatgtagggatatatactgtatttttaaacatttctcaccaactttcttatgtgtgttctttttaaaaattttttttcttttaaaatatttaacagttcaatctcaataagacctcgcattatgtatgaatgttattcactgactagatttattcataccatgagacaacactatttttatttatatatgcatatatatacatacatgaaataaatacatcaatataaaaataa

SEQ ID NO: 3113 - DNA, 294 bp, Homo sapiens
  source 1..294: mol_type = genomic DNA
aagactttctctaagtccggagctgaaaaaggatcctgactgaaagctagaggcattgaggagcctgaagattctcaggttttaaagacgctagagtgccaaagaagactttgaagtgtgaaaacatttcctgtaattgaaaccaaaatgtcatttatagatccttaccagcacattatagtggagcaccagtattcccacaagtttacggtagtggtgttacgtgccaccaaagtgacaaagggggcctttggtgacatgcccaaagtgacaaagggggcctttggtgacatg

SEQ ID NO: 3114 - DNA, 2351 bp, Homo sapiens
  source 1..2351: mol_type = genomic DNA
atcctgactgaaagctagaggcattgaggagcctgaagattctcaggttttaaagacgctagagtgccaaagaagactttgaagtgtgaaaacatttcctgtaattgaaaccaaaatgtcatttatagatccttaccagcacattatagtggagcaccagtattcccacaagtttacggtagtggtgttacgtgccaccaaagtgacaaagggggcctttggtgacatgcttgatactccagatccctatgtggaactttttatctctacaacccctgacagcaggaagagaacaagacatttcaataatgacataaaccctgtgtggaatgagacctttgaatttattttggatcctaatcaggaaaatgttttggagattacgttaatggatgccaattatgtcatggatgaaactctagggacagcaacatttactgtatcttctatgaaggtgggagaaaagaaagaagttccttttattttcaaccaagtgcctgtggtagccatattgggttcaggtgggggtttccgagccatggtgggattctctggtgtgatgaaggcattatacgaatcaggaattctggattgtgctacctacgttgctggtctttctggctccacctggtatatgtcaaccttgtattctcaccctgattttccagagaaagggccagaggagattaatgaagaactaatgaaaaatgttagccacaatccccttttacttctcacaccacagaaagttaaaagatatgttgagtctttatggaagaagaaaagctctggacaacctgtcacctttactgatatctttgggatgttaataggagaaacactaattcataatagaatgaatactactctgagcagtttgaaggaaaaagttaatactgcacaatgccctttacctcttttcacctgtcttcatgtcaaacctgacgtttcagagctgatgtttgcagattgggttgaatttagtccatacgaaattggcatggctaaatatggtacttttatggctcccgacttatttggaagcaaattttttatgggaacagtcgttaagaagtatgaagaaaaccccttgcatttcttaatgggtgtctggggcagtgccttttccatattgttcaacagagttttgggcgtttctggttcacaaagcagaggctccacaatggaggaagaattagaaaatattaccacaaagcatattgtgagtaatgatagctcggacagtgatgatgaatcacacgaacccaaaggcactgaaaatgaagatgctggaagtgactatcaaagtgataatcaagcaagttggattcatcgtatgataatggccttggtgagtgattcagctttattcaataccagagaaggacgtgctgggaaggtacacaacttcatgctgggcttgaatctcaatacatcttatccactgtctcctttgagtgactttgccacacaggactcctttgatgatgatgaactggatgcagctgtagcagatcctgatgaatttgagcgaatatatgagcctctggatgtcaaaagtaaaaagattcatgtagtggacagtgggctcacatttaacctgccgtatcccttgatactgagacctcagagaggggttgatctcataatctcctttgacttttctgcaaggccaagtgactctagtcctccgttcaaggaacttctacttgcagaaaagtgggctaaaatgaacaagctcccctttccaaagattgatccttatgtgtttgatcgggaagggctgaaggagtgctatgtctttaaacccaagaatcctgatatggagaaagattgcccaaccatcatccactttgttctggccaacatcaacttcagaaagtacagggctccaggtgttccaagggaaactgaggaagagaaagaaatcgctgactttgatatttttgatgacccagaatcaccattttcaaccttcaattttcaatatccaaatcaagcattcaaaagactacatgatcttatgcacttcaatactctgaacaacattgatgtgataaaagaagccatggttgaaagcattgaatatagaagacagaatccatctcgttgctctgtttcccttagtaatgttgaggcaagaagatttttcaacaaggagtttctaagtaaacccaaagcatagttcatgtactggaaatggcagcagtttctgatgctgaggcagtttgcaatcccatgacaactggatttaaaagtacagtacagatagtcgtactgatcatgagagactggctgatactcaaagttgcagttacttagctgcatgagaataatactattataagtta

SEQ ID NO: 3115 - DNA, 2985 bp, Homo sapiens
  source 1..2985: mol_type = genomic DNA
agacggggtttcaccgtgttagccagtatggtcttgatctcctgacctcgtgatccacctgcctcggcctcccaaaagtgctgggattacaggtgtgagctgctgcgcctggcttatgagtcgtatgttctgatcctccctcttgaagttgccttctgtggtctaaggagggcctgaaggttcaggtggctggttcaggagtgggtgtggagcttaggtggagcagaggcggcgggtaggagggacttgggaccaattgggacatcacatccctggctctgggttagaaagctgacagtccttgatcctgtggccactgccccatcattcctgctcctgaggactcagtctcatggctgtggcagaggtgtccaggacctgcctgctcacggttcgtgtcctgcaggcccatcgcctaccctctaaggacctagtgaccccctctgactgctacgtgactctctggctgcccacggcctgcagccacaggctccagacacgcacggtcaagaacagcagtagccctgtctggaaccagagctttcacttcaggatccacaggcagctcaagaatgtcatggaactgaaagtctttgaccaggacctggtgaccggagatgaccctgtgttgtcagtactgtttgatgcggggactctgcgggctggggagttccggcgcgagagcttctcactgagccctcagggtgaggggcgcctggaagttgaatttcgcctgcagagtctggctgaccgtggcgagtggctcgtcagcaatggcgttctggtggcccgggagctctcctgcttgcacgttcaactggaggagacaggagaccagaagtcctcagagcacagagttcagcttgtggttcctgggtcctgtgagggtccgcaggaggcctctgtgggcactggcaccttccgcttccactgcccagcctgctgggagcaggagctgagtattcgcctgcaggatgcccccgaggagcaactaaaggcgccactgagtgccctgccctctggtcaagtggtgaggcttgtcttccccacgtcccaggagcccctgatgagagtggagctgaaaaaagaagcaggactgagggagctggccgtgcgactgggcttcgggccctgtgcagaggagcaggccttcctgagcaggaggaagcaggtggtggccgcggccttgaggcaggccctgcagctggacggagacctgcaggaggatgagatcccagtggtagctattatggccactggtggtgggatccgggcaatgacttccctgtatgggcagctggctggcctgaaggagctgggcctcttggattgcgtctcctacatcaccggggcctcgggctccacctgggccttggccaacctttatgaggacccagagtggtctcagaaggacctggcagggcccactgagttgctgaagacccaggtgaccaagaacaagctgggtgtgctggcccccagccagctgcagcggtaccggcaggagctggccgagcgtgcccgcttgggctacccaagctgcttcaccaacctgtgggccctcatcaacgaggcgctgctgcatgatgagccccatgatcacaagctctcagatcaacgggaggccctgagtcatggccagaaccctctgcccatctactgtgccctcaacaccaaagggcagagcctgaccacttttgaatttggggagtggtgcgagttctctccctacgaggtcggcttccccaagtacggggccttcatcccctctgagctctttggctccgagttctttatggggcagctgatgaagaggcttcctgagtcccgcatctgcttcttagaaggtatctggagcaacctgtatgcagccaacctccaggacagcttatactgggcctcagagcccagccagttctgggaccgctgggtcaggaaccaggccaacctggacaaggagcaggtcccccttctgaagatagaagaaccaccctcaacagccggcaggatagctgagtttttcaccgatcttctgacgtggcgtccactggcccaggccacacataatttcctgcgtggcctccatttccacaaagactactttcagcatcctcacttctccacatggaaagctaccactctggatgggctccccaaccagctgacaccctcggagccccacctgtgcctgctggatgttggctacctcatcaataccagctgcctgcccctcctgcagcccactcgggacgtggacctcatcctgtcattggactacaacctccacggagccttccagcagttgcagctcctgggccggttctgccaggagcaggggatcccgttcccacccatctcgcccagccccgaagagcagctccagcctcgggagtgccacaccttctccgaccccacctgccccggagcccctgcggtgctgcactttcctctggtcagcgactccttccgggagtactcggcccctggggtccggcggacacccgaggaggcggcagctggggaggtgaacctgtcttcatcggactctccctaccactacacgaaggtgacctacagccaggaggacgtggacaagctgctgcacctgacacattacaatgtctgcaacaaccaggagcagctgctggaggctctgcgccaggcagtgcagcggaggcggcagcgcaggccccactgatggccggggcccctgccacccctaactctcattcattccctggctgctgagttgcaggtgggaactgtcatcacgcagtgcttcagagcctcgggctcaggtggcacggtcccagggtccaggctgagggctgggagctcccttgcgcctcagcagtttgcagtggggtaaggaggccaagcccatttgtgtaatcacccaaaaccccccggcctgtgcctgttttcccttctgcgctaccttgagtagttggagcacttgatacatcacagactcatacaaatgtg

SEQ ID NO: 3116 - DNA, 1161 bp, Homo sapiens
  source 1..1161: mol_type = genomic DNA
cagggttctacccggctgggtccaggcagaagtttttcctccccacctccgggtttgtcctcatcatcggtcactcccattcacagctttaagattctggaggccaagaatttgactccccccggatccatggtctgtggataccaatgttccgactggagacggggagcccgcgagacccgggtctccagggtctgcccaaggaagttgctcatgggagcagacctctagagcaggatttgaggccaggccaaagagaaccccagagatgaaaggcctcctcccactggcttggttcctggcttgtagtgtgcctgctgtgcaaggaggcttgctggacctaaaatcaatgatcgagaaggtgacagggaagaacgccctgacaaactacggcttctacggctgttactgcggctggggcggccgaggaacccccaaggatggcaccgattggtgctgttgggcgcatgaccactgctatgggcggctggaggagaagggctgcaacattcgcacacagtcctacaaatacagattcgcgtggggcgtggtcacctgcgagcccgggcccttctgccatgtgaacctctgtgcctgtgaccggaagctcgtctactgcctcaagagaaacctacggagctacaacccacagtaccaatactttcccaacatcctctgctcctaggcctccccagcgagctcctcccagaccaagacttttgttctgtttttctacaacacagagtactgactctgcctggttcctgagagaggctcctaagtcacagacctcagtctttctcgaagcttggcggacccccagggccacactgtaccctccagcgagtcccaggagagtgactctggtcataggacttggtagggtcccagggtccctaggcctccacttctgagggcagcccctctggtgccaagagctctcctccaactcagggttggctgtgtctcttttcttctctgaagacagcgtcctggctccagttggaacactttcctgagatgcacttacttctcagcttctgcgatcagattatcatcaccaccaccctccagagaatttttacgcaagaagagccaaattgactctctaaatctggtgtatgggtattaaataaaattcattctcaaggctaataaaaa

SEQ ID NO: 3117 - DNA, 3271 bp, Homo sapiens
  source 1..3271: mol_type = genomic DNA
aagtgctgagtaagccgaggtgagtgacctcgcgggtgggcggggcctgggggtccgttccccaacttcctcggcgctccggactcccaagtctccgccggaccctcctttggatattcctcgtgtctccgattctgagacagagggggaagacggtggggcctccccacctgccccgcagaagatgcagttctttggccgcctggtcaataccttcagtggcgtcaccaacttgttctctaacccattccgggtgaaggaggtggctgtggccgactacacctcgagtgaccgagttcgggaggaagggcagctgattctgttccagaacactcccaaccgcacctgggactgcgtcctggtcaaccccaggaactcacagagtggattccgactcttccagctggagttggaggctgacgccctagtgaatttccatcagtattcttcccagctgctacccttctatgagagctcccctcaggtcctgcacactgaggtcctgcagcacctgaccgacctcatccgtaaccaccccagctggtcagtggcccacctggctgtggagctagggatccgcgagtgcttccatcacagccgtatcatcagctgtgccaattgcgcggagaacgaggagggctgcacacccctgcacctggcctgccgcaagggtgatggggagatcctggtggagctggtgcagtactgccacactcagatggatgtcaccgactacaagggagagaccgtcttccattatgctgtccagggtgacaattctcaggtgctgcagctccttggaaggaacgcagtggctggcctgaaccaggtgaataaccaagggctgaccccgctgcacctggcctgccagctggggaagcaggagatggtccgcgtgctgctgctgtgcaatgctcggtgcaacatcatgggccccaacggctaccccatccactcggccatgaagttctctcagaaggggtgtgcggagatgatcatcagcatggacagcagccagatccacagcaaagacccccgttacggagccagccccctccactgggccaagaacgcagagatggcccgcatgctgctgaaacggggctgcaacgtgaacagcaccagctccgcggggaacacggccctgcacgtggcggtgatgcgcaaccgcttcgactgtgccatagtgctgctgacccacggggccaacgcggatgcccgcggagagcacggcaacaccccgctgcacctggccatgtcgaaagacaacgtggagatgatcaaggccctcatcgtgttcggagcagaagtggacaccccgaatgactttggggagactcctacattcctagcctccaaaatcggcagacttgtcaccaggaaggcgatcttgactctgctgagaaccgtgggggccgaatactgcttcccacccatccacggggtccccgcggagcagggctctgcagcgccacatcatcccttctccctggaaagagctcagcccccaccgatcagcctaaacaacctagaactacaggatctcatgcacatctcacgggcccggaagccagcgttcatcctgggctccatgagggacgagaagcggacccacgaccacctgctgtgcctggatggaggaggagtgaaaggcctcatcatcatccagctcctcatcgccatcgagaaggcctcgggtgtggccaccaaggacctgtttgactgggtggcgggcaccagcactggaggcatcctggccctggccattctgcacagtaagtccatggcctacatgcgcggcatgtactttcgcatgaaggatgaggtgttccggggctccaggccctacgagtcggggcccctggaggagttcctgaagcgggagtttggggagcacaccaagatgacggacgtcaggaaacccaaggtgatgctgacagggacactgtctgaccggcagccggctgaactccacctcttccggaactacgatgctccagaaactgtccgggagcctcgtttcaaccagaacgttaacctcaggcctccagctcagccctcagaccagctggtgtggcgggcggcccgaagcagcggggcagctcctacttacttccgacccaatgggcgcttcctggacggtgggctgctggccaacaaccccacgctggatgccatgaccgagatccatgagtacaatcaggacctgatccgcaagggtcaggccaacaaggtgaagaaactctccatcgttgtctccctggggacagggaggtccccacaagtgcctgtgacctgtgtggatgtcttccgtcccagcaacccctgggagctggccaagactgtttttggggccaaggaactgggcaagatggtggtggactgttgcacggatccagacgggcgggctgtggaccgggcacgggcctggtgcgagatggtcggcatccagtacttcagattgaacccccagctggggacggacatcatgctggatgaggtcagtgacacagtgctggtcaacgccctctgggagaccgaggtctacatctatgagcaccgcgaggagttccagaagctcatccagctgctgctctcaccctgagggtccccagcctctcaccggccccagctgacctcgtccattcagcccctgccaggccaagcccagccactgccctcccgggcagatctgggcccaggcacctctgagtccatagaccaggcctgggagaatgccaagctgcctgcccgaggctggtcctgaaggcctgtctcccactaaccccgccttccagcactttctgtcattccaggctgggaaagtctagagccccctttggcccctttccctgactgtcaaggacaactgactcccccatcagctcaaacattaagggtacccgggcacaaccgtacccctgcccccagccccagcctccctgagggcctgccgggctgcctctgccccagcccccagcaagggcactcccaggcttcctggtgggtgcagcccactccctctgccctctgctccgttccctgggggctgggactaaagaaatgggtgtcccccaccccatcagctgggaaagcccaggccgcaggagtgggatgcccgttggactttgcccctcacactggcccagcccctcacactgccccaccccgagaaccctcagctctcaaaggtcactcctgggagtttcttcttcccaatggaagtggcttaagagccaaaactgaaataaatcatttggattcaagttca

SEQ ID NO: 3118 - DNA, 1411 bp, Homo sapiens
  source 1..1411: mol_type = genomic DNA
ccgttccccaacttcctcggcgctccggactcccaagtctccgccggaccctcctttggatattcctcgtgtctccgattctgagacagagggggaagacggtggggcctccccacctgccccgcagaagatgcagttctttggccgcctggtcaataccttcagtggcgtcaccaacttgttctctaacccattccgggtgaaggaggtggctgtggccgactacacctcgagtgaccgagttcgggaggaagggcagctgattctgttccagaacactcccaaccgcacctgggactgcgtcctggtcaaccccaggaactcacagagtggattccgctgtgccaattgcgcggagaacgaggagggctgcacacccctgcacctggcctgccgcaagggtgatggggagatcctggtggagctggtgcagtactgccacactcagatggatgtcaccgactacaagggagagaccgtcttccattatgctgtccagggtgacaattctcaggtgctgcagctccttggaaggaacgcagtggctggcctgaaccaggtgaataaccaagggctgaccccgctgcacctggcctgccagctggggaagcaggagatggtccgcgtgctgctgctgtgcaatgctcggtgcaacatcatgggccccaacggctaccccatccactcggccatgaagttctctcagaaggggtgtgcggagatgatcatcagcatggacagcagccagatccacagcaaagacccccgttacggagccagccccctccactgggccaagaacgcagagatggcccgcatgctgctgaaacggggctgcaacgtgaacagcaccagctccgcggggaacacggccctgcacgtggcggtgatgcgcaaccgcttcgactgtgccatagtgctgctgacccacggggccaacgcggatgcccgcggagagcacggcaacaccccgctgcacctggccatgtcgaaagacaacgtggagatgatcaaggccctcatcgtgttcggagcagaagtggacaccccgaatgactttggggagactcctacattcctagcctccaaaatcggcagacttgtcaccaggaaggcgatcttgactctgctgagaaccgtgggggccgaatactgcttcccacccatccacggggtccccgcggagcagggctctgcagcgccacatcatcccttctccctggaaagagctcagcccccaccgatcagcctaaacaacctaggcagtcacccaagccaggccggatggtgggcctggggtgcggcgtcagatggaactacaggatctcatgcacatctcacgggcccggaagccagcgttcatcctgggctccatgagggacgagaagcggacagacagaacatggagagc

SEQ ID NO: 3119 - DNA, 3060 bp, Homo sapiens
  source 1..3060: mol_type = genomic DNA
gggggtccgttccccaacttcctcggcgctccggactcccaagtctccgccggaccctcctttggatattcctcgtgtctccgattctgagacagagggggaagacggtggggcctccccacctgccccgcagaagatgcagttctttggccgcctggtcaataccttcagtggcgtcaccaacttgttctctaacccattccgggtgaaggaggtggctgtggccgactacacctcgagtgaccgagttcgggaggaagggcagctgattctgttccagaacactcccaaccgcacctgggactgcgtcctggtcaaccccaggaactcacagagtggattccgactcttccagctggagttggaggctgacgccctagtgaatttccatcagtattcttcccagctgctacccttctatgagagctcccctcaggtcctgcacactgaggtcctgcagcacctgaccgacctcatccgtaaccaccccagctggtcagtggcccacctggctgtggagctagggatccgcgagtgcttccatcacagccgtatcatcagctgtgccaattgcgcggagaacgaggagggctgcacacccctgcacctggcctgccgcaagggtgatggggagatcctggtggagctggtgcagtactgccacactcagatggatgtcaccgactacaagggagagaccgtcttccattatgctgtccagggtgacaattctcaggtgctgcagctccttggaaggaacgcagtggctggcctgaaccaggtgaataaccaagggctgaccccgctgcacctggcctgccagctggggaagcaggagatggtccgcgtgctgctgctgtgcaatgctcggtgcaacatcatgggccccaacggctaccccatccactcggccatgaagttctctcagaaggggtgtgcggagatgatcatcagcatggacagcagccagatccacagcaaagacccccgttacggagccagccccctccactgggccaagaacgcagagatggcccgcatgctgctgaaacggggctgcaacgtgaacagcaccagctccgcggggaacacggccctgcacgtggcggtgatgcgcaaccgcttcgactgtgccatagtgctgctgacccacggggccaacgcggatgcccgcggagagcacggcaacaccccgctgcacctggccatgtcgaaagacaacgtggagatgatcaaggccctcatcgtgttcggagcagaagtggacaccccgaatgactttggggagactcctacattcctagcctccaaaatcggcagacaactacaggatctcatgcacatctcacgggcccggaagccagcgttcatcctgggctccatgagggacgagaagcggacccacgaccacctgctgtgcctggatggaggaggagtgaaaggcctcatcatcatccagctcctcatcgccatcgagaaggcctcgggtgtggccaccaaggacctgtttgactgggtggcgggcaccagcactggaggcatcctggccctggccattctgcacagtaagtccatggcctacatgcgcggcatgtactttcgcatgaaggatgaggtgttccggggctccaggccctacgagtcggggcccctggaggagttcctgaagcgggagtttggggagcacaccaagatgacggacgtcaggaaacccaaggtgatgctgacagggacactgtctgaccggcagccggctgaactccacctcttccggaactacgatgctccagaaactgtccgggagcctcgtttcaaccagaacgttaacctcaggcctccagctcagccctcagaccagctggtgtggcgggcggcccgaagcagcggggcagctcctacttacttccgacccaatgggcgcttcctggacggtgggctgctggccaacaaccccacgctggatgccatgaccgagatccatgagtacaatcaggacctgatccgcaagggtcaggccaacaaggtgaagaaactctccatcgttgtctccctggggacagggaggtccccacaagtgcctgtgacctgtgtggatgtcttccgtcccagcaacccctgggagctggccaagactgtttttggggccaaggaactgggcaagatggtggtggactgttgcacggatccagacgggcgggctgtggaccgggcacgggcctggtgcgagatggtcggcatccagtacttcagattgaacccccagctggggacggacatcatgctggatgaggtcagtgacacagtgctggtcaacgccctctgggagaccgaggtctacatctatgagcaccgcgaggagttccagaagctcatccagctgctgctctcaccctgagggtccccagcctctcaccggccccagctgacctcgtccattcagcccctgccaggccaagcccagccactgccctcccgggcagatctgggcccaggcacctctgagtccatagaccaggcctgggagaatgccaagctgcctgcccgaggctggtcctgaaggcctgtctcccactaaccccgccttccagcactttctgtcattccaggctgggaaagtctagagccccctttggcccctttccctgactgtcaaggacaactgactcccccatcagctcaaacattaagggtacccgggcacaaccgtacccctgcccccagccccagcctccctgagggcctgccgggctgcctctgccccagcccccagcaagggcactcccaggcttcctggtgggtgcagcccactccctctgccctctgctccgttccctgggggctgggactaaagaaatgggtgtcccccaccccatcagctgggaaagcccaggccgcaggagtgggatgcccgttggactttgcccctcacactggcccagcccctcacactgccccaccccgagaaccctcagctctcaaaggtcactcctgggagtttcttcttcccaatggaagtggcttaagagccaaaactgaaataaatcatttggattcaagttc

SEQ ID NO: 3120 - DNA, 1567 bp, Homo sapiens
  source 1..1567: mol_type = genomic DNA
ccgttccccaacttcctcggcgctccggactcccaagtctccgccggaccctcctttggatattcctcgtgtctccgattctgagacagagggggaagacggtggggcctccccacctgccccgcagaagatgcagttctttggccgcctggtcaataccttcagtggcgtcaccaacttgttctctaacccattccgggtgaaggaggtggctgtggccgactacacctcgagtgaccgagttcgggaggaagggcagctgattctgttccagaacactcccaaccgcacctgggactgcgtcctggtcaaccccaggaactcacagagtggattccgactcttccagctggagttggaggctgacgccctagtgaatttccatcagtattcttcccagctgctacccttctatgagagctcccctcaggtcctgcacactgaggtcctgcagcacctgaccgacctcatccgtaaccaccccagctggtcagtggcccacctggctgtggagctagggatccgcgagtgcttccatcacagccgtatcatcagctgtgccaattgcgcggagaacgaggagggctgcacacccctgcacctggcctgccgcaagggtgatggggagatcctggtggagctggtgcagtactgccacactcagatggatgtcaccgactacaagggagagaccgtcttccattatgctgtccagggtgacaattctcaggtgctgcagctccttggaaggaacgcagtggctggcctgaaccaggtgaataaccaagggctgaccccgctgcacctggcctgccagctggggaagcaggagatggtccgcgtgctgctgctgtgcaatgctcggtgcaacatcatgggccccaacggctaccccatccactcggccatgaagttctctcagaaggggtgtgcggagatgatcatcagcatggacagcagccagatccacagcaaagacccccgttacggagccagccccctccactgggccaagaacgcagagatggcccgcatgctgctgaaacggggctgcaacgtgaacagcaccagctccgcggggaacacggccctgcacgtggcggtgatgcgcaaccgcttcgactgtgccatagtgctgctgacccacggggccaacgcggatgcccgcggagagcacggcaacaccccgctgcacctggccatgtcgaaagacaacgtggagatgatcaaggccctcatcgtgttcggagcagaagtggacaccccgaatgactttggggagactcctacattcctagcctccaaaatcggcagacttgtcaccaggaaggcgatcttgactctgctgagaaccgtgggggccgaatactgcttcccacccatccacggggtccccgcggagcagggctctgcagcgccacatcatcccttctccctggaaagagctcagcccccaccgatcagcctaaacaacctagaactacaggatctcatgcacatctcacgggcccggaagccagcgttcatcctgggctccatgagggacgagaagcggacagacagaaca

SEQ ID NO: 3121 - DNA, 3011 bp, Homo sapiens
  source 1..3011: mol_type = genomic DNA
tttgtttgcggaagtaggaggaagtagaagtgctgagtaagccgagacagagggggaagacggtggggcctccccacctgccccgcagaagatgcagttctttggccgcctggtcaataccttcagtggcgtcaccaacttgttctctaacccattccgggtgaaggaggtggctgtggccgactacacctcgagtgaccgagttcgggaggaagggcagctgattctgttccagaacactcccaaccgcacctgggactgcgtcctggtcaaccccaggaactcacagagtggattccgactcttccagctggagttggaggctgacgccctagtgaatttccatcagtattcttcccagctgctacccttctatgagagctcccctcaggtcctgcacactgaggtcctgcagcacctgaccgacctcatccgtaaccaccccagctggtcagtggcccacctggctgtggagctagggatccgcgagtgcttccatcacagccgtatcatcagctgtgccaattgcgcggagaacgaggagggctgcacacccctgcacctggcctgccgcaagggtgatggggagatcctggtggagctggtgcagtactgccacactcagatggatgtcaccgactacaagggagagaccgtcttccattatgctgtccagggtgacaattctcaggtgctgcagctccttggaaggaacgcagtggctggcctgaaccaggtgaataaccaagggctgaccccgctgcacctggcctgccagctggggaagcaggagatggtccgcgtgctgctgctgtgcaatgctcggtgcaacatcatgggccccaacggctaccccatccactcggccatgaagttctctcagaaggggtgtgcggagatgatcatcagcatggacagcagccagatccacagcaaagacccccgttacggagccagccccctccactgggccaagaacgcagagatggcccgcatgctgctgaaacggggctgcaacgtgaacagcaccagctccgcggggaacacggccctgcacgtggcggtgatgcgcaaccgcttcgactgtgccatagtgctgctgacccacggggccaacgcggatgcccgcggagagcacggcaacaccccgctgcacctggccatgtcgaaagacaacgtggagatgatcaaggccctcatcgtgttcggagcagaagtggacaccccgaatgactttggggagactcctacattcctagcctccaaaatcggcagacaactacaggatctcatgcacatctcacgggcccggaagccagcgttcatcctgggctccatgagggacgagaagcggacccacgaccacctgctgtgcctggatggaggaggagtgaaaggcctcatcatcatccagctcctcatcgccatcgagaaggcctcgggtgtggccaccaaggacctgtttgactgggtggcgggcaccagcactggaggcatcctggccctggccattctgcacagtaagtccatggcctacatgcgcggcatgtactttcgcatgaaggatgaggtgttccggggctccaggccctacgagtcggggcccctggaggagttcctgaagcgggagtttggggagcacaccaagatgacggacgtcaggaaacccaaggtgatgctgacagggacactgtctgaccggcagccggctgaactccacctcttccggaactacgatgctccagaaactgtccgggagcctcgtttcaaccagaacgttaacctcaggcctccagctcagccctcagaccagctggtgtggcgggcggcccgaagcagcggggcagctcctacttacttccgacccaatgggcgcttcctggacggtgggctgctggccaacaaccccacgctggatgccatgaccgagatccatgagtacaatcaggacctgatccgcaagggtcaggccaacaaggtgaagaaactctccatcgttgtctccctggggacagggaggtccccacaagtgcctgtgacctgtgtggatgtcttccgtcccagcaacccctgggagctggccaagactgtttttggggccaaggaactgggcaagatggtggtggactgttgcacggatccagacgggcgggctgtggaccgggcacgggcctggtgcgagatggtcggcatccagtacttcagattgaacccccagctggggacggacatcatgctggatgaggtcagtgacacagtgctggtcaacgccctctgggagaccgaggtctacatctatgagcaccgcgaggagttccagaagctcatccagctgctgctctcaccctgagggtccccagcctctcaccggccccagctgacctcgtccattcagcccctgccaggccaagcccagccactgccctcccgggcagatctgggcccaggcacctctgagtccatagaccaggcctgggagaatgccaagctgcctgcccgaggctggtcctgaaggcctgtctcccactaaccccgccttccagcactttctgtcattccaggctgggaaagtctagagccccctttggcccctttccctgactgtcaaggacaactgactcccccatcagctcaaacattaagggtacccgggcacaaccgtacccctgcccccagccccagcctccctgagggcctgccgggctgcctctgccccagcccccagcaagggcactcccaggcttcctggtgggtgcagcccactccctctgccctctgctccgttccctgggggctgggactaaagaaatgggtgtcccccaccccatcagctgggaaagcccaggccgcaggagtgggatgcccgttggactttgcccctcacactggcccagcccctcacactgccccaccccgagaaccctcagctctcaaaggtcactcctgggagtttcttcttcccaatggaagtggcttaagagccaaaactgaaataaatcatttggattcaa

SEQ ID NO: 3122 - DNA, 2755 bp, Homo sapiens
  source 1..2755: mol_type = genomic DNA
ttgtttgcggaagtaggaggaagtagaagtgctgagtaagccgagagggggaagacggtggggcctccccacctgccccgcagaagatgcagttctttggccgcctggtcaataccttcagtggcgtcaccaacttgttctctaacccattccgggtgaaggaggtggctgtggccgactacacctcgagtgaccgagttcgggaggaagggcagctgattctgttccagaacactcccaaccgcacctgggactgcgtcctggtcaaccccaggaactcacagagtggattccgactcttccagctggagttggaggctgacgccctagtgaatttccatcagtattcttcccagctggggaagcaggagatggtccgcgtgctgctgctgtgcaatgctcggtgcaacatcatgggccccaacggctaccccatccactcggccatgaagttctctcagaaggggtgtgcggagatgatcatcagcatggacagcagccagatccacagcaaagacccccgttacggagccagccccctccactgggccaagaacgcagagatggcccgcatgctgctgaaacggggctgcaacgtgaacagcaccagctccgcggggaacacggccctgcacgtggcggtgatgcgcaaccgcttcgactgtgccatagtgctgctgacccacggggccaacgcggatgcccgcggagagcacggcaacaccccgctgcacctggccatgtcgaaagacaacgtggagatgatcaaggccctcatcgtgttcggagcagaagtggacaccccgaatgactttggggagactcctacattcctagcctccaaaatcggcagacttgtcaccaggaaggcgatcttgactctgctgagaaccgtgggggccgaatactgcttcccacccatccacggggtccccgcggagcagggctctgcagcgccacatcatcccttctccctggaaagagctcagcccccaccgatcagcctaaacaacctagaactacaggatctcatgcacatctcacgggcccggaagccagcgttcatcctgggctccatgagggacgagaagcggacccacgaccacctgctgtgcctggatggaggaggagtgaaaggcctcatcatcatccagctcctcatcgccatcgagaaggcctcgggtgtggccaccaaggacctgtttgactgggtggcgggcaccagcactggaggcatcctggccctggccattctgcacagtaagtccatggcctacatgcgcggcatgtactttcgcatgaaggatgaggtgttccggggctccaggccctacgagtcggggcccctggaggagttcctgaagcgggagtttggggagcacaccaagatgacggacgtcaggaaacccaaggtgatgctgacagggacactgtctgaccggcagccggctgaactccacctcttccggaactacgatgctccagaaactgtccgggagcctcgtttcaaccagaacgttaacctcaggcctccagctcagccctcagaccagctggtgtggcgggcggcccgaagcagcggggcagctcctacttacttccgacccaatgggcgcttcctggacggtgggctgctggccaacaaccccacgctggatgccatgaccgagatccatgagtacaatcaggacctgatccgcaagggtcaggccaacaaggtgaagaaactctccatcgttgtctccctggggacagggaggtccccacaagtgcctgtgacctgtgtggatgtcttccgtcccagcaacccctgggagctggccaagactgtttttggggccaaggaactgggcaagatggtggtggactgttgcacggatccagacgggcgggctgtggaccgggcacgggcctggtgcgagatggtcggcatccagtacttcagattgaacccccagctggggacggacatcatgctggatgaggtcagtgacacagtgctggtcaacgccctctgggagaccgaggtctacatctatgagcaccgcgaggagttccagaagctcatccagctgctgctctcaccctgagggtccccagcctctcaccggccccagctgacctcgtccattcagcccctgccaggccaagcccagccactgccctcccgggcagatctgggcccaggcacctctgagtccatagaccaggcctgggagaatgccaagctgcctgcccgaggctggtcctgaaggcctgtctcccactaaccccgccttccagcactttctgtcattccaggctgggaaagtctagagccccctttggcccctttccctgactgtcaaggacaactgactcccccatcagctcaaacattaagggtacccgggcacaaccgtacccctgcccccagccccagcctccctgagggcctgccgggctgcctctgccccagcccccagcaagggcactcccaggcttcctggtgggtgcagcccactccctctgccctctgctccgttccctgggggctgggactaaagaaatgggtgtcccccaccccatcagctgggaaagcccaggccgcaggagtgggatgcccgttggactttgcccctcacactggcccagcccctcacactgccccaccccgagaaccctcagctctcaaaggtcactcctgggagtttcttcttcccaatggaagtggcttaagagccaaaactgaaataaatcatttggattcaagttc

SEQ ID NO: 3123 - DNA, 656 bp, Homo sapiens
  source 1..656: mol_type = genomic DNA
agtgacctcgcgggtgggcggggcctgggggtccgttccccaacttcctcggcgctccggactcccaagtctccgccggaccctcctttggatattcctcgtgtctccgattctgagagggggaagacggtggggcctccccacctgccccgcagaagatgcagttctttggccgcctggtcaataccttcagtggcgtcaccaacttgttctctaacccattccgggtgaaggaggtggctgtggccgactacacctcgagtgaccgagttcgggaggaagggcagctgattctgttccagaacactcccaaccgcacctgggactgcgtcctggtcaaccccaggaactcacagagtggattccgctgtgccaattgcgcggagaacgaggagggctgcacacccctgcacctggcctgccgcaagggtgatggggagatcctggtggagctggtgcagtactgccacactcagatggatgtcaccgactacaagggagagaccgtcttccattatgctgtccagggtgacaattctcaggtgctgcagctccttggaaggaacgcagtggctggcctgaaccaggtgaataaccaagggctgaccccgctgcacctggcctgccagctggggaagcaggagatggtccgcgtg

SEQ ID NO: 3124 - DNA, 1652 bp, Homo sapiens
  source 1..1652: mol_type = genomic DNA
gtttgtttgcggaagtaggaggaagtagaagtgctgagtaagccgagacagagggggaagacggtggggcctccccacctgccccgcagaagatgcagttctttggccgcctggtcaataccttcagtggcgtcaccaacttgttctctaacccattccgggtgaaggaggtggctgtggccgactacacctcgagtgaccgagttcgggaggaagggcagctgattctgttccagaacactcccaaccgcacctgggactgcgtcctggtcaaccccaggaactcacagagtggattccgactcttccagctggagttggaggctgacgccctagtgaatttccatcagtattcttcccagctgctacccttctatgagagctcccctcaggtcctgcacactgaggtcctgcagcacctgaccgacctcatccgtaaccaccccagctggtcagtggcccacctggctgtggagctagggatccgcgagtgcttccatcacagccgtatcatcagagtccggagtgctcaccaggtgccaggtctgtgggagctgatttctacccaccatgaaattgaattttcccaacccccacaagctgtgccaattgcgcggagaacgaggagggctgcacacccctgcacctggcctgccgcaagggtgatggggagatcctggtggagctggtgcagtactgccacactcagatggatgtcaccgactacaagggagagaccgtcttccattatgctgtccagggtgacaattctcaggtgctgcaggtgtgcggagatgatcatcagcatggacagcagccagatccacagcaaagacccccgttacggagccagccccctccactgggccaagaacgcagagatggcccgcatgctgctgaaacggggctgcaacgtgaacagcaccagctccgcggggaacacggccctgcacgtggcggtgatgcgcaaccgcttcgactgtgccatagtgctgctgacccacggggccaacgcggatgcccgcggagagcacggcaacaccccgctgcacctggccatgtcgaaagacaacgtggagatgatcaaggccctcatcgtgttcggagcagaagtggacaccccgaatgactttggggagactcctacattcctagcctccaaaatcggcagacttgtcaccaggaaggcgatcttgactctgctgagaaccgtgggggccgaatactgcttcccacccatccacggggtccccgcggagcagggctctgcagcgccacatcatcccttctccctggaaagagctcagcccccaccgatcagcctaaacaacctaggcagtcacccaagccaggccggatggtgggcctggggtgcggcgtcagatgggtaacgccctgggcctggagaggccaccgagcctagccatgcggcattagctctagctctcactccctaatccgtccttcttagctgcgcacacaccacacgccccctcccctgcaccctgtccccggcctctctcagccactcttctgcttcccttgttcactgtggagccgtgtgccctggggagggggagacaccgcttcgcagccctcggttctgctttgctgcttctagactctgcacagtggtggggggctgtcagagt

SEQ ID NO: 3125 - DNA, 364 bp, Homo sapiens
  source 1..364: mol_type = genomic DNA
atgagttgcttgaggtcacaccgatgaggttgaagctggaatctgacaccagagcctgtgtgattgtcctgatgtgtaagacagagggggaagacggtggggcctccccacctgccccgcagaagatgcagttctttggccgcctggtcaataccttcagtggcgtcaccaacttgttctctaacccattccgggtgaaggaggtggctgtggccgactacacctcgagtgaccgagttcgggaggaagggcagctgattctgttccagaacactcccaaccgcacctgggactgcgtcctggtcaaccccaggaactcacagagtggattccgactcttccagctggagttggaggctgacgc

SEQ ID NO: 3126 - DNA, 995 bp, Homo sapiens
  source 1..995: mol_type = genomic DNA
ggccttccaaagtgctgggattacaggcgtgagtcaccgcgcccggccaaataaaataaaatgttaaagcaaattcaggactacccctcctccaagtcttctgttccctttgggcgcccaggtgagcgggggaggggctgggggagtaataacatcaaaagagcgccttttcctcccttattccgaggagacttccctgggcctgactcccggtcctgtccccagcgccccgcggcctctggagccccttcagtgaccaagatacagagatcaggacgcctttgcgccgccccaggtgcccgcccctagctggctctgcttgggccgcgagggaaggtgaggtcgggggcggagccggggcgtgacagccggggtgtgtgtccgccgggcttggtgcctccggtggccctgcagcaccgtcccacctctgccaccctccgatggggccgctacctgtgtgcctgccaatcatgctgctcctgctactgccgtcgctgctgctgctgctgcttctacctggccccgggtccggcgaggcctccaggatattacgtgtgcaccggcgtgggatcctggaactggcaggaactgtgggttgtgttggtccccgaacccccatcgcctatatgaaatatggttgcttttgtggcttgggaggccatggccagccccgcgatgccattgactggtgctgccatggccacgactgttgttacactcgagctgaggaggccggctgcagccccaagacagagcgctactcctggcagtgcgtcaatcagagcgtcctgtgcggaccggcagagaacaaatgccaagaactgttgtgcaagtgtgaccaggagattgctaactgcttagcccaaactgagtacaacttaaagtacctcttctacccccagttcctatgtgagccggactcgcccaagtgtgactgactaccttgacttgaaatgctcttttgcacaaggaaataaagcgtcctctcagtaatg

SEQ ID NO: 3127 - DNA, 1000 bp, Homo sapiens
  source 1..1000: mol_type = genomic DNA
ggccttccaaagtgctgggattacaggcgtgagtcaccgcgcccggccaaataaaataaaatgttaaagcaaattcaggactacccctcctccaagtcttctgttccctttgggcgcccaggtgagcgggggaggggctgggggagtaataacatcaaaagagcgccttttcctcccttattccgaggagacttccctgggcctgactcccggtcctgtccccagcgccccgcggcctctggagccccttcagtgaccaagatacagagatcaggacgcctttgcgccgccccaggtgcccgcccctagctggctctgcttgggccgcgagggaaggtgaggtcgggggcggagccggggcgtgacagccggggtgtgtgtccgccgggcttggtgcctccggtggccctgcagcaccgtcccacctctgccaccctccgatggggccgctacctgtgtgcctgccaatcatgctgctcctgctactgccgtcgctgctgctgctgctgcttctacctggccccgggtccggcgaggcctccaggatattacgtgtgcaccggcgtgggatcctggaactggcaggaactgtgggttgtgttggtccccgaacccccatcgcctatatgaaatatggttgcttttgtggcttgggaggccatggccagccccgcgatgccattgactggtgctgccatggccacgactgttgttacactcgagctgaggaggccggctgcagccccaagacagagcgctactcctggcagtgcgtcaatcagagcgtcctgtgcggaccggcagagaacaaatgccaagaactgttgtgcaagtgtgaccaggagattgctaactgcttagcccaaactgagtacaacttaaagtacctcttctacccccagttcctatgtgagccggactcgcccaagtgtgactgactaccttgacttgaaatgctcttttgcacaaggaaataaagcgtcctctcagtaatgaacaa

SEQ ID NO: 3128 - DNA, 1808 bp, Homo sapiens
  source 1..1808: mol_type = genomic DNA
cgcaggcgcacaggggacggttgctggcccaggtgagcgggcgcgctggtccaggtgagcgggcgcgtccccgcgacggcgctgcctgcccgaggcggttcacgtaaagacagcgagatcctgagggccagccgggaaggaggcgtggatatggagctggctgctgccaagtccggggcccgcgccgctgcctagcgcgtcctggggactctgtggggacgcgccccgcgccgcggctcggggacccgtagagcccggcgctgcgcgcatggccctgctctcgcgccccgcgctcaccctcctgctcctcctcatggccgctgttgtcaggtgccaggagcaggcccagaccaccgactggagagccaccctgaagaccatccggaacggcgttcataagatagacacgtacctgaacgccgccttggacctcctgggaggcgaggacggtctctgccagtataaatgcagtgacggatctaagcctttcccacgttatggttataaaccctccccaccgaatggatgtggctctccactgtttggtgttcatcttaacattggtatcccttccctgacaaagtgttgcaaccaacacgacaggtgctatgagacctgtggcaaaagcaagaatgactgtgatgaagaattccagtattgcctctccaagatctgccgagatgtacagaaaacactaggactaactcagcatgttcaggcatgtgaaacaacagtggagctcttgtttgacagtgttatacatttaggttgtaaaccatatctggacagccaacgagccgcatgcaggtgtcattatgaagaaaaaactgatctttaaaggagatgccgacagctagtgacagatgaagatggaagaacatacctttgacaaataactaatgtttttacaacataaaactgtcttatttttgtgaaaggattattttgagaccttaaaataatttatatcttgatgttaaaacctcaaagcaaaaaaagtgagggagatagtgaggggagggcacgcttgtcttctcaggtatcttccccagcattgctcccttacttagtatgccaaatgtcttgaccaatatcaaaaacaagtgcttgtttagcggagaattttgaaaagaggaatatataactcaattttcacaaccacatttaccaaaaaaagagatcaaatataaaattcatcataatgtctgttcaacattatcttatttggaaaatggggaaattatcacttacaagtatttgtttactatgaaattttaaatacacatttatgcctagaaggaacggactttttttttctattttaattacacataatatgtaattaaagtacaacataatatgttgtttctctgtagcccgttgagcatatgagtaagtcacatttctattaggactacttacaaggacaaggtttccatttttccagttgtaaaattggaaccatcagctgataacctcgtagggagcaaccccaggatagctaagtgttatgtaatatgcctagaaggtgatgtgaatgcgattcagaagcatagccactcccattttatgagctactcacatgacaaatgtcatcttttgctataacctttgccaagttagagaaaagatggatttaatgagataaatgaaaagatatttaacctaatatatcaaggcactatttgctgttatgctttgttatttatttcccagcacttgttccttattgtagattttttaaagactgtaaccttttactaactgtggtcttactaaaatttgtgcttgatactgcttttcaaaaa

SEQ ID NO: 3129 - DNA, 755 bp, Homo sapiens
  source 1..755: mol_type = genomic DNA
tgagggccagccgggaaggaggcgtggatatggagctggctgctgccaagtccggggcccgcgccgctgcctagcgcgtcctggggactctgtggggacgcgccccgcgccgcggctcggggacccgtagagcccggcgctgcgcgcatggccctgctctcgcgccccgcgctcaccctcctgctcctcctcatggccgctgttgtcaggtgccaggagcaggcccagaccaccgactggagagccaccctgaagaccatccggaacggcgttcataagatagacacgtacctgaacgccgccttggacctcctgggaggcgaggacggtctctgccagtataaatgcagtgacgcttaacattggtatcccttccctgacaaagtgttgcaaccaacacgacaggtgctatgagacctgtggcaaaagcaagaatgactgtgatgaagaattccagtattgcctctccaagatctgccgagatgtacagaaaacactaggactaactcagcatgttcaggcatgtgaaacaacagtggagctcttgtttgacagtgttatacatttaggttgtaaaccatatctggacagccaacgagccgcatgcaggtgtcattatgaagaaaaaactgatctttaaaggagatgccgacagctagtgacagatgaagatggaagaacatacctttgacaaataactaatgtttttacaacataaaactgtcttatttttgtgaaaggattattttgagacc

SEQ ID NO: 3130 - DNA, 1128 bp, Homo sapiens
  source 1..1128: mol_type = genomic DNA
cctgcctgacatctgggtagggggtttgtccctggaattctgggacactggctggggtttgaggagagaagccagtacctacctggctgcaggatgaagctggccagtggcttcttggttttgtggctcagccttgggggtggcctggctcagagcgacacgagccctgacacggaggagtcctattcagactggggccttcggcacctccggggaagctttgaatccgtcaatagctacttcgattcttttctggagctgctgggagggaagaatggagtctgtcagtacaggtgccgatatggaaaggcaccaatgcccagacctggctacaagccccaagagcccaatggctgcggctcctatttcctgggtctcaaggtaccagaaagtatggacttgggcattccagcaatgacaaagtgctgcaaccagctggatgtctgttatgacacttgcggtgccaacaaatatcgctgtgatgcaaaattccgatggtgtctccactcgatctgctctgaccttaagcggagtctgggctttgtctccaaagtggaagcagcctgtgattccctggttgacactgtgttcaacaccgtgtggaccttgggctgccgcccctttatgaatagtcagcgggcagcttgcatctgtgcagaggaggagaaggaagagttatgaggaagaagtgattccttcctggttttgagtgacaccacagctgtcagccttcaagatgtcaagtcttcgagtcagcgtgactcattcattcttccaacagtttggacaccacaaagcaggagaaagggaacatttttctacagctggaaagtgagtcctatcctttgaggaaatttgaaaaaagacatggagtggtttgaaagctactcttcatttaagactgctctccccaaccaagacacatttgcctggaaattcagttcttagcttaaagactaaaatgcaagcaaaccctgcaattcctggacctgatagttatattcatgagtgaaattgtggggagtccagccatttgggaggcaatgactttctgctggcccatgtttcagttgccagtaagcttctcacatttaataaagtgtactttttagaacatttggaaagaga

SEQ ID NO: 3131 - DNA, 5285 bp, Homo sapiens
  source 1..5285: mol_type = genomic DNA
gagggcgcgcggaggacccgccgccgccggtgtgaggcggcccgtcctggctcccttgtccgggaagcccgcccaggagccgccgccgggtcccgctcgtctgccgcctcagcctcagccccaacctcagccgccgccgttgcgcttgctcccgggcggtcctggcctgtgccgccgccgcccccagcgtcggagccatggcgggcgccgcgtccccttgcgccaacggctgcgggcccggcgcgccctcggacgccgaggtgctgcacctctgccgcagcctcgaggtgggcaccgtcatgactttgttctactccaagaagtcgcagcgacccgagcggaagaccttccaggtcaagctggagacgcgccagatcacgtggagccggggcgccgacaagatcgagggggccattgacattcgtgaaattaaggagatccgcccagggaagacctcacgggactttgatcgctatcaagaggacccagctttccggccggaccagtcacattgctttgtcattctctatggaatggaatttcgcctgaaaacgctgagcctgcaagccacatctgaggatgaagtgaacatgtggatcaagggcttaacttggctgatggaggatacattgcaggcacccacacccctgcagattgagaggtggctccggaagcagttttactcagtggatcggaatcgtgaggatcgtatatcagccaaggacctgaagaacatgctgtcccaggtcaactaccgggtccccaacatgcgcttcctccgagagcggctgacggacctggagcagcgcagcggggacatcacctacgggcagtttgctcagctgtaccgcagcctcatgtacagcgcccagaagacgatggacctccccttcttggaagccagtactctgagggctggggagcggccggagctttgccgagtgtcccttcctgagttccagcagttccttcttgactaccagggggagctgtgggctgttgatcgcctccaggtgcaggagttcatgctcagcttcctccgagaccccttacgagagatcgaggagccatacttcttcctggatgagtttgtcaccttcctgttctccaaagagaacagtgtgtggaactcgcagctggatgcagtatgcccggacaccatgaacaaccctctttcccactactggatctcctcctcgcacaacacgtacctgaccggggaccagttctccagtgagtcctccttggaagcctatgctcgctgcctgcggatgggctgtcgctgcattgagttggactgctgggacggcccggatgggatgccagttatttaccatgggcacacccttaccaccaagatcaagttctcagatgtcctgcacaccatcaaggagcatgcctttgtggcctcagagtacccagtcatcctgtccattgaggaccactgcagcattgcccagcagagaaacatggcccaatacttcaagaaggtgctgggggacacactcctcaccaagcccgtggagatctctgccgacgggctcccctcacccaaccagcttaagaggaagatcctcatcaagcacaagaagctggctgagggcagtgcctacgaggaggtgcctacatccatgatgtactctgagaacgacatcagcaactctatcaagaatggcatcctctacctggaggaccctgtgaaccacgaatggtatccccactactttgttctgaccagcagcaagatctactactctgaggagaccagcagtgaccagggcaacgaggatgaggaggagcccaaggaggtcagcagcagcacagagctgcactccaatgagaagtggttccatgggaagctaggggcagggcgtgacgggcgtcacatcgctgagcgcctgcttactgagtactgcatcgagaccggagcccctgacggctccttcctcgtgcgagagagtgagaccttcgtgggcgactacacgctctctttctggcggaacgggaaagtccagcactgccgtatccactcccggcaagatgctgggacccccaagttcttcttgacagacaacctcgtctttgactccctctatgacctcatcacgcactaccagcaggtgcccctgcgctgtaatgagtttgagatgcgactttcagagcctgtcccacagaccaacgcccacgagagcaaagagtggtaccacgcgagcctgaccagagcacaggctgagcacatgctaatgcgcgtccctcgtgatggggccttcctggtgcggaagcggaatgaacccaactcatatgccatctctttccgggctgagggcaagatcaagcattgccgtgtccagcaagagggccagacagtgatgctagggaactcggagttcgacagccttgttgacctcatcagctactatgagaaacacccgctataccgcaagatgaagctgcgctatcccatcaacgaggaggcactggagaagattggcacagctgagcctgactacggggccctgtatgagggacgcaaccctggcttctatgtagaggcaaaccctatgccaactttcaagtgtgcagtcaaagccctctttgactacaaggcccagagggaggacgagctgaccttcatcaagagcgccatcatccagaatgtggagaagcaagagggaggctggtggcgaggggactacggagggaagaagcagctgtggttcccatcaaactacgtggaagagatggtcaaccccgtggccctggagccggagagggagcacttggacgagaacagccccctaggggacttgctgcggggggtcttggatgtgccggcttgtcagattgccatccgtcctgagggcaagaacaaccggctcttcgtcttctccatcagcatggcgtcggtggcccactggtccctggatgttgctgccgactcacaggaggagctgcaggactgggtgaaaaagatccgtgaagtggcccagacagcagacgccaggctcactgaagggaagataatggaacggaggaagaagattgccctggagctctctgaacttgtcgtctactgccggcctgttccctttgatgaagagaagattggcacagaacgtgcttgctaccgggacatgtcatccttcccggaaaccaaggctgagaaatacgtgaacaaggccaaaggcaagaagttccttcagtacaatcgactgcagctctcccgcatctaccccaagggccagcgactggattcctccaactacgatcctttgcccatgtggatctgtggcagtcagcttgtggccctcaacttccagacccctgacaagcctatgcagatgaaccaggccctcttcatgacgggcaggcactgtggctacgtgctgcagccaagcaccatgcgggatgaggccttcgacccctttgacaagagcagcctccgcgggctggagccatgtgccatctctattgaggtgctgggggcccgacatctgccaaagaatggccgaggcattgtgtgtccttttgtggagattgaggtggctggagctgagtatgacagcaccaagcagaagacagagtttgtggtggacaatggactcaaccctgtatggccagccaagcccttccacttccagatcagtaaccctgaatttgcctttctgcgcttcgtggtgtatgaggaagacatgtttagtgaccagaatttcctggctcaggctactttcccagtaaaaggcctgaagacaggatacagagcagtgcctttgaagaacaactacagtgaggacctggagttggcctccctgctgatcaagattgacattttccctgccaagcaggagaatggtgacctcagtcccttcagtggtacgtccctgcgggagcggggctcagatgcctcaggccagctgtttcatggccgagcccgggaaggctcctttgaatcccgctaccagcagccgtttgaggacttccgcatctcccaggagcatctcgcagaccattttgacagtcgagaacgaagggccccaagaaggactcgggtcaatggagacaaccgcctctagttgtaccccagcctcgttggagagcagcaggtgctgtgcgccttgtagaatgccgcgaactgggttctttggaagcagccccctgtggcggccttccgggtctcgcagcctgaagcctggattccagcagtgaatgctagacagaaaccaagccattaatgagatgttattactgttttgggcctccatgccccagctctggatgaaggcaaaaactgtactgtgtttcgcattaagcacacacatctggccctgacttctggagatggatccttccatcttgtggggccaggaccatggccgaagccccttggagagagaggctgcctcagccagtggcacaggagactccaaggagctactgacattcctaagagtggaggaggaggaggagccttgctgggccagggaaacaaagtttacattgtcctgtagctttaaaaccacagctgggcagggtgagaagctagatgcccctgcagtttggccctggagccagggcagaggaatgtagggcctgcatggagaagggttctgccctgcctgaggaggaggacacagcacaagggcacattgcccatggctgggaacatgacccagcctgaaagatacaggggatcatgttaaaaatagcagtattatttttcgtctcaatggtattgtaactaagttatttactcctcctgctcctcacccctgtagggaaaccttggagaggagagtggcaggtgggctgcctgctgtgttaagaggacttagtttgtgatgtaaggcactgtcaggaatggggggcgggccagggtgggaagagaagaaatagcagagcctattttggtgaggttttttgtttttaagtcaaagaagactcagtatgctttccctgaggaatgaaaaagggattgaggagttgcctgactcctgggtgggtggggtacaggcagttaggtgctgaatgaagctgccatccttgctgcagcttctaactggtaaaaagatccagggatggagatgggaaggttagaaaggcagccctcacctctgaggacagaggccggggtccaggcccgtgggcgcaaaggtgcctcatagcatagccagcattcagcacacacaaacctactgcccacatttgggctcagggttggccatttgctagttctgctgccctcttaagatctgactgccaaataaatcatcctcatgtcctttttc

SEQ ID NO: 3132 - DNA, 5490 bp, Homo sapiens
  source 1..5490: mol_type = genomic DNA
gccgctcgtggccgccgggctgtgtccggggccgcgtgagaaagctctgcgggactgagggctgggtgggtcgaccgggaacggcgcgcgctcccgccgccatcgcgcctccgtccccgcctgcggcctgtctgggggtcgcggggcgcaggcgcggcgggccgacgggcgggggtcctccccacgggtgcgcgggcgcctttgttcccggcgccgaagcggggtggggcctcagggcagccccgccccgccgcgctgaggccccgccccgtgtccgcctgcaggagccgccgccgggtcccgctcgtctgccgcctcagcctcagccccaacctcagccgccgccgttgcgcttgctcccgggcggtcctggcctgtgccgccgccgcccccagcgtcggagccatggcgggcgccgcgtccccttgcgccaacggctgcgggcccggcgcgccctcggacgccgaggtgctgcacctctgccgcagcctcgaggtgggcaccgtcatgactttgttctactccaagaagtcgcagcgacccgagcggaagaccttccaggtcaagctggagacgcgccagatcacgtggagccggggcgccgacaagatcgagggggccattgacattcgtgaaattaaggagatccgcccagggaagacctcacgggactttgatcgctatcaagaggacccagctttccggccggaccagtcacattgctttgtcattctctatggaatggaatttcgcctgaaaacgctgagcctgcaagccacatctgaggatgaagtgaacatgtggatcaagggcttaacttggctgatggaggatacattgcaggcacccacacccctgcagattgagaggtggctccggaagcagttttactcagtggatcggaatcgtgaggatcgtatatcagccaaggacctgaagaacatgctgtcccaggtcaactaccgggtccccaacatgcgcttcctccgagagcggctgacggacctggagcagcgcagcggggacatcacctacgggcagtttgctcagctgtaccgcagcctcatgtacagcgcccagaagacgatggacctccccttcttggaagccagtactctgagggctggggagcggccggagctttgccgagtgtcccttcctgagttccagcagttccttcttgactaccagggggagctgtgggctgttgatcgcctccaggtgcaggagttcatgctcagcttcctccgagaccccttacgagagatcgaggagccatacttcttcctggatgagtttgtcaccttcctgttctccaaagagaacagtgtgtggaactcgcagctggatgcagtatgcccggacaccatgaacaaccctctttcccactactggatctcctcctcgcacaacacgtacctgaccggggaccagttctccagtgagtcctccttggaagcctatgctcgctgcctgcggatgggctgtcgctgcattgagttggactgctgggacggcccggatgggatgccagttatttaccatgggcacacccttaccaccaagatcaagttctcagatgtcctgcacaccatcaaggagcatgcctttgtggcctcagagtacccagtcatcctgtccattgaggaccactgcagcattgcccagcagagaaacatggcccaatacttcaagaaggtgctgggggacacactcctcaccaagcccgtggagatctctgccgacgggctcccctcacccaaccagcttaagaggaagatcctcatcaagcacaagaagctggctgagggcagtgcctacgaggaggtgcctacatccatgatgtactctgagaacgacatcagcaactctatcaagaatggcatcctctacctggaggaccctgtgaaccacgaatggtatccccactactttgttctgaccagcagcaagatctactactctgaggagaccagcagtgaccagggcaacgaggatgaggaggagcccaaggaggtcagcagcagcacagagctgcactccaatgagaagtggttccatgggaagctaggggcagggcgtgacgggcgtcacatcgctgagcgcctgcttactgagtactgcatcgagaccggagcccctgacggctccttcctcgtgcgagagagtgagaccttcgtgggcgactacacgctctctttctggcggaacgggaaagtccagcactgccgtatccactcccggcaagatgctgggacccccaagttcttcttgacagacaacctcgtctttgactccctctatgacctcatcacgcactaccagcaggtgcccctgcgctgtaatgagtttgagatgcgactttcagagcctgtcccacagaccaacgcccacgagagcaaagagtggtaccacgcgagcctgaccagagcacaggctgagcacatgctaatgcgcgtccctcgtgatggggccttcctggtgcggaagcggaatgaacccaactcatatgccatctctttccgggctgagggcaagatcaagcattgccgtgtccagcaagagggccagacagtgatgctagggaactcggagttcgacagccttgttgacctcatcagctactatgagaaacacccgctataccgcaagatgaagctgcgctatcccatcaacgaggaggcactggagaagattggcacagctgagcctgactacggggccctgtatgagggacgcaaccctggcttctatgtagaggcaaaccctatgccaactttcaagtgtgcagtcaaagccctctttgactacaaggcccagagggaggacgagctgaccttcatcaagagcgccatcatccagaatgtggagaagcaagagggaggctggtggcgaggggactacggagggaagaagcagctgtggttcccatcaaactacgtggaagagatggtcaaccccgtggccctggagccggagagggagcacttggacgagaacagccccctaggggacttgctgcggggggtcttggatgtgccggcttgtcagattgccatccgtcctgagggcaagaacaaccggctcttcgtcttctccatcagcatggcgtcggtggcccactggtccctggatgttgctgccgactcacaggaggagctgcaggactgggtgaaaaagatccgtgaagtggcccagacagcagacgccaggctcactgaagggaagataatggaacggaggaagaagattgccctggagctctctgaacttgtcgtctactgccggcctgttccctttgatgaagagaagattggcacagaacgtgcttgctaccgggacatgtcatccttcccggaaaccaaggctgagaaatacgtgaacaaggccaaaggcaagaagttccttcagtacaatcgactgcagctctcccgcatctaccccaagggccagcgactggattcctccaactacgatcctttgcccatgtggatctgtggcagtcagcttgtggccctcaacttccagacccctgacaagcctatgcagatgaaccaggccctcttcatgacgggcaggcactgtggctacgtgctgcagccaagcaccatgcgggatgaggccttcgacccctttgacaagagcagcctccgcgggctggagccatgtgccatctctattgaggtgctgggggcccgacatctgccaaagaatggccgaggcattgtgtgtccttttgtggagattgaggtggctggagctgagtatgacagcaccaagcagaagacagagtttgtggtggacaatggactcaaccctgtatggccagccaagcccttccacttccagatcagtaaccctgaatttgcctttctgcgcttcgtggtgtatgaggaagacatgtttagtgaccagaatttcctggctcaggctactttcccagtaaaaggcctgaagacaggatacagagcagtgcctttgaagaacaactacagtgaggacctggagttggcctccctgctgatcaagattgacattttccctgccaaggagaatggtgacctcagtcccttcagtggtacgtccctgcgggagcggggctcagatgcctcaggccagctgtttcatggccgagcccgggaaggctcctttgaatcccgctaccagcagccgtttgaggacttccgcatctcccaggagcatctcgcagaccattttgacagtcgagaacgaagggccccaagaaggactcgggtcaatggagacaaccgcctctagttgtaccccagcctcgttggagagcagcaggtgctgtgcgccttgtagaatgccgcgaactgggttctttggaagcagccccctgtggcggccttccgggtctcgcagcctgaagcctggattccagcagtgaatgctagacagaaaccaagccattaatgagatgttattactgttttgggcctccatgccccagctctggatgaaggcaaaaactgtactgtgtttcgcattaagcacacacatctggccctgacttctggagatggatccttccatcttgtggggccaggaccatggccgaagccccttggagagagaggctgcctcagccagtggcacaggagactccaaggagctactgacattcctaagagtggaggaggaggaggagccttgctgggccagggaaacaaagtttacattgtcctgtagctttaaaaccacagctgggcagggtgagaagctagatgcccctgcagtttggccctggagccagggcagaggaatgtagggcctgcatggagaagggttctgccctgcctgaggaggaggacacagcacaagggcacattgcccatggctgggaacatgacccagcctgaaagatacaggggatcatgttaaaaatagcagtattatttttcgtctcaatggtattgtaactaagttatttactcctcctgctcctcacccctgtagggaaaccttggagaggagagtggcaggtgggctgcctgctgtgttaagaggacttagtttgtgatgtaaggcactgtcaggaatggggggcgggccagggtgggaagagaagaaatagcagagcctattttggtgaggttttttgtttttaagtcaaagaagactcagtatgctttccctgaggaatgaaaaagggattgaggagttgcctgactcctgggtgggtggggtacaggcagttaggtgctgaatgaagctgccatccttgctgcagcttctaactggtaaaaagatccagggatggagatgggaaggttagaaaggcagccctcacctctgaggacagaggccggggtccaggcccgtgggcgcaaaggtgcctcatagcatagccagcattcagcacacacaaacctactgcccacatttgggctcagggttggccatttgctagttctgctgccctcttaagatctgactgccaaataaatcatcctcatgtcctttttc

SEQ ID NO: 3133 - DNA, 5493 bp, Homo sapiens
  source 1..5493: mol_type = genomic DNA
gccgctcgtggccgccgggctgtgtccggggccgcgtgagaaagctctgcgggactgagggctgggtgggtcgaccgggaacggcgcgcgctcccgccgccatcgcgcctccgtccccgcctgcggcctgtctgggggtcgcggggcgcaggcgcggcgggccgacgggcgggggtcctccccacgggtgcgcgggcgcctttgttcccggcgccgaagcggggtggggcctcagggcagccccgccccgccgcgctgaggccccgccccgtgtccgcctgcaggagccgccgccgggtcccgctcgtctgccgcctcagcctcagccccaacctcagccgccgccgttgcgcttgctcccgggcggtcctggcctgtgccgccgccgcccccagcgtcggagccatggcgggcgccgcgtccccttgcgccaacggctgcgggcccggcgcgccctcggacgccgaggtgctgcacctctgccgcagcctcgaggtgggcaccgtcatgactttgttctactccaagaagtcgcagcgacccgagcggaagaccttccaggtcaagctggagacgcgccagatcacgtggagccggggcgccgacaagatcgagggggccattgacattcgtgaaattaaggagatccgcccagggaagacctcacgggactttgatcgctatcaagaggacccagctttccggccggaccagtcacattgctttgtcattctctatggaatggaatttcgcctgaaaacgctgagcctgcaagccacatctgaggatgaagtgaacatgtggatcaagggcttaacttggctgatggaggatacattgcaggcacccacacccctgcagattgagaggtggctccggaagcagttttactcagtggatcggaatcgtgaggatcgtatatcagccaaggacctgaagaacatgctgtcccaggtcaactaccgggtccccaacatgcgcttcctccgagagcggctgacggacctggagcagcgcagcggggacatcacctacgggcagtttgctcagctgtaccgcagcctcatgtacagcgcccagaagacgatggacctccccttcttggaagccagtactctgagggctggggagcggccggagctttgccgagtgtcccttcctgagttccagcagttccttcttgactaccagggggagctgtgggctgttgatcgcctccaggtgcaggagttcatgctcagcttcctccgagaccccttacgagagatcgaggagccatacttcttcctggatgagtttgtcaccttcctgttctccaaagagaacagtgtgtggaactcgcagctggatgcagtatgcccggacaccatgaacaaccctctttcccactactggatctcctcctcgcacaacacgtacctgaccggggaccagttctccagtgagtcctccttggaagcctatgctcgctgcctgcggatgggctgtcgctgcattgagttggactgctgggacggcccggatgggatgccagttatttaccatgggcacacccttaccaccaagatcaagttctcagatgtcctgcacaccatcaaggagcatgcctttgtggcctcagagtacccagtcatcctgtccattgaggaccactgcagcattgcccagcagagaaacatggcccaatacttcaagaaggtgctgggggacacactcctcaccaagcccgtggagatctctgccgacgggctcccctcacccaaccagcttaagaggaagatcctcatcaagcacaagaagctggctgagggcagtgcctacgaggaggtgcctacatccatgatgtactctgagaacgacatcagcaactctatcaagaatggcatcctctacctggaggaccctgtgaaccacgaatggtatccccactactttgttctgaccagcagcaagatctactactctgaggagaccagcagtgaccagggcaacgaggatgaggaggagcccaaggaggtcagcagcagcacagagctgcactccaatgagaagtggttccatgggaagctaggggcagggcgtgacgggcgtcacatcgctgagcgcctgcttactgagtactgcatcgagaccggagcccctgacggctccttcctcgtgcgagagagtgagaccttcgtgggcgactacacgctctctttctggcggaacgggaaagtccagcactgccgtatccactcccggcaagatgctgggacccccaagttcttcttgacagacaacctcgtctttgactccctctatgacctcatcacgcactaccagcaggtgcccctgcgctgtaatgagtttgagatgcgactttcagagcctgtcccacagaccaacgcccacgagagcaaagagtggtaccacgcgagcctgaccagagcacaggctgagcacatgctaatgcgcgtccctcgtgatggggccttcctggtgcggaagcggaatgaacccaactcatatgccatctctttccgggctgagggcaagatcaagcattgccgtgtccagcaagagggccagacagtgatgctagggaactcggagttcgacagccttgttgacctcatcagctactatgagaaacacccgctataccgcaagatgaagctgcgctatcccatcaacgaggaggcactggagaagattggcacagctgagcctgactacggggccctgtatgagggacgcaaccctggcttctatgtagaggcaaaccctatgccaactttcaagtgtgcagtcaaagccctctttgactacaaggcccagagggaggacgagctgaccttcatcaagagcgccatcatccagaatgtggagaagcaagagggaggctggtggcgaggggactacggagggaagaagcagctgtggttcccatcaaactacgtggaagagatggtcaaccccgtggccctggagccggagagggagcacttggacgagaacagccccctaggggacttgctgcggggggtcttggatgtgccggcttgtcagattgccatccgtcctgagggcaagaacaaccggctcttcgtcttctccatcagcatggcgtcggtggcccactggtccctggatgttgctgccgactcacaggaggagctgcaggactgggtgaaaaagatccgtgaagtggcccagacagcagacgccaggctcactgaagggaagataatggaacggaggaagaagattgccctggagctctctgaacttgtcgtctactgccggcctgttccctttgatgaagagaagattggcacagaacgtgcttgctaccgggacatgtcatccttcccggaaaccaaggctgagaaatacgtgaacaaggccaaaggcaagaagttccttcagtacaatcgactgcagctctcccgcatctaccccaagggccagcgactggattcctccaactacgatcctttgcccatgtggatctgtggcagtcagcttgtggccctcaacttccagacccctgacaagcctatgcagatgaaccaggccctcttcatgacgggcaggcactgtggctacgtgctgcagccaagcaccatgcgggatgaggccttcgacccctttgacaagagcagcctccgcgggctggagccatgtgccatctctattgaggtgctgggggcccgacatctgccaaagaatggccgaggcattgtgtgtccttttgtggagattgaggtggctggagctgagtatgacagcaccaagcagaagacagagtttgtggtggacaatggactcaaccctgtatggccagccaagcccttccacttccagatcagtaaccctgaatttgcctttctgcgcttcgtggtgtatgaggaagacatgtttagtgaccagaatttcctggctcaggctactttcccagtaaaaggcctgaagacaggatacagagcagtgcctttgaagaacaactacagtgaggacctggagttggcctccctgctgatcaagattgacattttccctgccaagcaggagaatggtgacctcagtcccttcagtggtacgtccctgcgggagcggggctcagatgcctcaggccagctgtttcatggccgagcccgggaaggctcctttgaatcccgctaccagcagccgtttgaggacttccgcatctcccaggagcatctcgcagaccattttgacagtcgagaacgaagggccccaagaaggactcgggtcaatggagacaaccgcctctagttgtaccccagcctcgttggagagcagcaggtgctgtgcgccttgtagaatgccgcgaactgggttctttggaagcagccccctgtggcggccttccgggtctcgcagcctgaagcctggattccagcagtgaatgctagacagaaaccaagccattaatgagatgttattactgttttgggcctccatgccccagctctggatgaaggcaaaaactgtactgtgtttcgcattaagcacacacatctggccctgacttctggagatggatccttccatcttgtggggccaggaccatggccgaagccccttggagagagaggctgcctcagccagtggcacaggagactccaaggagctactgacattcctaagagtggaggaggaggaggagccttgctgggccagggaaacaaagtttacattgtcctgtagctttaaaaccacagctgggcagggtgagaagctagatgcccctgcagtttggccctggagccagggcagaggaatgtagggcctgcatggagaagggttctgccctgcctgaggaggaggacacagcacaagggcacattgcccatggctgggaacatgacccagcctgaaagatacaggggatcatgttaaaaatagcagtattatttttcgtctcaatggtattgtaactaagttatttactcctcctgctcctcacccctgtagggaaaccttggagaggagagtggcaggtgggctgcctgctgtgttaagaggacttagtttgtgatgtaaggcactgtcaggaatggggggcgggccagggtgggaagagaagaaatagcagagcctattttggtgaggttttttgtttttaagtcaaagaagactcagtatgctttccctgaggaatgaaaaagggattgaggagttgcctgactcctgggtgggtggggtacaggcagttaggtgctgaatgaagctgccatccttgctgcagcttctaactggtaaaaagatccagggatggagatgggaaggttagaaaggcagccctcacctctgaggacagaggccggggtccaggcccgtgggcgcaaaggtgcctcatagcatagccagcattcagcacacacaaacctactgcccacatttgggctcagggttggccatttgctagttctgctgccctcttaagatctgactgccaaataaatcatcctcatgtcctttttc

SEQ ID NO: 3134 - DNA, 4263 bp, Homo sapiens
  source 1..4263: mol_type = genomic DNA
gcgccggcggcggagggcgtgagcggcgctgagtgacccgagtcgggacgcgggctgcgcgcgcgggaccccggagcccaaacccggggcaggcgggcagctgtgcccgggcggcacggccagcttcctgatttctcccgattccttccttctccctggagcggccgacaatgtccaccacggtcaatgtagattcccttgcggaatatgagaagagccagatcaagagagccctggagctggggacggtgatgactgtgttcagcttccgcaagtccacccccgagcggagaaccgtccaggtgatcatggagacgcggcaggtggcctggagcaagaccgctgacaagatcgagggcttcttggatatcatggaaataaaagaaatccgcccagggaagaactccaaagatttcgagcgagcaaaagcagttcgccagaaagaagactgctgcttcaccatcctatatggcactcagttcgtcctcagcacgctcagcttggcagctgactctaaagaggatgcagttaactggctctctggcttgaaaatcttacaccaggaagcgatgaatgcgtccacgcccaccattatcgagagttggctgagaaagcagatatattctgtggatcaaaccagaagaaacagcatcagtctccgagagttgaagaccatcttgcccctgatcaactttaaagtgagcagtgccaagttccttaaagataagtttgtggaaataggagcacacaaagatgagctcagctttgaacagttccatctcttctataaaaaacttatgtttgaacagcaaaaatcgattctcgatgaattcaaaaaggattcgtccgtgttcatcctggggaacactgacaggccggatgcctctgctgtttacctgcatgacttccagaggtttctcatacatgaacagcaggagcattgggctcaggatctgaacaaagtccgtgagcggatgacaaagttcattgatgacaccatgcgtgaaactgctgagcctttcttgtttgtggatgagttcctcacgtacctgttttcacgagaaaacagcatctgggatgagaagtatgacgcggtggacatgcaggacatgaacaaccccctgtctcattactggatctcctcgtcacataacacgtaccttacaggtgaccagctgcggagcgagtcgtccccagaagcttacatccgctgcctgcgcatgggctgtcgctgcattgaactggactgctgggacgggcccgatgggaagccggtcatctaccatggctggacgcggactaccaagatcaagtttgacgacgtcgtgcaggccatcaaagaccacgcctttgttacctcgagcttcccagtgatcctgtccatcgaggagcactgcagcgtggagcaacagcgtcacatggccaaggccttcaaggaagtatttggcgacctgctgttgacgaagcccacggaggccagtgctgaccagctgccctcgcccagccagctgcgggagaagatcatcatcaagcataagaagctgggcccccgaggcgatgtggatgtcaacatggaggacaagaaggacgaacacaagcaacagggggagctgtacatgtgggattccattgaccagaaatggactcggcactactgcgccattgccgatgccaagctgtccttcagtgatgacattgaacagactatggaggaggaagtgccccaggatataccccctacagaactacattttggggagaaatggttccacaagaaggtggagaagaggacgagtgccgagaagttgctgcaggaatactgcatggagacggggggcaaggatggcaccttcctggttcgggagagcgagaccttccccaatgactacaccctgtccttctggcggtcaggccgggtccagcactgccggatccgctccaccatggagggcgggaccctgaaatactacttgactgacaacctcaccttcagcagcatctatgccctcatccagcactaccgcgagacgcacctgcgctgcgccgagttcgagctgcggctcacggaccctgtgcccaaccccaacccccacgagtccaagccgtggtactatgacagcctgagccgcggagaggcagaggacatgctgatgaggattccccgggacggggccttcctgatccggaagcgagaggggagcgactcctatgccatcaccttcagggctaggggcaaggtaaagcattgtcgcatcaaccgggacggccggcactttgtgctggggacctccgcctattttgagagtctggtggagctcgtcagttactacgagaagcattcactctaccgaaagatgagactgcgctaccccgtgacccccgagctcctggagcgctacaatatggaaagagatataaactccctctacgacgtcagcagaatgtatgtggatcccagtgaaatcaatccgtccatgcctcagagaaccgtgaaagctctgtatgactacaaagccaagcgaagcgatgagctgagcttctgccgtggtgccctcatccacaatgtctccaaggagcccgggggctggtggaaaggagactatggaaccaggatccagcagtacttcccatccaactacgtcgaggacatctcaactgcagacttcgaggagctagaaaagcagattattgaagacaatcccttagggtctctttgcagaggaatattggacctcaatacctataacgtcgtgaaagcccctcagggaaaaaaccagaagtcctttgtcttcatcctggagcccaagcagcagggcgatcctccggtggagtttgccacagacagggtggaggagctctttgagtggtttcagagcatccgagagatcacctggaagattgacaccaaggagaacaacatgaagtactgggagaagaaccagtccatcgccatcgagctctctgacctggttgtctactgcaaaccaaccagcaaaaccaaggacaacttagaaaatcctgacttccgagaaatccgctcctttgtggagacgaaggctgacagcatcatcagacagaagcccgtcgacctcctgaagtacaatcaaaagggcctgacccgcgtctacccaaagggacaaagagttgactcttcaaactacgaccccttccgcctctggctgtgcggttctcagatggtggcactcaatttccagacggcagataagtacatgcagatgaatcacgcattgttttctctcaatgggcgcacgggctacgttctgcagcctgagagcatgaggacagagaaatatgacccgatgccacccgagtcccagaggaagatcctgatgacgctgacagtcaaggttctcggtgctcgccatctccccaaacttggacgaagtattgcctgtccctttgtagaagtggagatctgtggagccgagtatgacaacaacaagttcaagacgacggttgtgaatgataatggcctcagccctatctgggctccaacacaggagaaggtgacatttgaaatttatgacccaaacctggcatttctgcgctttgtggtttatgaagaagatatgttcagcgatcccaactttcttgctcatgccacttaccccattaaagcagtcaaatcaggattcaggtccgttcctctgaagaatgggtacagcgaggacatagagctggcttccctcctggttttctgtgagatgcggccagtcctggagagcgaagaggaactttactcctcctgtcgccagctgaggaggcggcaagaagaactgaacaaccagctctttctgtatgacacacaccagaacttgcgcaatgccaaccgggatgccctggttaaagagttcagtgttaatgagaaccagctccagctgtaccaggagaaatgcaacaagaggttaagagagaagagagtcagcaacagcaagttttactcatagaagctggggtatgtgtgtaagggtattgtgtgtgtgcgcatgtgtgtttgcatgtaggagaacgtgccctattcacactctgggaagacgctaatctgtgacatcttttcttcaagcctgccatcaaggacatttcttaagacccaactggcatgagttggggtaatttcctattattttcatcttggacaactttcttaacttatattctttatagaggattccccaaaatgtgctcctcatttttggcctctcatgttccaaacctcattgaataaaagcaatgaaaaccttg

SEQ ID NO: 3135 - DNA, 3032 bp, Homo sapiens
  source 1..3032: mol_type = genomic DNA
gctgagctccagctgtgccagaggcacccgagccctgagagtccgccgccaacgcgcaggtgctagcggccccttcgccctgcagcccctttgcttttactctgtccaaagttaacatgtcactgaaaaacgagccacgggtaaatacctctgcactgcagaaaattgctgctgacatgagtaatatcatagaaaatctggacacgcgggaactccactttgagggagaggaggtagactacgacgtgtctcccagcgatcccaagatacaagaagtgtatatccctttctctgctatttataacactcaaggatttaaggagcctaatatacagacgtatctctccggctgtccaataaaagcacaagttctggaagtggaacgcttcacatctacaacaagggtaccaagtattaatctttacactattgaattaacacatggggaatttaaatggcaagttaagaggaaattcaagcattttcaagaatttcacagagagctgctcaagtacaaagcctttatccgcatccccattcccactagaagacacacgtttaggaggcaaaacgtcagagaggagcctcgagagatgcccagtttgccccgttcatctgaaaacatgataagagaagaacaattccttggtagaagaaaacaactggaagattacttgacaaagatactaaaaatgcccatgtatagaaactatcatgccacaacagagtttcttgatataagccagctgtctttcatccatgatttgggaccaaagggcatagaaggtatgataatgaaaagatctggaggacacagaataccaggcttgaattgctgtggtcagggaagagcctgctacagatggtcaaaaagatggttaatagtgaaagattcctttttattgtatatgaaaccagacagcggtgccattgccttcgtcctgctggtagacaaagaattcaaaattaaggtggggaagaaggagacagaaacgaaatatggaatccgaattgataatctttcaaggacacttattttaaaatgcaacagctatagacatgctcggtggtggggaggggctatagaagaattcatccagaaacatggcaccaactttctcaaagatcatcgatttgggtcatatgctgctatccaagagaatgctttagctaaatggtatgttaatgccaaaggatattttgaagatgtggcaaatgcaatggaagaggcaaatgaagagatttttatcacagactggtggctgagtccagaaatcttcctgaaacgcccagtggttgagggaaatcgttggaggttggactgcattcttaaacgaaaagcacaacaaggagtgaggatcttcataatgctctacaaagaggtggaactcgctcttggcatcaatagtgaatacaccaagaggactttgatgcgtctacatcccaacataaaggtgatgagacacccggatcatgtgtcatccaccgtctatttgtgggctcaccatgagaagcttgtcatcattgaccaatcggtggcctttgtgggagggattgacctggcctatggaaggtgggacgacaatgagcacagactcacagacgtgggcagtgtgaagcgggtcacttcaggaccgtctctgggttccctcccacctgccgcaatggagtctatggaatccttaagactcaaagataaaaatgagcctgttcaaaacctacccatccagaagagtattgatgatgtggattcaaaactgaaaggaataggaaagccaagaaagttctccaaatttagtctctacaagcagctccacaggcaccacctgcacgacgcagatagcatcagcagcattgacagcacctccagttattttaatcactatagaagtcatcacaatttaatccatggtttaaaaccccacttcaaactctttcacccgtccagtgagtctgagcaaggactcactagacctcatgctgataccgggtccatccgtagtttacagacaggtgtgggagagctgcatggggaaaccagattctggcatggaaaggactactgcaatttcgtcttcaaagactgggttcaacttgataaaccttttgctgatttcattgacaggtactccacgccccggatgccctggcatgacattgcctctgcagtccacgggaaggcggctcgtgatgtggcacgtcacttcatccagcgctggaacttcacaaaaattatgaaatcaaaatatcggtccctttcttatccttttctgcttccaaagtctcaaacaacagcccatgagttgagatatcaagtgcctgggtctgtccatgctaacgtacagttgctccgctctgctgctgattggtctgctggtataaagtaccatgaagagtccatccacgccgcttacgtccatgtgatagagaacagcaggcactatatctatatcgaaaaccagtttttcataagctgtgctgatgacaaagttgtgttcaacaagataggcgatgccattgcccagaggatcctgaaagctcacagggaaaaccagaaataccgggtatatgtcgtgataccacttctgccagggttcgaaggagacatttcaaccggcggaggaaatgctctacaggcaatcatgcacttcaactacagaaccatgtgcagaggagaaaattccatccttggacagttaaaagcagagcttggtaatcagtggataaattacatatcattctgtggtcttagaacacatgcagagctcgaaggaaacctagtaactgagcttatctatgtccacagcaagttgttaattgctgatgataacactgttattattggctctgccaacataaatgaccgcagcatgctgggaaagcgtgacagtgaaatggctgtcattgtgcaagatacagagactgttccttcagtaatggatggaaaagagtaccaagctggccggtttgcccgaggacttcggctacagtgctttaggtctaaaatgactccaggtgtcgaagatccctga

SEQ ID NO: 3136 - DNA, 5261 bp, Homo sapiens
  source 1..5261: mol_type = genomic DNA
gctgagctccagctgtgccagaggcacccgagccctgagagtccgccgccaacgcgcaggtgctagcggccccttcgccctgcagcccctttgcttttactctgtccaaagttaacatgtcactgaaaaacgagccacgggtaaatacctctgcactgcagaaaattgctgctgacatgagtaatatcatagaaaatctggacacgcgggaactccactttgagggagaggaggtagactacgacgtgtctcccagcgatcccaagatacaagaagtgtatatccctttctctgctatttataacactcaaggatttaaggagcctaatatacagacgtatctctccggctgtccaataaaagcacaagttctggaagtggaacgcttcacatctacaacaagggtaccaagtattaatctttacactattgaattaacacatggggaatttaaatggcaagttaagaggaaattcaagcattttcaagaatttcacagagagctgctcaagtacaaagcctttatccgcatccccattcccactagaagacacacgtttaggaggcaaaacgtcagagaggagcctcgagagatgcccagtttgccccgttcatctgaaaacatgataagagaagaacaattccttggtagaagaaaacaactggaagattacttgacaaagatactaaaaatgcccatgtatagaaactatcatgccacaacagagtttcttgatataagccagctgtctttcatccatgatttgggaccaaagggcatagaaggtatgataatgaaaagatctggaggacacagaataccaggcttgaattgctgtggtcagggaagagcctgctacagatggtcaaaaagatggttaatagtgaaagattcctttttattgtatatgaaaccagacagcggtgccattgccttcgtcctgctggtagacaaagaattcaaaattaaggtggggaagaaggagacagaaacgaaatatggaatccgaattgataatctttcaaggacacttattttaaaatgcaacagctatagacatgctcggtggtggggaggggctatagaagaattcatccagaaacatggcaccaactttctcaaagatcatcgatttgggtcatatgctgctatccaagagaatgctttagctaaatggtatgttaatgccaaaggatattttgaagatgtggcaaatgcaatggaagaggcaaatgaagagatttttatcacagactggtggctgagtccagaaatcttcctgaaacgcccagtggttgagggaaatcgttggaggttggactgcattcttaaacgaaaagcacaacaaggagtgaggatcttcataatgctctacaaagaggtggaactcgctcttggcatcaatagtgaatacaccaagaggactttgatgcgtctacatcccaacataaaggtgatgagacacccggatcatgtgtcatccaccgtctatttgtgggctcaccatgagaagcttgtcatcattgaccaatcggtggcctttgtgggagggattgacctggcctatggaaggtgggacgacaatgagcacagactcacagacgtgggcagtgtgaagcgggtcacttcaggaccgtctctgggttccctcccaataccgggtccatccgtagtttacagacaggtgtgggagagctgcatggggaaaccagattctggcatggaaaggactactgcaatttcgtcttcaaagactgggttcaacttgataaaccttttgctgatttcattgacaggtactccacgccccggatgccctggcatgacattgcctctgcagtccacgggaaggcggctcgtgatgtggcacgtcacttcatccagcgctggaacttcacaaaaattatgaaatcaaaatatcggtccctttcttatccttttctgcttccaaagtctcaaacaacagcccatgagttgagatatcaagtgcctgggtctgtccatgctaacgtacagttgctccgctctgctgctgattggtctgctggtataaagtaccatgaagagtccatccacgccgcttacgtccatgtgatagagaacagcaggcactatatctatatcgaaaaccagtttttcataagctgtgctgatgacaaagttgtgttcaacaagataggcgatgccattgcccagaggatcctgaaagctcacagggaaaaccagaaataccgggtatatgtcgtgataccacttctgccagggttcgaaggagacatttcaaccggcggaggaaatgctctacaggcaatcatgcacttcaactacagaaccatgtgcagaggagaaaattccatccttggacagttaaaagcagagcttggtaatcagtggataaattacatatcattctgtggtcttagaacacatgcagagctcgaaggaaacctagtaactgagcttatctatgtccacagcaagttgttaattgctgatgataacactgttattattggctctgccaacataaatgaccgcagcatgctgggaaagcgtgacagtgaaatggctgtcattgtgcaagatacagagactgttccttcagtaatggatggaaaagagtaccaagctggccggtttgcccgaggacttcggctacagtgctttagggttgtccttggctatcttgatgacccaagtgaggacattcaggatccagtgagtgacaaattcttcaaggaggtgtgggtttcaacagcagctcgaaatgctacaatttatgacaaggttttccggtgccttcccaatgatgaagtacacaatttaattcagctgagagactttataaacaagcccgtattagctaaggaagatcccattcgagctgaggaggaactgaagaagatccgtggatttttggtgcaattccccttttatttcttgtctgaagaaagcctactgccttctgttgggaccaaagaggccatagtgcccatggaggtttggacttaagagatattcattggcagctcaaagacttccaccctggagaccacactgcacacagtgacttcctggggatgtcatagccaaagccaggcctgacgcattctcgtatccaacccaaggaccttttggaatgactggggagggctgcagtcacattgatgtaaggactgtaaacatcagcaagactttataattccttctgcctaacttgtaaaaagggggctgcattcttgttggtagcatgtactctgttgagtaaaacacatattcaaattccgtataccaaaatccatttcctttgtaacaagaatttaccagtaactgtgatctaggttgccaaaagttgtctgaatctccttattcttctctgatcttcatttatgcagccaatgtctagctggacctgccctcatcttgcagttcatacaggcactgtttgagagattgtttattattagatgttgtaatgctgcttcaagattcttcatggttacatgggatgcccctgctcatctggtcctgaagtagtaacattcacccaaatgaggatatagtcattattccttttcagtcactgtacgaacacggcagactttagcctacacagtagactgtgttaggcacttctggtaacattgacactgtatcttgacaccactaagcaacaggaaggaataaattccaatattgagacagagatttatttcattttgctcccaaaggcactgacaacatgagtccttgtgattaggcccacctgatcaaatgtaaaaacatgcatgggatatttgattacgtaacaaccagctaaaactgagagcacacagccttcggaaacccccaaggtgtcgaggaggatcagatccagataagagaagatgattccttctagtcctgtaaaatttcctgtcatccttagctgctgggttgattgaaatttgatctctacatttcaaaatcaaactagtgaatacagtttgtctttcaagagaatcagaggcatcgtaactcctaccaagttagtaagtatgagtctaaccttgtttgacattcaggtcttctgctacattatcttctttgagaaaaattaattgattataaaatatgtgctacttcacttacattattaaatatgtattaacgcctctcaccagggcttccagtgaagttacaatgccctagtctgtgaattagtctggaaacgtgtttttccttttcggatgttagagtaccctttgataaactaaattttactaagctgaacaactctgacagtctaaagagctaatgtgggttaccaaaaggcctgtacctgtaaaacaaaatgcaggtgtaatgattatacatgtctatggattacctggacatactctcatttgggttgttcttcaaagaagcaagcagccgatccctgttttcataaagctaatacttcagttggaaaaattaaacaggagcacaaagtcagggataggggttagcagaagagagaaatagtgtcacatcaagggcaggatctcatagctagggaacatttcacaaataaggtgagattttgtaaccaataataaaaatgaatgtttttataagtaaataacttatttttcatatggctaaagatggtaaaatgacttcattctatagccattgtaaataagaatttgctattgatgaaagaagttcagattggcatttgaagtattgagtgtatgggatctctaaggatttcttagattttatatttaaatattttttaaaccttagaggagtcaacaaactggctcttgattttcagcaccctactctcatgaaaaaagcctgaaaggaccctttcccttataagtaatttaatccaatttctccccattttatagatgaggaaactgaggctcagatcagatgagaactcacttaaatccactcaatgtgtagatggtagagctgggactagcaacattgctgcagcccattgttggcctctctcttcactttatcattgcccaagaatgaggatatgcagtaaacagaattcaggcaagatacctctaagctgttttgaaccctctgatattttgtatttatgtgtttgtctgtctccccctactagaatgtaagctccatggggcagggacttcactgtattttgttcatagtgtatccccagagcctggaccagtgcttggcacataggagatggcaataaatgcttgtagaattaataaacaaggtgaaggagagagctaatgaaatg

SEQ ID NO: 3137 - DNA, 5604 bp, Homo sapiens
  source 1..5604: mol_type = genomic DNA
ccctccctcccgctgagctccagctgtgccagaggcacccgagccctgagagtccgccgccaacgcgcaggtgctagcggccccttcgccctgcagcccctttgcttttactctgtccaaagttaacatgtcactgaaaaacgagccacgggtaaatacctctgcactgcagaaaattgctgctgacatgagtaatatcatagaaaatctggacacgcgggaactccactttgagggagaggaggtagactacgacgtgtctcccagcgatcccaagatacaagaagtgtatatccctttctctgctatttataacactcaaggatttaaggagcctaatatacagacgtatctctccggctgtccaataaaagcacaagttctggaagtggaacgcttcacatctacaacaagggtaccaagtattaatctttacactattgaattaacacatggggaatttaaatggcaagttaagaggaaattcaagcattttcaagaatttcacagagagctgctcaagtacaaagcctttatccgcatccccattcccactagaagacacacgtttaggaggcaaaacgtcagagaggagcctcgagagatgcccagtttgccccgttcatctgaaaacatgataagagaagaacaattccttggtagaagaaaacaactggaagattacttgacaaagatactaaaaatgcccatgtatagaaactatcatgccacaacagagtttcttgatataagccagctgtctttcatccatgatttgggaccaaagggcatagaaggtatgataatgaaaagatctggaggacacagaataccaggcttgaattgctgtggtcagggaagagcctgctacagatggtcaaaaagatggttaatagtgaaagattcctttttattgtatatgaaaccagacagcggtgccattgccttcgtcctgctggtagacaaagaattcaaaattaaggtggggaagaaggagacagaaacgaaatatggaatccgaattgataatctttcaaggacacttattttaaaatgcaacagctatagacatgctcggtggtggggaggggctatagaagaattcatccagaaacatggcaccaactttctcaaagatcatcgatttgggtcatatgctgctatccaagagaatgctttagctaaatggtatgttaatgccaaaggatattttgaagatgtggcaaatgcaatggaagaggcaaatgaagagatttttatcacagactggtggctgagtccagaaatcttcctgaaacgcccagtggttgagggaaatcgttggaggttggactgcattcttaaacgaaaagcacaacaaggagtgaggatcttcataatgctctacaaagaggtggaactcgctcttggcatcaatagtgaatacaccaagaggactttgatgcgtctacatcccaacataaaggtgatgagacacccggatcatgtgtcatccaccgtctatttgtgggctcaccatgagaagcttgtcatcattgaccaatcggtggcctttgtgggagggattgacctggcctatggaaggtgggacgacaatgagcacagactcacagacgtgggcagtgtgaagcgggtcacttcaggaccgtctctgggttccctcccacctgccgcaatggagtctatggaatccttaagactcaaagataaaaatgagcctgttcaaaacctacccatccagaagagtattgatgatgtggattcaaaactgaaaggaataggaaagccaagaaagttctccaaatttagtctctacaagcagctccacaggcaccacctgcacgacgcagatagcatcagcagcattgacagcacctccagttattttaatcactatagaagtcatcacaatttaatccatggtttaaaaccccacttcaaactctttcacccgtccagtgagtctgagcaaggactcactagacctcatgctgataccgggtccatccgtagtttacagacaggtgtgggagagctgcatggggaaaccagattctggcatggaaaggactactgcaatttcgtcttcaaagactgggttcaacttgataaaccttttgctgatttcattgacaggtactccacgccccggatgccctggcatgacattgcctctgcagtccacgggaaggcggctcgtgatgtggcacgtcacttcatccagcgctggaacttcacaaaaattatgaaatcaaaatatcggtccctttcttatccttttctgcttccaaagtctcaaacaacagcccatgagttgagatatcaagtgcctgggtctgtccatgctaacgtacagttgctccgctctgctgctgattggtctgctggtataaagtaccatgaagagtccatccacgccgcttacgtccatgtgatagagaacagcaggcactatatctatatcgaaaaccagtttttcataagctgtgctgatgacaaagttgtgttcaacaagataggcgatgccattgcccagaggatcctgaaagctcacagggaaaaccagaaataccgggtatatgtcgtgataccacttctgccagggttcgaaggagacatttcaaccggcggaggaaatgctctacaggcaatcatgcacttcaactacagaaccatgtgcagaggagaaaattccatccttggacagttaaaagcagagcttggtaatcagtggataaattacatatcattctgtggtcttagaacacatgcagagctcgaaggaaacctagtaactgagcttatctatgtccacagcaagttgttaattgctgatgataacactgttattattggctctgccaacataaatgaccgcagcatgctgggaaagcgtgacagtgaaatggctgtcattgtgcaagatacagagactgttccttcagtaatggatggaaaagagtaccaagctggccggtttgcccgaggacttcggctacagtgctttagggttgtccttggctatcttgatgacccaagtgaggacattcaggatccagtgagtgacaaattcttcaaggaggtgtgggtttcaacagcagctcgaaatgctacaatttatgacaaggttttccggtgccttcccaatgatgaagtacacaatttaattcagctgagagactttataaacaagcccgtattagctaaggaagatcccattcgagctgaggaggaactgaagaagatccgtggatttttggtgcaattccccttttatttcttgtctgaagaaagcctactgccttctgttgggaccaaagaggccatagtgcccatggaggtttggacttaagagatattcattggcagctcaaagacttccaccctggagaccacactgcacacagtgacttcctggggatgtcatagccaaagccaggcctgacgcattctcgtatccaacccaaggaccttttggaatgactggggagggctgcagtcacattgatgtaaggactgtaaacatcagcaagactttataattccttctgcctaacttgtaaaaagggggctgcattcttgttggtagcatgtactctgttgagtaaaacacatattcaaattccgtataccaaaatccatttcctttgtaacaagaatttaccagtaactgtgatctaggttgccaaaagttgtctgaatctccttattcttctctgatcttcatttatgcagccaatgtctagctggacctgccctcatcttgcagttcatacaggcactgtttgagagattgtttattattagatgttgtaatgctgcttcaagattcttcatggttacatgggatgcccctgctcatctggtcctgaagtagtaacattcacccaaatgaggatatagtcattattccttttcagtcactgtacgaacacggcagactttagcctacacagtagactgtgttaggcacttctggtaacattgacactgtatcttgacaccactaagcaacaggaaggaataaattccaatattgagacagagatttatttcattttgctcccaaaggcactgacaacatgagtccttgtgattaggcccacctgatcaaatgtaaaaacatgcatgggatatttgattacgtaacaaccagctaaaactgagagcacacagccttcggaaacccccaaggtgtcgaggaggatcagatccagataagagaagatgattccttctagtcctgtaaaatttcctgtcatccttagctgctgggttgattgaaatttgatctctacatttcaaaatcaaactagtgaatacagtttgtctttcaagagaatcagaggcatcgtaactcctaccaagttagtaagtatgagtctaaccttgtttgacattcaggtcttctgctacattatcttctttgagaaaaattaattgattataaaatatgtgctacttcacttacattattaaatatgtattaacgcctctcaccagggcttccagtgaagttacaatgccctagtctgtgaattagtctggaaacgtgtttttccttttcggatgttagagtaccctttgataaactaaattttactaagctgaacaactctgacagtctaaagagctaatgtgggttaccaaaaggcctgtacctgtaaaacaaaatgcaggtgtaatgattatacatgtctatggattacctggacatactctcatttgggttgttcttcaaagaagcaagcagccgatccctgttttcataaagctaatacttcagttggaaaaattaaacaggagcacaaagtcagggataggggttagcagaagagagaaatagtgtcacatcaagggcaggatctcatagctagggaacatttcacaaataaggtgagattttgtaaccaataataaaaatgaatgtttttataagtaaataacttatttttcatatggctaaagatggtaaaatgacttcattctatagccattgtaaataagaatttgctattgatgaaagaagttcagattggcatttgaagtattgagtgtatgggatctctaaggatttcttagattttatatttaaatattttttaaaccttagaggagtcaacaaactggctcttgattttcagcaccctactctcatgaaaaaagcctgaaaggaccctttcccttataagtaatttaatccaatttctccccattttatagatgaggaaactgaggctcagatcagatgagaactcacttaaatccactcaatgtgtagatggtagagctgggactagcaacattgctgcagcccattgttggcctctctcttcactttatcattgcccaagaatgaggatatgcagtaaacagaattcaggcaagatacctctaagctgttttgaaccctctgatattttgtatttatgtgtttgtctgtctccccctactagaatgtaagctccatggggcagggacttcactgtattttgttcatagtgtatccccagagcctggaccagtgcttggcacataggagatggcaataaatgcttgtagaattaataaacaaggtgaaggagagagctaatgaaatgaaaa

SEQ ID NO: 3138 - DNA, 5855 bp, Homo sapiens
  source 1..5855: mol_type = genomic DNA
ccgccaacgcgcaggtgctagcggccccttcgccctgcagcccctttgcttttactctgtccaaagttaacatgtcactgaaaaacgagccacgggtaaatacctctgcactgcagaaaattgctgctgacatgagtaatatcatagaaaatctggacacgcgggaactccactttgagggagaggaggtagactacgacgtgtctcccagcgatcccaagatacaagaagtgtatatccctttctctgctatttataacactcaaggatttaaggagcctaatatacagacgtatctctccggctgtccaataaaagcacaagttctggaagtggaacgcttcacatctacaacaagggtaccaagtattaatctttacactattgaattaacacatggggaatttaaatggcaagttaagaggaaattcaagcattttcaagaatttcacagagagctgctcaagtacaaagcctttatccgcatccccattcccactagaagacacacgtttaggaggcaaaacgtcagagaggagcctcgagagatgcccagtttgccccgttcatctgaaaacatgataagagaagaacaattccttggtagaagaaaacaactggaagattacttgacaaagatactaaaaatgcccatgtatagaaactatcatgccacaacagagtttcttgatataagccagctgtctttcatccatgatttgggaccaaagggcatagaaggtatgataatgaaaagatctggaggacacagaataccaggcttgaattgctgtggtcagggaagagcctgctacagatggtcaaaaagatggttaatagtgaaagattcctttttattgtatatgaaaccagacagcggtgccattgccttcgtcctgctggtagacaaagaattcaaaattaaggtggggaagaaggagacagaaacgaaatatggaatccgaattgataatctttcaaggacacttattttaaaatgcaacagctatagacatgctcggtggtggggaggggctatagaagaattcatccagaaacatggcaccaactttctcaaagatcatcgatttgggtcatatgctgctatccaagagaatgctttagctaaatggtatgttaatgccaaaggatattttgaagatgtggcaaatgcaatggaagaggcaaatgaagagatttttatcacagactggtggctgagtccagaaatcttcctgaaacgcccagtggttgagggaaatcgttggaggttggactgcattcttaaacgaaaagcacaacaaggagtgaggatcttcataatgctctacaaagaggtggaactcgctcttggcatcaatagtgaatacaccaagaggactttgatgcgtctacatcccaacataaaggtgatgagacacccggatcatgtgtcatccaccgtctatttgtgggctcaccatgagaagcttgtcatcattgaccaatcggtggcctttgtgggagggattgacctggcctatggaaggtgggacgacaatgagcacagactcacagacgtgggcagtgtgaagcgggtcacttcaggaccgtctctgggttccctcccacctgccgcaatggagtctatggaatccttaagactcaaagataaaaatgagcctgttcaaaacctacccatccagaagagtattgatgatgtggattcaaaactgaaaggaataggaaagccaagaaagttctccaaatttagtctctacaagcagctccacaggcaccacctgcacgacgcagatagcatcagcagcattgacagcacctccaataccgggtccatccgtagtttacagacaggtgtgggagagctgcatggggaaaccagattctggcatggaaaggactactgcaatttcgtcttcaaagactgggttcaacttgataaaccttttgctgatttcattgacaggtactccacgccccggatgccctggcatgacattgcctctgcagtccacgggaaggcggctcgtgatgtggcacgtcacttcatccagcgctggaacttcacaaaaattatgaaatcaaaatatcggtccctttcttatccttttctgcttccaaagtctcaaacaacagcccatgagttgagatatcaagtgcctgggtctgtccatgctaacgtacagttgctccgctctgctgctgattggtctgctggtataaagtaccatgaagagtccatccacgccgcttacgtccatgtgatagagaacagcaggcactatatctatatcgaaaaccagtttttcataagctgtgctgatgacaaagttgtgttcaacaagataggcgatgccattgcccagaggatcctgaaagctcacagggaaaaccagaaataccgggtatatgtcgtgataccacttctgccagggttcgaaggagacatttcaaccggcggaggaaatgctctacaggcaatcatgcacttcaactacagaaccatgtgcagaggagaaaattccatccttggacagttaaaagcagagcttggtaatcagtggataaattacatatcattctgtggtcttagaacacatgcagagctcgaaggaaacctagtaactgagcttatctatgtccacagcaagttgttaattgctgatgataacactgttattattggctctgccaacataaatgaccgcagcatgctgggaaagcgtgacagtgaaatggctgtcattgtgcaagatacagagactgttccttcagtaatggatggaaaagagtaccaagctggccggtttgcccgaggacttcggctacagtgctttagggttgtccttggctatcttgatgacccaagtgaggacattcaggatccagtgagtgacaaattcttcaaggaggtgtgggtttcaacagcagctcgaaatgctacaatttatgacaaggttttccggtgccttcccaatgatgaagtacacaatttaattcagctgagagactttataaacaagcccgtattagctaaggaagatcccattcgagctgaggaggaactgaagaagatccgtggatttttggtgcaattccccttttatttcttgtctgaagaaagcctactgccttctgttgggaccaaagaggccatagtgcccatggaggtttggacttaagagatattcattggcagctcaaagacttccaccctggagaccacactgcacacagtgacttcctggggatgtcatagccaaagccaggcctgacgcattctcgtatccaacccaaggaccttttggaatgactggggagggctgcagtcacattgatgtaaggactgtaaacatcagcaagactttataattccttctgcctaacttgtaaaaagggggctgcattcttgttggtagcatgtactctgttgagtaaaacacatattcaaattccgtataccaaaatccatttcctttgtaacaagaatttaccagtaactgtgatctaggttgccaaaagttgtctgaatctccttattcttctctgatcttcatttatgcagccaatgtctagctggacctgccctcatcttgcagttcatacaggcactgtttgagagattgtttattattagatgttgtaatgctgcttcaagattcttcatggttacatgggatgcccctgctcatctggtcctgaagtagtaacattcacccaaatgaggatatagtcattattccttttcagtcactgtacgaacacggcagactttagcctacacagtagactgtgttaggcacttctggtaacattgacactgtatcttgacaccactaagcaacaggaaggaataaattccaatattgagacagagatttatttcattttgctcccaaaggcactgacaacatgagtccttgtgattaggcccacctgatcaaatgtaaaaacatgcatgggatatttgattacgtaacaaccagctaaaactgagagcacacagccttcggaaacccccaaggtgtcgaggaggatcagatccagataagagaagatgattccttctagtcctgtaaaatttcctgtcatccttagctgctgggttgattgaaatttgatctctacatttcaaaatcaaactagtgaatacagtttgtctttcaagagaatcagaggcatcgtaactcctaccaagttagtaagtatgagtctaaccttgtttgacattcaggtcttctgctacattatcttctttgagaaaaattaattgattataaaatatgtgctacttcacttacattattaaatatgtattaacgcctctcaccagggcttccagtgaagttacaatgccctagtctgtgaattagtctggaaacgtgtttttccttttcggatgttagagtaccctttgataaactaaattttactaagctgaacaactctgacagtctaaagagctaatgtgggttaccaaaaggcctgtacctgtaaaacaaaatgcaggtgtaatgattatacatgtctatggattacctggacatactctcatttgggttgttcttcaaagaagcaagcagccgatccctgttttcataaagctaatacttcagttggaaaaattaaacaggagcacaaagtcagggataggggttagcagaagagagaaatagtgtcacatcaagggcaggatctcatagctagggaacatttcacaaataaggtgagattttgtaaccaataataaaaatgaatgtttttataagtaaataacttatttttcatatggctaaagatggtaaaatgacttcattctatagccattgtaaataagaatttgctattgatgaaagaagttcagattggcatttgaagtattgagtgtatgggatctctaaggatttcttagattttatatttaaatattttttaaaccttagaggagtcaacaaactggctcttgattttcagcaccctactctcatgaaaaaagcctgaaaggaccctttcccttataagtaatttaatccaatttctccccattttatagatgaggaaactgaggctcagatcagatgagaactcacttaaatccactcaatgtgtagatggtagagctgggactagcaacattgctgcagcccattgttggcctctctcttcactttatcattgcccaagaatgaggatatgcagtaaacagaattcaggcaagatacctctaagctgttttgaaccctctgatattttgtatttatgtgtttgtctgtctccccctactagaatgtaagctccatggggcagggacttcactgtattttgttcatagtgtatccccagagcctggaccagtgcttggcacataggagatggcaataaatgcttgtagaattaataaacaaggtgaaggagagagctaatgaaatgaaaatcttagtctcatataagaagtcttactactgctttctatggcaagttccttttctattgcatcttcccaaagacaagatgctcatctgcaaaggggtgataagatttacttggagggattttatggaaaattcagtgcaataattgcttttttttttttttttgcagtagcagtttacatagtacagcattctgcaaaaattgcatgaaatgtggacacaagatgtactgtatgacttaattacctgtcattctctgacaccattactacctactagaagttcaaataatttatctttaacattgcaatatctgataaactttttaaaatgtaaataattcaaagccttgaaaatctatcatgaatctgctcaacatttcaaagtgactattttgaaatgcctataaatgctatatacctg

SEQ ID NO: 3139 - DNA, 621 bp, Homo sapiens
  source 1..621: mol_type = genomic DNA
agccaaaactgggcttgggaacaggaaggctttgcccgtttatttggattctcagggtagtcgattttgccacctcttggctatcagctgccttggagattggtttcatagtaaggattctttctttaaggtgatatggagcaactgctttcacaggggcaccagcccctttgcttttactctgtccaaagttaacatgtcactgaaaaacgagccacgggtaaatacctctgcactgcagaaaattgctgctgacatgagtaatatcatagaaaatctggacacgcgggaactccactttgagggagaggaggtagactacgacgtgtctcccagcgatcccaagatacaagaagtgtatatccctttctctgctatttataacactcaaggatttaaggagcctaatatacagacgtatctctccggctgtccaataaaagcacaagttctggaagtggaacgcttcacatctacaacaagggtaccaagtattaatctttacactattgaattaacacatggggaatttaaatggcaagttaagaggaaattcaagcattttcaagaatttcacagagagctgctcaagtacaaagcctttatccgcatccccattcc

SEQ ID NO: 3140 - DNA, 4387 bp, Homo sapiens
  source 1..4387: mol_type = genomic DNA
attctccgcggcgcggcggcgagtgctggctgcggtaccctcccgctcgcttgtccgtctgcgcgcccgcgatgtgaccagccgactgggggcgggctggcggctctgcctgcggcagcgcatcggtttttctcctggcaggtccctaattgagccgtgattcccttggagccagagacacccaccaggggctcggagcgccgcgctccggggctggaggcagctgcagcgctcgggtccgcgcggccgggtgcagtagcctcagtcccagccgccgcctcgctgagtcgtgtgccctggcgaatgcccggcgcccggcacagctgagccaaggcgactggtgcagagcggcggcgcctggtcctgcacttgccgctgctgccgggctgtgccggggcggcggcgctgcgcgccggagtttgcagaggctgcctccgagcgccgtccgccaggaagactccctgcctcctgagtcccaaaaacacgagatttttctcctatttcagcagttggccacaacttcattgctgggaaaaggccaagaaagaagagagaactctcaccacaacatttcaaagggaatacattgccagaacttggaatactctactggacaaacatttcctccaaggacacagctctctgcctccatgtcaccacctttgaaggactgactgattccctcggctggtgccagtgcctgctcctgccatggggcccgcggggagcctgctgggcagcggacagatgcagatcaccctgtggggaagtctggctgctgtcgccattttcttcgtcatcaccttcctcatcttcctgtgctctagttgtgacagggaaaagaagccgcgacagcatagtggggaccatgagaacctgatgaacgtgccttcagacaaggagatgttcagccgttcagttactagcctggcaacagatgctcctgccagcagtgagcagaatggggcactcaccaatggggacattctttcagaggacagtactctgacctgcatgcagcattacgaggaagtccagacatcggcctcggatctgctggattcccaggacagcacagggaaaccaaaatgtcatcagagtcgggagctgcccagaatccctcccgagagcgcagtggataccatgctcacggcgagaagtgtggacggggaccaggggctggggatggaagggccctatgaagtgctcaaggacagctcctcccaagaaaacatggtggaggactgcttgtatgaaactgtgaaagagatcaaggaggtggctgcagctgcacacctggagaaaggccacagtggcaaggcaaaatctacttctgcctcgaaagagctcccagggccccagactgaaggcaaagctgagtttgctgaatatgcctcggtggacagaaacaaaaaatgtcgtcaaagtgttaatgtagagagtatccttggaaattcatgtgatccagaagaggaggccccaccacctgtccctgttaagcttctggacgagaatgaaaaccttcaggagaaggaagggggagaggcggaagagagtgccacagacacgaccagtgaaactaacaagagatttagctcattgtcatacaagtctcgggaagaagaccccactctcacagaagaagagatctcagctatgtactcatcagtaaataaacctggacagttagtgaataaatcggggcagtcgcttacagttccggagtccacctacacctccattcaaggggacccacagaggtcaccctcctcctgtaatgatctctatgctactgttaaagacttcgaaaaaactccaaacagcacacttccaccagcagggaggcccagcgaggagccagagcctgattatgaagcgatacagactctcaacagagaggaagaaaaggccaccctggggaccaatggccaccacggtctcgtcccaaaggagaacgactacgagagcataagtgacttgcagcaaggcagagatattaccaggctctagcaacccagaagacaaccctgggtagcctgtgatcagtgtctggagacgtttcttctgtggaagagaagaagtgacacaaacctatacttcatatgctgctttagtcacctgaagatggttggagaggccctgtcgactgttctcccagttgttcagtttctgagacagagaggtacggactaggctgcacctgagtgtgcccctgcctgccagatggacaggtacacccaagcacatctccctgctgcaccctcaccacccacaaaagatcccagctgtcagtggtctcatctcattagtgaggaaagccaagctgtatggaaaagctgcactcaccaaggaccacaatgcccccggcctaaagtactgccattcagaaaagcaggtttttcttcctctctttccttttctctgtctgctactgactttaaggctttttcccccttgaaatgtccagattcctgtggttcatcccaaggaaattttcacacaaagcttggcctttgccctcaatataggtgttttaggatggtgacaaaccatggctgctgctttctgcccagctcgccagtcctccccaaagagttgcgcatcagcacctggggatctggaccctgcgggtgaagggatggggagggacgtccctggagtctcttctgtctttgttccttcttattttggcattcgatatcagcagcctctccccaaagtacttgaagtcagttttagatgctttattttatttttctagtcaaaaacgtgtttcccccagtgtttgaaaactcgtccgaatcttttcagtattttccatgagtattgtggtacttctagacttgtttaagcccagaactcattccttcaaaacagagagccttaatctttatgttgggacacagaccacatatttggacggcagccatgcatccatcgctgaagggctgtggacatgaatgtgtatttcccatggtctccgctgcccacaccaacagtgtggcatctcataagttaactgctaccctaaggtaatctaagattaaaatgtaaacatttatttttgttatgtaagtttataagatgttttatgttcaatgcctaatttctcaaaagtgccagaaaaaaatgtatattagctattttgattttatgtacaatgatttatactctccttttgaaaagataccataaagcacataagctagatcactacaaggagctgttatcttttttctaatcaagtgtttaaaacactgatggtttttaaagactcacctttttaaatggtacttggagctcctgattcaaattacctagaccccctagagaaataaatggaatatacataaataatcattttcagtggtttatggtgggcaatattgcaatatttgaaatggtaaaaatggaaagaagaacaaaatatgatgagaggtggctgtgaattataaacctcataaaagtgtcataattccattaaggtttaattatattttttcagaaaacagtgatgaattctgtagtccagtgcttgccaatgcaaattgcctattggaatcttcttcctatattttacaaacatcagtggctgaaatagctcagagtaagagctcagcctggtttgaatttaatcatctctttagatcttataaggccagcattaggaaacttgttcacttttcattttcaaaggagcctagttgaagtgctattatgagtgtgggctatggaaagacagcttttcctacactgataaagaaaaaaaatgaggaaattatttcatccccttgtgacatctgtgactttttggatttaataatcttgctgtttttcctctttatgacaaagaatataattgggaggatgaagtgtcttaaaaattgtagagaccagctcactggaatgtttttccatccctgtattcatggcttgactttgtgactgctctacactgcatgtctgacattgcagagtgagctatgttgaggtaaactggttggttgtcattattttgcaatcagcctggtctctcccatgaagatgtcgtgtgcataagcacaatcatcactgattagaagatcacagcagaatacccttggattagagagaagttcgtaccttgcatttctctgaattctagtctctcataagcactgctttgctggatgattttcactgctttgtgttaatgactttgagcgatctctcacatgatggggttctttagtacatggtaacagccatgtcatcttacacacctagcattgtgaatgctgtagtgacatcctttataggcaccttacagctcaaaacttttgtttcatttcatgccttacttatcaaaaaggcaggaaagtaggtatgatctctaaagtaaaaaaaa

SEQ ID NO: 3141 - DNA, 2687 bp, Homo sapiens
  source 1..2687: mol_type = genomic DNA
atttgaaaaatttctagtttcggagcttagccacaggccggctacgatctgcttgttcatctgagtgtcggcacaaaccagcagaggcggtgacgatgctctcgggcatagaggcggcggcaggggaatatgaggactcggagctgcggtgccgcgtggctgtggaggagctgagcccgggcgggcagccgcgaaggcgccaggccctgcgcaccgcggagctgagcctgggtcgcaacgagcgccgcgagttgatgctgcggctgcaagcgccagggcccgcggggcggccgcgctgctttcctctgcgcgccgcgcgcctcttcacgcgtttcgccgaggccgggcgcagcaccctgcggctccccgcccacgacacccccggggccggcgcagtgcagctgctgctctcggactgccccccagaccgcctgcgccgcttcctgcgcacattgcgcctcaagctggctgcggccccgggtcccgggccggcctccgcccgagcgcagctgctgggcccgcggccccgcgacttcgtcaccatcagccctgtgcagcccgaggagcggcggctcagggcggccacccgggttccggacactacgctggtgaagcggcctgtggagccccaggctggggccgagcctagcacagaagccccaaggtggcccctgcctgtgaagaggctgagcttgccctccaccaagccacagctttctgaggaacaggctgctgtgctgagggccgtcctgaaaggccagagcatcttcttcactgggagtgcaggaacagggaagtcatatctgctaaagcgaatcctgggctcactgccccccacaggcactgtggccactgccagcactggggtggcagcctgccacatcgggggcaccaccctccatgcctttgcaggcatcggctcaggccaggctcctctagcccagtgtgtggccctggcccaaaggccaggcgtgcggcagggctggctgaactgccagcggttggtcattgacgagatctcaatggtggaggcagacctgtttgacaaactggaggccgtggccagagctgtccggcagcagaacaagccattcggagggatccagctcatcatctgtggggactttctgcagctgccacctgtgaccaagggctcccagcccccacggttctgcttccagtccaagagctggaagaggtgtgtgccagtgaccctggagctgaccaaggtgtggaggcaggcagaccagaccttcatctctctactgcaggccgtgaggctaggcaggtgttcagatgaggtgacccgccagctccaggccacagcttcccacaaggtggggcgagatgggattgtggccacgaggctctgcacccaccaggatgatgtggccctcaccaacgagaggcggcttcaggagctgccaggtaaggtacacagatttgaggctatggacagcaaccctgagctggccagtaccctggatgcccagtgtcctgttagccagctccttcaactaaagctgggggcccaggtgatgctggtgaaaaacttatcggtgtctcggggcctggtgaatggtgcccgaggggtggtagttgggttcgaggcagaagggagagggctaccccaggtgcggttcctgtgtggagtcactgaggtcatccacgctgaccgctggacggtgcaggccaccgggggccagctcctcagtcggcagcagctgcccctccagctggcctgggcgatgtccatccacaagagccaaggcatgaccctggattgtgtggagatttctctgggccgtgtgtttgccagtggccaggcctatgtggccctttctcgggcccgcagcctgcagggcctacgtgtgctggactttgaccccatggcggttcgctgtgacccccgtgtgctgcacttctatgccaccctgcggcggggcaggagcctcagtctggagtccccagatgatgatgaggcagcctcagaccaggagaacatggacccaatcctctgagcctcacccacaaagagaagacaaagggtggcctgtggcctccccgtcctcctgctccctagtggcccagggccccagggaataactggagtaggcaggcagtgtccccttctgtattttttagggactctcagcctcctggcagggttaaagggagagtactttaaacccatataccagctgtgcttcagtttctctcactttgccctgggtaagctgctgtagggtcagaagtaaccctttctgtgccagttgagaatgagcctgtgtggtagctgatgtcagaggacaaagctctctgcaagggctggacacagagctgcagagtcctgaacatccctcctttcaggctgcagaagggagaggcaatgaagacaggtgctccggaagcagcatcagggctcttggaggggactggtggggactcaggctgggtgcagcctccaaacagagaacggaacttaggtgtgtctctacagctaggcccagcctagcccagcccagaacaaacacccttcagagcctaaccaaagaacataagctgcaaaatgtgcacccatattttaagctgctttttcaggggataaatagtgtttggggacattgaaatggatgttctcaggttgtatttatttcggacaaataaactagagaattgtgtaaaaa

SEQ ID NO: 3142 - DNA, 2278 bp, Homo sapiens
  source 1..2278: mol_type = genomic DNA
atttgaaaaatttctagtttcggagcttagccacaggccggctacgatctgcttgttcatctgagtgtcggcacaaaccagcagaggcggtgacgatgctctcgggcatagaggcggcggcaggggaatatgaggactcggagctgcggtgccgcgtggctgtggaggagctgagcccgggcgggcagccgcgaaggcgccaggccctgcgcaccgcggagctgagcctgggtcgcaacgagcgccgcgagttgatgctgcggctgcaagcgccagggcccgcggggcggccgcgctgctttcctctgcgcgccgcgcgcctcttcacgcgtttcgccgaggccgggcgcagcaccctgcggctccccgcccacgacacccccggggccggcgcagtgcagctgctgctctcggactgccccccagaccgcctgcgccgcttcctgcgcacattgcgcctcaagctggctgcggccccgggtcccgggccggcctccgcccgagcgcagctgctgggcccgcggccccgcgacttcgtcaccatcagccctgtgcagcccgaggagcggcggctcagggcggccacccgggttccggacactacgctggtgaagcggcctgtggagccccaggctggggccgagcctagcacagaagccccaaggtggcccctgcctgtgaagaggctgagcttgccctccaccaagccacagctttctgaggaacaggctgctgtgctgagggccgtcctgaaaggccagagcatcttcttcactgggagtgcaggaacagggaagtcatatctgctaaagcgaatcctgggctcactgccccccacaggcactgtggccactgccagcactggggtggcagcctgccacatcgggggcaccaccctccatgcctttgcaggcatcggctcaggccaggctcctctagcccagtgtgtggccctggcccaaaggccaggcgtgcggcagggctggctgaactgccagcggttggtcattgacgagatctcaatggtggaggcagacctgtttgacaaactggaggccgtggccagagctgtccggcagcagaacaagccattcggagggatccagctcatcatctgtggggactttctgcagctgccacctgtgaccaagggctcccagcccccacggttctgcttccagtccaagagctggaagaggtgtgtgccagtgaccctggagctgaccaaggtgtggaggcaggcagaccagaccttcatctctctactgcaggccgtgaggctaggcaggtgttcagatgaggtgacccgccagctccaggccacagcttcccacaaggtggggcgagatgggattgtggccacgaggctctgcacccaccaggatgatgtggccctcaccaacgagaggcggcttcaggagctgccaggtaaggtacacagatttgaggctatggacagcaaccctgagctggccagtaccctggatgcccagtgtcctgttagccagctccttcaactaaagctgggggcccaggtgatgctggtgaaaaacttatcggtgtctcggggcctggtgaatggtgcccgaggggtggtagttgggttcgaggcagaagggagagggctaccccaggtgcggttcctgtgtggagtcactgaggtcatccacgctgaccgctggacggtgcaggccaccgggggccagctcctcagtcggcagcagctgcccctccagctggcctgggcgatgtccatccacaagagccaaggcatgaccctggattgtgtggagatttctctgggccgtgtgtttgccagtggccaggcctatgtggccctttctcgggcccgcagcctgcagggcctacgtgtgctggactttgaccccatggcggttcgctgtgacccccgtgtgctgcacttctatgccaccctgcggcggggcaggagcctcagtctggctgcagaagggagaggcaatgaagacaggtgctccggaagcagcatcagggctcttggaggggactggtggggactcaggctgggtgcagcctccaaacagagaacggaacttaggtgtgtctctacagctaggcccagcctagcccagcccagaacaaacacccttcagagcctaaccaaagaacataagctgcaaaatgtgcacccatattttaagctgctttttcaggggataaatagtgtttggggacattgaaatggatgttctcaggttgtatttatttcggacaaataaactagagaattgtgtaaaaa

SEQ ID NO: 3143 - DNA, 2677 bp, Homo sapiens
  source 1..2677: mol_type = genomic DNA
gccacaggccggctacgatctgcttgttcatctgagtgtcggcacaagtgagtgtctgcccgaacccagagaccagcagaggcggtgacgatgctctcgggcatagaggcggcggcaggggaatatgaggactcggagctgcggtgccgcgtggctgtggaggagctgagcccgggcgggcagccgcgaaggcgccaggccctgcgcaccgcggagctgagcctgggtcgcaacgagcgccgcgagttgatgctgcggctgcaagcgccagggcccgcggggcggccgcgctgctttcctctgcgcgccgcgcgcctcttcacgcgtttcgccgaggccgggcgcagcaccctgcggctccccgcccacgacacccccggggccggcgcagtgcagctgctgctctcggactgccccccagaccgcctgcgccgcttcctgcgcacattgcgcctcaagctggctgcggccccgggtcccgggccggcctccgcccgagcgcagctgctgggcccgcggccccgcgacttcgtcaccatcagccctgtgcagcccgaggagcggcggctcagggcggccacccgggttccggacactacgctggtgaagcggcctgtggagccccaggctggggccgagcctagcacagaagccccaaggtggcccctgcctgtgaagaggctgagcttgccctccaccaagccacagctttctgaggaacaggctgctgtgctgagggccgtcctgaaaggccagagcatcttcttcactgggagtgcaggaacagggaagtcatatctgctaaagcgaatcctgggctcactgccccccacaggcactgtggccactgccagcactggggtggcagcctgccacatcgggggcaccaccctccatgcctttgcaggcatcggctcaggccaggctcctctagcccagtgtgtggccctggcccaaaggccaggcgtgcggcagggctggctgaactgccagcggttggtcattgacgagatctcaatggtggaggcagacctgtttgacaaactggaggccgtggccagagctgtccggcagcagaacaagccattcggagggatccagctcatcatctgtggggactttctgcagctgccacctgtgaccaagggctcccagcccccacggttctgcttccagtccaagagctggaagaggtgtgtgccagtgaccctggagctgaccaaggtgtggaggcaggcagaccagaccttcatctctctactgcaggccgtgaggctaggcaggtgttcagatgaggtgacccgccagctccaggccacagcttcccacaaggtggggcgagatgggattgtggccacgaggctctgcacccaccaggatgatgtggccctcaccaacgagaggcggcttcaggagctgccaggtaaggtacacagatttgaggctatggacagcaaccctgagctggccagtaccctggatgcccagtgtcctgttagccagctccttcaactaaagctgggggcccaggtgatgctggtgaaaaacttatcggtgtctcggggcctggtgaatggtgcccgaggggtggtagttgggttcgaggcagaagggagagggctaccccaggtgcggttcctgtgtggagtcactgaggtcatccacgctgaccgctggacggtgcaggccaccgggggccagctcctcagtcggcagcagctgcccctccagctggcctgggcgatgtccatccacaagagccaaggcatgaccctggattgtgtggagatttctctgggccgtgtgtttgccagtggccaggcctatgtggccctttctcgggcccgcagcctgcagggcctacgtgtgctggactttgaccccatggcggttcgctgtgacccccgtgtgctgcacttctatgccaccctgcggcggggcaggagcctcagtctggagtccccagatgatgatgaggcagcctcagaccaggagaacatggacccaatcctctgagcctcacccacaaagagaagacaaagggtggcctgtggcctccccgtcctcctgctccctagtggcccagggccccagggaataactggagtaggcaggcagtgtccccttctgtattttttagggactctcagcctcctggcagggttaaagggagagtactttaaacccatataccagctgtgcttcagtttctctcactttgccctgggtaagctgctgtagggtcagaagtaaccctttctgtgccagttgagaatgagcctgtgtggtagctgatgtcagaggacaaagctctctgcaagggctggacacagagctgcagagtcctgaacatccctcctttcaggctgcagaagggagaggcaatgaagacaggtgctccggaagcagcatcagggctcttggaggggactggtggggactcaggctgggtgcagcctccaaacagagaacggaacttaggtgtgtctctacagctaggcccagcctagcccagcccagaacaaacacccttcagagcctaaccaaagaacataagctgcaaaatgtgcacccatattttaagctgctttttcaggggataaatagtgtttggggacattgaaatggatgttctcaggttgtatttatttcggacaaataaactagagaattgtgt

SEQ ID NO: 3144 - DNA, 1631 bp, Homo sapiens
  source 1..1631: mol_type = genomic DNA
acgatctgcttgttcatctgagtgtcggcacaaaccagcagaggcggtgacgatgctctcgggcatagaggcggcggcaggggaatatgaggactcggagctgcggtgccgcgtggctgtggaggagctgagcccgggcgggcagccgcgaaggcgccaggccctgcgcaccgcggagctgagcctgggtcgcaacgagcgccgcgagttgatgctgcggctgcaagcgccagggcccgcggggcggccgcgctgctttcctctgcgcgccgcgcgcctcttcacgcgtttcgccgaggccgggcgcagcaccctgcggctccccgcccacgacacccccggggccggcgcagtgcagctgctgctctcggactgccccccagaccgcctgcgccgcttcctgcgcacattgcgcctcaagctggctgcggccccgggtcccgggccggcctccgcccgagcgcagctgctgggcccgcggccccgcgacttcgtcaccatcagccctgtgcagcccgaggagcggcggctcagggcggccacccgggttccggacactacgctggtgaagcggcctgtggagccccaggctggggccgagcctagcacagaagccccaaggtggcccctgcctgtgaagaggctgagcttgccctccaccaagccacagctttctgaggaacaggctgctgtgctgagggccgtcctgaaaggccagagcatcttcttcactgggagtgcaggtagtgggggcagagaggaggtagggggacagtggtggggtgggatagaggaacagggagacctgtctaactttgcccctgtccaggaacagggaagtcatatctgctaaagcgaatcctgggctcactgccccccacaggcactgtggccactgccagcactggggtggcagcctgccacatcgggggcaccaccctccatgcctttgcaggtaagtaggaacccctagggcttgagctaagagcaagcccagcttctgggaagggagagaggggaggtctgcataaagagggagttttgggggctgggcgccgtggctcactcttgtaatcccaaaactttaggaggccaaggtgggaggatcgcttgagcccaggagtttgagaccagcctggccaacacagtaaaccctgtctccacaaaatttaaaaattagcggccgggcgcagtggctcacgcctgtaatcccagcactttgggaggccgaggcaggcggatcacaaggtcaggagatcaagactatcctggctaacacggtaaaaccctgtctctactaaaaatacaaaaaaattagccaggcatggtggcaagcgcctgtagtcccagctactctggaggctgaggcaggagaatggcgtgaacccaggaggcagagcttgcagtgagccgagatcacgccactgcacttgagcctgggcgacacagcgagactccatctcaaaacaaaacaaaacaaaattagctgagcatggtggtgtgtgcctgtagtcccagctactatggaggttgaggtgggaggatcgcttgagcccatgaggcccaggttacagtgagccaagatcgtgccactgcacttcagcctgggtgacagaaagagaccttctctc

SEQ ID NO: 3145 - DNA, 1545 bp, Homo sapiens
  source 1..1545: mol_type = genomic DNA
cgtccgctgcagtccgccggcgagggagttacgcacgtcctgattctcctggagtctccagcccgcccagtggccgcagtcacccaggtccagaggcggcggtatcacaggctctccgacatgtctatgctggctgaacgtcggcggaagcagaagtgggctgtggatcctcagaacactgcctggagtaatgacgattccaagtttggccagcggatgctagagaagatggggtggtctaaaggaaagggtttaggggctcaggagcaaggagccacagatcatattaaagttcaagtgaaaaataaccacctgggactcggagctaccatcaataatgaagacaactggattgcccatcaggatgattttaaccagcttctggccgaactgaacacttgccatgggcaggaaaccacagattcctcggacaagaaggaaaagaaatcttttagccttgaggaaaagtccaaaatctccaaaaaccgtgttcactatatgaaattcacaaaagggaaggatctgtcatctcggagcaaaacagatcttgactgcatttttgggaaaagacagagtaagaagactcccgagggcgatgccagtccctccactccagaggagaacgaaaccacgacaaccagcgccttcaccatccaggagtactttgccaagcggatggcagcactgaagaacaagccccaggttccagttccagggtctgacatttctgagacgcaggtggaacgtaaaagggggaagaaaagaaataaagaggccacaggtaaagatgtggaaagttacctccagcctaaggccaagaggcacacggagggaaagcccgagagggccgaggcccaggagcgagtggccaagaagaagagcgcgccagcagaagagcagctcagaggcccctgctgggaccagagttccaaggcctctgctcaggatgcaggggaccatgtgcagccgcctgagggccgggacttcaccctgaagcccaaaaagaggagagggaagaaaaagctgcaaaaaccagtagagatagcagaggacgctacactagaagaaacgctagtgaaaaagaagaagaagaaagattccaaatgaatccttcccagccggggccttccgaccactcagctgtcagggcactgcgggggcagacacctctggcctgaagtcacagcagagttcaccccagagcgcctgggcgcatcttgtggcatgcccatgggctgccgagtcctgccctctcgccacatttcccccaagttacattcccaggaggacctttttaatgttctcaatcgtggctctcagacacaaataaatttttttgtaaactctgagcccttcagcaagagagtttaattataatcattacaaatacatgcattcatgtaagtgtgcacacgtgtgtgtgcatgtgcgcatctgtgtgtgtgtgtgtgtgtcactatctccgtttgctctcggttcccttcaataacaatgaatggtgctttcttctgaaagactcagcctaattaaaggattaagaggcaa

SEQ ID NO: 3146 - DNA, 1466 bp, Homo sapiens
  source 1..1466: mol_type = genomic DNA
cgtccgctgcagtccgccggcgagggagttacgcacgtcctgattctcctggagtctccagcccgcccagtggccgcagtcacccaggtccagaggcggcggtatcacaggctctccgacatgtctatgctggctgaacgtcggcggaagcagaagtgggctgtggatcctcagaacactgcctggagtaatgacgattccaagtttggccagcggatgctagagaagatggggtggtctaaaggaaagggtttaggggctcaggagcaaggagccacagatcatattaaagttcaagtgaaaaataaccacctgggactcggagctaccatcaataatgaagacaactggattgcccatcaggatgattttaaccagcttctggccgaactgaacacttgccatgggcaggaaaccacagattcctcggacaagaaggaaaagaaatcttttagccttgaggaaaagtccaaaatctccaaaaaccgtgttcactatatgaaattcacaaaagggcgatgccagtccctccactccagaggagaacgaaaccacgacaaccagcgccttcaccatccaggagtactttgccaagcggatggcagcactgaagaacaagccccaggttccagttccagggtctgacatttctgagacgcaggtggaacgtaaaagggggaagaaaagaaataaagaggccacaggtaaagatgtggaaagttacctccagcctaaggccaagaggcacacggagggaaagcccgagagggccgaggcccaggagcgagtggccaagaagaagagcgcgccagcagaagagcagctcagaggcccctgctgggaccagagttccaaggcctctgctcaggatgcaggggaccatgtgcagccgcctgagggccgggacttcaccctgaagcccaaaaagaggagagggaagaaaaagctgcaaaaaccagtagagatagcagaggacgctacactagaagaaacgctagtgaaaaagaagaagaagaaagattccaaatgaatccttcccagccggggccttccgaccactcagctgtcagggcactgcgggggcagacacctctggcctgaagtcacagcagagttcaccccagagcgcctgggcgcatcttgtggcatgcccatgggctgccgagtcctgccctctcgccacatttcccccaagttacattcccaggaggacctttttaatgttctcaatcgtggctctcagacacaaataaatttttttgtaaactctgagcccttcagcaagagagtttaattataatcattacaaatacatgcattcatgtaagtgtgcacacgtgtgtgtgcatgtgcgcatctgtgtgtgtgtgtgtgtgtcactatctccgtttgctctcggttcccttcaataacaatgaatggtgctttcttctgaaagactcagcctaattaaaggattaagaggc

SEQ ID NO: 3147 - DNA, 1272 bp, Homo sapiens
  source 1..1272: mol_type = genomic DNA
cgtccgctgcagtccgccggcgagggagttacgcacgtcctgattctcctggagtctccagcccgcccagtggccgcagtcacccaggtccagaggcggcggtatcacaggctctccgacatgtctatgctggctgaacgtcggcggaagcagaagtgggctgtggatcctcagaacactgcctggagtaatgacgattccaagtttggccagcggatgctagagaagatggggtggtctaaaggaaagggtttaggggctcaggagcaaggagccacagatcatattaaagttcaagtgaaaaataaccacctgggactcggagctaccatcaataatgaagacaactggattgcccatcaggatgattttaaccagcttctggccgaactgaacacttgccatgggcaggaaaccacagattcctcggacaagaaggaaaagaaatcttttagccttgaggaaaagtccaaaatctccaaaaaccgtgttcactatatgaaattcacaaaagggcgatgccagtccctccactccagaggagaacgaaaccacgacaaccagcgccttcaccatccaggagtactttgccaagcggatggcagcactgaagaacaagccccaggttccagttccagggtctgacatttctgagacgcaggtggaacgtaaaagggggaagaaaagaaataaagaggccacaggtaaagatgtggaaagttacctccagcctaaggccaagaggcacacggagggaaagcccgagagggccgaggcccaggagcgagtggccaagaagaagagcgcgccagcagaagagcagctcagaggcccctgctgggaccagagttccaaggcctctgctcaggatgcaggggaccatgtgcagccgcctgagggccgggacttcaccctgaagcccaaaaagaggagagggaagaaaaagctgcaaaaaccagtagagatagcagaggacgctacactagaagaaacgctagtgaaaaagaagaagaagaaagattccaaatgaatccttcccagccggggccttccgaccactcagctgtcagggcactgcgggggcagacacctctggcctgaagtcacagcagagttcaccccagagcgcctgggcgcatcttgtggcatgcccatgggctgccgagtcctgccctctcgccacatttcccccaagttacattcccaggaggacctttttaatgttctcaatcgtggctctcagacacaaataaatttttttgtaaactctga

SEQ ID NO: 3148 - DNA, 3576 bp, Homo sapiens
  source 1..3576: mol_type = genomic DNA
cgcctcggcggcgcggcatagcccggctcggcctgtaaagcagtctcaagcctgccgcagggagaagatggcggtcgccgtgagaactttgcaggaacagctggaaaaggccaaagagagtcttaagaacgtggatgagaacattcgcaagctcaccgggcgggatccgaatgacgtgaggcccatccaagccagattgctggccctttctggtcctggtggaggtagaggacgtggtagtttattactgaggcgtggattctcagatagtggaggaggacccccagccaaacagagagaccttgaaggggcagtcagtaggctgggcggggagcgtcggaccagaagagaatcacgccaggaaagcgacccggaggatgatgatgttaaaaagccagcattgcagtcttcagttgtagctacctccaaagagcgcacacgtagagaccttatccaggatcaaaatatggatgaaaagggaaagcaaaggaaccggcgaatatttggcttgttgatgggtacccttcaaaaatttaaacaagaatccactgttgctactgaaaggcaaaagcggcgccaggaaattgaacaaaaacttgaagttcaggcagaagaagagagaaagcaggttgaaaatgaaaggagagaactgtttgaagagaggcgtgctaaacagacagaactgcggcttttggaacagaaagttgagcttgcgcagctgcaagaagaatggaatgaacataatgccaaaataattaaatatataagaactaagacaaagccccatttgttttatattcctggaagaatgtgtccagctacccaaaaactaatagaagagtcacagagaaaaatgaacgctttatttgaaggtagacgcatcgaatttgcagaacaaataaataaaatggaggctaggcctagaagacaatcaatgaaggaaaaagagcatcaggtggtgcgtaatgaagaacagaaggcggaacaagaagagggtaaggtggctcagcgagaggaagagttggaggagacaggtaatcagcacaatgatgtagaaatagaggaagcaggagaggaagaggaaaaggaaatagcgattgttcatagtgatgcagagaaagaacaggaggaggaagaacaaaaacaggaaatggaggttaagatggaggaggaaactgaggtaagggaaagtgagaagcagcaggatagtcagcctgaagaagttatggatgtgctagagatggttgagaatgtcaaacatgtaattgctgaccaggaggtaatggaaactaatcgagttgaaagtgtagaaccttcagaaaatgaagctagcaaagaattggaaccagaaatggaatttgaaattgagccagataaagaatgtaaaaccctttctcctgggaaagagaatgtcagtgctttagacatggaaaaggagtctgaggaaaaagaagaaaaagaatctgagccccaacctgagcctgtggctcaacctcagcctcagtctcagccccagcttcagcttcaatcccagtcccaaccagtactccagtcccagcctccctctcagcctgaggatttgtcattagctgttttacagccaacaccccaagttactcaggagcaagggcatttactacctgagaggaaggattttcctgtagagtctgtaaaactcactgaggtaccagtagagccagtcttgacagtacatccagagagcaagagcaaaaccaaaactaggagcagaagtagaggtcgagctagaaataaaacaagcaagagtagaagtcgaagcagtagcagtagcagttctagtagcagttcaaccagtagcagcagtggaagtagttccagcagtggaagtagtagcagtcgcagtagttccagtagcagctccagtacaagtggcagcagcagcagagatagtagcagtagcactagtagtagtagtgagagtagaagtcggagtaggggccggggacataatagagatagaaagcacagaaggagcgtggatcggaagagaagggatacttcaggactagaaagaagtcacaaatcttcaaaaggtggtagtagtagagatacaaaaggatcaaaggataagaattcccggtccgacagaaagaggtctatatcagagagtagtcgatcaggcaaaagatcttcaagaagtgaaagagaccgaaaatcagacaggaaagacaaaaggcgttaatggaagaagccaggctttcttagccattctttgcagcagaagatttcttgataaaaaaggattacctttccttgtaaagaggatgctgccttaagaattgcatgttgtaaaaaatctttttggaaaatacagactgtttgtttaccagacattcttgtactttttgcataattttgtaagagttatttatcaaaattatgtgaggttccaaaatatgtaaaaatgataataataaaaaaagattaacatcccttgtcatcttttttaaatatcctatactcttcagtaagaatctgtatattttaataggcaaatctttaagtctgttcccttctaattctgtatcatacattgcttttgtagaaataaatgtgtgtttatttcattatttttgggatgtcctcgttgacacttgtataataaatatcctctttatcattttcagcttttaacactagatactgcacgtgattagaatgtttttgaaggtttcctcgtttttatttgccttggacagtttttagttgtcagagtcagagctttgcagctttgagggggaacagttctctttaaaatcatttgctattttctattctcccttgttattttaatctaagcattttcccccgtttctcatattttaaccatatgttcggtagataactaaacagtatgatctggttggcattttcttcctgatgatgggagcgtcattcttttgtcttcatggttacttgtgtgatataacatacatctgttaaagaaaatcacttctttctaggggagggaggtagaaaagtatctttcaaacttggtttttgagtttgtgtcttgtcttaactttgtgttggctctaacttaaacatgctgatatgtgttttcaagaattttgtttaaggaagtattgtatggaagtccacaaaatgaaggaagttcatctaggttttaatatgtaagcaagataacacacaagtgtaccaagtgattattaactttgttgttttacaaatttgtatgaacttggagtatctgttggccattactatacatgtgcaaataaatgtggcttagacttgtgtgactgcttaagactagtacttgtattaactttctgatgctttatacaagagagcacttaaattgcatccttctttgagtttaacactgtagctttagccttgactttgaatattcattttgccttcccttgacaagtaaatggttacagtgaaaatgtgaagaagtatttccagttagtttttgtgtgtatataactcacttgtgtaagtggatgtgttaaaagatctctttttaaaaatccttttattggagtaattattaaaacagtaaatgca

SEQ ID NO: 3149 - DNA, 666 bp, Homo sapiens
  source 1..666: mol_type = genomic DNA
atgccggtcatgaggctgttcccttgcttcctgcagctcctggccgggctggcgctgcctgctgtgcccccccagcagtgggccttgtctgctgggaacggctcgtcagaggtggaagtggtacccttccaggaagtgtggggccgcagctactgccgggcgctggagaggctggtggacgtcgtgtccgagtaccccagcgaggtggagcacatgttcagcccatcctgtgtctccctgctgcgctgcaccggctgctgcggcgatgagaatctgcactgtgtgccggtggagacggccaatgtcaccatgcagctcctaaagatccgttctggggaccggccctcctacgtggagctgacgttctctcagcacgttcgctgcgaatgccgccacagccctgggaggcagagcccagacatgcctggtgacttcagggctgatgctccctccttcctcccaccccgtcgctcactccccatgttgttccggatggagtggggctgtgccctgacaggcagccagtccgctgtctggccatcatctcctgtccctgaggaaattcccagaatgcaccctggaaggaacggaaaaaagcagcaaagaaagcctctgcgggagaagatgaagccggaaaggtgcggcgatgctgttccccggaggtaa
